United States Patent Application Publication US 2012/0005773 A1 - sequence listing, part 6

SEQ ID NO: 22088 - protein, 857 aa, Vibrio sp. Ex25
MRLDRFTSKFQIAISDAQSLALGRDHQYIEPVHLMVALLDQNGSPIRPLLTMLDVDVTHLRSKLSEMLDRLPKVSGIGGDVQLSSSMGTLFNLCDKVAQKRQDSYISSEIFLLAALEDRGPLGQLLKEIGLTEQKVSQAIEKIRGGQKVNDPNAEELRQALEKFTIDLTERAEQGKLDPVIGRDDEIRRTIQVLQRRTKNNPVIIGEPGVGKTAIVEGLAQRIVNNEVPEGLRGRRVLSLDMGALVAGAKYRGEFEERLKSVLNELAKEEGNVILFIDELHTMVGAGKGEGSMDAGNMLKPALARGELHCVGATTLDEYRQYIEKDAALERRFQKVLVDEPTVEDTVAILRGLKERYELHHHVEITDPAIVAAASLSHRYVSDRQLPDKAIDLIDEAASSIRLQIDSKPESLDKLERKIIQLKIEQQALSNEHDEASEKRLKALNEELNEKEREYAELEEVWNTEKAALSGTQHIKSELEQARMDMEFARRAGDLNRMSELQYGRIPELEKQLDLATQAEMQEMTLLRNKVTDNEIAEVLSKQTGIPVSKMLEAEKEKLLRMEDVLHNRVVGQSEAVSVVSNAIRRSRAGLSDPNRPIGSFLFLGPTGVGKTELCKTLASFMFDSEDAMVRIDMSEFMEKHSVARLVGAPPGYVGYEEGGYLTEAVRRKPYSVILLDEVEKAHPDVFNILLQVLDDGRLTDGQGRTVDFRNTVVIMTSNLGSSRIQENFATLDYQGIKSEVMDVVSKHFRPEFLNRVDEIVVFHPLGQEHIKSIASIQLERLAKRLEEKGYQLEVSDKALDLIAQVGFDPVYGARPLKRAIQQNVENPLAKSILSGEIVPDKKVQLIVTNDQIRAHQ

SEQ ID NO: 22089 - protein, 391 aa, Vibrio sp. Ex25
MTNQTRNVVVVDCLRTPMGRSKGGAFRHTRAEDLSARLMKGILARNPQVNPSEIEDIYWGCVQQTLEQGFNVARNAALLAGLPIEIGAVTVNRLCGSSMQALHDGTRAIMTGDAEICLIGGVEHMGHVPMNHGVDFHPGMSKNVAKAAGMMGLTAEMLGKLHGISREQQDEFAARSHARAHAATVEGRFKNEILPIEGHAADGTLFTLDYDEVIRPETSVEGLSQLRPVFDPANGTVTAGTSSALSDGASAMLIMSEEKANELGLKIRARIKGMAIAGCDPSIMGYGPVPATKKALKRAGLSIEDMDVVELNEAFAAQSLPCAKDLGLLDVMDEKVNLNGGAIALGHPLGCSGSRISTTLINLMEAKDAKYGLATMCIGLGQGIATVFERP

SEQ ID NO: 22090 - protein, 275 aa, Vibrio sp. Ex25
MKKQRAFLKWAGGKYGLVEDIQRHLPPARKLVEPFVGAGSVFLNTDYDHYLLADINPDLINLYNLLKERPEEYISEAKRWFVAENNRKEAYLHIRAEFNKTDDVMYRSLAFLYMNRFGFNGLCRYNKKGGFNVPFGSYKKPYFPEAELEFFAEKAKKATFVCEGYPETFRRARKGSVVYCDPPYAPLSNTANFTSYAGNGFTLDDQAALADIAERTATERGIPVLISNHDTTLTRRLYHGADLNVVKVKRTISRNGSGRNKVDELLALFHAPEMD

SEQ ID NO: 22091 - protein, 404 aa, Vibrio sp. Ex25
MQNIGMSSKLDNVCYDIRGPVLKHAKRMEEEGHKILKLNIGNPAPFGFDAPDEILVDVIRNLPTSQGYCDSKGIYSARKAVVQHYQRKGIRSLDVEDVYVGNGVSELIVMAMQALLNNGDEMLIPAPDYPLWTASVALSGGKPVHYLCDEGADWYPDLEDIKKKITPKTRGIVLINPNNPTGAVYSRDFLLEVIEIARQHKLIIFADEIYDKVLYDGATHTSVATLTEDVLVMTFNGLSKAYRVCGFRGGWMFLTGPKHLAQGYVNGLELLSSMRLCANVPMQHAIQTALGGYQSINELILPGGRLLEQRNRAYELINQIPGVSCVKPKGAMYLFPKIDTKMYNIKNDQQMVLDFLKQEKVLLVQGSGFNWPKPDHFRIVTLPHVEDLEIAIGRFERFLSTYSQ

SEQ ID NO: 22092 - protein, 320 aa, Vibrio sp. Ex25
MADNEFDIDAFFASQGEPSSPENQHCGFIAIVGRPNVGKSTLLNKILGQKISITSRKPQTTRHRIMGVDTDGDYQAIYVDTPGLHIEEKRAINRLMNRAANSSLSDVNLVFFLVDGTHWTKDDEMVLTKLQKSNFPVVLCVNKVDNVQDRNEVMLHMAEMSKKMDFVDVVPISAKQGKNIDVLRKHVRNHLPKATHHFPEEYVTDRSQRFMASEIVREKLMRFTGEELPYSVTVEIERFDYNPETDGFHINALILVERNGQKKMVIGKGGEKIKTIGREARLDMEELFGRKVYLETWVKVKSGWADDERALRSLGYIDDL

SEQ ID NO: 22093 - protein, 540 aa, Vibrio sp. Ex25
MDSQRNILLIGLALVSFLLFQQWQVAKNPEPQAVEQAQSSSTLPAPSFADELDPVPGQQQASAKTITVTTDVLTLSIDTVGGDVVHANLNEYSAELDSSDSFVLLKDDQGHQFIAQSGLVGPQGIDLSSTNRPHYNVSADSFTMADGQDELRVPMTFTTNGIEYTKTYIFKRGSYALNVEYDVVNNSGNNATFGMYAHLRQNLMDDGGSITMPTYRGGAYSTEDTRYKKYSFDDMQDRNLSLNLADGQGWAAMIQHYFAAAWIPRNEPGTNLYTRVIGNLGDIGVRMPNKTIATGDQAKFEATLWVGPKLQDEMAEVAPNLDLVVDYGWLWFIAKPLHMLLSFIQSFVGNWGVAIICLTFIVRGAMYPLTKAQYTSMAKMRMLQPKLQAMRERIGDDRQRMSQEMMELYKKEKVNPLGGCLPLILQMPIFIALYWALMESVELRHSPFFGWIHDLSAQDPYYILPLLMGASMFLIQKMSPTTVTDPMQQKIMTFMPVMFTFFFLFFPSGLVLYWLVSNIVTLIQQTLIYKGLEKKGLHSK

SEQ ID NO: 22094 - protein, 388 aa, Microcoleus chthonoplastes PCC 7420
MQLAARVGQVSPSLTLAISAKAKAMKADGLDVCSFSAGEPDFDTPAHIKAAAKQALDQGKTKYGPAAGEPKLRQAIANKLRQDNGLEYQPENIIVTNGGKHSLFGLMQALIEPGDDVIIPAPYWLSYPEMVKLAGGTPIIVQTDASTGYKITSEQLQAAITPQTKLFILNSPSNPTGMVYTPEELKALAQVIVERDILVVSDEIYEKILYDGAQHLSIGAIGSDIFQRTITSNGFAKAYSMTGWRVGYLAGAVDLIKAVTTIQSHSTSNVCTFAQYGAIAALENPQDCVEEMRLAFAKRRQVIYERLNNISGIRCSQPNGAFYVFADISKTGLQSLEFCNRLLEAEKVATVPGIAFGVDNCIRLSYATDMPSIEKGMDRLEKFVRQLS

SEQ ID NO: 22095 - protein, 621 aa, Microcoleus chthonoplastes PCC 7420
MQSETVRVRRVSGAFALIDSLKRHGVKHIFGYPGGANLPIYDEIYQAESAGELQHILVRHEQGAAHAADGYARATGKVGICLATSGPGATNLVTGLATASLDSVPMIAITGQVPRGAIGTDGFQEIDIFGITLPIVKHSYLVNEARDIPRIVAEAFHIASTGRPGPVLIDIPKDVGIEQFDYFPVEPGTIKLPGYRPTVKGNLNQINKALELIRAAKKPLLYVGGGAIAASAQGELLELAEHFQIPVTTTLMGKGAFDESHPLALGMLGMHGTAYANFAVSECDLLIALGARFDDRVASLPKQFAAEAKVIHIDIDPAEVGKNRNTDVPIVGDVRQVLIDLLRRSDQVGNGIDPEQTKAWCDRLQQWRDEYPLDLPHPQENLSPQEVIVEVARQSPHAYYTTDVGQHQMWAAQFLKNKPRRWISSGGLGTMGFGLPAAVGVKMALPSEPVICISGDGSFQMNMQELGTIAQYGIGVKIVILNNGWLGMVRQWQHLFYGDRYEATNLEVGTPEFVNLAQVYGINAIKVTQRQALPDAIAQMLAHDGPMLVDVRVTRNEDCYPMVAPGHTNSDMMGLHPHNPEPISPTILTCSNCGTENPATHKCCCECGTKLLDMPSTVALS

SEQ ID NO: 22096 - protein, 445 aa, Microcoleus chthonoplastes PCC 7420
MITQGSVSMPESKAPPSLKRELDLRGAILVGLGSMVGTGVFVSIGIAAGVAGTSVILAVAIAALLAACNGLSSAQLAANHSVSGGTYEYGYRYLTPWLGFTAGWMFLLAKTASAATAALGFAGYLLNALRLDATQWLVPLALVTVVILTLIVLGGIRRSNLTNLIIVSITLLSLMIFIITGLPHVTPGNFTPFFPTDTSDKRAIASLLHGSALMFVAYTGYGRIATLGEEVHQPRRTIPIAIILTMIITMILYMAIAAVGVGSVGVDTLSAATQSNAAPLEVASRQFGIPIVPPFLALGAMTAMVGVLLNLILGLSRVLLAMGRRRDMPRIVARLNAAGTTPYISVICIGVAIAALVLIGNVKTTWSFSAFTVLVYYALTNLSALRLSAQERLYPKWIAGVGLAGCLILAFWVEQQIWLVGLGLIVAGLTWKTIVLPLALGSRNH

SEQ ID NO: 22097 - protein, 627 aa, Microcoleus chthonoplastes PCC 7420
MKFSWRILLLWTIPALVIGFFLWQGAFSPAVGDLSQNTASTRMNYGRFLEYVEKGRVTSVDLYDGGQTAIVEATDPELNKTNRWRVDLPANSPELITKLREANIALDTHPARQDGAIWGILGNLIFPILLIGGLFFLFRRSSNMGGGPGQAMNFGKSRARFQMEAKTGILFDDVAGIQEAKEELQEVVTFLKQPERFTAVGARIPKGVLLVGPPGTGKTLLAKAIAGEAGVPFFSISGSEFVEMFVGVGASRVRDLFKKAKENAPCLIFIDEIDAVGRQRGAGIGGGNDEREQTLNQLLTEMDGFEGNTGIIIIAATNRPDVLDSALLRPGRFDRQVIVDAPDLKGRIGILEVHARNKKLASEISIEAIARRTPGFTGADLANLLNEAAILTARRRKEAITMLEINDAVDRVVAGMEGTPLVDSKSKRLIAYHEVGHAIVGTVLKDHDPVQKVTLIPRGQAQGLTWFTPSEEQGLITRAQLKARITGALGGRAAEEEIFGHSEVTTGAGGDLQQVTGMARQMVTRFGMSDLGPLSLESQQGEVFLGGGLTNRAEYSEEVASRIDEQVRRIVEHCHDDAKRIMRDNRVVIDRLVDLLIEKETIDGEEFRQIVAEYTHVPEKEQYVPVL

SEQ ID NO: 22098 - protein, 107 aa, Microcoleus chthonoplastes PCC 7420
MTSAVKERIDQLINQDKIVVFMKGTKLMPQCGFSNNVVQILNTLGVSYATVNVLDDPEVRQGIKEYSNWPTIPQVYVNGEFIGGSDVMIELYQNGELQEMVEVALAS

SEQ ID NO: 22099 - protein, 385 aa, Microcoleus chthonoplastes PCC 7420
MTNPAPPSLLSLTVAPAQVLRGVPALAQSGDAIASLGHRPLIVGGNHTLATLSPQLQPILKQPSLNCATASYSPDCSEVSLASLKEAATCHQADLIIGVGGGKALDTAKLLAHQCHLPVVTIPTSAATCAAWTALSNIYSNEGAFLYDVSLNRCPDLLILDYSLIETAPQRTLVAGIGDALAKWYEASVSSGDSAQTLIIAAVQQARVLRDILFQKSADALKTPGSEVWREVVDASVLLAGVIGGLGGAQCRTVAAHAVHNGLTHLPGSHSALHGEKVAYGILVQLRLEEMVQGNQLAASARQQLLKFYREIGLPQTLDDLGLGNITLAQLRQGADIACQPQSDIHRLPFDVTPEQLMAAMVSTTTLVEKNCSPVLSTAMNEKYE

SEQ ID NO: 22100 - protein, 409 aa, Microcoleus chthonoplastes PCC 7420
MSVIYLDNNATTRVDEAVLEEMLPYLSEYYGNPSSMHTFGGQLARNIEQARENVAALLGAQPTEIIFTSCGTEGDNAAIRAALITQPDKKHIVTTAVEHPAVYTLCKRLEKEGYRVTYLPVNGKGLIDLKELKASLTDDTALVSVMCANNETGTIFPIERIGQIVKERGILFHVDAVQAVGKVPLNMSESTVDFLVLSGHKLHAPKGIGVLYVRKGVRFRPLLIGGHQERGRRGGTSNVPAIIGLGKAAELAIQHVTEEVTQVKELRDRLEQGLLSQIPDCQLNGHPSMRLPNTTNIGFKYIEGEAILLSLDRFGICASSGSACTSGSLEPSHVLRAMGLPYTLLHGSIRFSLSRYTTSAEIDRVLEVMPAIVERLRTISPFKNEADEEQGWLQTAREQQGRGVMETVK

SEQ ID NO: 22101 - protein, 375 aa, Microcoleus chthonoplastes PCC 7420
MCGIAGIWGQIDQTSVKKMMDTLIHRGPDAEGMFVSPIKAGVLGHRRLSIMDPQGGNQPIYGDRKARVIVGNGEIYNFPQLLPQLAERFKFRTKSDTEAILHLYEDQGIESVDQLDGMFAFAIADGDKFFAARDPIGIKPLYYGKKDNAFVFASELKAIANFCDNVQEFPAGTFFSSETGFSTFYQVPDIQPEVDADAEALIREVRETVEESVVKRLMSDVPLGCFLSGGLDSSITTAVARQHIEKLHTFSVGIEGSKDIKAARLVSQYLDTIHHEYLITPKEVQDKLPEIIYSLESFDQDLVRSAIPCYFTSRLAAEYVKVILTGEGADELFAGYTYYKGIPDNDTLHRELRRSVTSLHNINLGTCGKIEYQSL

SEQ ID NO: 22102 - protein, 332 aa, Microcoleus chthonoplastes PCC 7420
MRSHDQNSCPLVIAHRGASGYRPEHTLAAYELAIQMGADYIEPDLVMTQDGVLVARHENEISGTTDVATRPEFRDRQTTKMIDGQTVTGWFTEDFTLAELKTLRVKERLPHLRSTEFDGLFDIPTLVDIIELVQRQSAATGRMIGIYPETKHPTYFTAIGLSLEEPLVNILNQYGLCDRTSPVFIQSFETANLKALKQITDVSLVQLVNDIGQPYDFIAHPQHHDNNNRTYRDLVTPQGLGEIADYADAIGVNKRLIVPTGADGYLLPPTSLLDDAHAQGLQVHGWTFRNEEVFLAPDYQGNPELEYQQFYRLGIDGLFSDFPDTALHVEKN

SEQ ID NO: 22103 - protein, 318 aa, Microcoleus chthonoplastes PCC 7420
MEDSNNFTLIPDADTVMIPQAPEGFKSGFVGIIGRPNVGKSTLMNELVGQKIAITSPVAQTTRNRLQGILTTDNAQLIFVDTPGIHKPHHQLGKVLVQNAKIAIEAVDVVLFVVDGATPAGGGDRYISNLLSQTSTPVILGINKSDLQSPGKGLDEGYHQLADPHNWQVTKFSALTGDGLATLQEQLIDRLEQGPYYYPPNLVTDQPERFIMGELIREQILLLTRQEVPHSVAITIDAVEEEPKITRILATIHVERESQKGILIGKKGSMLKSIGSAARQQIQKLIAGKVYLELFVKVQPKWRQSRLRLAELGYRLEE

SEQ ID NO: 22104 - protein, 659 aa, Microcoleus chthonoplastes PCC 7420
MCGIVGVLNLQEPQPIPETVLPQMLAMIRHRGPDEFGIYRDEWVNLGNARLSIIDLSGGQQPICNEDETLWIVFNGEIFNYVELRPQLEALGHRFTTNCDTEVILHLYEEYGVDCLNYLNGQFAIAIWDTRQRSLFLARDRLGIRPLFYTLCQGQLIFGSEIKTILAHPRVCAAIDPAALTQVFTFWTVLTPHTIFQDIYSLSPGHYLQVQDGQLNIQRYWELDFTPEASQRTPQDYLDEFEQLLIDSTLIRLRADVPVGAYLSGGLDSSTTTAIIRQYAQNSLETFSIAFSDPEFDESEFQRRMADILGTNHRVVYCTHTDISRLFPEVIWHTETPTLRTAPAPMFMLSRLVRDSHLKVVLTGEGADEFLGGYDIFKEMAIRRFWAKQPDSQWRPLLLKRLYPEISRLSRSSEAFVQAFFKKNLTDTESPFYSHIIRWSNTARLQRLLVSKPEVGLLEWAEKLVPLQSNFSSWSPLAQAQYLEIVSFMSPYLLSSQGDRMAMANSVEGRFPFLDYRVVEFCDRLPSNVKLRGLTEKWLLRQLSRKLLPPDIWQRRKRPYRAPIHRSFFHQDTPDYVLELLSEDAVRASGLFNPLAVNQLVRKAQSGATLGEVDDMAIAGVLSTQLVDQQFVKTFNSRLSSLTTSDRVKVIDRTVEQIH

SEQ ID NO: 22105 - protein, 597 aa, Microcoleus chthonoplastes PCC 7420
MQQVDWLIVLLYLIGSMGLGLYLSRKASGSLVDFFVSGRSLPWWLAGTSMAATTFSIDTPLYIAGVVGNRGIAGNWEWWSFGIAHLVMIYIFARLWRRSEIVTDAELTELRYGGRTAAILRGTKAFLFAVPINCIAIGYAMLAMIKVVDALELWQSLGIEPGENLKILSVVGVSVLVLIYSGFAGLWGVVTTDFFQFFLALFGAIVVAIAAVSHVGGIHVLVPEVQQMTGHDILSFFPITDNFRWSETAGITANTFFAYIFLQWWTFRRSDGGGEFVQRLAASKDEAEAEKAAWLFNILHYVIRTWPWILVALVAIVVYPDLSDRELGYPKLMLDFLPPVMLGLVVTSLLAAFMSTVSTSINWGASYLTNDLYQRFIRPNAQQSELVLAGRIASVVVTALGAMAAFFSQDVATVFRLVIAIGTGPGLVLILRWFWWRINAIAELTAMVGGFIVGLTTSIVPIIQIEEFGLRLLVTTIITSVLWITALLVTPPESEATLDEFYRRVRPAGPGWQRQQESTGLLPIQNLGQDIKRVFAAILLLFGTMFAIGGFLLLQPLTGWVSLIIAVGGAMLLRQLNRKKAVPMPRPGLDDQDDDSK

SEQ ID NO: 22106 - protein, 341 aa, Microcoleus chthonoplastes PCC 7420
MQFIDQAEIEVEAGKGGDGIVAFRREKYVPAGGPAGGNGGRGGDVILVAAEHLQTLLDFKYAHRFQADNGGRGGPNNRTGANGRDRTIQVPCGTVIYDADTQEIIGDLVQPGQTFCAAKGGKGGLGNKHFLSNRNRAPDYALPGLPGEYRRLRLELKLLAEVGIIGLPNAGKSTLIAALSAARPKIADYPFTTLVPNLGVVRKPTGDGTVFADIPGLIEGAHLGTGLGYDFLRHIERTRLLLHLIDATADDPIGDYQTIQAELQAYGRGLSERPQILALNKIDAIASEAVELLATELNHLTHVPVFQISAVTQTGLESLLQTVWQSLDQLKDVEVKTVTKV

SEQ ID NO: 22107 - protein, 115 aa, Microcoleus chthonoplastes PCC 7420
MLITMFKSKLHRVKVTDACLHYDGSITIDEELLKAANILPYEKVQVVNVNNGSRLETYTIPGEWGSRVICLNGPAARLNAVGDNVIVIAYAQMTPEEALLHHPQVVKVDESNNPL

SEQ ID NO: 22108 - protein, 260 aa, Microcoleus chthonoplastes PCC 7420
MIAQRFFNVGVVLGLMGVAVLQPPSAYPAELAEIEQRGQLIVAVKDNLRPLGFRDATGSLQGLEIDIARRLAKELLGSPEAVVLQPVANRDRLSVVVEDQVDIAIARVTVTDSRARLVDFSIPYYLDGAGIITNDASINLLSDLDNQTIAVIKGSSTIPVIKYALPNAQLVGVDSYQEALFLLEAGEANAFAADQTVLTGWVQQYPDYRLLPYRLSGAALAIVMPKGLQYTELRQQVNQAIERWHAEGWLAERAAAWGLP

SEQ ID NO: 22109 - protein, 393 aa, Microcoleus chthonoplastes PCC 7420
MPELMIKEQTLIYLDYHATTPTDPRVAEKVLASMTSQFGNASSTDHVFGDKAAAAVSQAAQHLAQLVGASPKEIIFTSGATESINLAIQGTIAASHDSLPRIAISPVEHQAVLDTCKALEKRRRAEIIYLRVDSQGRLDLNHLEQTCRDGVSLLCVMAANNEIGNIYPIEKIGRIAQNHNIPFLCDGSQAVGKIPINVAEWGITYLAVSGHKFYAPQGVGALVVKRGYTLEPILFGGGHQKGLRSGTLNLPGIVGLGEACRWRQLEMVQDESAIAAKRDRLQAQLAEKIPELIINGDINSRLAGNLHISIPGIPNSAIIARVRGKLAISRGSACSSGVEAPSHVLRAMNLPEDVIEGALRIGIGKFTTEAEIDQAADILASTVKDISRLLAEN

SEQ ID NO: 22110 - protein, 502 aa, Microcoleus chthonoplastes PCC 7420
MKSSLVILYHREPYDEVVENGKVHYRAKKSPNGIVPTLKSFFAGVNQGTWIAWKQVNAKQKANFEQRIVVEGEANYNVRRIPLSADQVKHFYHITSKEAFWPILHSFPYHFTYETSDWENFHTINRLFAEAACDEAADDALIWVHDYNLWLVPYYIRQLKPNARIAFFHHTPFPSVDIFNILPWREEITDSLLCCDIVGFHIPRYSENFVNVARSLRPVEIVKKEPVPEHITPMGIALAEPEMTTQIRYKDQLVNIDPFPVGANPQQILSILHKPETQKRFEEIKESLGDRKLIISAGRVDYVKGTREKLEAYGRLLARRPDLHGKINMLVTCVASASGMRVYKTAQTQIEQLAGKINGRYGNLDWLPIMLYTQPVPLPDLLCYYKAADICWTTPLRDGLNLVAKEYIITHEKQEGVLVLSEFVGAAVELPDAILTNPYSIDRMDESIEQALAMSPEEQKERMAKMYDIVTKYDIQCWADHLFEMFEKTKHQTAKQQQAVAV

SEQ ID NO: 22111 - protein, 466 aa, Microcoleus chthonoplastes PCC 7420
MIAATFIVFLLVFTGVGIYSTTQKQNTTTDYLLASRNVNPWLTALSAMATGQSGLLFIGQVGFAYTIGLSAIWLTLGWMIGDYIAWWFVFKRFRQVSEEISADTVSSFLGQETKGIRWITAISALITIAFLGSYAAAQLVAGGKALHAVFNWNYSLGVIVGAIVVMIYCFSGGIRASIWTDAVQATIMIGSLVLLVVVAIANCGGLAGFWTQLDAIDPELVSLSPKDLEWGFVPFLIGWIAAGFGVVGQPHILIRAMAINSANKIGLARDIKVICAFFTSSSAMAVGMAARVLLPDLLINGDPELALPYLALELLPPILVGMMLAGLFAATISTADSQILSCSAALTQDLFPGLAHSYNYAKLGTLTVTVITLSIALAGDDNVFALITFSWSVLASSLGPLLILRVWQKSVTTPVAIAMMFGGIAAALFWKVGLDLSGIVYEVLPGMAAGGLIYLGSQFFIAQEST

SEQ ID NO: 22112 - protein, 815 aa, Microcoleus chthonoplastes PCC 7420
MCLESGLTRSKNSINVAIKNLADLGISIALFWAFGYAFMFGTSVLGWIGSSDFFVHVEATPRLAAFFLFQAMFCSTATTIVSGAVAERMKFPAYLILASLVSGLIYPLFGHWAWNGIDLDVSVGWLEQLGFVDFAGSTVVHSLGGWVSLASLMIIGSRTGRFPDHLPPRKIHGSNLPLSVLGAMLLWIGWLGFNGGSTLTLNEQVPSIIVHTVLAGIAGMMAAGMVSWYRCQLPEVESLINGSLAGLVSITACCHVVTSPASVIIGAIGGIIATLMSNWLERWQIDDAVDAIPVHLGGGIWGTLAVALFGQPELLDTGLSPVIQLGVQVIGILSCGIWAFGLTYLLLFITNRFLPMRVSIEAEQIGLNVSEHRAKTEICDLFQVMEAQAQTQDLSLRVPVEPFTQVGQIAQRYNQVMDALEEALTRTDAIVRTAMDAIITFTKPQLKIVTANPSAKEIFGYSINEFISMDIHQLLDWSTPAADDTDIGMERLLKVGRHEIIGCRVDGSRFPLEATVVETKSGQDCFYTGTFRDISERKKAQADLFRANQEITKLNERLKAENLRLSAELDVTRRLQQMLLPKEAELNQITDLEISGFMEPATEVGGDYYDILPYRDRVQISIGDVTGHGLESGVLSLMVQTAVRTLLESNQTDPKQFLDILNRTIYQNIQRMNSDKNLTLALLDYQKGILNLSGQHEEIIVVRAGGHIERIDTIDLGFPIGLDADIADFVAHLQVQLNPGDAVVLYTDGIPEAENAQGIPYGIERLCQILSQNWQQSAAEIRQAVIYDLRQHIQAQQLYDDITLLVIKQRKIFEV

SEQ ID NO: 22113 - protein, 400 aa, Microcoleus chthonoplastes PCC 7420
MGRAEKVVLAYSGGVDTSVCIPYLKEEWGVKEVITLAADLGQGDELEPIKEKALTSGAAESLVADATERFVTDYAFPAIQANALYENRYPLSTALARPLIAKLLVEAAHKYGADAVAHGCTGKGNDQVRFDVSITALDPNLKVLAPAREWGLSREDTIAYGERFGIPSPVKKSSPYSIDRNLLGRSIEAGILEDPMAEPPEEIYLMTKAIADTPNDPEYVDIGFERGLPISLNGQALDPVALITQLNQVAGNHGVGRIDMIENRVVGIKSREIYEVPALLTLIHAHRDLESLTLTSDVSQYKRGIEDTYSQLIYQGLWYSPLKDALDAFIQQTQEQVSGSVRVKFFKGNATIVGRASSNSLYTPELATYTSEDQFDHKAAEGFIYIWGLPTRVWSAKTRG

SEQ ID NO: 22114 - protein, 576 aa, Microcoleus chthonoplastes PCC 7420
MVPKPLLGSLGDQAPTNARYIMANAIALPLLPDVPRLTSLQPLDGACAPRLRVNLALGIIVIVSESMFNPYRYQQQLNQPFSFDRLYSHPGSLDSYDSQGSRQSIGIIGGGIAGLTCAYELSQLQHQVTLLEASGRLGGRIYTHYFSDGTHAELGAMRVPASHGCTLHYMDKFKLKRRQFVSYNPAAYYYLRGQKTRLNKYKPLLYNYNLTPEEQQDPAVIYETILEELIESLSNQEKWEMFSPSFTSSRLREYDSLSVTQYFRDRLSPDAFEFVGHATGMLHYNQVSLLNGLIDFLAWHRVEQYKLVGGMETLVNAFAERIPGDIQTQAQVTAIELTDSGVKLHWNSLQGKQSAEFDFVICTVPTTALAKIDFDPPLPVKQREAINSLGYCSAAKTLFHCTARPWEFEDGIYGGGSFTDLNIEKCWYPDDNAILADKQSDNPDWIACDRERSHQPSAFTAAYRWEGNSRKFRSLEEGDRTELTLREVKQLHPQIEPYVDDIVHYIWDEKAKLGSGSYAFFAPGEHERYQGWLGESYPHQQPRVFFAGEHLGINHASVQGAIQTALAATIDVLENS

SEQ ID NO: 22115 - protein, 610 aa, Microcoleus chthonoplastes PCC 7420
MVLVVQKYGGTSVGSVERIQTVAQRLFKTVQAGNSLVVVVSAMGKTTDGLVKLAHEISANPSRREMDMLLSTGEQVSIALLAMALQELGQPAISLTGAQVGIVTEAQYSRARIFSIHTERISRHLDEGKVVVVAGFQGISSLTDLEITTLGRGGSDTSAVALAASLGADRCEIYTDVPGILTADPRLVSDAQLMDEITCDEMLELASLGAKVLHPRAVEIARNYGMPLVVLSSWTDDPGTKVISPTPQPRSLDDLEIARSVDAVEFDTDQAKVAMLRVPDHPGVAAQLFGEIAGQELDVDLIIQSIHEGNTNDIAFSVSKGILKRAEAVAEAIAPAFRSPTNPSDDEAEVLVESNIAKIAIAGAGMIGHPGIAAQMFTTLANAGINIQMISTSEVKVSCVIDAADCNRAIAVLCDQFNIKSSPARLPISDNVETRHGASLHSNPVRGVALDQNQARLAIRYVPDRPGMAARIFSILAEQTISVDMIIQSQRCRVIDGIPTRDIAFTVAQAEAENAQKILQEAAPILGYGKVLLDADIAKVSIVGAGMIGQPGVAARMFAALSQHKINIQMITTSEIKISCVVNKEQGVTALQAIHQAFGLAGNQQVEVPA

SEQ ID NO: 22116 - protein, 255 aa, Microcoleus chthonoplastes PCC 7420
MKFDQLDAKMRVYETAHDHCVLPGLYMIARLDGRGFTRLTRDVHPFSAPFDQRFRDAMILTVEHLMNCGLKVIYGYTQSDEISLLVDGAESAFNRKLRKLNSVLAGEASAKFSLILGTVACFDCRISQLPTIEIVVDYFRWRQEDAHRNALNSHSYWCLRNDGKTARQATSQLERLSVADKNELLFQHGINFNHLPNWHKRGVGLYWETYQKPGLNPLTGETTEATRKRIRQELNLPMKDQYSQFIRDVLSEINP

SEQ ID NO: 22117 - protein, 640 aa, Microcoleus chthonoplastes PCC 7420
MAKVVGIDLGTTNSCVAVMEGGKPTVIANAEGGRTTPSVVAYAKNGDRLVGQIAKRQAVMNPENTFYSVKRFIGRRHGEVTNEATEVSYKVLKVGDNVKLDCPSQGKQFAPEEIAAQVLRKLVDDASKYLGETVTQAVITVPAYFNDSQRQATKDAGKIAGVEVLRIINEPTAASLAYGLDKKSNETILVFDLGGGTFDVSILEVGDGVFEVLSTSGDTHLGGDDFDKKIVDYLAAEFQKSEGIDLRKDKQALQRLTEAAEKAKIELSSVTQAEINLPFITATQDGPKHLDTTLTRAKFEELCADLIDRCRIPVENSVRDAKIDKSAIDEIVLVGGSTRIPAVQEVVKRVLGKEPNQTVNPDEVVAIGAAIQAGVLAGEVKDILLLDVTPLSLGVETLGGVMTKIIPRNTTIPTKKSETFSTAVDGQTNVEIHVLQGEREMSGDNKSLGTFRLDGIPPAPRGVPQIEVTFDIDANGILNVTAKDKGTGKEQSISITGASTLPSEDVDRMVQEAEANAAADKERREKIDRKNQADSLTYQAEKQINELGDKVSAEDKTKVEGLIKDLRDAVSQEDDEKIKTLTTELQQALYSISANLYQQAGGPEPGAAPGGAGGPEAGAAPSGESGGGDDVIDAEFSETK

SEQ ID NO: 22118 - protein, 527 aa, Microcoleus chthonoplastes PCC 7420
MSKVLVSDPIDQAGIDILSQVAQVDVKTNLSPEELVSIIPEYDAMMIRSGTRVTKEIIEVGKQLKIIGRAGVGVDNVDVPAATRQGIVVVNSPEGNTIAAAEHALAMMLSLSRHIPEANQSVKNSQWDRKRFIGAEVYKKTIGIVGLGKIGSHVATVVRSMGMKLLAYDPFISLERADQLGCRLVDMDLLLRESDYVTLHIPKTPETTHLINAEALATMKPTARIINCSRGGVIDEAALSEALKTGKIAGAALDVFESEPLGESPLRELGKEVILTPHLGASTAEAQVNVAIDVAEQIRDVLLGLPARSAVNIPGLSSNVLEQLKPYMRLAETLGNLVSQLAGGRIEQLNVRLQGELATNNSQPLVVASLKGLLSQALRERVNYVNASIEAKERGIRVIETRDASVQDYSGGSLLLSAKGSLGEHSVTGALLSDGEIHITSIDEFPINVPPSHHMLFTLHRDMPGIIGKIGSLLGSFNVNIASMQVGRKIVRGDAVMVLSIDDPLPEGILTEITKVPGIRDAYTVTL

SEQ ID NO: 22119 - protein, 391 aa, Microcoleus chthonoplastes PCC 7420
MQIYLDYSATTPPRPEAIAAMQGVLTQQWGNPSSLHEWGQRSATVVEQSRMQVAGLVNAPADGLIFTSGGTEADNLAIMGIAQNYKTPQHIVISSVEHSAIAQPVRWLETWGWQVTRLSVDSEGRVNPRDLEDALQPNTVLVSVIYGQSEVGTLQPIEALGQIAQDHGVLFHTDAVQVAGRLPIDVRQLPVDLLSMSSHKIYGPQGVGALYVRPGVELVPLLWGGGQEMQQRSGTQAVPAIAGFGVAAELATAELTTETPRLIRLRDRLFNQLSDIPYLKPTGSLRHRLPHHVSFCLTNIPASQLEGVTGKTMVRQLNLAGIGISAGSACDSGKLNPSPILSAMGYSESEALRGIRLTLGRQTTEADVDWTVMVLKQILARLLPKPVLLNV

SEQ ID NO: 22120 - protein, 619 aa, Microcoleus chthonoplastes PCC 7420
MRYQSISKKEVKQKTVTRRTGAYALMDSLKRHGVNHIFGYPGGAILPIYDELYQWEERGEIQHFLVRHEQGAAHAADGYARATGKVGVCFATSGPGATNLVTGIATAHMDSIPLVVVTGQVTRAAIGSDAFQETDIFGITLPIVKHSYVVRDPRDMAWIVAEAFHIANTGRPGPVLIDIPKDVGLEEFDYTPVDPGMVKLTGYRPTVKGNPRQINQALHLIHQSQQPLLYVGGGAITANAHKQVKQLAETFQIPVTTTLMGKGAFDESHPLSVGMLGMHGTAYANFAVSECDLLIAVGARFDDRVTGKLDQFACHAKVIHIDIDPAEVGKNRAPQVPIVGDVQQVLAKLLRRYEEQDILADPNQTQVWLKRIQRWRQEYPLEAPQYPDTISPQEVIVELDRQAPDAYYTTDVGQHQMWAAQFLKTGPRRWISSAGLGTMGYGVPAAMGVKVALPDQQVVCVAGDASVQMNIQELGTLAQYGISVKTVIINNGWQGMVRQWQEAFFGQRYSSSNMEIGMPDFVILCQAYGVKGMVVKDRDELQDAIAQMLAYDGPVLLDVRVTKNENCYPMVAPGKSNAQMIGLPERRQQEQVAEVVDCSNCGTQNPTTNHFCPVCGTKL

SEQ ID NO: 22121 - protein, 365 aa, Microcoleus chthonoplastes PCC 7420
MEIGVPKETKDQEFRVGLSPSSVRVLQEAGHQVWIETQAGAGAGFTDEDYQHSGAKIVATAAEAWNRELVVKVKEPLTSEYPYLQKEQLLFTYLHLAADRPLTECLIDSGVCAIAYETVELPDRRLPLLTPMSIIAGRLSVQFGARFLERQQGGRGVLLGGVPGVRRGKVVILGGGVVGTEAAKIAVGMGAQVQILDINVERLAYLETLFGSRVELLYSNSAQIEAVVPQADLLIGAVLVPGRRAPILVPRGLVQQMHPGAVIVDVAVDQGGCIETLKSTSHTNPTYIDEGVVHYGVPNMPGAVPWSSTQALNNSTLPYVLKLANEGIKAVASDLALAKGVNVQNHQLVHSAVREVFPDLSNAKV

SEQ ID NO: 22122 - protein, 301 aa, Microcoleus chthonoplastes PCC 7420
MANLPHPIQYQGSKRNLASDILRFLPNKIGRLVEPFSGTAAISIAAAARQVSQKFWINDLNLPLIKLLELIIEQPDKIAYLYTKIWNEQHGNSVEHYYKIRDEFNKTNDPFLFLYLLSRCVKGSVRYNSDGLFNQSPDKRRKGTRPEKMRQNIEGVSHLLKNKCLFTALDYKDVLAKVDNTDFVYMDPPYQGVCGNRDSRYCSGISFDEFVSAIEVLNRKAIKFAISYDGKRGNKIFGKKLPEYLGLKKIQIEVGRSSQATLLGKQEITVESLYLSPTLLRDCSPEIENYILGFPKQLTLL

SEQ ID NO: 22123 - protein, 262 aa, Microcoleus chthonoplastes PCC 7420
MIRENSDVILSVRNLTANVEGQQILKGLTLEVKAGEIHAIMGQNGSGKSTFSKLLAGHPAYEVTGGEVTFLGQNLLELEPEERALAGIFLAFQYPLEIPGVSNLDFLRVAYNSRRKHQGLEEIDTFDFEDLIEEKLEIVKMNPSFLERSLNEGFSGGEKKRNEILQMALLEPKLAILDETDSGLDIDALKIVANGVSQLATSDNAMILITHYQRMLNYIEPDYVHVMAGGRILKTGGKELALELESRGYDWVIEEAAAEVIA

SEQ ID NO: 22124 - protein, 333 aa, Microcoleus chthonoplastes PCC 7420
MKIIVFTVEAWERDIFEKLSPVHHVECVEQSLTTDNASHYADADVIATFIYSDLSTDVLKQFNNLQMIATRSTGFDHIDTDYCQEHGIKVCNVPTYGENTVAEHVFALLLALSHNLIESTDRTRKGDFSQVGLQGFDLRGKTLGVVGTGNIGECVIEIAKGFRMEVVAFDVKPKEELASRLGFRYAEMKDVLSTADIITLHVPANPKTHHLISTEQFDSMKDGVILINTARGSIVDINALLQALAEGKVAAAGLDVLPEEPVMREEAELLRSVYRKQHDLESLLADHILLRLRNVIVTPHSAFNTKEAVQRIIDTTVENIVAFAEGNPQNVVA

SEQ ID NO: 22125 - protein, 381 aa, Microcoleus chthonoplastes PCC 7420
MEAVQSPVIPIVGELIRRHPGTISLGQGVVYYPPPPEAIARLPEFLADPDNHKYKAVQGIAPLLSTIAAKLHTDNRITLNQHNCIVVTAGANMAFMNAILAITSPGDEIIIQTPYYFNHEMAITMASCHPVLVATDQNYQLRPQAIANAITEKTKAVVTISPNNPTGAVYSKAALQAVNELCRERGIYHISDEAYEYFTYNGVKHVSPAAFPQSHSHTISLYSLSKTYGFASWRIGYMVIPQHLLAAVKKIQDTILICPPVVSQYVALAALQMGMSYTQPHIQAIATVRQLILEALQRLDGLCAIAPADGAFYFWLKVNTSVNPVELVERLIRDHRVAVLPGTTFGMEEGCYLRIAYGALQKETVAEGIERLVQGLQTILS

SEQ ID NO: 22126 - protein, 406 aa, Microcoleus chthonoplastes PCC 7420
MKVLVLNAGSSTQKSCLYEIGESLPNSPPEPIWEAKIEWTGQSDTECLKVKTSQGRSIEERLPTDDRMKAIAQMLNTLWRGQTQVISKLSDIDVVGHRVVHGGDKYHQPTLINAEVKKAIASLSPLAPSHNPVNLEGIEAIENILPDLPQFAVFDTSFHSQMPLPAAIYPGPKDWLDQGIRRYGFHGISHHYCLERVAQLLEKEAKSLRVITCHLGNGCSLAAIRDGISINTTMGYTPLEGLMMGSRSGSIDPSILIQLMRQGYNADQLEHLLNKESGLKGLSGVSSDMRQINDAIAAGNEQAKLALDVYIHRLRCYLGAMLTSLGGLDVLVFAGGVGEHQASVRLAASDALAFLGLKIDSDKNETNPVDADISTEDSSVRVFVIHTQEDWAIAQLVVRALALDSL

SEQ ID NO: 22127 - protein, 330 aa, Microcoleus chthonoplastes PCC 7420
MSRSATLTLQPTLPLIADNNRLRLFSGSANVPLAQEVARYLGMDIGPMVRKRFADGELYIQIQESIRGCDVYLIQPSCHPVNDNLMELLIMIDACRRASARQITAVIPYYGYARADRKTAGRESITAKLVANLITEAGANRVLAMDLHSAQIQGYFDIPFDHVYGSPVTLDYLASKQLPDLVVVSPDVGGVARARAFAKKLDDAPLAIIDKRRQAHNVAEVMNVIGDVKGKTAVLVDDMIDTAGTIAAGAKILRQEGARQVYACATHAVFSPPAIERLSGGLFEEVIVTNTIPVAQDNYFEQLTVLSVANLLGETIWRIHEDSSVSSMFR

SEQ ID NO: 22128 - protein, 447 aa, Microcoleus chthonoplastes PCC 7420
MKRRHFLKYTSLASTGLAFAACNSGNLSTSGKNNSSESSSVSEVDFGKLEKTYLNLGIIPITESAPLVIAQELGFFARYGLNVSLSKQENWQQIQDGLLDYQLDAAQALYGMPMMAQLGSESAPMVALMVLNLHGSSITLSPKAWDAGIRPAIEYFTFQEFADSYRQYVRKFEEPPIFATESNASMDYYISRYWLAAMGINPESEVEFMEIAPSQMIYKIQAGVMDAYSSSEPWNQQTVLQGNGFIANTSQNIWTGHPGNVLATMQAWVDEHPATARALVAAILEACQFCEQAKNRREIAQIIAQSRYLDTDQDYIEPALLGNYSYGGFDNQERLETIPNFYQFYGDNSDDPEKPNPVNYPWRSHGMWLLTQMIRWGQIEQQDYPKDADEILEKIYPLDVYTEVAETLKIELPSDPMKVEPATVFIDQRQFDPSDPIAYLNNFEIQA

SEQ ID NO: 22129 - protein, 464 aa, Microcoleus chthonoplastes PCC 7420
MTLSFNNLGLSEECLHQLEKLGFDTPTEIQSQAIPELLAGRDVVAQSQTGTGKTAAFSLPMLEQIDPNARGVQALILAPTRELARQVADAIRDLTSNRRVGIVTVYGGQSIDRQIRLLQRNAQMVVGTPGRVIDLLDRGDLKLDQVKWVVLDEADEMLSMGFIDDVKKILKQAPKERQTACFSATMPKAIRDLVNQFLKSPVTVTVELPKATPARIEQRVYMIPRGCSKSKALQPILALEDPEAALIFVRTRRSAAELTSQLQAAGHSVDEYHGDLSQSQRERLLSRFRQSQVRWVVATDIAARGLDVDHLTHVINYDLPDQVESYIHRIGRTGRAGKTGTAISLIQPFERRKLHQIERKVRQNLQVSRIPTRSQIEARRLEKLQDELREALTGERMASFLPIVRELSEEYDPHAIAAAALQMVYDHTQPELAAIEVDNKVERPKLVKRRNNKSKESVTHNRSR

SEQ ID NO: 22130 - protein, 245 aa, Microcoleus chthonoplastes PCC 7420
MNQLETHKEKILVVDDEASIRRILETRLSMIGYDVVTAADGEEALETFRTSEPDLVVLDVMMPKLDGYGVCQELRKESDIPIIMLTALGDVADRITGLELGADDYVVKPFSPKELEARIRSVLRRVDKVGASGIPSSGVIHVASIKIDTNKRQVYKGDERIRLTGMEFSLLELLVSRSGEPFSRSEILQEVWGYTPERHVDTRVVDVHISRLRAKLEDDPSNPELILTARGTGYLFQRILEAGEE

SEQ ID NO: 22131 - protein, 299 aa, Microcoleus chthonoplastes PCC 7420
MESTDMNQQIAFIGLGVMGGPMAANLAREGYAVKAWNRTPNRPGVEVAAEAGVTVVSSIREAVASADVIFSCVSDVPDVKEVLLGTGGVAESARPGTLVIDTSTIGPEAAREIGTQLQQHNLRFLDAPISGGDIGAKNGTLTIMVGGEAKDFEESKPLLEVLGKTIRLCGPMGSGQAVKLCNQVLGAVHAVALCEAMQLAQQQDIDPNLIVEVCSTGAAGSWALSNLGPKIAASDFQPGFMIKHILKDLRLVQETLNSSPQELPGVELADRLFKMVQEFDSGKGGEQGTQAMIRAYRKS

SEQ ID NO: 22132 - protein, 397 aa, Microcoleus chthonoplastes PCC 7420
MPLSQQSSQSRPIYLDYHSTTPTDPRVATQMLHYMTTVFGNASSIDHTYGDEAEQAVSQAATHIANLIGSSAKEIIFTSGATESINLALQGFVRLHHSNTSKIPRLAVSPVEHKAVLDTCNTLAKKGLAEIINLQVDSQGRLDLDYLENTCKNGISLLCIMAANNEIGTIYPIQNIGQIAQTYRIPFLCDASQAVGKIPINFHDWGITYLAISAHKLYGPKGSGALVVRKKYPLEPILWGGGHQNGMRSGTLNVPGIVGLGEACRLRQLEMADDENAIASSRDKLQTLLQDSITDVVINGDTTHRLAGNLHISIPDIPNSAVIARIRSQLAISTGSACTSGVETPSHVLRSINLSDNLIEGALRIGLGKFTTDTEISQAAEILSTAVSKIRQAIDGN

SEQ ID NO: 22133 - protein, 259 aa, Microcoleus chthonoplastes PCC 7420
MSHRPIYLDNHATTPMDERVLEAMLPYFREHFGNPSSISHAYGWEAEAAVKQARQTLADAIHATPKEIVFTSGATEANNLAIKGVAEAYFSKGRHIITIQTEHPAVLDPCTYLQDLGFEVTFLPVQGDGLVNLTQLEKAIRSDTILVSVMAANNEIGVLQPLAEIGELCHQHQVLFHTDAAQGIGKIPVDVLDMNIDLMSFTAHKLYGPKGIGALYVRRRNPKVKLASQIQGGGQERGLRSGTLYTPQIVALPKRWNSD

SEQ ID NO: 22134 - protein, 147 aa, Microcoleus chthonoplastes PCC 7420
MSYAIIETGGKQLRVEPGRFYDIELLPVEPEEKVTIERVLLVENNGDVTIGQPWVDGATVEGTVMRHFRDRKILVYKMKPKKKTRKKRGHRQEITRLMVDAISMNGSVLAGTSAESTETPTPATPVEVMPTEAEESAPEATSETASE

SEQ ID NO: 22135 - protein, 1561 aa, Microcoleus chthonoplastes PCC 7420
MTNRSINPNQQYQTWNRDDVPYPGQRWLVEERDACGVGFIASVAGVASHELIEQALSALTCLEHRGGCSADRDSGDGAGLMTTIPWGLFTSWFEEQGITMPQTDQLAVGMVFLPQDGTKATKVRDIVGGVFEHDGFTVLGWRVVPLNESVVGPQALENQPQIEQIIVSCPHQTGNDRERLLYKTRRRIGSALEADGTLHWSDDLYICSLSSRTIVYKGMVRSAVLGEFYQDLKHPEFQSPFAVYHRRFSTNTLPKWPLAQPMRLLGHNGEINTLLGNINWMKAREADLSHPVWGNEMEDLKPTVDPDNSDSATLDNIFELLVRSRRSPLEALMIMVPEAYKNQPDLQDHPEIVDFYEYYSGVQEPWDGPALLVFSDGQVVGATLDRNGLRPARYSITRNGYVVVGSEAGVVDLPEADIVEKGRLGPGQMIAVDLANHEILKNWDIKQRVAQRLPYGDWLKQHRQVLSPQPFTDTPQLDAKALLQQQTAFGYTAEDLDMILEPMVSQGKEPTFCMGDDIPLAILSDKPRLLYDYFKQRFAQVTNPPIDPLRESLVMSLSMELGERGNLLEAKPEYAQLLKLKTPVLNEAELNSVKTSGFATTELSTLFEISAGPDGLKNAIDRLCDQADQAVKSGSKVLILSDKIGGSVGENTSYIPPLLAVGAVHHHLIRAGLRMKVSLVVETAQCWSTHHFACLIGYGASAIHPYLALESVRQWWSNPKTQKLMNRGKLEPLTIEEAQKNYRKAVEAGLLKILSKMGISLLSSYQGAQIFEALGIGAEVLDLAFRGTTSRLGGLNLAELAQEVMAFHQRAFPELTGKKLENFGFIQYRPGGEYHMNSPEMAKALHKAVASVKNGNGKTDNGKTAYDHYEVYKKYLEDRPVTALRDLLDFNSDRTPIPIEEVEPVAEIVQRFCTGAMSLGSLSREAHETLAIAMNRIGGKSNSGEGGEDPVRFKVLDDVDNQGNSPTLPHLKGLRNGDTASSATKQVASGRFGVTPEYLMSGKQLEIKIAQGAKPGEGGQLPGKKVSPYIAMLRRSKAGVPLISPPPHHDIYSIEDLAQLIFDLHQINPEAKVSVKLVAEIGIGTIAAGVAKANADVIQISGHDGGTGASPLSSIKHAGVSWELGVTEVHRALMNNQLRDRVILRADGGFKTGWDVLMAALMGAEEYGFGSVSMIAEGCIMARICHTNNCPVGVATQQEHLRKRFTGIPDHVVNFFYFVAEEVRSLLARLGYRKLDEVIGRADLLQQREDIGLTKTSTVSVKCLTDLPDTSRDRSFLNHEAVHSNGPVLDDQLLADPEMQVAIANHGTITKDLAVLNTDRSVGTRLAGAIAKQYGDTGFEGQITLNFKGAAGQSFGAFNLPGMTLRLVGEVNDYVGKGMHGGEIIITPPTEATYNPAENVIVGNTCLYGATGGTLFANGWAGERFGVRNSKGQAVIEGAGDHCCEYMTGGVIVVLGRVGRNVGAGMTGGLAYVLDEDSQFPAKVNPEIVKIQRVTTSAGEQQLKALIQAHVDRTGSDKAKTILANWSDFLGKFWQVVPPSEEDTPEANPEAVAQRELSPVQ

SEQ ID NO: 22136 - protein, 210 aa, Microcoleus chthonoplastes PCC 7420
MIYLDSALVSEAKTVENWGWVKGITTNPTLLAKSDLPPETALKQLAAISPGELYYQLMATDFQGMVTEGRKAFDIIGDKTVLKVPATAVGFQVVAHLSPEIPCSVTAIYSAAQAAVATEAGAKYAIAYVNRATRLLGDGLALVQEMATILKDSSTEILAASLKSPAEAAGALIAGADHLTLPLEMLDAMTTHNLSEQTIDEFAQKGRGLV

SEQ ID NO: 22137 - protein, 563 aa, Microcoleus chthonoplastes PCC 7420
MSNYILPLLTTLTRQVKANFVNKTHQTEAVQERFLLTLLRRYQNTELGRKWGLREIRTIDQFRDRVPVLPYSSYEPYTERIFQGESNILTPDPVVYLNLTSGSTGSKKLIPVTKRFQNSLRGANLTSMGFLVDALKTRQRQFGKLLITNSVQLLGRTPGGVKYGPASVGILRMGKFLYQQLFAHPFETLQPGNSLARHYVCLLFALRDRTMRGMIANFPMLLLRTASYLETYAEDLIRDLDKGTIANWLDLESGIRSQLEHQWSAYPERARELRDILNQEGRLTPKRVWSDLSFVATARGGTSDFYFQRFPDYFEDTPVFGAVYSSAEATFSIYPDVDTDGSVLAIESGFFEFVPQDQWDAEHPKTLLATEVKVGEHYRLLTTNYSGFYRYDIGDVIEVVGFYNKTPLIVFRYRRGGTMSATTEKTTEHHVTQVMQALQQEFDVPLEDFCLTLSESIITPHYLVNIELAPGQRLDNPQLFLTRFDHQLQQANTSYAVKRTDNYIPAPRLRILAPGSFAILRQRQLERGVPDSQLKFPHISNDRQFLAGLKVLEEVKLPGDSDE

SEQ ID NO: 22138 - protein, 482 aa, Microcoleus chthonoplastes PCC 7420
MQHSQGIATYETVNNGYIRRRQLQGNAGSLLLWGLGVGAVISGDFYGWNYGLAAGGFWGFSIAAVLMAIMYLCLVYSSAELSAALPHAGGFYSFTRYALGPFWGFICGVTVTIEYVLANAALVFSLSNYLKPLFPNLPSFFIWVFAYAVFLAINIRGFELSVTVCLWLTIIAMTVLAIFYVSMLVSGEFNFDLLFNIPAEPGQSETWLPNGWFGVFGAIPFAIWLYLAIEQLPMTAEETDDVPRNMPAGMISGMVTLIILSIFTVVINSGVGGGAVAIGQSDAPLQDGLEAYFGAGATSTIVTALALICGLIASLHGNMFAYGRIIFSLSRAGYFPRWLSVTSKNHTPHRALIAGATIGFICVLLVSIGIQAVDAVILNMAVFGALISYILVMVSYMKLKGNPYLPKPYESPLGTAGAFVGLALATFALVACISIPDYRGGVWGIGIALIVASVYFLVFRSNRLVAQAPEEATALGLTGYQD

SEQ ID NO: 22139 - protein, 571 aa, Microcoleus chthonoplastes PCC 7420
MRWLLSRLTDQQVRKPIPSVHPGWLLAWGQFRAEPPDCTLLIPNQLAVTQIQPAFSPQAEYGVVGDIWLSNSARLLQQVGIEPGEWRGTDQALVALLWERWGQDCLEYLEGVFGLAIWHQPSQRLWLVRDRVGGRTLYYTTVGSSCWIAPRLRTLRPHHSADLDLVALRDYLSCAFVPGERTLWQQVRELRPGTVLQLPDGQPNYYWQPQEHIAHPQQSLAWHSQQLRSRLDQVVQEYLPINEPVGVYLSGGLDSSCITALAAKFHQHPVHTYSIHFGADCPNELEFSNLVAHHCHTQHHILEITPEQMWQQLPITMAQLDDPIGDPLTVPNYLLAQLAKETVKVILNGEGGDPCFGGPKNQPMLLKQLYGSPENNPNLVVAYLNSFKKCAPDLPKLFKPEIWDAVKSVPSVFEADLLSSAQYLNRLMGLNIKFKGADHILTKVNNLTRSAGLDGRSPLFDQRIVQMAMEIPPEYKLAGNQEKAVLKQAVADILPREIIQRPKSGMMVPVQFWFRHYWQRQTKALLLSKKSAISPYLNQSLIRDWIEYRGDTWRRYGVKLWLLVSLEYWLN

SEQ ID NO: 22140 - protein, 288 aa, Microcoleus chthonoplastes PCC 7420
MVKVGFLGTGLMGQPMAQRLLDAEIPVVAYNRTLSKLEPLKDSGAETTDSAADAIAAVDCVILMLADADAIRQVALSDSCQEALKGRTVIQMGTISPRQSQDIQNQIVAVGGEYLEAPVLGSIPQVKDGKLQVMVGASEDQFQKWQELLKNFGEPLLMGPVGTAAATKLALNQLIASLTAGFALSLGFVKRQGVDVDKFMELLRDSALYAPTFDKKLNRMQDSNFADPNFPLKHLLKDINLFLSEAKAEGLEASSLAGVRQVVEKAKNAGLADEDYSSLYSGINQTLG

SEQ ID NO: 22141 - protein, 397 aa, Microcoleus chthonoplastes PCC 7420
MSESFPFQRPNNNPNGYPSEAQRALEREQQLPLTGWQQEVNQGLDYGLEAAESIRDRTIPTFSRGELPHYAGINTFMKAPYLEDVRQVGNYDVAIIGVPHDSGTTYRPGTRFGPQGIRRISALYTPYNFELGVDLREQITLCDVGDIFTIPANNEKSFDQISKGIAHVFSSGAFPIILGGDHSIGFATVRGICRHLGDKKVGIIHFDRHVDTQETDLDERMHTCPWFHATNIKNAPAKNLVQLGIGGWQVPRQGVKVCRERATNILTVTDITEMGLDAAADFAIKRATDGTDCVWISFDIDCIDAGFVPGTGWPEPGGLLPREALYLLKKIVQNVPVCGLEVVEVSPPYDISDMTSLMATRVICDTMGHLVVSGQLPRQEKPDYIHMNYQAEMVEWV

SEQ ID NO: 22142 - protein, 339 aa, Microcoleus chthonoplastes PCC 7420
MKVAVFNTKSYDRNFLETTNANYNHDLVFFEPRLTQETTALAVGFSAVCVFINDQLDKTTLRVLAAQGTKLIATRSAGFNHIDLNAAAEFGITVVRVPAYSPYAVAEHTVGLILTLNRKIHRAYNRVREGNFSLDGFMGFDLHGRTVGIIGTGKIGFLVAQILHGFGCQLLAYDLYPNPDCEALGVKYVDLQELFATSDIISLHCPLTPQTRHLINAQSLAQMKSGVMLINTSRGALIDTQAVIDALKSRKIGYLGLDVYEQESNLFFEDLSTEVIEDDVFQRLLTFPNVLITGHQAFFTEDALQNIAQTTLSNISDVESGRPCPNEVSAQRVVATKSG

SEQ ID NO: 22143 - protein, 326 aa, Microcoleus chthonoplastes PCC 7420
MAGLYTQNSSCVKINLKKFFGASPMLVQTSAAVIPFLGSEIQASYKASRVVILPIPYEATTTYRKGTENGPDALLEASIQLEYYDDELEREICKDARIYTHGAIADTRGGQQISAQTMLTDTRDTVSGLIDDGKFVIAIGGEHSITTGLVDAYRQKSHEPFTVVQIDAHGDLRHEYEGSIYNHACVMRRIVDMGLPTLPVAIRSLCQEEADLIKQKSIPVIWARHIAQNPHWIEEAIATIPTERVFITIDLDGIDPASMPGVGTPEPGGLHWYALLTFLRRLFETHQVIGCDVMELAPVVDSVVSQFTAAKLVYKLIGYQTLAQRW

SEQ ID NO: 22144 - protein, 195 aa, Microcoleus chthonoplastes PCC 7420
MFSSDFPQENGQSGHSSSNVTLTDEAGRSLSCSIEHSLNVEGIDYLLLLPIDSPVEIVAWDEDDQADDLADATLVEDETEIDEIFSDAQAVLAEQNLILKRTAFTLTVAGELPPADEEEILSIELAEEDVELEPEQLQLLANFYHEEQEYGIYTPLDPLLFFAKHNPNGQLELLSPEEFQKVQPLLEELLFEDLD

SEQ ID NO: 22145 - protein, 381 aa, Microcoleus chthonoplastes PCC 7420
MKIALVKEIEVGENRVALIPDTVARLVKQGLEIWVENGAGEASFFSDRAYEEAGATLVSDPGKLWAEADVLVKVGIPKDDEINQMREGSTLISFLSPLGKPEVAQKLANRKVTAFSMELIPRTSRAQSMDALSSQAGVAGYKAVLIAAAALPKFFPMLTTAAGTIKPSKVFILGAGVAGLQAIATARRLGAMVEAFDIRPAVKEEVESLGAKFVEVDLQEDTVAEGGYAKEISEAAKQRTQEVIAERVKQADVVITTAQVPGKTAPLLVTEEMVEQMSPGSVIVDLAAEQGGNCAVTEAGKDIVRHGVTVIGPINVPASMPTHASQMYAKNISTLLQYLVKEGQLHLDFEDDIVDNTCITHAGEIRNQRVKDALSQMSTTV

SEQ ID NO: 22146 - protein, 493 aa, Microcoleus chthonoplastes PCC 7420
MTNDKGQRTIPILDALQACAGHPHAPFYAPGHKRGKGISDRLANLWGKSVFEHDLPELPDFDNLFAPSGGIKEAQALAAEAFGADKTWFLVNGSTCGVIAAILATCGTGDKLILPRNSHQSAIAGLVLSGASPIFITPESDPSGDLAHSITPDAVSQALKEHPDAKAVMLLYPTYHGVCGDIHAIAQRVHHYNIPLLVDEAHGAHLRFHPDLPPSAMSAGADLTIQSTHKVLTAMTQASMLHIKGHRLDPERLSQALQLVQSTSPSALLLASLDAARQQMVLYGEKLLSRTLRLAEAAREQIQQIPGLSVLDATNTPGCFTLDPTRLTVRVTELGLSGFEADEIFCEQLGVIGELPTFQHLTFILSLGNTAADIQQLVQAFTDLQQRYSRPDASFRQNLCQLGMTSGLILEPSMSPRDAFFAPKERLTLDQSVGHISAEWICPYPPGIPVLMPGLAIASTTVDYLRQVQHLGGYITGCSDPRLERVNVVNSKD

SEQ ID NO: 22147 - protein, 548 aa, Microcoleus chthonoplastes PCC 7420
MGEMNTADMLVRCLENEGVEYVFGLPGEENLHVLEALKHSSIQFITTRHEQGAAFMADLYGRLTGKAGICLSTLGPGATNLMTGVADANLDGAPVVAITGQVGTDRMHIESHQYLDLVAMFAPVTKWNTQIVRPSNTSEIVRKAFKLAQSEKPGAVHIDLPENIAAMPVFGEPLTKDEREKTYASFRSIGKAAVAISKAKNPLILVGNGAIRAHAAEALTEFATRMNIPVINTFMGKGVIPYTHPLALWTMGLQQRDHVSCAFDETDLVIAVGYDLIEYSPKKWNPEGKIPIIHIGASHAEIDSSFIPLVEVVGDISDSLNEIMKQADREGKATPHAVELRSDIRADYEQYANDEGFPIKPQKLIYDLRQVMGPEDIVISDVGAHKMWMARHYHCDRPNTCIISNGFAAMGIAMPGAIAAKLVHPDRNVVAVTGDGGFMMNCQELETALRVGTNFVTLIFNDGGYGLIEWKQHNQFGDSAFIKFGNPDFVKFAESMGLKGYRVNSVAEFIPTLKEALSQDVPTVIDCPVDYGENLRFSQKAGDLSCKM

SEQ ID NO: 22148 - protein, 629 aa, Microcoleus chthonoplastes PCC 7420
MLGVPAQAQQTEQKPSLSYGQLLQKIDACTPPPSSPEEEIPPSQTSKTDCTIKKVELDPARDVARVYLAGQEDAEPPQEIMLLEQNGELIGKLRNTNIPLDVTPTTNNSAALGLVMQLFLLLLLLAGLMMILRRSASSSGQALNFGKSRARFQMEAKTGIEFGDVAGIEEAKEELQEVVTFLKQPERFTAIGARIPKGVLLVGPPGTGKTMLAKAIAGEAGVPFFSISGSEFVEMFVGVGASRVRDLFKKAKENAPCLIFIDEIDAVGRQRGAGIGGGNDEREQTLNQLLTEMDGFEGNTGIIIIAATNRPDVLDSALLRPGRFDRHVMVDLPTYNGRLGILDVHSRNKKLAPEISLEAIARRTPGFSGADLANLLNEAAILTARRRKEAITPLEIDDAIDRVSIGLQMTPLLDSKKKRLIAYHEVGHALLMTILKNSDPLNKVTILPRSGGVGGFAQPLPNEEFMDISRSTDLGDLYLPRTWLIDQITIALGGRASEEEVFGHGEVTIGAASDIKKVAELAREMVTRYGMSDLGPVALERPNSEVFLGGGWTQRSDYSEEVAAKIDHRVQAIAMQCYEQARQLIRDNRPLIDRLVDILLEQETIEGEQFRQIVAEHTQLPEKQMAVIH

SEQ ID NO: 22149 - protein, 524 aa, Microcoleus chthonoplastes PCC 7420
MMSRRTFEKTSDRKKSPPKTRQVDLPGYSQSFWDSPYFDPLKTIAKSFSPYWLACIPLTAIIVVVWNTAAIAQTEAVDADAIAQLQGTLNAIWVLIAAILVIFMNAGFGMLETGFCRQKNAVNILSKNLIVFALATIAFWAIGFSFMFGAGTGFIGLGGFFLTSTDPGTYGLDPFPTGLPISVFFLFQAAFAGTAATIVSGAVAERIRFIDFLVFSLLLTGISYPITGHWVWGGGWLGGMGFSDFAGSTVVHSVGGWAALMGAAFLGPREGKYRDGQINAIPGHNMSIATLGCLILWIGWFGFNPGSELAANASVPYIAVTTNLAAAAGGISATITSWLKDGKPDLSMIINGILAGLVAITAPCNAVSYLSAIIIGLIGGIIVVFAVSFFDNIHIDDPVGAISVHLVNGIWGTIAVGIFTFAENDAGQRLGLIYGGGLGQLGVQLLGILCVGGFTVAFSSIVWLALKATLGLRVHAEEEIHGLDISEHGMEAYSGFVKESDVLTSSSFGSVSGSTADIPRGSEV

SEQ ID NO: 22150 - protein, 212 aa, Microcoleus chthonoplastes PCC 7420
MFRQIGGSSFPPVVETFERGKTIFFPGDPAERVYFLMKGAVKLSRVYEAGEEITVALLRENSVFGVLSLITGHRSDRFYHAVAFTPVELLSAPIDQVEQALKDNPELSMLMLQGLSSRILQTEMMIETLAHRDMGSRLVSFLLILCRDFGVPGKDGITIDLKLSHQAIAEAIGSTRVTVTRLLGDLRTDQMISIQKKKITVHNPVVLSQQFT

SEQ ID NO: 22151 - protein, 532 aa, Microcoleus chthonoplastes PCC 7420
MTTTKDVSKKINKVEKAKAEKDGLDIKQELESLIQLGWENVDKTDLELRLKWLGVFFRPVTPGKFMLRLRIPNGSLDSEKMRVLANIVQRYGDDGSADITTRQNIQLRGVRLEDIPDIFHQLQSVNLTSIQSGMDNVRNLTGSPVAGIDADEIIDTRDMLQKLQDMITNNGEGNYAFTNLPRKFNIAIEGGRDNSIHAEINDIAFVPAYRDGELGFNVLVGGYLSAQRCVEAIPLNAWVPANEADVINLSGAILTVYTQNGLKEGLRKSRQKARMMWLIDKWGVDKFRAEVEKTYGKELLPAAPEDEITQEKKDYIGVYPQKQPGYSYVGLLVPVGRLSADTMFELARLADVYGNGEIRLTVEQNLIIPYIANDKIEAFLSEPLLQQFPIHPSTLTRSLVSCTGNRYCNFAIIETKQRALKLAQELDQELDIPERVRIHWTGCPNSCGQPQVADIGLMGTKVRKDGKPVEGVNLYTGGKVGKDAQLGDVLEKGIACDDLKPILRNLLIENFDAKVKDGVVIEPEPETQEFFE

SEQ ID NO: 22152 - protein, 301 aa, Microcoleus chthonoplastes PCC 7420
MRARPFLKWAGGKSQLIKEIDKLLPEELNQGKINRYIEPFVGGGAVFLYIAQLGKIEEFFICDINPELILAYKTIQKNVEDLIKLLSKLQDKYLSFDAEERKQYFYQIRSQFNLQRQQIDFHTYYPDWVERTAHLIFLNRTCFNGLFRVNSKGEFNVPIGRYKQPKICHADNLRAVAQILKNTQIHYGDFTASEAFVDHRSLVYFDPPYRPLNKTANFTSYSQEIFDDSSQLRLRDFFRVLDHKGAKLILSNSDPKNENLEDNFFEVAYAEYHIKRVKAQRTINSKSTRRGRIYELLIRNY

SEQ ID NO: 22153 - protein, 242 aa, Synechococcus sp. PCC 7335
MESVKEKILVVDDEASIRRILETRLSMIGYDVVTAADGEEALDTFRNTIPDLVVLDVMMPKLDGYGVCQELRKESDIPIIMLTALGDVADRITGLELGADDYVVKPFSPKELEARIRSVLRRVEKTGASGIPSSGVITINNIRIDTNKRQVYKGDERIRLTGMEFSLLELLVSRSGEPFSRSEILQEVWGYTPERHVDTRVVDVHISRLRAKLEDDPSNPELILTARGTGYLFQRIVEPGEE

SEQ ID NO: 22154 - protein, 399 aa, Synechococcus sp. PCC 7335
MQIYLDYSATTPLRQEAIAAMQTAIAQHWGNASSLHQWGNRAATVLEKARIQVASLINAPGTENLAFTAGGTEADNLAIFGITRQYDKPQHIIVSAVEHSAIAAPARQLEASGWQVTWLAVDQQGAVSPNDLRSAIKENTVLVSIIYGQSEIGTLQPIAELGAIAQASGIPFHTDAVQVAGRLPIDVQQLPVDLLSLSSHKIYGPQGAGALYVKPGTSLSPILFGGGQENGLRSGTQAIPNIAGFGVAAELAATEMSTETLRLIYLRDRFFAHMASVPELVLTGDRRHRLPHHISFCLPRSKITGKALVRQMNLAGIGISAGSACHSGQLSPSPILKAIGYGDHAAKTGIRITLGRHTTEADIDWSAMALRQIIARSVAPEARNQAKETAPTVPLAPLS

SEQ ID NO: 22155 - protein, 668 aa, Synechococcus sp. PCC 7335
MQQNFLRLKTSSQIVITRKVGCKKATKRAIGSFSASLLAAAMLIGGTSSQTPAVAQALPRTTDMPSELMAQLPSVRSEEEEEETLEYGELLNKIDNGEVESVELDQINGIARVQLKAAEAEAEPLEVKVFRNDRNLDLQDRLNANDVAWEVTRNTDSSAVTSLVTTGIVAMLVVFAMLMLLRRSASSGGGAMSFGRSKARFQMEAKTGVTFEDVAGINEAKEELQEVVTFLKNPERFTAIGARIPKGVLLVGPPGTGKTLLAKAIAGEAGTPFFSISGSEFVEMFVGVGASRVRDLFKKAKENAPCIVFIDEIDAVGRQRGTGIGGGNDEREQTLNQLLTEMDGFEGNSGIIVIAATNRPDVLDSALLRPGRFDRQVAVDLPGLKGRLGILEVHARDKKIAEDVEMDAIARRTTGFSGAQLANLLNEAAILTARRRKDAVTMLEVNDAIDRLTIGLSLNPLMDSKKKRLLAYHEVGHALIGSLSKYGGLLNKVTIIPRSGGIGGFASFAVQEDRLDSEFLRSYGEIIDDLVMSLGGRAAEEVIFGEAEVTSGASSDIRYVSKLVKDMVTNYGMAALSPKDDSKAAVRTDIMGGGEEYSDELAAEIDDRMREISQECLDKARKIISDNRVLVDRLVDILIEKETLEGDEFRDIVSEYITLPQKEEVKIG

SEQ ID NO: 22156 - protein, 411 aa, Synechococcus sp. PCC 7335
MYNSSSIVTSADNRLYVYEVEGLGQSGQADDIGAPVRRSGTTSFVVPYGRMQQETKRIMQLGGKIVSVRPMNEAASQTASDSSSNGASSNGSGPAKQSATPSESKKKSMTQAKEKKKVPVNIYRPKAPYLGECLSNDELVAEGGIGTVKHLKFDLSEGDLHYLEGQSIGIIPDGEDENGKPHKIRLYSIASTQHGDDVDDKTVSLCVRQLEYKDPETGEQVKGVCSSFLCGLDVGQKVKITGPVGKEMLLADDPKANIIMMGTGTGIAPFRAYLWRMFKDKEREANPDYQFDGKAWLIFGIPKTENILYKEELEEIQEKYPDNFELTYAISREQKNSEGGRMYIQHRVAENAERIWEMVQNDNTYVYICGLKGMEDGIDEAMAVEAEKAGVDWSEYRRTLKKAHRWNVETY

SEQ ID NO: 22157 - protein, 610 aa, Synechococcus sp. PCC 7335
MNTVPDAPGQTNNQSVQQLSTFRRLLSYLKPYRQELPIAIGAVCIGAFTQAIGPFLIGWSIDNLIRPGNLSGLLRMVMGLAFIYGIGTMAIRVQIFRVGTIVQNVLAQIRQDIFTKIQSLSIGYFDKSEAGDLMSRLLNDVSVIDQAFGRSIPQILGNTFSLIGIIIAMFLINFQLGLLSNLVVPIMIFTTRLFSRWARARFRVTRETIGDLSARIEEDVSSVKEAQAFNRVDYNIDAFEALNAANRDANIQAVAVTAAFLPSIDFLNTLATAAVLAYGGYLAVTGAATVGTVTAFLLYVQQFFRPIQILSQFYTQAQSAIAGLERVFFLLDEPELLHDAPDATELPPITGEVEFDRVTFGYVPGQTILDRVSLFAQPGQMIALVGPTGAGKSTIINLILRFYDVTGGAVKIDGIDVRQVSQASLRRQIGYVLQDNILFSGTVAENIAFGHPTAEQSDIEAAARVANIHDFITQLPQGYATVLGSQGATLSQGQRQLISIARAVLIDPRILILDEATSSIDTQTEGLVQEAIASLLQNRTSFVIAHRLSTVTQADQVLVIQQGHIVEQGTHQQLIDQGGEYAKLYALQLGGQELGGQMSTADSILYPTSP

SEQ ID NO: 22158 - protein, 502 aa, Synechococcus sp. PCC 7335
MSMKSSLVILYHREPYDEVEENGKIYYREKKSPNGIVPTLKSFFSNADQSTWVAWKQIKPEQSEGFEERVTMEGGSDSCVVRRIPLNAEQVRNFYYITSKEAFWPILHSFPEHFTYDSSDWENFQNINRLFAEAACEDAADDALIWIHDYNLWLAPLYIREKMPNVKIAFFHHTPFPAADVFNILHWRNAIIDSLLCCDLCGFHIPRYVQNFVSAARSCREVEILETMPVPKAFTRVGTALAEPEMTTKLRYNGRVVNIDAFPVGTNPKNIRKTVLTQEITNRVKEIREQIGDNKLIVSAGRVDYVKGAKEMLQCFERLLERQPIMVGKVNLVMTAVKAAAGMRVYQEAQQTIEQLVGQINGRFSSLGWTPIVLFTEPLPQEDLMALYKTADICWICPLRDGLNLVAKEYVAAHGGEDGVLILSEFTGSAVELPEALLTNPYSSTRMDECIDAALVMSPEEQKQRMAKLYKAICRYDVQQWANHLFREAKATSVQTSASLLS

SEQ ID NO: 22159 - protein, 369 aa, Synechococcus sp. PCC 7335
MALDVELLEQSFELVKPKADDFVASFYNNLFTDYPDAKPLFEHTNMAAQQQMLKGALVMVVDNLRRPEVLSKSLKGLGARHIKYGALPEHYPLVGNSLIKTLEQYAGPAWNSKLESAWAGAYSAITELMLEGASYEAAAIALESDAPTGSSSPTTSAAAPTEDPPSEQASEKASEGGLKVEVLEQSFELIKPRADEFTASFYENLLTDYPAARPLFEHTSMPKQRHMLKGALVMVVDNLRKPEVLSEALRGLGARHVKYGALPEHYPLVGSSLLKTLEQYAGPAWTAEVKDAWVGAYGAITEIMLDGADYSKSDIRLSDPTVGTTTSSEPSVASSAVSTESPEGISNGKAAGIIGSGAVALAVLMLILL

SEQ ID NO: 22160 - protein, 398 aa, Synechococcus sp. PCC 7335
MVTYLDNNATTQIDPAVLQTMLPYLSDFYGNPSSMHSFGGQVGAAIQDARAQVAELLGAESTEIVFNSCGSEGNNTAIHAALAAQPEKRHIVTTAVEHPAVLNVCKHLEKKGYTVTYLSVDGRGQLDLMEVEAAVTGGTALVTTMYANNETGVVFPVEQIGAIAKECGATFHVDAVQAVGKIPIDLKNSTIDLLTLSGHKLHAPKGIGALYTRRGFRFRPFLLGGHQERGRRAGTPNVASIVALGKAAEIAQQHLQTVDREAQLRDLLEQQLLATIPNCEVNGGGTTRLPNTTNIGFKYIEGEAILFMLDKHGICASSGSACTSGSLDPSHVLTAMGLPYTILHGSIRFSLSRFTTEAEIQQVISVMPTIVEKLRAMSPFNSDESGWLQSRDLVQTPS

SEQ ID NO: 22161 - protein, 288 aa, Synechococcus sp. PCC 7335
MRRKLLAGVGSILGVQFLLPLFVSLNAFAAELSEIRERGYLVVAVKDNRPPMGFLNSADQLSGFEIDIARKLAEDLLGDADAVELVPTRNVDRLDAVIENRVDVAIAALTITEPRRRIVSFSYPYYLDGTAFITRLPTDSAPDILTLHDLQLGTIAVLERSSTVAQLSYLLPAAQQVGVGSYLEAQTLVESGAVDAFAGDASVLAGWTMEGGALMNHSMLPDIISAEPLAVVLPKGQQYSPLQTAVNKAIQRWYKEGWLQARSQFWELPEGVVPEGVLPSALDAEGTR

SEQ ID NO: 22162 - protein, 589 aa, Synechococcus sp. PCC 7335
MASPATFTLDSSKATQRVSGAYALIDSLVRHGVEHIFGYPGGAILPIYDALHHAEAKGQVQHILVRHEQGASHAADGYARATGKVGVCFATSGPGATNLVTGIATAQMDSIPMVVVTGQVTRAAIGTDAFQETDIYGITLPIVKHSYVVRDPNQMSQIVAEAFHIAKTGRPGPVLIDVPKDVGIEEIDYIPVEPGDVKIPGYSPQIDIDDNLVDEAIELLQASERPLLYVGGGAIASGAHAEIKALAEAFYAPMTNTLMGKGAVDEHHPLAVGMLGMHGTAYANFAVSECDLLVAIGARFDDRVTGKLDEFASSAKVIHIDIDPAEVGKNRVPEVPIVGDVKAVLARMLDRLSGQAALDVNRSQSWRDQIETWKQDFPLVAPVYPDDISPQSVIVEISKQAPHAYCTTDVGQHQMWAAQFLKNGPRQWISSAGLGTMGFGLPAALGVQVALPEAQVVCVSGDASFQMNLQELATLAQYGIKVKTVILNNGWQGMVRQWQETFFGERYSSSEMAAGMPNFELLAQAFGVKGMVISDPSELEDAIAQMLSHDGPVLLDVHVRRNENCYPMIPPGKSNADMVGLPDKPRPRR

SEQ ID NO: 22163 - protein, 526 aa, Synechococcus sp. PCC 7335
MPKVLVSDPIDQSGLDILSQVATVDVKTKLPLDELVAIIPDYDALMIRSGTKVTQAVIEAGKNLKIIGRAGVGVDNVDVPAATRRGIVVVNSPEGNTIAAAEHALAMMLSMSRFIPAANESMKAGEWNRKAFTGVEVYKKKLGVVGLGKIGSHVATVARAMGMNLLAFDPYISSDRAEELGCRLVEMDLLLSESDYITLHIPKTPDTANLINADSLAKMKPSARIINCARGGIIDEAALAQALNDGVIAGAALDVYSEEPLGESPLRAVGKPLVLTPHLGASTAEAQVNVAVDVAEQIRDVLLELPARSAVNIPGLRPDVLEKLRPYLNLAETLGNFVGQLAGGRIEELNIKLQGELAQNDTKPVVVAALKGLLSNALQERVNYVNASIEAKERGIRVVETRDTTVEDYTGSLYLSAKGSLGEHSVTGVLLGGSEVRIIDMDGFPINVPPTQYMLFTLHRDMPGIIGKIGSLLGSFNVNIASMQVGRKIVRGDAVMVLSIDDPLPAGILEEIKKEQGIRDAYVVVL

SEQ ID NO: 22164 - protein, 388 aa, Synechococcus sp. PCC 7335
MKIASRISRVNPSMTLAISAKAKAMKADGLDICSFSAGEPDFDTPLHIRAAAKAALDQGKTRYGPASGEPALRSAIAQKLRQDNQLAYEAKNIVVTNGGKHSLYNLIMALIEPGDEVIIPAPFWVSYPEMVKLAGGVPIIVETTAKTDYKLSAEQLKASITPKTRLFILNSPSNPTGMVYSPAELQALADVIVEADILVVSDEIYEKILYEGAEHVSIGSLNSEIFQRTIISNGFAKAYAMTGWRLGYLAAPEEVVQAVNTLQSHSTSNVCTFAQYGAIAALTGPQDDLMTMRQAFSQRRLAIMNLVANIDGLSYIEPKGAFYLFVDISQTGLGSIEFCEKLLAQKQVAAIPGIAFGAEGTIRISYATDLDTIERGIDRLNGFVKAYA

SEQ ID NO: 22165 - protein, 486 aa, Synechococcus sp. PCC 7335
MNDAGRLHDRLDQSTVPLVDALQHCANRENAAFYTPGHKRGQGITHRHKQLFGKTVFRADLPELPELDNLFAPEGVILQAQQLAAAAFGAEQTWFIANGSTCGVEAAILATCGPSDKLVLPRNVHSSAVSGLILSGAVPVFIQPTYSPEWDISLDISPDKIEAALAEHPDAKAVLVVSPTYQGICSNLSIIAQIAHSHRVPLIVDEAHGAHFAFHPDLPACALSAGADIAIQSTHKVLSAFTQASMLHLQGDRINRTRLSQSLQLTQSTSPSYLLLGSLDAARYQMATAGETLMSKTLGIANQARQAVQQLSKLKVLDSDDRTRLSLNVSSLGITGFDADEFLHTECDITCELPTLHTLTFIISLGNTRSDIHQLVKGLAKLSEHPHRSSAPDQIKIDFPRSHISISPLSPRQAFFAPRAPLPLKKAIGQTCAETITTYPPGIPVLLPGETITASAIDYLQATHKAGGIVTGNSDPTLATLLTITD

SEQ ID NO: 22166 - protein, 183 aa, Synechococcus sp. PCC 7335
MDVALLEKSFEQISPRAIEFSASFYQNLFHHHPELKPLFAETSQTIQEKKLIFSLAAIIENLRNPDILQPALKSLGARHAEVGTIKSHYPLVGQALIETFAEYLAADWTEQLATAWVEAYDVIASTMIEGADNPAAYLEPELTFYEWLDLYGEESPKVRNAIATLTHFHYGEDPQDVQRDSRG

SEQ ID NO: 22167 - protein, 494 aa, Synechococcus sp. PCC 7335
MQAVDWAIVGVYGLILLAISISASRQQNSTDEYFRGSRQLPWWAIGFSIIATSFSAASLLGGPGEGYNNGLLYLQLQFGDLLGYLLVIFLFLPFFVGLNLTTAYEYLERRFDGKTRSLGSLCFLLFVIARLGGLLYAASLAVATVIGLPLPLAILLVGIVSIVYTVAGGIAAVVWTDVLQFAMIFVGLGAGIWAASQGVSGGLGELWSTAGEAGKLTVINTTWEPESIRSLPTALFAYGTLAFAVAGTNQQSVQRYVSCATIADGRKAILLGWFSGFMGVAATLILGTLLFGFYTANPGLPEDIPADGILPYFIVNNGLPGTSGLLVAAILAAAMSSIDSALHSLATCMTVDFYQRYSAHEATERRSLKVAQGLIVVWGVIGIASAFYVASTGEALLPFLIKYTAMFLGPLLGLFLMGVLIPRVNANGAFYGTIGAVILLAIGTTSGLFSFPGIWQSAVIAPIGVLLGVIISLLGKVPAQRSTKGLTFWSKSVE

SEQ ID NO: 22168 - protein, 107 aa, Synechococcus sp. PCC 7335
MSPETKARIDTLVEENKIMVFMKGTKLMPQCGFSNNVVQLLNMLGAPYETIDVLADPEIRQGIKEYSNWPTIPQVYINGEFIGGSDILIKMYEEGNLQETVEVALAS

SEQ ID NO: 22169 - protein, 395 aa, Synechococcus sp. PCC 7335
MTDSPTSQNPDGSSRSEADYALEKEARLPLTGWQQEVDQGLTFGLEAAESIRDRSIPTFSRGELPHYAGITTFLKAPYVEDVRQVGNYDVAIVGVPHDSGTTYRPGTRFGPQGIRRISALYTPYNFELGVDLREQITLCDVGDIFTIPANNEKSFDQISKGIAHIFSSGAFPIILGGDHSIGFPTVRGVCRHLGDKKVGIIHFDRHVDTQETDLDERMHTCPWFHATNMANAPAKNLVQLGIGGWQVPRPGVKVCRERATNILTVTDITEMGLDAAVDFALERAMDGTDCVYISFDIDCIDAGFVPGTGWPEPGGLLPREALYMLGKIVSKAPVCGLEVVEVSPPYDISDITSLMATRVICDTMAHLVLSGQLPRAGKPDYIHEEADMSLGSSWE

SEQ ID NO: 22170 - protein, 292 aa, Synechococcus sp. PCC 7335
MTPPLAASTINSSAPGSHLVAASRPFLKWAGGKSRLIEQYQPFLPVDFQRYHEPFLGGGALFFHLASELHAKGKRAYLSDLNPELINVYRCVRDQVANLIHQLAIHQQQHSESYYYHVRAAIETEPIARAARFIYLNKTCYNGLYRENSKGKFNVPVGRYKSPKICVPNLLRAASAALQIADISEQSFTHIAEQAQDSQDFVYFDPPYHPLSETSKFTAYSRDRFATEQQIALRDTIGQLATKGVQVLASNSDCPFIRELYTGFKIHTITAARSINSKASKRGKITEVLIAR

SEQ ID NO: 22171 - protein, 188 aa, Synechococcus sp. PCC 7335
MLDEPAEYPVISLSDEEGRELACYIEKSIDVEGTEFLLLLPVNLPIEIFVWEPDDEAEGDEAAEILVDVEDEAIDELFPSARAVLAELDLILERSAHTLTAAGDLPEADEDDCFSLDIGEDDAHPVTEDFQMLATFFHKDAQYTLCTPLEPLLFFAQRNSDGSIELVEPDDFQKMRSQLEDKLFEVLD

SEQ ID NO: 22172 - protein, 399 aa, Synechococcus sp. PCC 7335
MALSPAFPILNIAPAQVIRGSGVLAKSGELLARMGTRPLLVGGSQSLPKAQPFLAPALSGLESATATYTKDCSEVALSALHQAAENHGADFIVGIGGGKALDAAKLLAYQRQLAVVTVPTSAATCAGWTALSNVYSEAGAFLYDVGLPKCPDAIVLDYDLVATAPQQTLVAGIGDAIAKWYEASVSSGHSPHTMVIGAVQQARVLRDILFQKSAAAIANLGSDDWAEVVDASVLMAGVIGGMGGAQCRTVAAHAVHNGLTHVAPHGTLHGEKVAYGILVQLRLEEMAANNSLAATARQQLIRFYDSLGLPTSLADMGMDQLTLAQLKQAATVACKEGSDIHHLPFPVQPDQLMAAMVSTTVPTGAVGQSALSLETTHSNTARSNITHSNAVSSNAPTSK

SEQ ID NO: 22173 - protein, 299 aa, Synechococcus sp. PCC 7335
MVLELLSAMFSKWQKFVAFCLFSFFLTVSIAACGGEPTSVGSKAQITPEDIARLPVEATLEQIRESGQVKVAVPSDFPPFGFVNTSMEPIGYDIDMAKEIAKGLNAELEIIPVVGGYRIPFLQTDRVDMIISSLGKNDERDLIIDFSEPYAPFFSAIYGGPTADISTIEDLSGRSIGVAQGSLEDLEISSLTEDISNVDIKRYANNSLTASALVSGQVDAIATGNVVAAKLIRDNPGSEITSKFILKDSPCYVGVREGDTEFVDEINEIIAFTKRSGRLNEMSKEWFGEPLPEAIAQTA

SEQ ID NO: 22174 - protein, 389 aa, Synechococcus sp. PCC 7335
MSRPIYLDCNATTPVDPQVLSAMLPFFTDYFGNPSSLNHSYGWEAEASVGQARKILAEVIAADPVEIVFTSGATEANNLAIKGVAESYMSTGRHLITVQTEHSAVLEPCRYLETLGFEITYLSVQPDGLVELQALADAFRPDTILVSVMTANNEIGVLQPIKKIGEMCRERGVLFHTDAAQAVGKIPLNVDKMHIDLLSMTAHKLYGPKGIGALYVRRKNPRVQISPQLHGGGQERGIRSGTLYPPQIVGFGEAVRLAVAEMETETQRLKSLRDRLWQHLQAIPGIYLNGHPTRRLPNNLNISFDGIDGNALLLEIRDAIAISSGSACSSLKAAPSHVIQSLGRSHDQAKATLRFGLGRHTSLEEIERAATIVRQAVRSQRQTATEIAV

SEQ ID NO: 22175 - protein, 1554 aa, Synechococcus sp. PCC 7335
MIVNPTTFQTDVLEPLGPSWLVEERDACGVGFIADQQGRASHQLIEDTLAALTCMEHRGGCCADKYSGDGAGVMTAIPWQLLQGWAKGNATESLVPGKTGVAMVFLPQQTAEEEVARSQFQEAVEATGLAFVGWREVPVEPEKLGPLAKEFQPKIAQAVVTSNDQEWDDLERSLFLVRRRFEKAIVQLAKEKNEADAQSLLETYVCSISTRTIVYKGMVRSEVLGQFYKDLQDPSYESAFAVYHRRFSTNTLPKWPLAHPMRLLGHNGEINTLIGNINWMTARQAELSHPIWGEELALLKPVVNAENSDSANLDNAMELLVRSGREPAQALTILVPEAYQNQPELADYPEIVDYYEYYSSIQEPWDGPALIVFCDGKQIGATLDRNGLRPARYVVTKNGYVVVSSEAGVVDLPVEDIVEKGRLGPGQMLAVNFEDGHEILHNWEIKQRIAKAQPYGQWLAERRQEVSPQLFSEEMRLDPQTLLTQQTAFGFTAEDVDMIIQDMAAQAKEPTFCMGNDTPLAVLSDKPHLLYDYFKQRFAQVTNPPIDPLRERLVMSLTTQLGAQGNLLEEHPELANILKLESPVINDTELTIIKESGFEVSSLSTLYRIEGGPTGLEAAVKVLCDRAAEAVKSGSQVLILSDRIDSQNDQNETTLSPEQTYIPPLVAVGAVHHSLIASGLRMRTSLIVDTAQCWSTHHFACLLGYGATAICPYLTLESVRHWWADKKTQKQMESGKLPVSTLNGAQANYRKAVDNGLLKILSKMGISLLSSYRGAQIFEAVGIGADLKELAFRGSVSRLGGLRIEELAQETMSFHEKAFPELTRKRLENMGFIQSRPSGEYHMNNPAMTKLLHKAVETKQYDHYEIYREQLKGRPIAALRDLLDFTGDRDSIDLSEVEPVESIMQRFCTGGMSLGSLSREAHETLGIAMNRIGGKSNSGEGGEDAVRFKILDDVDGEGFSDTLPHLKGLENGDTASSAIKQVASGRFGVTPEYLMSAKQIEIKMAQGAKPGEGGQLPGKKVSEYIASLRKSKPGVTLISPPPHHDIYSIEDLAQLIFDLHQINPKAGVSVKLVAEVGIGTIAAGVAKANADVIQISGHDGGTGASPLSSIKHAGMPWELGLTEVHRSLMENGLRDRVLLRVDGGLKTGWDVIMGALMGAEEYGFGSIAMIAEGCIMARVCHTNQCPVGVATQQEALRKRFSGTPGKVVNFFYFIAEEVRSLLAKLGYRSLNEIIGRADLLVPRDDVFLAKTKALDLSAIVKLPDVKSDRGWLDHGGVNSNGNVLDDEILADAAVANAIANHTSITKAWDVVNTDRAVGARVSGAIAKQYGNTGFKGKLNLNFNGSVGQSFGAFNITGMTMTLTGEANDYVGKGMNGGEIVIKPFEKATYKAEENVIVGNTCIYGASGGTLYVNGIAGERFAVRNSKGVAVLEGAGDHCCEYMTGGVVVVLGGVGRNVGAGMTGGLGYFLDESGDFQTRVNPEIVQVQRVQSKAGEQQLKSLIEAHAERTNSEKAQRILANWQTYLSKFWQVVPPSEADSVEAGVQQEKITTTVS

SEQ ID NO: 22176 - protein, 355 aa, Synechococcus sp. PCC 7335
MQFIDQAEIEVEGGTGGDGLTAFRREKYVPAGGPSGGTGGKGGSVILATNTNLQTLLDFRYAHRFKAKDGEKGGPKNRTGANGEDLIVEVPCGTLAFDLDTGELIGDLTEPNQSLVIAPGGKGGLGNKHFLSNRNRAPEMSQRGIGGMIRRVRLELKLLAEVGIIGLPNAGKSTLISTLSAAKPKVADYPFTTLVPNLGVVRKPTGDGTVFADIPGLIEGAHEGQGLGHDFLRHIERTKLLLHLVDGTALDPVSDYQTIQQELNAYGRGLVGRPQILAINKVDALLDEEIDEIASRLSLLTGEKVFRISAVSRQGTDELLQAIWQLLDETNQAIAAEAARAAQAVIDFNTPVLRP

SEQ ID NO: 22177 - protein, 365 aa, Synechococcus sp. PCC 7335
MDIGVPKEIKDQEFRVGLSPASVKELCDRGHSVTVETQAGVGAGFSDEDYVEAGGRIAADALKPWQQEMVVKVKEPLPAEYELIQDRQLLFTYLHLAAGRNLTERLIESGVSAIAYESVEKDGTLPLLMPMSVIAGRLSVQFGARFLEKQQGGRGVLLGGIPGVSSGKVAILGGGVVGTEAAKMAVGLGAQVTIIDISVERLSYLETLFGSRVNLLYSNTPNISATVTDADLVVGSVLVPNRKAPTLVTKAMVSKMRAGSVIVDVAVDQGGCIETLKVTSHSDPVYTELGVVHYGVPNMPGAVPWTATQALNNSTLPYVIQLAELGMGALKHPSAVGKGLQSALNVEEHRLVHPAVRKVFPDLAA

SEQ ID NO: 22178 - protein, 292 aa, Synechococcus sp. PCC 7335
MKIGLLGTGLMGAPMAYQLHHSGFEVVAWNRSPQRLLPLKEVGIQTADSAAEVIASAELTITMLSDASAIKSALFIDPAALSSRTILQMGTIAPAESRELCVQVQAAKGDYLESPVLGSIPQVKSGSLILMVGATPEQFDRCLPVLECFGPSPKLMGPVGTAATAKLAMNQLIGSLTAAFSMSLGLVQKEGLDIEKFMSIVRESALYAPTFDKKLTRMCDRNFSNPNFPTKHLLKDMNLFTQAAQDRGIDATVAAGVSQLAQNAITQGLADEDYSAIYNVINIQTDQLQQDE

SEQ ID NO: 22179 - protein, 297 aa, Synechococcus sp. PCC 7335
MEVARYLGTDLGPMVRKRFADGELYVQIQESIRGCDVYLIQPTCHPVNDNLMELLIMIDACRRASARQITAVIPYYGYARADRKTAGRESITAKLVANLITQAGANRVLAIDLHSAQIQGYFDIPCDHVYGSTVLTEYLASKNIEDLVVVSPDVGGVARARHFAKMLDDAPLAIIDKRRQAHNVAEVMNLIGDVEGKTAVLVDDMIDTAGTICEGARVLREKGAKHVYACATHAVFSPPAVERLSQGLFEEVIVTNSIPVVPDRQFDQLTMLSVANMLGETIWRIHEESSVSSMFRG

SEQ ID NO: 22180 - protein, 546 aa, Synechococcus sp. PCC 7335
MTLAIERGTAEASPAESKPSKKIGVPKEIVAGERRVSATPATAKKLQKLGFDVLVEHAAGEEANFSDVAYQAAGCEIVQTATELWEKSDIVLKVQPPQEHPNGKHEADMLGSDQSLISFIWPAQNQSLVEHLSRRQATVLAMDAIPRISRAQKMDALSSMANIAGYRAVIEAANQFGRFFTGQITAAGKVPPAKVLVIGAGVAGLAAIGAAKSLGAIVRAFDTRPVVKEQVESLGAEFLELTFEEDGTGQGGYAKTMSPEFIAAEMELFAQQAEEVDIIITTALIPGKKAPLLITQETAELMKPGSVIVDMAAEQGGNCAVTKPGEVYVHNGVTVVGITDFPSRMASQASQLYGTNLCHLLSDMGGSDEFKIDFDDEAVRGALITHAGEVTWPAPRQEKPPQPIAVKETPAAATTPAAVTSAIEEKSAEEKGVAQDLVKWIGITAAASLFLTVGLTAPASFLSHFTVFILACFVGWQVIWNVSPSLHTPLMSVTNAISGIIIIGGLLQLEGLSATSVLGAIAILVGTINISGGFLVTQRMLKMFRK

SEQ ID NO: 22181 - protein, 418 aa, Synechococcus sp. PCC 7335
MVKNLLTLSIIGLTFFFFGWWVYNAFPLFPLQGGIVGPWTDPNSEGVVGEVLGLVQASYPWSPALGPNVADNLTGVFWFAFSLFAMTTASILSGAVIERIKVGAYAILAVVLGSFTWVVAAAWGWNPYGWFLTQFGYHDFGCSAVLHGVAGFFALGVLINLGPRIGKFDSTGRPRAILPHNLPLTMVGLMLIFVGFYAFLAACVIFVPGQAVEITIYGTPMTLASIGVNTTLALCSGIVGAYISSKADPFYTISGGLAGIISVGAGLDLYSPPIVILIAFIGAYTMPFVGNAVEKAGIDDAVGAFAVHGYCGVIGAMAVGVMATGYPQGEGIPLTGFIGQLVGTLVCTVILGFIPGYGVSFVLKKLGMLRVPREEEIGGLDLSEFGLEGYPEYPIITEENAGGGAAAVPVSQTSIPTL

SEQ ID NO: 22182 - protein, 387 aa, Synechococcus sp. PCC 7335
MENLKVVVVGAGMGGLTSAIAMQRAGYEVEIYDRVKELRPAGAGISLWSNGVKVLNRLGLGPEISRIGGPMKQMAYYAKSGKLLTRFSLSPLIEEVGQPPYPVSRTDLQMMLLKAVGEENVQLNKRCVAVEQTADGATAIFEDGHKAIADIVVGADGTHSIIRTHVLGHPSERRYVGYVNWNGLVPASEDLAPLDSWDIYVGNGQRASVMPVGSDRFYFFFDVPLPKGTEREPNRFKQELSKHFEGWAEPVQNLIQQLDPDKTNRVEIHDIEPLEALVKGRVALIGDAAHSTSPDLGQGGCQAMEDAWALANCLLTTNLSVEDALMRYEASRKERVAGIVLGARKRSNMTHAKEPEKTEQWYAELAQEDGKKIMDAISRTILAGPMG

SEQ ID NO: 22183 - protein, 255 aa, Synechococcus sp. PCC 7335
MSPSKTNTSSASTLGASTLENGEIDSLPNLRLYLDTADTAAWERWLPTGMFYGVTCNPLLLERAGVDCTPSTLKSLAQRAFDLGMQEVHLQAWGESTATLLNIGNLLSSFDQRIVVKLPATREGTIAAKLLVRSGIPVTLTAVYSIRQVLIAAAIGASYVAPYLGRIDDSGRDGFAEVATMQQVLKGVKSTTRVLTASIRNIEDIPELAEHGLDTFTFSDAIAQAFFDVPETIEATAEFERAANSAVIITADDTG

SEQ ID NO: 22184 - protein, 431 aa, Synechococcus sp. PCC 7335
MSDQNNPWDNVSKKTSKSATGQKKSKKSSYNSDRKPGEGKLGDRKFNKARKATPAPKLKADRTQAASSAHKKTRKGPILKDGKIVDSSTANSEAAIAKTNYEVLPLTNPADQNIPVKSKPNISGGLIPTAAPEFRSGFVSIVGRPNVGKSTLMNYLVGQKIAITSPVAQTTRNRLQGILTTPQAQIIFVDTPGIHKPHHELGKVLVQNARVAIGSVDVVLFVVEATSAAGKGDLFVSNLIAQTKGPVVLGINKVDQLPESGRKAAEIKHSYEALAAEHGWSVVKFSALTGEGIENLQTELVAKLEPGPYYYPPDLVTDQPERFIMGELIREQILLHTREEVPHSVAIAIEKVEEDKNITRILATVNVERKSQKGILIGKGGLMMKAISTAAREQMQKLVAGKVYLEIFVRVQERWRQSRTRLSEFGYKVEK

SEQ ID NO: 22185 - protein, 635 aa, Synechococcus sp. PCC 7335
MGKVVGIDLGTTNSVVAVMEGGKPTVIANAEGFRTTPSVVAYAKNGDRLVGQIAKRQAVMNPENTLYSVKRFIGRQYDEVNNEASEVPYKIAKVGGNVKIETSDGKQYAPEEISAQVLRKLVDDASKYLGEKVTQAVITVPAYFNDSQRQATKDAGKVAGVEVLRIINEPTAAALAYGLDKKSNETILVFDLGGGTFDVSILEVGDGVFEVLATSGDTHLGGDDFDKKLVDYLAQDFQNKEGIDLRKDKQALQRLTEAAEKAKIELSSVSQAEVNLPFITATQDGPKHLETTLTRAKFEELCSDLIDRCGVPVQNALKDAKLSKSDIDEVVLVGGSTRIPAVQQLVEKILGKAPNQTVNPDEVVAIGAAIQGGVLAGEVKDILLLDVTPLSLGVETLGGVMTKLINRNTTIPTKKSEVFSTAVDGQTNVEIHVLQGEREMSSDNKSLGTFRLDGIPPAQRGVPQIEVTFDIDANGILNVTAKDKGSGKEQSISITGASTLSENEVEQMVRDAETNADADKERRERIDRKNQADSLAYQAEKQVEELGDKVPAEDKEKIEAQIKELKEALAAEDDDKIKSSMETLQQALYTLSSNLYQQGADAADAGAAPEDATDTDASSGGEDDVIDAEFSETEK

SEQ ID NO: 22186 - protein, 370 aa, Synechococcus sp. PCC 7335
MKEVITLAADLGQGDELEPIRKKALDCGAAESVVTDVTEPFITDYAFPAIQANALYENRYPLSTALARPLIAKLLVDTAEKYGADAVAHGCTGKGNDQVRFDVAIAALNPELKVLAPAREWGMSREEAMAYGEKFGLSFPVKKSSPYSIDRNLLGRSIEAGPLEDPWTEPTEEVFVMTSAIADTPNEAEYVEIGFEKGIPTSLNGEELPPVALVTKLNELAGRHGVGRIDMIENRLVGIKSREIYEAPALLVLIAAHRDLESLTLTGDVTQYKRNIEQSYGQMIYNGLWYNPLKSALDAFIKQTQERVTGTVRIKLLKGNAILAGRKSKNALYTDELSTYGSNDQFDHRAAEGFIYVWGLPTRVWSQQTR

SEQ ID NO: 22187 - protein, 630 aa, Synechococcus sp. PCC 7335
MKFSWRTALLWTMPLLVVGFFLWQGSFSSVDPVDSGRNTASTSMTYGRFLDYLDAGRVTSVDFYEGGQTAIIEAVDPQIDNRVQRWRVDLPGNAPELVERLRASDISLDSHQPRNDGALIGILGNLLFPILLIGGLFFLFRRSNGGAGGPGQAMNFGKSKARFMMEANTGVMFDDVAGIEEAKEELQEVVTFLKKPERFTAIGARIPKGVLLVGPPGTGKTLLAKAIAGEAGTPFFSISGSEFVEMFVGVGASRVRDLFKKAKENAPCIIFIDEIDAVGRSRGAGIGGGNDEREQTLNQLLTEMDGFEGNTGIIVIAATNRADVLDSALLRPGRFDRQVSVDPPDIKGRREVLEVHARDKKVSDDLSLDAIARRTPGFTGADLANLLNEAAILTARRRKEAVTMLEIDDAIDRVIAGMEGTPLTDGKSKRLIAYHEVGHAIIGTLIKDHDPVQKVTLIPRGQAQGLTWFTPSEDQMLISRGQLKARICGALGGRAAEEVIFGDAEITTGAGNDLQQVTNMARQMVTKFGMSEDLGQLALESEQGEVFLGGSWGGRSEYSEEIAARIDAAVREIVQKCYEDTVNIVRENRDVIDRVVDLLIEKESIDGDEFRQIVSEYTTVPDKERFVPQL

SEQ ID NO: 22188 - protein, 261 aa, Synechococcus sp. PCC 7335
MINETAKTILSVRDLHASVDGTEILKGVNFEVKAGEVHAIMGLNGSGKSTFSKVLAGHPDYEITAGEVIFQGMNLLELEPHERANSGVFLAFQYPLEIPGVSNRDFLRVAYNSHRKANGEEEIDVFDFDDLVEERSDVVKMDVSFLDRSVNEGFSGGEKKRNEILQMALLEPTLAILDETDSGLDIDALKIVSNGVNQLSTPENASILITHYQRLLNYIVPDYVHVMAQGRIVKTGGKELAQELESRGYDWIVAEEAVAQS

SEQ ID NO: 22189 - protein, 123 aa, Synechococcus sp. PCC 7335
MAYAIIAAGGTQLRVEPGRFYDINRLPMEADEKITIDKVLMVENAGEVSIGQPLVEDASVSGTIVSHLRGKKVIVYKMQPKKKTRKKQGHRQDLTRVMIDSITVGGNTISSDSSDGSDSDSSD

SEQ ID NO: 22190 - protein, 464 aa, Synechococcus sp. PCC 7335
MASRALSRAFGRRFAWGWLACIPLAFTIVATWGFAAHAQEVTADDVQIVLDNIWIVVAAILVIFMNAGFGMLETGFCRQKNAVNILAKNLIVFALATLSFWALGFALAFGEGNGLFGLSGFFLAGSDPTEPVFGTLTTPVFFLFQAAFAGTAATIVSGAVAERVKFSSFIVFSVLLTAISYPISAHWVWGGGWLSDMSFLGEGVAFSDFAGSTVVHSVGGWAALMGAIFLGPRIGKYQDGAVNAIPGHNMSIATLGCLILWIGWFGFNPGSELAASLNVPQIALVTNLAAAAGGIGATFTAWSLSGKPDLSMVINGILAGLVGITAGCGGIGYWGAVIVGLIAGIIVVFSVGFFDSIKIDDPVGATSVHLVCGIWGTLAVGLFDGEAGLFFGGGITQLIAQIIGIVAIGLFTVVVTGILWVIIKSLIGLRVSSEEELKGLDIGEHGMEAYSGFLKDTSDMGGII

SEQ ID NO: 22191 - protein, 216 aa, Synechococcus sp. PCC 7335
MPNASILVADDEKSIRLTVAQALSSQGYEVATAIDGSTALEQLKETPTDLLLLDIQMPGMTGIEVLQKAITQQPSLKVVMVSAHGSVDNAVEAMKLGAVDYLQKPFTPSELRELVNRVLERETNDSGDCDAEVANARKLAGEGKYEEAIAAAKQCIGNHPQDAAGFNLLGELLEAGGDRSEALKNYRVALDLDPTYKAASNNLDRAATNPTSKPSF

SEQ ID NO: 22192 - protein, 673 aa, Synechococcus sp. PCC 7335
MCGIAGIMHHESTRPINPDWLVAMAAIQYHRGPDGFGQKVLPDSGVGFSHARLSIIDLNPNRGRQPFWTDDEQYMIAHNGEFYDYKRLRADLTSRGDRFTTKSDTELLLHLTKRFGLAETMPHLRGEFAFAMYEKQAERLTLVRDRFGVKPLYWTMTSEGLVFGSEIKVLFAHPGVHRVFSDQGLYHQLIQTMVPGTTCFEGVYAVQPGQMVICERQAGRLQVRVHTYWDVDFPQRGERPDRSEQETIEQLRHHFVEAIQLRLEADVPVACYLSGGIDSCSILGVAAACQQSPVKAFTIGFDDGDYDETAIAQEMAAAVGADQDILRVQGSDLYDHFARTIWHTERSIYNTFTVAKLLMSEHVQQAGYKVVVTGEGSDELFAGYPQLRLDMILHGMEAATPAERAELETWLQESNRLFKGNLLAQKRLDDPALTERVGFTPSCLQSWLSSAPRAMSLLSPERQQALGDYSPGAAIAQTLDPRQLAGRHPLDKAQYVWIKTQFESQVLGWAGDRVDMANSLEARPAFLDHPLVEFAVTVSPTLRFRDQKDKYILRETMKALLPETLYNRQKFAFMAPPAHTDPAKQKAMLGLSEQYLSKRAVAATGLLNNAAVSSLFERYHQPETPIAEQVQLDAIINHLLSVQILHDRLIAADIPKIAKERAHALGWRVESAA

SEQ ID NO: 22193 - protein, 223 aa, Synechococcus sp. PCC 7335
MVAVPSSPISDMFRSFAGGTLPPVVESYERNKTIFFPGDPAERVYFLTKGAVKLSRVYEAGEEITVALLRENSVFGVLSLITGDRSDRFYHAVAFTPVELMSLQADQMSVALKEHPELSAMMLRGLSSRILQTEMMIETLAHRDMGSRLVSFLLILCRDFGVPGNEGITVDLKLSHQAIAEAIGSTRVTVTRLLGDLREQGMISIHKKKITVHDPVTLSQQFT

SEQ ID NO: 22194 - protein, 522 aa, Synechococcus sp. PCC 7335
MVTSPSVLKSKREEEKKNKFEKYKAEKDGLAVKDELDKFAEMGWEAIDKTDLTGRLKWLGVFYREVTPGKFMLRMRMPHGILSSHKMRLLAEIVERYGDDGCADITTRQNLQLRGVRLEDIPDIFRRFEQAGLTSIQSGMDNVRNITGSPVAGIAANELVDTQGLVIKVQDMITNNSEGNYDFTNLPRKFNIAIEGSREDSIHSEINDIAFIPAFKDGDESSELGFNVLVGGFFSARRCESAIALDAWVPVDDTVVEICRAILTVFRDKGSRGNRQQTRLMWLIEEMGLDAFRAAVEEEMGTTLLPAAPEDAITEEGKSDHLGVHPQKQPGLNYVGLHVPVGHIFADDMFELARLAEVYGNGEIRLTVEQNAIIPNIPDSRLEAFLQEAPVKKFSIDPMPLSRALVSCTGSRFCNFAIVETKQRAQALTEKLDSLLTVDQPVRMHWTGCPNSCGQPQVADIGFLGTKARKDGKSVEAVDIYMGGKVGKHAQLGERVMKAVPCEDLEAVLSDLLKEKFGAAAK

SEQ ID NO: 22195 - protein, 223 aa, Synechococcus sp. PCC 7335
MQTSPQFRLRTNGMKESNPGEQKKLLLIDDDPNLILLVKDYLEFRGYQVVTAGNGREALTMLPELSPDMIICDVMMPEMDGYAFVEQIRQDPSKSWIPILFLSAKGQSQDRVKGLTTGADVYMVKPFEPEELVAQVESSLKQANRLIHHQNKGSSSMPTIQVPFDVELTPTELKVVQFVARGMANRQIADELRVSQRTIESHVSNMLGKTGLHNRTELARWAV

SEQ ID NO: 22196 - protein, 496 aa, Synechococcus sp. PCC 7335
MCGIASVFGSNASTQYDVSSILSHIVHRGPDDTGVAKGDSWALGHQRLSIVDVAGGHQPMQAVPTQLYSICNGEIYNFRELRSHHFSDYSFQTEADSEILLPLFQQFGKELVQHLEGMYSFVISDGEEWLAGRDCVGVKPLYYGTTDDTIFFASELKALVNCAERIYEFPSGHYYHSQAGLVPYYQLPKTVTFEKDVDTIVGDIRQSLTQSVQKRLMSDVPVGVFLSGGLDSSIVAALMKQQVKELHSFSVGLSHSPDLRAARLVAEHLGTVHHEYVYSEAEMQTVLSDVIYYLESYDPALVRSAIPCYMVSRLASEYVKVVLSGEGADELFAGYSYFAEYDDSMKLHREAIAILQGLHNLNLQRVDRMTMAHSLEGRVPFLDIDFIERCMCIDPQLKLQSPSRPEKWLLRKAFEDLLPQEIVWRDKMEFAQGCASSGLLEHHAKAEISQEALAAAKLQGLPVDTQEELFYYRIFEQHFPHPDAAKVIGRWGGTLH

SEQ ID NO: 22197 - protein, 502 aa, Synechococcus sp. PCC 7335
MQTMPTDPLDMVDDLVRMGLYKDQQLNVADKLNTYELRKALLLKSAGKGSLKREKLVLALAQQAGGIENAFAAAFGPQAGLFFADTVRTSSATRREFLRNVAIGAAMVTLTNCASPEDPDPVANDDAEPVDTSGLEKTDLKIGFIPITCATPIIMSEPLGFYQKYGFNAEVVKMPSWGAVRDSAIAGELDAYHMLAPMPIAMTLGLGSGAFGVKLASIENINGQAITVANKYQGQVNGPADFKGFTIGVPFPYSMHNLLLRYYLATGGIDPDVDVKIRPVPPPDSIAQLVAGDIDAYLMPDPFNQRAVYEEAGFIFKLTKDIWPGHPCCAFAASDQWINDNPNTFRALNKSIIEAAGYASDPANRVEIAEAISERAFLNQPVEVVEAVLTGQFDDGLGNTLDIPDRIDFDPYPWQSFANWISSQLVRWDLQGDGKAAQEITDESYNTVGEEVFLTDLARELAEEVGLNPPSDIYRTEELEFDTFDPAKPGEYVKEQIEKNGV

SEQ ID NO: 22198 - protein, 610 aa, Synechococcus sp. PCC 7335
MGLIVQKYGGTSVGDVERIQAVAKRVHETALAGHSVIAVVSAMGKSTDVLVQLADGITSNPSRREMDMLLSTGEQVTIALLSMALHERGQAAISLTGAQVGIVTEAEHTRARILEIRTERLERHLNEGKVIVVAGFQGTSGGTGSRLGGGDLEITTLGRGGSDTSAVALAAAMQAERCEIYTDVPGILTADPRIVPDAQLMDEITCDEMLELASLGASVLHPRAVEIARNYGIPLVVRSSWTDQPGTRVTGPMPQPRALEGLEIAHPVDAVEFDADQAKVALLRVPDRPGVAARLFGELADQSLNVDLVIQSIHEGNSNDIAFTVRSHVLNQAESVAEHIAPILRSQPNATDEAEVRSSGNIAKISIAGAGMIGRPGVAAGMFSALAAANVNIQMIATSEVKVSCTVAQSDCDRAIATLCEHFDVSSSPARIEQNQVDLANLRSVRGAALDLEQSQLAIRYVPDKPGLAAKIFQILADRGISVDMIIQSQRSRLCRGQMTRDIACTVAQADADLAKDVLQTAAAELNCGEVMVDHAIAKVSIVGIGMIHRPGIAAAMFKALSAANINIQMIATSEIKISCVVAQDKGIQALKVVHAAFDLAANEVVELLV

SEQ ID NO: 22199 - protein, 409 aa, Synechococcus sp. PCC 7335
MKIFVLNAGSSSQKSALYEIPNETLPGHPSEPLWEGQLDWTKENSAQLVVKSHTGEKHSETIERSSRKESILHLLGLLHHGPTKVISELLDIDVVGHRVVHGGADYQSSVTVTPTVKQTIHRLISLAPNHNPANLEGIELMEQLLPDIPQVAVFDTAFHSQMPSVASIYPGPYDWVEQGIRRYGFHGISHQYCTQKASQILEQALSSLRLITCHLGNGGSLAAVKNGKSIDTTMGFTPLDGLMMGTRSGAVDPGILIHLMRQGMSVDELDQLLNKASGLLGVSGVSHDLRAVQAEIQQNNKRAQLAKDLYLYRLKACIGSMIMALGGVDVIAFTGGIGENAAWLRLSVCESMEFLGLQIDNEKNNSLPTDIDIATCESKVRVLVIHTQEDWAIAQECWQLVKGERPKGR

SEQ ID NO: 22200 - protein, 570 aa, Synechococcus sp. PCC 7335
MSANETSFQTLSLIPPVLKALEDAGYETPTPIQALTIPPILDGRDIIGQAQTGTGKTAAFALPILSQIDISNSDPQALVLAPTRELALQVAEAFQSYASHLKGFHVLPIYGGQSYHVQLKQLRRAAHVIVGTPGRVIDHIKRGTLKLDNLKFLVLDEADEMLRMGFIEDVEWVISQTPQSRQVALFSATMPAAIRKIAQKYLNSPQELAVKNQSKTADTIRQRFWPVSGYHKLDALTRILEVEDFDGMIVFVRTKVATVELSEKLEARGYNTAPLSGDVPQNQRERTVERLRQGKLDILVATDVAARGLDVERISHVINYDMPYDPEAYVHRIGRTGRAGREGEAILFVTPREKRLLSSIERSTRQRIERMEMPSTEVVNDQRIERFKQKITNALAQEDSAFFTQILEQYEQEHDVPAIEIAGALAKLLQGDEPLLLEEKTKPKRRDGGSGAATHSVGMERFRVEVGKNHRVKPGHIVGAIANETGLANKYIGRISVYDDYSTVDLPVGIPKETFELLRGVKVLDHPMNITSLGKTRDEGNWREGKPKRRRNTRSGPPFKKKRRKDKATV

SEQ ID NO: 22201 - protein, 597 aa, Synechococcus sp. PCC 7335
MVIHTIPKEILDSVASTGDVFAYHLLRSTGDIGETVLQYLLCLAAKVNLTGIEQDTYNADKVQEQLLNDILRSENKTLYGKKYNFDSLNVDSFRSSLPLTSYENYRESIDNVVQTGNYSQLVSEPITLFQESSGTTGKVKLIPRTNKFTLSAMRAFQAIEAVVQSHFQNPSSSSQRVLALVNTSPTKLTPTGIPRGTGTSGGLNDALQKFKLANYLIDIKYSSPSPVFLISNTEAAYYCHLLFGLLDSDINDISANFAATVLNAMKILEKAWTQLVEDIRQGKLYAGLDIDEATRRELEIRLRANPERARELQAYFEEGFEGILPRIWPSLSCIQCITTGSMQLYTDALRYYSGTVPFFSGSYGASEAWIGVNLDPEREPPAFVVTPHTAFFEFIPQDAIDQEQSATVCLTDLKPGESYEVVVTNMSGLYRYRVGDVVRCVGYHHKSPMIEFMYRRQTLLNLFGEKVSEDVIYSALSTTLREFGMAIQDIDYTCRHEFEGTPWRYVVYLEPADYEGCSSQHEMVQQRLDEVLCNLSDRYRQLREVGSIGSLKLKLVREGTFSGLKTRLLSQEHSDSQFKMPRLLTETALISFMESSL

SEQ ID NO: 22202 - protein, 832 aa, Synechococcus sp. PCC 7335
MIAMNTRLMVGLTIFALAIAAALGAPNTYYLFVLGMIAVTTIVSVGLNVLAGLSGQISIGHAGFFAIGAYAGSLLMLRADWHLGAALLLGAITAAGTGVALSGPALQVSGPYLAMVTIAFGIIIERVLIEWVSLTGGFGGLSGIPKPTLLGLQPALRESVLLVIVLAFLSVVSFALLKRHPWGKAFQAVRDDAIAAAAVGLNPLYVKVMGFAVSAALTGLAGVFFAIIVGFVSPDSFTFHRSILFLLAIILGGLGTAEGAFIGALILVILPEFLHDFVDYQLLVFGSLLLLTLRLAPDGIMSLFHRWAKPKAAIHPLSDPPDLPSFIAQNKQQTSLKIDALTIQFGGIKAVDNVSFTAQPGTITAVIGPNGAGKTTLLNLISGFYRPQSGSIQLGSAQLNRMSSRRITDLGVSRTFQSTRLFNSLSVLDNLRVAAVGKRLGFILKALLGIGIRRQPEPQLLEVLSFVGYRGNIHRTAAALPFVDRRLVEIARALVTCPQVLLLDEPAAGLSKEDKKTLAQLIRRIASSGLKVILIEHDMELVMEISDQVLVMDSGRAIAYGPPAQVQQDPEVLAAYLGVSATDAELSRETLAAPEPVLVVKNLVTGYDALQVIAGLSLTISQGELVTVIGANGAGKSTLLKSLVNLLPAWSGDIDFLGHSLATVPAHKMAAQGLVLVPEGRQVLKELDVVSNLRLGGFHRRDKEIEADIERMLTRFPRLRERQQQKAGLLSGGEQQMLAIARGLMARPLLLLLDEPSLGLAPQLVTSLYATLASLRDEGITILLVDQMASLALEIADRAYLLETGRIVRSGAAEDWRNDPDLAKVYLSGSTS

SEQ ID NO: 22203 - protein, 876 aa, Synechococcus sp. PCC 7335
MKVQIPLIHQLTFKSKLILLTLFASISSVIVIAILSIGLSRRGLRQAAFSQLNVLRSEQAEQVQNYFQQLQSHTLTLSANRAIVVAMVEFNKEFRRLDRQFIPTEWDEPLKRYYEANYFPRLSDITGSEPRFGSYRPSGQAARYLQHYYLSQNDYLDAEKNQLITADDDSEYSRYHSEFHPLLNDIAQQFGYADLYLINQKTGDIVYSVNKRPDYGTNLETGAYRDSSLADLVATVRESSARGEVAIADFAPYEPASGVPSLFIASPIYNGPYVVGILAIRLETDQISQLMTETLTEDTPSTSLDSYLVGADGSLRSEPQFFRDSLSKDDIQSYTRRLRRQGVSDETLAAITRLESPVLLQPVKAAAAQSAIGGATDTERLQDYRGVSVLSAYAPLEIEGLDWAVISQIDTAEAFATLTHLELAILVASILLITAFTFLAMAAATMTIQPVRQLNEWADRVVDGDFEAEIDLDLEDEIGQLTDTLQIMVTSLSHQVATLDQKMAQNEVLLTNLVPPAIAKRLKRGETIIADQIRQITVIYANIVGISELSQTLSPEEVTALLTKLMQAFDDVGEQHGMERQNTPSVDYMAICGLTTARLDHTKRTVDFALEMLKIINLPEFGQSFALGLRLAVHTGPVTAGVVGTKRFGYSVWGESIYLVTRLYAHAALNSVVLTEAAYQQIAETYTCVAAGAVAIEKFGRVETWILATREKLAVRQVELVQRSFAKVEPISEQVGKLFYEHLFETRPDFKPLFSSTDMETQQRKLMMTLATAVEGLRHPEEIISKVQALGRSHQGYGVKAEDYEAIGATLLWTLKEKLGDDFTPEVKRAWEVAFQFLSKIMINAAAQIESDTQAGTELETEPTTELEIELKGIEV

SEQ ID NO: 22204 - protein, 558 aa, Synechococcus sp. PCC 7335
MNTAELLVSCLENEGVEYIFGLPGEENLQLLQALKRSSIQFITTRHEQGAAFMADVYGRLTGKAGVCLSTLGPGATNLMTGVADANLDRAPLVAITGQVGTDRMHIESHQYLDLVAMFEPVTKWNKQILRPDNTPEIVRKAFRLAQNEPLGAVHIDLPENIAAMEASGAPLRVVQPPHPVASEENLQKAAIAISQANKPIILVGNGAIRNLASESITRFAQQMNIPVTNTFMGKGVLDYRDERSLWTVGLQQRDYIACALDASDLVIAIGYDLIEYSPTKWNPQGHLPIVHISVTPAEINGCYIPSVEIVGDISDALTEIGKRLQHSQPIILSRSKEDKLEARFSNLRAEMQENYEQYANDAGFPIKPQKLLYDLRQVLDPEDIVISDVGAHKMWIARHYHCARPNTCLISNGFASMGIAIPGGVAAKLVHPNRNVVAVTGDGGFMMNCQELETAHRISAAFVTIIFNDGGYGLIEWKQESQYQEASYIKFNNPDFVKLAESMNIKGYRIKSAEDFMPVLTEALAQTVPSIIDCPIDYRENLLFSEQAKALHCPLPQN

SEQ ID NO: 22205 - protein, 396 aa, Alcanivorax sp. DG881
MSDISLSDRVQRIKPSPTLAITAKAGELRAQGKDIIGLGAGEPDFDTPDHIKDAAIEAIKAGKTKYTPVDGTPGLKKAIIDKFQRDNGLSYEPGQVLVSSGGKQSFFNMALALLNDGDEAIIPAPYWVSYPDMVLVAGGVPKILETDVNSRFKITPEQLEAAITPKTRLFVINSPSNPSGMAYSLEELAALGEVLKKHPNIIVATDDMYEHILWTGKPFINIVNATPELYDRTVVMNGVSKAYSMTGWRIGYAAGPQKLIAAMKKVQSQSTSNPASISQAAAEAALAGDQGCVDEMVKAFKERHDYLTAALDALPGVKCAQGDGTFYAFPDFSEAIANMDGVESDTDLATLLLETAEVALVPGSAFGAPGCMRLSFAVGMDTLKEAIRRIEQALAK

SEQ ID NO: 22206 - protein, 428 aa, Alcanivorax sp. DG881
MLGTGVMIGAGIFALTGQMAQMTGVLFPLAFLAAAVIVSFSAYSYIKISNAYPSAGGIGMYLHKAYGNRLPTAFNALLMYFSMVIAQSFLARTFGSYTMQLFDGDESGRMVPILGVSLILAAFLINLLGNRMIQGVASFIGILKIGGILVFGLVGIWIADSVSVDFSSPGEAGTFGNFLGATALGILAFKGFTTITNSGSEVIDPKRNVGRAIIISIAACVVIYTLVGFAVASNLSLAEIIKTQDYSLAAAARPALGDYGVWFTVAIAMMATAGGILASIFAVSRMLAMLTEMKLVPHSHFGMPGSIQKHTLVYTVVLGLILTAFFDLSRIAALGIIFYLIMDIAIHWGVLRYLREDVKANVWVPTVAIVLDLLALGGFVWVKLNTDLFVIGVAVVTMIVIAVAEQLFLKKATEAEEAGHKESHAHHH

SEQ ID NO: 22207 - protein, 388 aa, Alcanivorax sp. DG881
MAEAYIVAAVRTAGGKKNGRLSKVHPADMGGRVIDAVVERTGVAPEKIDDVIFGCVSQIGPQTFNVARTSIMSSCLPESVPGVTIDRQCGSSQQAIHFAAQAVMSGTQDLVIAGGVESMSQVPIGSPVMAVKEMGNPFTGEISKRYPGETFSQFHGAERMAEKYGVSKAELDQFAYDSHKRGAAATEAGRFKDEIIPVPVTLEDGSQEEHLVDEGIRWEAELDAIKALQPLQEGGHISAANASQITDGASAVMIASEKAVKELGLTPLARIHAMAVVGSDPTMVLEGPIPATEKVLKQAGMTMADIDLYEVNEAFGSVPLAWMKAVGADYEKLNVNGGAQALGHPLGATGSKLMGTLVYELKRRGGKYGLLAICEGLGTANATIIEVL

SEQ ID NO: 22208 - protein, 560 aa, Alcanivorax sp. DG881
MARYNKDEATGDGIAAVIVTLLLVPQGLAYALLAGMPPETGLYASIVPLIIYGLFGTSRALSVGPAALTSLMTASAAGAIAGGNPQLFIQAAIAMALLSGAILLVMAALRMGWLTNLLSHPVILGFVSGCAIIIAASQLSHLLGVDASGENILELGRNLLPRLGEIHWITVAMGALAIACLIIPKKMAGPLKRSALPGWLSAFLGKSGPVLAVLVTTLVNIGLGLDQQGLAVVGAIPDGLPQPVWPSLQAAQWHQVLVPALLLALIGFVESISLAQALAAKRRERINANRELLGLGLANVTSGLSGSFAVTGSFSRTTVSFEAGARTPMTGLLAGLAMGVVALWFTGLFTRVPQAALGAIIVMGVLSLIELRELKNLWHSSRPDSLAMAATLAGVLLVNVQTGLLIGVVLSLVLFLWRASQPHVAEVGLVPGTHHFRNIDRHDVVVENAVLSIRVDESLWFGNARPMEDLLYDRAMARPEVRHLVLMCSAINHLDASAVESLESLNERLDAAGVQLHLSEVKGPVMDRLKKNHLLSVLSGQVFLSQYQAVETLGGSTHNA

SEQ ID NO: 22209 - protein, 395 aa, Alcanivorax sp. DG881
MQFVDEATIDVHAGKGGDGCLSFRREKYVEFGGPDGGDGGAGGHVYVQADTNINTLVDYRYDRIFKARNGEPGKGRQMTGKSADDVILYVPVGTTVVDLDTEEVLADLTATDKPVMVAQAGRGGLGNIHFKSSVNQAPRKTTKGKPGESRRLRLELKVLADVGLLGMPNAGKSTLIRAISAAKPKVADYPFTTLIPNLGVVKADRYRSFVVADIPGLIEGAADGAGLGIRFLKHLARTRLLLHVVDLAPMDGSSPANHIDAIADELDRFSPALAEQERWLVFNKIDLMADDEAQEQADAIVDELGWQGPVFKVSAAAGVGCDDLVYALMNAIEDRRRLEEEDPAYAAAQLDLRARLEEEAREKVQELKAEARRARENDSDDDDDDDHDVEIVYEP

SEQ ID NO: 22210 - protein, 573 aa, Alcanivorax sp. DG881
MEMLSGAEMVVRALQDEGVEYIFGYPGGSVLHIYDALFQQDSVSHILVRHEQAATHAADGYARATGKPGVVMVTSGPGATNAITGLATAFMDSIPMVVLSGQVRSDWIGDDAFQETDMIGVSRPVVKHSFMVRDAKDIPEIMKKAFYIATTGRPGPVLVDIPKDQTAPNVKNPYEYPKKVKMRSYAPVSRGHSGQIRKALDELMKAKRPVIYAGGGVVQGEGSELLTQLAHRLNFPVTNTLMGLGGFPGTDRQNVGMLGMHGTYEANMTMHSSDVILAVGARLDDRVTNNVKKFCPGAKIIHIDIDPATISKNIMAHIPIVGPVQQVLEEMLAALDEHGGEPDRKALERWWEEIDGWRKVHGMRYETNEDGPMKPQQVVQALYKATKGDAYVTSDVGQHQMFAAQYYQYDKPRRWINSGGLGTMGFGLPAAMGVQFAFPEATVACVTGEGSIQMNIQELSTCLQYGLPVKVININNQALGMVRQWQDMQYGGRHSQSYMESLPDFVKLAESYGHVGMKITKIEDLDGAMEEAFALKDRLVFMDIYVDPTEHVYPMQIADGSMRDMWLSKTERT

SEQ ID NO: 22211 - protein, 317 aa, Alcanivorax sp. DG881
MQGVFLDTDTLVPDELDFTAFDNMLSWTLHPQTRPDQRVARLDGAQVVVTNKVVLDAATLKACPSLKLICICATGTNNVDLAAAAAQGITVCNVTGYARASVAQHTMALLLSLAARLVPYHEDVRSGRWSQAPQFCLLDHPMTELAGKTFGVIGYGDLGREAARLAEAFGMTVQIAESFQAQGNQSGRVPMASLLPAADVISLHCPLTPQTDKLVDAAFLSQMKPGALLLNTARGGLIDEPALAEALRSGQLGGAGLDVLSSEPPPADHPLLADGIPNLLITPHNAWGTRESRQRVLEGVVENIRQWQAGSPINVVS

SEQ ID NO: 22212 - protein, 548 aa, Alcanivorax sp. DG881
MYVYQEYDQRLLEERVAQYRDQTRRFLANELSEDEFLALRLQNGLYIQRYAPMLRISVPYGLLASRQLRRLAHIVRTYDKGFCHVSTRQNIQLNWPSVEEVPDILAELADVQMHAIQTSGNCIRNITTDEFAGVNPKEIEDPRPWCEIIRQWSTFNPEFAYLPRKFKIAVNAVPDADPALIGVHDIGVQLVHGANGETGFQVWAGGGLGRTPMTGAVIGEFVPWQDLLAYLESILRVYNKYGNRDNKYKARIKILVKALGAEKYRELVEQEFAELKGGEMTLTTEEVARIKGCFTAPDYQSADTAALDAKLAEDKAFSRWFHTNTRAHKQAGYRAVTLTLKRTGRVPGDISDEQLEAVADLADQYSFGELRNSHQQNMVLSDVAANDLYDLWKALDALGFATPNLGLLTDIVACPGGDLCALANAKSIPIAESIQRRFDDVDYVHDLGPLDLNISGCMNACGHHHIGHIGILGVDKKGKEFYQVTLGGRGDKLSRVGEKMGPSFESEEITDVVEKIIKLYVEKRLENEPFIDTYERIGMDPFKERIYG

SEQ ID NO: 22213 - protein, 436 aa, Alcanivorax sp. DG881
MLLRRYHWLSLLILPEFANADTLTATDTVWIAIAAALVFFMQAGFALLESGLSRAKNSLNVVMKNYMDLCVGTLVFWAVGFGLMFGTSSNGWFGQDQFMLNQADASTWAMLLFQIMFAATAATIASGAMAERTRYVGYLCGAVVITGLIYPLFGNWAWNSNGWLAQMGFIDFAGSTVVHSIGGWCALAGIMVVGPRLGRFDSQGKPRTIPGHNLSYVALGGFILWFGWFGFNGGSTLSASVDIAKVNLNTQLAAAAGAVGSVIYRMVSRRPVLLTETVNGSLAGLVAVTAGCAVMAPGFAVITGLVAGALAAFGARILLAFRLDDVVGAVPVHAFAGAWGTLAAGLFYDGDLFNGQRVMVQLLGVIVAFGWAFFTALIMYMLVSILAGLRAPALHEQRGLDLSEHAETGYPEFPQNTLYNRDTYNADKARGQELRP

SEQ ID NO: 22214 - protein, 1487 aa, Alcanivorax sp. DG881
MQQNSTLVRGLTEPGEFRDNCGFGLIAHMEGQASHELLQTAIEALTCMTHRGGINADGKTGDGCGLLLKKPDSFFRKVAEEQSITLPDNYGVGMVFTHPDADQSEQQKSAINAALEAQGVAVLGWREVPTDPSCLGDLARASLPGFWQVMVAADGNSEQELNRRLFFARRHAEKAIENDGYFYICSLSASVMSYKGLMMPVDLPVFFPDLGDSAMETAIVVFHQRFSTNTLPQWPLAQPFRYLAHNGEINTVQGNRNWALARENKFQNELLPGLEELSPLVNRTGSDSSSMDNMLEILLAGGMDLFRAVRMMIPPAWQNVETMDADLRAFYEYNSMHMEPWDGPAGLVMTDGRYAVCMLDRNGLRPARWVVTKNGFITLASEIGVYSYKPEDVVAKGRVGPGQILAIDTETGEVLHTKDIDNRLKVRHPYRDWLKSNALRIEADYDHEVGRTDEVDPQDLLSYQKFFQISFEERDQVLRPLAESGQEATGSMGDDTPMAVLSRRERSLFDYFRQQFAQVTNPPIDPLREAIVMSLETCVGAERNVFEETADHADRAILSTPVLSHSKFTNLINIERPGYQTARLSLHYDAETGLKQAVLDLCEQAAKAVRDGSAILVLTDHGIAQDKLTIHAAMATGAVHHSLTEKGLRSDANIIVETATVRDSHHFAVLFGFGATAVYPYLAYDVIADMVRSGELLGDAVELQKNFRKGINKGLMKILSKMGISTITSYRGAQLFEAIGINSDVVEVCFRGVPSRIQGAGFEDFQEDQQNLAKDAWKQRKPIDAGGILKYIHGKEYHAFNPDVIYALHRATQDSDYDAYKEYAELVNKRPVATLRDLFALRDDVDAIDVDQVEPLENILLRFDSAGMSLGALSPEAHEAIATAMNRLGGRSNSGEGGEDPARFGTERVSKIKQIASGRFGVTPHYLVNAEVLQIKVAQGAKPGEGGQLPGGKVNALIARLRHSVPGVTLISPPPHHDIYSIEDLSQLIFDLKQVNPDAQVSVKLVSEPGVGTVASGVAKAYADLITISGYDGGTAASPLTSIRYAGSPWELGLAEAHQALRGNDLRDKIRLQTDGGLKTGLDVIKAAILGAESFGFGTVPMIVLGCKYLRICHLNNCATGVATQREDLRKEHFIGAPELLINYFTFVAQEVRELLALLGVKSIPELIGRTDLLKVLEGETARQGKLDLTPILRNDLVPADKPTHCQVTRNEPFDKAVLSQKMVDDMGTAIESKSGGSFHYEITNCDRSVGARVSGEIAKQHGNLGMETAPIKVRFTGTAGQSFGVFNAGGLHMYIEGDANDYVGKGMAGGKLVIRPPNGSPFKSQETAIIGNTCLYGATGGKLYAAGTAGERFGVRNSGAHAIVEGAGDHCCEYMTGGSITVLGRTGHNFGAGMTGGFAFVLDEDNDFFDRINPELIELHRISSEATESHRSHLRGVIADYVEETGSEWGQYILDNFDAMSRKFWLVKPKAASLENLLQSTRANPA

SEQ ID NO: 22215 - protein, 522 aa, Alcanivorax sp. DG881
MKIDYETDYDVGQDNVQVMGMDMHNPVFFISAVLILTFVIGTLIFPEQANALLNGSKGWAIEHFDWLFMVSGNFFVLFCLLLAVLPLGKIRLGGQSAKPEFSTLSWFAMLFAAGMGIGLMFWSVAEPVAYLNGQWYGTPLAVEAGSEAARHTAMGATMYHWGLHPWAIYAVVALSLAFFTYNKGMPLTIRSAFYPLLGERCWGWPGHIIDILAVLATIFGLATSLGLGAQQAAGGLHFLFDTPNAINVQVGIIVGVTAVAVLSVVRGLDGGVKLLSNINMSLAVFLLLFVIVAGPTMLIITGFGTTAVDYISNIIPLSTWFGREDSEWMHGWTVFYWAWWISWSPFVGMFIARISKGRTVREFIVAVLLVPTVITIIWMSTFGGTGLEQSINGVGELANGVSDASLAMFQMLAHLPWTGIISFMAIALVLIFFVTSSDSGSLVIDSITAGGKVDAPVPQRIFWAVMEGLIAGVLLYGGGKEALKALQSGAVTTGLPFTIVLLLMCVSLFIALSAERKRLKLA

SEQ ID NO: 22216 - protein, 365 aa, Alcanivorax sp. DG881
MSNRFKSRYDDDINLFEGRWHMAQYAILAALLLAAPWVLGNYYLGELTAVLVWSLAGLGLMLISGHTGQVSLGHAAFMAIGAFTNLALMQRGWHFLPALLASAVTSGVAGAVIARPILRMSGIYLGIATLALSIIVEDVSIMAEPVTGGVAGVFAPPISLFGMEIDRYATPEAFYYLCLGVLVLVTLGYLNLLRSASGRSFLAVRDSEVSARALGVNVARAKTLAFSLSCAITGLAGALYAHLAQAVNYESFLVLISITLLLQVVIGGLGSVHGAFFGAIVVVLLPQVIAIASDYLDNTAGIQIAAYPGLDTALFALLILLMVIYEPRGLYGVWFKVRTWLQLFPLYRKGMFRRTRTYLKTERQR

SEQ ID NO: 22217 - protein, 251 aa, Alcanivorax sp. DG881
MLEIRDLHATVADKPILKGLNLTVKPGEVHAIMGPNGSGKSTLANVLAGRDNYAITGGEALFEGNSLADLEPEERAQAGLFLAFQYPVEIPGVSNMEFLKAALESVRGAQGKEEWDSVTLLRQARAACKQVNLDASFLKRGVNEGFSGGEKKRNEIMQMLLMEPKLALLDETDSGLDIDALQTVAKGVNSLRSPERGIVLVTHYQRLLDYIVPDFVHVLSNGQIIKSGGKELAHELEEKGYGWLTGEEESA

SEQ ID NO: 22218 - protein, 103 aa, Alcanivorax sp. DG881
MYAVIKTGGKQYRVEEGDVVRIEKIEVATGESVDFDQVLLVANGDDVKVGQPMLDGAKVTAEVLEQGRHKKIKIVKFRRRKHSRKQQGHRQWYTAVKITGIQG

SEQ ID NO: 22219 - protein, 409 aa, Alcanivorax sp. DG881
MADTSLEKDKIRVLLLEGIHENAVENLKANGYSNVELLPTALTGDDLTAKIKDAHFVGIRSRTQLTDEVFEAAEKLIGVGCFCIGTNQVDLKSALKRGIPVFNAPYSNTRSVAELVIAHTINMMRGIPEKNASAHRGGWLKSAKDSYEIRGKTLGIVGYGNIGAQVSVLAESMGMKVKFFDVVPKLPLGNAEQVGTLTDLLAQSDVVSLHVPDTADTRWMIQEEQIRAIKPKGYLINYARGKVVDIDALAAALRDGHLLGAAIDVFPEEPKGNDDEFVSPLREFDNVILTPHIGGSTKEAQVNIGTEVSEKLIRYSDNGATLGAVNFPEVALPPHPDMHRLLHTHKNVPGVLTQINTVFSENGINICGQYLQTNEEIGYVVIDVDKGYSQLALEKLRTIDGTIRTRVLF

SEQ ID NO: 22220 - protein, 319 aa, Alcanivorax sp. DG881
MSKLVVFTGNANPELAKAMVNNLNLPIGNADVGTFSDGEVAVEIQENVRGKDVFIVQSTCNPTNNNLMELLVMADALRRSSAGRITAVVPYFGYARQDRRVRSARVPITAKVVADMITAVGIDRVVTVDLHADQIQGFFDIPVDNVYATPLIVADIERQNHDDLMVVSPDVGGVVRARALAKQLNDADLAIIDKRRPKANVSQVMHIIGEVEGRTCVLVDDMVDTAGTLCKAAQALKDHGAAKVIAYITHPILSGPAIDNIASSALDELVVTDTIPLSEAGRACANIRVLSLAPMLAETVRRVNNEESLSAMFDRLELV

SEQ ID NO: 22221 - protein, 561 aa, Alcanivorax sp. DG881
MSETKAPSNFIRQIIDRDLAEGKNDGQVATRFPPEPNGYLHIGHAKSICLNFGIAESYGGSCNLRFDDTNPEKEEDEYIQSIKQDVQWLGFQWNGEERFASNYFDQLYDLAVGLIQKGLAYVDSLSPTEIAQYRGNFTTPGKPSPYRDRSVDENLALFEQMRDNKLDEGEAVLRAKIDMQSPNISLRDPILYRIRKKTHHQTGDKWVIYPMYDFTHPLSDAIEGITHSLCTLEFEDHRPFYDWVVENTAVSASPRQYEFARLNLNYTVTSKRKLKQLVDEGHVDGWNDPRMPTISGLRRRGYTPASIRTFCESVGVSRADSVVDMGMLEAAIRDDLNQYAPRAMCVMNPLKVVIENWEEGKEESLIAPVHPQNESMGTRQVPMTREVYIDREDFREEANKKFKRLVLGDRVRLRYGYVVRATDVVRDAQGEIVEVRCTYDPDTLGKNPENAEDQGKMRGVIHWVSAVKGLPCEVRLYDRLFSAANPGKGLEEGQTFLSHINPESLTVLDGCWVEPGLRGALAETRYQFEREGYFCVDQDSSEERLVFNQTVGLRESWPKEA

SEQ ID NO: 22222 - protein, 322 aa, Alcanivorax sp. DG881
MSHDHISVGQRVLDIEARAVDALKDSLDASFSAACDLMLNAKGRVIVTGMGKSGHVGSKLAATLASTGTPSFFVHPGEASHGDLGMITPDDVVLALSNSGETAEVLAILPVIKRKGTGLVGMTGRPQSALAQLSDVHLTVAVAEEACPHNLAPTSSTTAALAMGDALAIALLEARGFTPEDFALSHPGGSLGRRLLLKVDDIMHAGEQLPVVSADTSLSEALLEMTHKGLGMTAVTHDDGTLAGIFTDGDLRRIFDRDIDIRKATIAEVMVTDPITIAQGHLAAEALQIMETRKINGLMVCDDAGKPLGAFNMQDLLRAGVV

SEQ ID NO: 22223 - protein, 354 aa, Alcanivorax sp. DG881
MNALTKISNFFMTPAMKIVMIVAALLFPFVAGNEYQIYVMALAFVWAIAVYGMNIITGLCGQLNLAHGGFFAIGAYTLAILTVDNGWAFWPAFIAAGAVGAILGFLVGVISLRLKEHYFAIFTLCVGFIIYLLLDKWEELTHGALGIINIPAPSGFGLVDFTETTPFYYLALAFMVLSIWLASRIAHSLLGRTFLAIRISDDLAASLGINLMRNKVLAFVLSTTYASVAGALYAGMVRFIGPAEAEVTHTFDMITYLLVGGIGTLMGPLLGTLAITWLTQSLQFLEEYRMIVFGPMLVVLVIFFPKGVVGSFLSWRGRRLAAAHDASQTKEKAASNASSNKPSAASTQEAGNHA

SEQ ID NO: 22224 - protein, 391 aa, Alcanivorax sp. DG881
MIMTPSLSDFARRIPPFHVMALLERAQALSAQGHDVIHLEVGEPDFDTPEPVLAAIQDAVTHGHTGYTPAAGLPALREAIAEDYQNRFGARVSPGQVVVTPGASGALQLALAALLNPGDGVLLTDPGYPCNRQFVRLVGGEPQPVALQADDHFNVDPVAFLDAWQSNTRVAMVASPDNPTGNMLPVETLQQLARGAVDRGGILLVDEIYQGLCYTQPATSVLAGPAPVLVINSFSKYFCMTGWRLGWLVAPEPLVPAIERLAQNLFLAPSTPAQHGALAALQEPTLTILEQRHQLLARRRQCLLNGLAHLKLPVVSRADGAFYVYADVSDYTDDSFAFCADLLEKAKVAMTPGLDFGEGHDHRRFVRMAYTCSEARLTDALHRLEHYLESL

SEQ ID NO: 22225 - protein, 393 aa, Alcanivorax sp. DG881
MSDDAVVIVNGARTAMGGFQGSLSAVSAPELGAASIREAVARAGLKAEDVQEVIMGCVLPAGLKQGPARQAMRLAGLPDSTGATTINKLCGSGMKATMFAYDSIKAGTNDIVVSGGMESMTNAPYILEKARAGMRMGHGQVMDHMFLDGLEDAETGRLMGSFAQEVADKRSITREDMDNYAIESLNRANAAVDNGWFKDEIVPVTVKTRKGEVVVDTDEQPGNAKIDKIPTLRPAFAKDGTVTAANASSISDGGSALVLARESVANERGLKPLARILAHATNSKHPSEFTIAPIGATEAVMKKVGWSVDDVDLFEINEAFAMVAMMPMIDLGIPHEKVNIHGGACALGHPVGSTGSRIILTLIHALKRTGGKRGVASLCIGGGEATAVAVELV

SEQ ID NO: 22226 - protein, 551 aa, Alcanivorax sp. DG881
MSDSRSGFASLGLPEVLLTAIARQGFEQPSPIQAQAIPLLLDGHDLLGQAQTGTGKTAAFALPLLARLDPALREPQMLILAPTRELAIQVATACEEFAKDIKGLQVLPIYGGGEYRTQLKGLRGGAQVIVGTPGRVMDHMERGSMKLNNLKALVLDEADEMLRMGFIDDVKWVLERTPDDCQLALFSATMPPVIRKVADQHLKQPKLVRIDNGGATTGTTIRQRYWPVAGLNKLDAVCRILEAEEHDAVLVFVRTKQATLELAEQLNRRGLRAEALNGDIPQQQREKTVQRLKDKRFDLLIATDVVARGLDVPRITHVVNYDMPGDPEAYVHRIGRTGRAGRQGDAILFVARREQHVLRQIERITRQSIEKMALPSVDDLNAKRIARFQEQLAGFTSGANVDEARALVNQLRDAMDISDNDMAAALATMMFKREPLILKEPKMVKEPRRRESAHVGGRREERNPRNRNDKGRSDKTMRRYRIKVGHDHGVKPGNIVGAIANEAKLPSRLIGPIKIHQDHSTVELPEDLSPKQLHVIRTARVCQQALDLEMV

SEQ ID NO: 22227 - protein, 457 aa, Alcanivorax sp. DG881
MHFSDLGLCDALQAAVAERGYDTPSPIQAQAIPAVLSGRDVMAAAQTGTGKTAGFTLPLLERLRTGTPARNNQVRALVLTPTRELAAQVAESVSTYGKNLPLTSSVVFGGVKINPQMQRLRGGCDVLVATPGRLLDLYQQNAVKFDHLEVLILDEADRMLDMGFIHDIRKILSKLPPKRQNLMFSATFSPEIRALAKGLVNDPVEVDISPRNTTTELVTQWIAPVDKKRKPALLTHLIQEHGWFQVLVFSRTKHGANKLAKQLEANGIEAAAIHGNKSQNARTRALADFKNGKVRALVATDIAARGLDIEQLPQVVNVDLPNVPEDYVHRIGRTGRAGATGQAISLVSADEFQQLKDIERLTQQQLERKIVAGFEPGEPLPAGRAPLPPKSSRPKKPKKPSSGGHRGGQSSGNGQRAQQGNKASGNGGNAGAGKPAGNGQRRRRPQRNNRPANGNKA

SEQ ID NO: 22228 - protein, 403 aa, Alcanivorax sp. DG881
MTSRLGKGGMSHVFLATQHSFERQVAIKILTPTLALEPRFAERFMQEARTVASLNHPHIVPVYDVGEHQGYYYLTMEYVTGGSLKQRLADDALDESHALSILRQLAGALNYAGEHGFIHRDVKPDNVLFRADGSALLVDFGIASNVLRDTSVTQSNAIMGTPKYMSPEQHRSQPLTLQSDLYSLGCVFYEMLAGKPPFSAPDARSMGLAHLRDPLPLLPVALRRYQPLIRQLLAKDPADRPESGSALIAQLDNLEPGPGHYTADRSRYRPQEQGTTTPLAPRLRLKESKLGLSWRGNLYQYDIYLVADDFEQFQAHFPVMRSALMDWFQQRGARGKAVSIKATLHPWISGRVKQYLKELRRTEGLEFLARIPMAINLVGSDGDPIEKLAWGPMENSTTDTQQP

SEQ ID NO: 22229 - protein, 292 aa, Alcanivorax sp. DG881
MVSIVGRPNVGKSTLMNHLIGQKVSITSRKPQTTRHRIHGILSRDNYQIIFADTPGIHTGQEKALNRAMNEAAVSTLFGVDVICMMVDAMKWTPADEHVLSLLPEKDQVPVLLIINKVDNVDDKAALLPHIQTLSERYPFDAVIPVSALREQNLVELEKALVQRLPEGEFWYEEDQLTDRSLRFMVAEIIREKVVRQLGQEVPHQVSVEVEMWEDGPRVTEISAAILVERRGQKKILIGDKGERIKQIGIQAREDIERLIERKVMLNLWVKIKAGWSDDARALRSLGYDEPR

SEQ ID NO: 22230 - protein, 415 aa, Alcanivorax sp. DG881
MENQIFELKYALDTFYFLICGALVMWMAAGFAMLEAGLVRAKNTTEILTKNVALFAIASTMYMVCGYAIMYDGAIFLSGIVGDGVAGAEEAATYAPSADFFFQVVFVATAMSIVSGAVAERMKLWAFLVFAVVMTGVIYPLEGSWTWGGADVFGLYNLGDLGFSDFAGSGIVHMAGAAAALAGVLLLGARKGKYGPNGEVHAIPGSNLPLAALGTFILWLGWFGFNGGSVLATSSVGDSNAVAVVFMNTNAAAAGGAIAALIVGRILFGKADLTMLLNGALAGLVAITAEPSTPTALQATLFGALGGVLVVFSILTLDKLKIDDPVGAISVHGVVGFLGLMLVPITNPLTDDGGASFSGQLIGALTIFTWVFVASLVVWGVLKVVMGIRVSEEEEYEGMDIADCGMEAYPEFVKG

SEQ ID NO: 22231 - protein, 637 aa, Alcanivorax sp. DG881
MTKNIVLWLVIAGVLYVVASSLSTQPATTDVPYSTFISRVEDGKVQEAKIGESTITGTYSDGGQFRTVKPPTLDTNLMPTLIQNDVNVVGLEPQRQGFLTQLFLSVLPILLILAIFIFFMRQMQGGGRGGGGPMTFGKSKAKLLGEDQIKTTFADVAGVEEAKEEVQELVEFLRDPAKFQRLGGKIPRGVLMVGSPGTGKTLLAKAIAGEAKVPFFSISGSDFVEMFVGVGASRVRDMFEQAKKHSPCIIFIDEIDAVGRSRGAGVGGGHDEREQTLNQLLVEMDGFDGNEGIIVIAATNRPDVLDPALLRPGRFDRQVTVPLPDIRGREHVLKVHMRQVPISDDVEPALIARGTPGFSGADLANLVNEAALFAARANKRMVSMEEFEKAKDKILMGAERRSMVMSEKEKLNTAYHEAGHAIVGRLVPEHDPVYKVSIIPRGRALGVTMYLPEEDRYSQSKRGLESSICSLYGGRLAEEMTLGFDGVTTGASNDIERATKLARAMVTKWGLSEKLGPLAYEEEEGEVFLGKQMSQRKSMSEQTAEEIDREVRAIIDSCYGRAKQILEDNRDKLDLMADALMQYETIDANQIEDIMGGHKPRPPKDWRDQGPGNGAAASGDGDQPSGDDPIGGPANTH

SEQ ID NO: 22232 - protein, 546 aa, Alcanivorax sp. DG881
MKASDLFVRALEAEGVEHVFAIPGEENLDLLESLRGSNIKLVITRHEQAAGFMASTYGRLTGKAGVCMSTLGPGATNLVTAAAYAQLGAMPMVMITGQKPIKTSKQGQFQIIDVVDMMRPLTKFTKQVVSGDSIPTRIRESFRLAQEERPGATHLELPEDIAREHSTMPVTEPSATRRPIAEDKAICKAIEAIKGARKPLLLAGAGANRKLTSKMLRQFVEKLGIPVITTQMGKGVVDETGPHFLGNTALSDGDFVHRAIDQADLIINVGHDVVEKPPFFMRPGGAEVVHINFNSAQVDPVYFPQIEVVGDIANSLWQLKERLDPQEHWSFSDFHRIRDALQKHINEGIQDDSFPIRPQRLVDEIRKVMPEDGILTLDNGMYKIWFARNYPATKPNTVLLDNALATMGAGLPSGMAAKMVHPDRRVMAIVGDGGFMMNSQELETAVRLKLDIVVLILRDDGYGMIKWKQNDMDFQDFGLDFQNPDFVDYARAYGAHGHRVESTAGLGPLVEECYQQGGVHVIDCIVDYRDNSRILNREIRELSSKL

SEQ ID NO: 22233 - protein, 62 aa, Alcanivorax sp. DG881
MKWFNESKGFGFISQDDGGADVFVHFSAITGSGFKTLAEGQKVSFEIQQGPKGPQAANVVAE

SEQ ID NO: 22234 - protein, 694 aa, Alcanivorax sp. DG881
MAKNAVLRNSTILVPVFVPAVIVALLLIIGTISDPKLAGEAFSAAQSWITVNFGWFYMLVVALFFIFIVGISLTSWGNIKLGPDHCEAEYSFPEWFAMLFSAGYGIALLFFGVAEPVLHYAEPPVGAAQTVDAAKQAMQIAFFHWGFHIWAIYGLVGLVMAYFAFRHGLPLSMRSAFYPLIGEKIYGPIGHAIDVFAILGTMFGIATTLGLSAAQINAGLNYLWDVPVGNTVQISAIVIVTALATVSVVAGMDKGVKRLSILNMVLAVVLMLFVFVVGPTVHILESFVQNTGSYLSNIVERTFNLQAYTHSDWIGNWTLFIFSWTIAWAPFVGLFIAKISRGRTIRQFVVGVMLVPSIFTFLWFSVFGDTALNAIMEQGYTELVTQVQADKAVALFQLFDHLPWSTLVSFLAVCLIVTFFVTSSDSGSLVVDSLASGGVLETPAWQRIFWAVLEGAIASVLLLAGGLSALQTMTMVSALPFAIIILLAAVGMWRALVIEGHRETSLQAHMAHSRHMTGSQWRHRLTAMIRYPTREEVESFIRETAMSSMNKVVEELRKAGWDATVNFDEQFIRAELVVNRDEHVGFIYDIRLITTPVPEYAYSSREAKVSDAHEYCRAEVFLRRGGRSYDVFGYDEVDIIRDMLDQFENYLHFLNVAPGKLPWEMAEHDDLLRDQPGDDSEGNDGEDDGSVKPV

SEQ ID NO: 22235 - protein, 457 aa, Alcanivorax sp. DG881
MMNGFKKTFCGVLAAMTLGLSATSVADDALGWPEKADLKFGFIKLTDMAPLAIAYEKGYFEEEGLFVTLEAQANWKVLLDRVIDGQLDGAHMLAGQPLGATIGYGTEAHIITAFSMDLNGNGITVSNAVWEEMKKNIPVENGKPVHPIKADALKPVVEKYKAEGKPFNMGMVFPVSTHNYELRYWLAAGGLNPGYYAPHKGDTSGQLQADVLLSVTPPPQMPATLEAGTIYGYCVGEPWNQQAVFKGIGVPVITDYEIWRNNPEKVFGVSKGWADKYPNTHIRVVKAMIRAAKWLDENDNANRPEAVKILSQPNYVGADYDVIANSMTGTFEYEKGDVREVPDFNVFFRYNATYPFYSDAIWYLTQMRRWGQISDTKPDSWYMDVAKNVYRPDIYAQAAKALIAEGKIPADQFPDFATEDGFKPPQKGFIDNITYDGRKPNEYLKKFPIGLKEGDAL

SEQ ID NO: 22236 - protein, 401 aa, Alcanivorax sp. DG881
MVALVKPHGADALTPLYVADEAVRVALQHEAESLPSVVISSAAAANAVMMGAGYFTPLSGYMNKADMLSVAENLTTADGLFWPVPIVNMLKDVSAIEGAKRIALRDPNVDGQPVIAVMDVAAIEEASDAELEAVAEQVFATNDKQHPGVANFLAAGNFIVSGDIQVLSYSYFADDFPDTFRTAVSIRNEFVERGWSNVVAFQTRNPMHRAHEELCRMAQEALNADGILIHMLLGKLKAGDIPAEVRDASIRKMVEVYFPPNSVMITGYGFDMLYAGPREAVLHAVFRQNCGCSHLIVGRDHAGVGDYYGAFDAQTIFQEKVPAGALEIKIFEADHTAYSKKLDRVVMMRDVPDHTKDDFVLLSGTKVREMLGQGIAPPPEFSRPEVAQILMDYYQALDADK

SEQ ID NO: 22237 - protein, 372 aa, Alcanivorax sp. DG881
MRQPTQPEPGASSSIWSRLSTITDYFAWPLRTSHYLELVNPLWTTHKLQARVVKVWDETKDARTLTLRPGLNWRGHRAGQHVRVGIPANGKHYTRTYTISSPPEREDDCFTITVKAIDKGTISHHIVRNIKVGDYLPIGLPQGDFYLPDAQPIQPLFITAGSGITPAFSMINSLIAQGRLPDTHHVHYAPHEFDVVLGKELKAMDRYNDRYNLHLIYSREGEDPSRNRFSAAQLDALCPDWKDRDVYACGPPSLLEAIEQCMAEAGCSRRLHVERFRAPFTEVPADAVGGRVRFAQSDVDTEGDSDTPLLKVAEAAGMNPPHGCRMGICHTCNTTLVSGCVRDLRTGEVLNEAGSIVQTCICAAAGDCELDL

SEQ ID NO: 22238 - protein, 407 aa, Alcanivorax sp. DG881
MIIGVPKEICPGEQRVALTPANVSALLKKQGVEIIIERGAGDIAGYPDSTYEAAGAKLVDRDEVFSSAQVVLQVQTPGSNIKNGDEDLNKLKEGQVLIGMTDPLANPQFAQSLAEKKVSGLALELVPRITRAQAMDVLSSMAMIAGYKCVLLAATESQRMFPMNMTAAGTMKPSRVFIMGAGVAGLQACATAKRLGAVVEAYDVRPAAREQILSVGAKPVELDLDTGEAEGSGGYAKAQGEDFLKRQRELMTEVVKEMDVIVTTAAVPGAKSPILVTEDMVKAMKPGSIIVDLAAERGGNCDLTESGKTVVKHGVTIIGPENVPSSVAFHASQMFGKNMENLLNLLIDDNGELQLDFEDEIVAETVISHDGDVPQARLRDILGLPALAKPEPEAAEEASDADSKEEK

SEQ ID NO: 22239 - protein, 452 aa, Alcanivorax sp. DG881
MSAFSSLNRRAFLKSLAATGALGSMSPAQLLASTGNAPTWQNWSGNQSATPRQLVYATDESMVRDTIRNSTGTLRAFGGSHSFSGIVPTDDTLISLEPMAGLRGADGNAFRYGGGTRLAMASAMTYEQGYSFTNEPDINLQSLAGAIATSTHGTGLGLQSLSGQVDSLRLVTPDGEPLELTAADGDHFLAACCNVGALGVVTEIGFRHDPAYRLEEHTWTLPLRDAMDFVEKEKDNFRHIEFFAFPLGDQAIVKTMEITSDTQDSPTRADDNELLEMVSKLAMQAGWLTPTLQKLSTLFVEDSRYVGPANKVFANHRTVRFNEMEYTVPAEQGIACLEEVCAAIRQHDINVFFPIEFRYVAADDNLLSMFHQQSGASLSIHQYFEQDYQPLFDVVEPILRRYAGRPHWGKIHNLGRRELAELYPAFDRFQAVRKELDPQGRMLNPHLKRLFL

SEQ ID NO: 22240 - protein, 408 aa, Alcanivorax sp. DG881
MALIVQKYGGTSVGTVERIQAVAEKVAGFHKQGDQVVVVVSAMSGETNRLIELANGVTDKPSPREMDVLVSTGEQVTIALLSMALQKQGLNARSYTGSQIPLRTDNAYSKARIEEIDDKKVRADLDGGSVVVVAGFQGVDGDGNITTLGRGGSDTTAVALAAALKADECQIYTDVDGVYTTDPRVVDNARRLDSITFEEMLEMASQGSKVLQIRAVEFAGKYNVPLRVLSSFQDGPGTLISVEDEVDMEKPVISGIAFTRDEAKIIVRGAPDTPGIAYKILGPVSAENIEVDMIVQNVGKDGAADFTFTVHRNDFVRAQEALRNASEELGNPEIIGDDKIAKVSLVGVGMRSHAGVASKMFEALANEGVNIEMISTSEIKVSVVIAEKYLELAVRALHSEFELDQPGS

SEQ ID NO: 22241 - protein, 410 aa, Alcanivorax sp. DG881
  misc_feature (379)..(399): Xaa can be any naturally occurring amino acid
  unsure (1)..(410): unsure at all Xaa locations
MKVRIGYMPLTDSLPLAVAQEAGFFAAEGLDVELQPEWSWASLRDRLLVGQLDAAPMLAPMLLSTSLGLGCIKKPLATAFSMGLNGNGVTVSPMLFQGLCALSEGPTPNDIAAAMNKLVAARASSGEAPLVLAVVFPFSCHAYQLRHWLSVAGLDPDHDVKLVVLPPSQMVDHLRMGHIDGFCVGEPWNSLAALTGAGHCILSGYQIWENAPEKVLAVSRDWVSRYPDTHRALLRALYKAACHADENLVESLSLLAHPAWLDVPAEIIRAPFSQRLPGGLTGQPFPAHHFHVFAGFHANFPWRSDAAFLLQEMQRWRQCSLEETNTFAAQCYRTDLFRDAVADLKACRSWTASRTNVMRATGNCPASRPPWSWGRTGCXXXXXXXXXXXXXXXXXXXXXPTGRLNPFNSL

SEQ ID NO: 22242 - protein, 400 aa, Alcanivorax sp. DG881
MLDAYIYDGLRTPFGRHGGALAPVRPDDLLAGVIRELVQRNRFEPAGFEDVVIGNTNQAGEDARNVARHAGLLAGLPESVAGITVNRLCGSGLAATLDAARMVTVGEGELIIAGGTESMSRAPFVMAKAEKAFSRDMTIFDSTIGARFPNPTILQQFGGDTMPETAQNVAEDLGISRESADAFAARSQQRYQDARERGFFREEITPVTVPQGRKKDPLTVTDDEHPRPGTGVDKLAKLPAIVDGGVITAGNASGVNDGAAALIVGSRAAGEAAGIAPRARILAGAVAGVAPRVMGLGPVEACNKALARAGLTLEQMDVIEINEAFAAQVLGCCKQLGLAGDDERLNPNGGAIAVGHPLGASGARLALTATRQLEATGGRYALVSLCIGVGQGVAMVIERQ

SEQ ID NO: 22243 - protein, 84 aa, Alcanivorax sp. DG881
MATGRVKWFNNAKGYGFVRPDEGGEDLFVHYSYIQMDGYKSLKAGQPVEYEVQPANKGFHAINLRANEEASNEEGAAEDQTTPS

SEQ ID NO: 22244 - protein, 409 aa, Alcanivorax sp. DG881
MSVEIILGVVMFTAIVLALVAVILAARSRLVATGNVHIDINDDAEKGIDAPAGGKLLGTLADQGIFLSSACGGGGTCAQCRCQVLDGGGDILPTEEGHFTKGQIRDGWRLSCQVNVKQDMKIQVPEEFFGVKKWECEVIANNNVATFIKELTLKLPEGENVDFRAGGYVQLEAPPFDVKFSDFDIDEEYRGDWERFKFFDLNTKNNEEVIRAYSMANYPEEKGILKFNIRIATPPPGSKDIQPGIMSSYVFNLKPGDKITVFGPFGEFFAKKTDAEMVFIGGGAGMAPMRSHIFDQLKRLDSKRKISFWYGARSVRECFYNEEYDLLADENDNFEWHLALSDPQPEDNWDGLTGFIHNVLFEQYLKDHPAPEDCEYYMCGPPMMNASVIKMLEDLGVEPENILLDDFGG

SEQ ID NO: 22245 - protein, 294 aa, Alcanivorax sp. DG881
MSALNAAFIGLGTMGYPMAGHLAEAGITMTVYNRSGQRAQQWTGDYPGSHAATPAEAAQRADLVFVCVGNDDDLRQVTLGDDGALQGLAKGAILIDHTTASAEMARELDTACRKQGNHFVDAPVSGGQQGAENGQLSIMCGGEEAIYQRVLPTLQHYAKATNLMGPAGSGQLTKMVNQICVAGLVEGLSEGVAFALNAGLDASKVFETISQGAAGSWQMVNRHQTMIDDQYEHGFAVDWMRKDLDICLNEAARNGTPLPITEQINDFYRDIQAMGGGRWDTSSLLRRLQKKPEA

SEQ ID NO: 22246 - protein, 180 aa, Alcanivorax sp. DG881
MNKLIILDRDGVINEDSDAYIKTVDEWIPIPGSIEAIARLSKAGYTVTVATNQSGIGRGYYDVATLDAMHARLRELVAEQGGALGKIVYCPHGPDDGCDCRKPLPGLIDQIVTEYGDVTGAPLIGDSLRDLEAGVARHCTPVLVRTGKGNQTLEKGLPESLGPVAIYDSLADFVDHTLKD

SEQ ID NO: 22247 - protein, 476 aa, Alcanivorax sp. DG881
MSVSIWVVDDDRSIRWVLEKALGQEGYAVTCFEDADEALNTLEQGGQEPEVLISDVRMPGTDGLRMLKILQRKNPDLPVIIMTAHSDLDSAVASYQGGAFEYLPKPFDVDEAVALVRRAIKHREESRGDFPEPVEEAPTEIIGEAPAMQEVFRAIGRLSHSNVTVLINGQSGTGKELVARALHRHSMRREKNFVALNMAAIPKDLIESELFGHEKGAFTGANNQRVGRFEQANGGTLFLDEIGDMPLEAQTRLLRVLQESEFYRVGGTTPIHVDVRIIAATHQDLEKLVKEGDFREDLFHRLNVIRIHIPRMAERREDIPRLANYFLQRAGSELGVEPKILHKDTEKYLSAQTWPGNVRQLENTCRWLTVMASGREVLVDDLPPELKETGAAKGTDVSGDWLKSLRNWADRALSQGERSILEQAVPGFERTMIEVALQHTGGRKRDAAALLGWGRNTLTRKIKELDMESQLGSDDD

SEQ ID NO: 22248 - protein, 409 aa, Alcanivorax sp. DG881
MTSDQYHVSKSDKLKGVCYDIRGPVLREAHRLEDEGHRVIKLNIGNPAPFGFEAPEELLQDVIANLPDSTGYCHSKGLFPARKAVMQYTQTKGIEGVTVDDVIIGNGVSELIVMAMQALLNSGDEVLLPAPDYPLWTASVRLSGGTPVHYLCDEQQDWQPSLEDIRAKVNKNTKALVIINPNNPTGANYEPAMLRELLQIARENNLIVFADEIYDKILYDGEEHTSIASMADDLLFITFNGLSKNYRAAGFRAGWMVISGAKHRAESYIEGLDMLASMRLCANVPSQHAIQTALGGYQSIGDLVLPTGRLGRQRDLAWEMLDSIPGVSCVKPKSALYLFPKLDPKVFPFEDDEAFALDLLREEKVLIVQGTAFNWPDPDHFRVVFLPRPDDLEDSIGRIARYLDRARKK

SEQ ID NO: 22249 - protein, 302 aa, Alcanivorax sp. DG881
MKIGFFGVGHMGGPMAANLVKAGHEVVAFDLMPALLETVVQEGARAASSAVDAVAGVDVVVSMLPSAGAVRGLYLGGQDKVDGGVLSHIDKSALIIDCSTIDADTARDVAAIAQEQGRVMIDAPVSGGVGGAKAGTLTFICGGPEDAIDRARPVLECMGAQVFRAGDNGAGQLAKICNNMLLAIHMIGTAEALQMGADHGLDPAVLSDIMKASSGDNWSLDKYNPWPGVMENVPSSKDYEGGFAVKLMNKDLGLALQAGLSTQSATPMGNLAKSLYAAHGNHGYAEKDFSSIQRFFRHKESK

SEQ ID NO: 22250 - protein, 401 aa, Alcanivorax sp. DG881
MTREAVIVSTARTPIGKAYRGAFNDTQAQALGGHAIKHAVERAGIDPSSIQDVIMGAALQQGSTGGNVARQAALRAGLPTSVSGMSMDRQCASGLMAIATAAKEIIVDNMDVAVAGGLESISLVQNDKMNTFRAADPWLKENRPDIYMSMLETAEIVADRYNVSRDSQDEYAFQSQMRTAAAQEAGKFDDEIAPMTSVMKVMNKETKEISDVEVTLDKDEGNRPQTTLEGLQSLQPVFKGGQQVQEGGFITAGNASQLSDGASACVLMDSKEAERLGLQPLGAYRGMAVAGCDPDEMGIGPVYAVPKLLKRFGLTVDDIGLWELNEAFASQCLYSRDKLGIDPEKYNVNGGAISIGHPYGMSGARMTGHALIEGKRRGVKYVVVTMCIGGGMGAAGLFEVF

SEQ ID NO: 22251 - protein, 407 aa, Alcanivorax sp. DG881
MSKINKVVLAYSGGLDTSVIVKWLQDTYDCEVVTFTADIGQGEEVEPARAKAEAMGVKEIYIEDLREEFVRDYVFPMFRANAIYEGEYLLGTSIARPLIAKRLVEIAEETGADAISHGATGKGNDQVRFELGAYALAPGIQVIAPWREWDLNSREKLMAYCEERNIPVDFSSKKKKSPYSMDANLLHISYEGGNLEDPWWEAEEDMWRWSVSPEAAPDQPTYITLGFEKGDIVSIDGDALSPAQVLEKLNKLGGDNGIGRLDIVENRYVGMKSRGCYETPGGTIMLPAHRAIESLTLDRESAHLKDSVMPKYAELLYNGYWWSPERLALQKLIDATQEHVNGEVRLKLYKGSVTVVGRRSDNDSLFDASIATFEDDAGAYDQKDAEGFIKLNALRLRIAAKTGRKLG

SEQ ID NO: 22252 - protein, 111 aa, Alcanivorax sp. DG881
MDVMQVIKDQIEKNPVILYMKGSPQFPQCGFSAQVVEAMTAVGKPFAYVNILEAPEIRQNLKEYANWPTYPQLWVGGELVGGCDIIMDMYRSGQLKELVDGVAVESDESES

SEQ ID NO: 22253 - protein, 402 aa, Alcanivorax sp. DG881
MMGNSNLDTDFYESEDPIWNPALLTIPVPGIRRMVNLAADLDDVIHLSIGQPDFKPPEHVIQAGVDALYAGQTGYTMDAGLPELLESLAEYYSKRYQRTLVPENFMVTTGATEALYLALTATSAPGREFIVPDPSFMLYGPLIRMNGGIVRNIATRAENNHQLDPQEVIDAMGPNTFAVILNSPSNPTGTIYPRETIEAIVEEAAYRGIHVISDEVYDHLIYDGKDYPSVLSCCPDLDHVMVISSFSKTFSMAGMRIGWLIGSQGAIKKLRRYHMFTTTVANTPCQWAGVAALRGSNQFIDNMVEEYQRRRDRLVELVEQTPHLTGYKPDGAFYLFPSLPEGVDGANVALKLLRETGVCTISGDTFGDAGRNALRISYSTSLDQIEEAFKRIIPWMEKQNFS

SEQ ID NO: 22254 - protein, 394 aa, Alcanivorax sp. DG881
MQFSAMETLMIALLVLGTGQWLVHRISILSRLNMPEPVVGGLLATIIVTGLQIGGVSLTFDESMKVPSMLFFFGAVGLAADFRLLKQGGWAMLLFAVLVIVLVALQDLAGVGMAKLMGLEPYYGLIGGSVTMTGGHGTGAAWASVFEKDFGLTGVSELAAASATFGLVFGALLGGPLAMFLIRRYRIAAPAHGAADDDAAYDKAERPHPISAGSVIRILMLLSVGVVVGKVAAEEFASVFRLPTFVWVLFVCILLGNTARRLWRVNDATIDVVGNTALGIFLAITLMSLQLLQLVDLALPMLAMLVGQVLLALAFITFVTFRLMGRNYDSAVLCAGHCGFAMGATPTAVANIQAVTQHHGPSPLAFIIVPVVGGFIVDIANATIIQTFVSVLSG

SEQ ID NO: 22255 - protein, 304 aa, Alcanivorax sp. DG881
MPHISFLGTGLMGAPMVARLLDAGFSLTLWNRTPDKAQRFADRALIAASPAQAVAGADVVITMLEDGAVVDQVLYQSGAIAGLRPDTLVIDMSSIEPATARRHGAQVTQQGGGYLDAPVSGGTRGAEAGALSIMAGGSEVDFHRAAPIFQALGKATHIGPVGSGQLAKLANQAIVGITIGAVSEALLLAAKGGARPDKVREALLGGFAGSKILEQHGERMLARDFEPGAPARIQLKDLRMILDEARAEGLTLPLSQRVFEEYRALQASGHGDVDHSGLLLELERLNGVRLSSGTGEEDPKEENG

SEQ ID NO: 22256 - protein, 506 aa, Alcanivorax sp. DG881
MSFLSRTFQAVDVPVFILSGGLILLFVGLSLWDIEQTAAWVQTSFAWSTKLFGAYWQLLMLATFFVSLYLAISRTGNVRLGGMDKPELSTFKWVSIIMCTLLAGGGVFWAAAEPIAHFISAPPLFGEGNTPMEQGTNALAQSFMHWGFLAWAILGCLTSVTLMVLHYEKGLPLKPRTLLYPVFGDRIIHGAGGAIVDACCVLAVVAGTVGPIGFLGLQVSFGLNDLFGIADTFRTQLAVILGLVCIYTISAITGVNRGIQILSRFNVLLAIALMAFILIAGPTAFIIDGFVQGLGTYLGEFFPMATFRGDPGWLDWWTVFFWGWFIGYGPLMALFVARISRGRTLRQLVGVVALVAPLVTCFWFTIVGGTGISLEIAQPGIISQPFEGFNLPAALLATTQALPWGTLLSGLFLVLTTIFVATTGDSMTYSVSVVMTGTEEPPSAIRVFWGIMMGASAAILISIGDGGIDALQKFIVVTAVPVSLVLLPSLWTGPALAGELLRKQQA

SEQ ID NO: 22257 - protein, 126 aa, Alcanivorax sp. DG881
MQCTMLKAKLHQARVTHAELEYEGSCAIDGDLMDMAGILEYEQIQIYNIDNGERFETYAIRGEAGSKIISVNGAAAHKAQPGDRVIICAYASYSSAELINFKPSLIYMAEGNEVKGTSDAIPVQVA

SEQ ID NO: 22258 - protein, 641 aa, Alcanivorax sp. DG881
MGKIIGIDLGTTNSCVAVLEGDKTKVIENAEGARTTPSIIAYTDDKETLVGQSAKRQAVTNPENTLYAVKRLIGRRFDDKVVQKDIKMVPYKITKADNGDAWVEVKGEKMAPPQISAQVLKKMKKTAEDYLGETVTEAVITVPAYFNDSQRQATKDAGRIAGLDVKRIINEPTAAALAYGLDKKGGDRTIAVYDLGGGTFDISIIEIAEVDGEHQFEVLATNGDTFLGGEDFDLALINFLADQFKADSGIDLGGDPLAMQRLKEAAEKAKIELSSAEQTEVNLPYITADSTGPKHLVVKVTRAKLESLVGDLVSRSLEPCKTALADAGVKTADITDVILVGGQTRMPMVQKSVTEFFGKEPRKDVNPDEAVAMGAAIQGAVLSGDVTDVLLLDVTPLTLGIETMGGVMTPLIEKNTTIPTNASQVFSTADDNQTAVTVHVLQGERKQAAQNKSLGQFNLEDIPPAPRGMPQIEVTFDIDANGILHVGAKDKATGKEQTIQIKASSGLSDEEVEQMVQDAEAHADEDKKFEELVQTRNQADHLVHATRKTLEEAGDKATDEEKESITKAVDELEEAAKGSDKDDIEAKIKALSEVSAPLAEKMYAEQAQQAEGAAGAEGGEQQKGDDVVDAEFEEVDDDKKK

SEQ ID NO: 22259 - protein, 391 aa, Alcanivorax sp. DG881
MSLNPKDVVIVDAVRTPMGKSRNGQFRHVRAEKLSAQLIQALMARNPNWDTQLTEDVIWGCVNQTKEQGMNIARNISMLAGLPRTSAAQTVNRLCGSSMQALHSASQSIMTGNGDVFVIGGVEHMGHVAMDHGIDLNPEMSKVAAKASNMMGLTAEMLGKMHGITREQQDAFGVRSHRLAWEATQQGRWDNEIVPIEGHDQNGHKVLCEIDEVIRPGASIEDMQKLRPVFDPANGTVTAGTSSALSDGASAMLVMSAERAQALGLKPRAKIRSMAVAGCDAAIMGYGPVPATQKALARAGLTIDDIDYVELNEAFAAQSLPVAKDLKLIDKMEEKVNLNGGAIALGHPLGCSGARITGTLLNVMEWKDGQIGLATMCIGLGQGIATVIERV

SEQ ID NO: 22260 - protein, 509 aa, Alcanivorax sp. DG881
MVLAGYLCVVLGIGFYFSRRNTNTEEYFVGGRRFRGWVIGLSLVGTSISSITFLAYPADAFKTDWLRYLPNLALLPAMLVAAFVFLPFFRRGNMTSAYEFLEQRYGPSIRVYGAVAFLVAQLVRLAMILWLLSLLIQQVTDLSPATAIVLGGLFVGLYTVIGGIDAVIWTDVLQTVILLLGGIICLWVILDALPGGLNQVFEQAGNAGKFALAPWENGAPGDTSWSFSLSEKTATMMLLIGLTNWLTEYSSNQNTVQRYCASQSTLEARRGLWVYLFTALPIWAFYMLLGTALWVFFQAYPDPHASAILAGDARAETLMPHFITGYLPAGVAGLVIAAALAAAMSSLDSSINSITTVSVVDLYRRHLRPGRDDRHYLKVAWTIAIAVTGLMILGALWLNQADTKTLQDTSTILVSLLGGGMLGLYLLGFFSKRGNARAAWCGIGCTLVFTGWTILTNNQLLPEALSAPFDLYYTGLIGNVLMFLVGYLVALFWPAASVAPSASLPASEG

SEQ ID NO: 22261 - protein, 383 aa, Alcanivorax sp. DG881
MSNAVYLDYAATTPVDPAVVDAMVRHLGPEGTFANPASRSHLYGWLAEEAVESARRQVADLLNADPREVVWTSGATEANNLALKGAIDARGGGHVITSATEHKAVLDACGWLESQGHAVTYLKPEKDGQVSPQSVANGMREDTVLVSVMHANNETGVINDIAAIGALCRERGVLFHTDAAQSVGKLPLDVKTLPVDLVSVCAHKVYGPKGIGALYVRRSPDVKVAAQIHGGGHERGMRSGTLATHQIVGMGGAFALAGLLKDEEGPRIAALRDRLWQGIEALGGVSVNGEGAPRLPGHLNVAFEGVDGEMLLTAMNGVAVSSGSACTSASLEPSYVLKAMGVEDALAHGSVRFSVGRFTTDEDIERAIASVTDAVSRLRTVSA

SEQ ID NO: 22262 - protein, 209 aa, Alcanivorax sp. DG881
MTDGNKIIPNLDHFLAHCHRRKYPAKSTIIYAGDESDALYYILKGSVTVMIEDDDGREMIMAYLNEGDFFGEMGLFENDPSRSAWVKAKSECEVAEVSYAKFRQLAREDADILFTVSAQIAGRLRATTRKVGDLAFLDVTGRVAGTLLDLCKQPDAMTHPDGMQIKVTRQEIGRIVGCSREMVGRVLKNLEEQGLVSVKGKTMVVYGTR

SEQ ID NO: 22263 - protein, 195 aa, Alcanivorax sp. DG881
MEKGVLEQLRQRLPDYRRTELPLALPEAAVLMPLVDVPEPRVILTVRSNSMPTHAGEVAFPGGKRDPGDKNLLMTALRESQEEVGLSPDYVDVLGQLSPLASRYGMKVTPFVGIVRPEAQLQAEPGEIDTIFQVPLQFFLDEVPELSSPIDVFGRQFRIPSYYYEDKRIWGLTAFMILDLINHVYDAGIEFEVKG

SEQ ID NO: 22264 - protein, 369 aa, Alcanivorax sp. DG881
MTLTSNRFQQGVNRLLQSRVAEILSYPHGVDRYLEVFNPLWSVNEVRARVEAVRYLTNDSVTLTLRPNHNWEGFIPGQFVQLSVTIDGKRQTRCYSPANSLHRTDGCIELTAKVHANGFVSRHLREQLSVGDVVILSQADGEFALPEERPEQVLLISGGSGITPVMSMLRTLCDEGFAGPITFLHYANSAADMIYASELDEIARTHDNVTLVRCFNNDGEQGELSGLFCREHLFTAAPEFAQATTFLCGPPPMMAAVEKVWEEDGLAERLHKEQFTLAAPQIESDSAEGEVRFVQSEKMAINNGATLLEQAESAGLTPESGCRMGICHACTCRKTAGEVRDIRTGEITSGEEDIQICISVPVGTVTLDI

SEQ ID NO: 22265 - protein, 509 aa, Cyanobium sp. PCC 7001
MTPPTTMLASQESVSTTSGFGSSSFVLVYHRSPYDLKTAADGSVEFVDQKSPNGIIPTLRNLFQEERSGTWISWREDADAANAPDERLTVPSASPFTLRRLPLTKEQISSFYHVTSKESFWPILHSFPGLFSVDNSDWDTFVEVNQSFARAACEEAAQGATIWVHDYNLWLVPAQIRELRPDVRIAFFHHTPFPSNDVFSILPWRDEILDSLLCCDLVGFHIPRYADNFSRTAINLRGARCGDPVPVAEKFRHFGSALAQPTVMPWLEHNGRRVHIQASPVGTSPDVIREIVASEEVRTMAAQIAEQHAGRKLIISASRVDYTKGNEDMLLSYERVLENNPKWHGKVELFLACVAAASGMRIYEDIQRSVEEITGRINGRFGRIDWTPVRLSTRRTPYNELVAWFTQSDVCWITPLRDGLNLVAKEYVAARQGRDGVLVLSEFSGASVELEDAVVTNPYSHHSMDNAILKALTMPKDEQVRRMASMSEAVEEFTVQHWAEQELGALRAI

SEQ ID NO: 22266 - protein, 528 aa, Cyanobium sp. PCC 7001
MTKVLVSDPIDQAGIDILSQVAMVDLRPGLAPEELVQIIGDYDALMIRSGTTVTADIIAAAGKLRIIGRAGVGVDNVDVPAATKRGVLVVNSPEGNTIAAAEHALALMLSLSRHVPHAHGSTMAGGWDRKTYVGNELYKKKLGVVGLGKIGSHVARVAKAMGMELLAYDPFVSPERAQSMQVKLLPLADLFAEADYISLHLPRTPDTENLVDAELLRSMKPTARLVNCARGGIVDEAALAEAVEAGVIAGAALDVFAKEPLAADSPLRSVKERLVLTPHLGASTAEAQENVAIDVAEQIRDVLLGLPARSAVNIPGLNAEVMEQLKPHLQLAETLGQLLSQLAGGAISELEVRLQGEFAGHPAQPLVVAALKGLLSTALGDSINYVNASLEAKDRGIHVLEVKDGAARDYAGGSLQLSSRSSLGNHSVTGAVFADGELRVTSIDEFPVNVTPSRHMLFTRHRDMPGIIGQIGSVLGEHNVNIASMQVGRRIVRGDAVMVLSLDDPIPTSLLACVNDIDGIQEAHPVTL

SEQ ID NO: 22267 - protein, 354 aa, Cyanobium sp. PCC 7001
MPQRSRRTAGQSATHTPQQAASPNGQTHHIAPAAVIRGEGAWRRSLPRITALCQRPLLLGRGEATAPLREQLANDLRQAGLEARHERLQWDCCEPDLQRLGAALCNPAGGPPLDAVIACGGGKVLDAGKLLADRHGLACITVPTSAATCAGWTALANIYSPEGAFLRDVELRRCPELLVFDHALVRTAPPRTLASGIADALAKWYEASVSSGGSSDGLIQQAVQMARVLRDQLLLDAETALADPASEAWVRVAEASALSAGLIGGLGGARCRTVAAHAVHNGLTQLAASHGALHGEKVGFGILVQLRLEEVLGQNQLAGQARRQLLPLFERLGIPRSLNALGLGHTTLQSCSSL

SEQ ID NO: 22268 - protein, 637 aa, Cyanobium sp. PCC 7001
MGKVVGIDLGTTNSCVAVMEGGKPTVIANAEGFRTTPSVVAYTKNQDQLVGQIAKRQAVMNPENTFYSVKRFIGRRVDEVNEESKEVSYGVEKAGSNVKVKCPVLNKQFAPEEVSAQVLRKLAEDAGKYLGETVTQAVITVPAYFNDSQRQATKDAGKIAGLEVLRIINEPTAAALAYGLDKKSNERILVFDLGGGTFDVSVLEVGDGVFEVLSTSGDTHLGGDDFDKVIVDHLADTFKANEGIDLRQDKQALQRLTEAAEKAKIELSSATQSEINLPFITATPEGPKHLDLTLTRAKFEELASKLIDRCRVPVEQALKDAKLSSSELDEVVMVGGSTRIPAVLELVKRITGKDPNQTVNPDEVVAVGAAIQGGVLAGEVKDILLLDVTPLSLGVETLGGVMTKMIPRNTTIPTKKSEVYSTAVDGQTNVEIHVLQGEREMASDNKSLGTFRLDGIPPAPRGVPQIEVTFDIDANGILSVTAKDKGSGKEQSISITGASTLSDNEVEKMVKDAEANATADKEKRERIDLKNQAETAIYQAEKQLGELGDKVSAEDREKVESSSKALKEAVEKEDFATVKTELEALQKALYAAGAAVYQQAAGADAAAAAAGGNGASAEAGSGSASDDVIDAEFTESK

SEQ ID NO: 22269 - protein, 355 aa, Cyanobium sp. PCC 7001
MPPALVLVVNAGSSSLKASLVDADGQRPWQQQRSLNPGETGGVEALLEGWLLPAITPWLPGLERIAHRVVHGGERFTAPTAITPAMVEALEGLVPLAPLHNAAALRAIRWFSAWGQAEAPTLAQWACFDTGFHASLPEEARTYAIPADWRAAGLRRFGFHGLSHQHVAEQVAARHPQARRLISCHLGAGCSLCAVSLDPATGPRSMATTMGFTPLEGLVMASRSGSVDPGLLLHQLRQGLSAAAIDEALQRHSGLLGLSGLSGDMRTLREEAGRGHRGAQLALAVFRQRLLEGIGAMAACLRGVDVIALTGGIGEHDQALKAELSDALAWLEPTTLLTVPADEEGLMARLCREAA

SEQ ID NO: 22270 - protein, 317 aa, Cyanobium sp. PCC 7001
MRPESQPQTGSEPVSAPLPRRTLPRTAFLGLGALGAPMAANLLRSGFPLRLYNRTPGRGHAVAAHAGSDSGPGAALPAVSSDPASTVADAEVVCLCLSDDAAVREVVEGSVIDALPRGGLVVDFSTIAPATSRHLAAALQGRGLDYIDAPVTGGTEGARRGSLSVLVGGDPSCVARARAHLEVVGGTITHLGPVGSGQEAKAVNQVLVAGSYAAVAEAMALGSRLGLPMDRVVEALKAGAAGSWALEHRAVQMLENRYPLGFRLALHRKDLAIALQSAEAVQLSLPITSEVAALEDSLIAAGHGDEDVSALARWFRA

SEQ ID NO: 22271 - protein, 561 aa, Cyanobium sp. PCC 7001
MDLGAWLPRPTGLLPLRRDQVAADVLAGLTLAALAIPEVMGYTRISQTPVITGLYTMLLPMVAFAVLGASRHLVVAADSATAAILVATLGGVAPPGSASYLGLTMAVAVGVALFLLLAALLRLGFLADFLSRSALIGLLSGIGVQVAASELAGLFGLPRQGQGAVQQLLATLARLPQSRIDHLLVALGVLGLIAVCRRLDRRLPGALIAVSGSILVSALLDFPGRGLDVVGAVPGGLPHLVLPVVAPSQWNAVLVSAASCFVVVLAQSSATARAYAQRYRERSLENVDLVGLASANLAAGLSGTFVVNGSPTKTEMVDAAGGRSQLAHLTAAAVVLLVLLFFTRPLELLPAAVLSTIVFLIGLKLIDWTGLRELWRLQRNEFLIALATVITVAQVGVMPGILLAVVLSLIEQVRHTYRPRTCLWAPRADGTGLHTVPVAPGVFAVPGILAYRFEANLFYANANRFTEEVLALVTQPGAIVEGLVVDASGIDDVDYSAAKALLELRDRLAGSGVRSALVTNSRAMVEELHRFGLGRGPNSMGTFGSVPEAIAQLSCPPGPES

SEQ ID NO: 22272 - protein, 578 aa, Cyanobium sp. PCC 7001
MYGRFLAYGQRYLWPTFLLALLFNLGYGASTGFVPLVIRYLFDDILPGSDRGRLYAAPAVILGVIVLRAVCQYLGAYLTETVSQSITADLRSDLAAKVMDLPQAYIDRHPSTTLISRVLSDVTLVKTGIVDGFSAIFKDSLTLLALVVVAFYQDWLLALIAFILFPVAILPVLKSSKKVRRHSSQGQSSLARLASYLQEALVGSRVVKIFGMEAYELRRFREENAAVLRAALRTTRAKLANQPLMELLGAVGFSAVLVYGGEAVIAGTRTTGSFFAFLTSLYLCYAPFKGLAKANATLQQGVSAARDLFTILDTPADPVEAPAPVVASGLERELRAEAVSFGYGAEPVIHDLSLTIPVGSTVALVGPSGGGKSTIIDLFCRFYDPGAGRICIDDTDIRDLSLASLRGLISVVDQTTFLFNDTVANNIAYGHAAASRQAIEAAARAANAHGFITQLPQGYDTLIGENGTLLSGGQRQRIAIARALIKNAPILLLDEATSALDSASEQVVQEALDRLMSNRTTLVVAHRLSTVVNADRICVIEAGRLVESGTHRQLLARGGHYAVLFSTQFSNTEAVTPL

SEQ ID NO: 22273 - protein, 604 aa, Cyanobium sp. PCC 7001
MSGGYALMDALHRHGVTHIFGYPGGAILPIYDELHKAESRGWLKHILVRHEQGGSHAADAYARATGRVGVCFGTSGPGATNLVTGIATAHMDSVPMVVITGQVPRAAIGTDAFQETDIFGITLPIVKHSWVVRDPRDIGRIVAEAFVIAATGRPGPVLIDVPKDVGIEEFDYVPVEPGSAIPAGFRLPPEPEAERIQAALELIRDARRPLLYVGGGAISSGAHEQVRQLAELFQIPVTTTLMGKGAFDETHPLAVGMLGMHGTAYANFAVTECDLLIAAGARFDDRVTGRLDGFAPRAQVVHIDIDAAEVGKTRIPEVAVVSDVRLALDALLTAAQSMAANQDSAIQQGRTAPWLERIASWKRHYPLVTPTPEGEIAPQEVVIALQELAPKAYYTTDVGQHQMWAAQYLHNAPRHWVSSAGLGTMGFGLPAAMGVQTAFPDEQVICVAGDASILMNIQELGTLAQYALPVKVVVLNNGWQGMVRQWQESFYDERYSASEMTGGMPDFEALAEAFGVRGVLITERSRLREQLAEALAHPGPAFIDVKVRRNENCYPMVPPGASNAQMVGLPTHPELAIDTTRQCNSCGSSTASDHRFCPSCGAKL

SEQ ID NO: 22274 - protein, 313 aa, Cyanobium sp. PCC 7001
MRSPRVIERLGNGLNRHLRRVAGAAAVLVLAAAPAAVQAETAIERAARTGELALGVAGSAPPYMQEDAQGALQGYAIDVAGLIAAEVSDYLGRPVKVVGETTDSQDALFRQVHNGEVDLMCGAQFTWEREMFVDFSIPFALSGIRLLTQDGALDGTPDSLQGKRIGVVNGSLGEATVKALQPSARLVPVADLAAGMQALAQGRVDALGGDSVLLASAAKGSSLKQPSLVPTMALNRYAVGCAMPENNSTLRNLVNLAIAKLLQGYVNGDSASRELVNRWLGPDSTLGLPEPMIALYFQSVLLNHEQIAVPAQP

SEQ ID NO: 22275 - protein, 335 aa, Cyanobium sp. PCC 7001
MTSFLTADRLAQERAASETPHDTRRLRLFSGTSNQELSREIGAYLGVPDGPRVIKRFADGETYIQIQESIRGCDVFLVQPTCAPVNDHLMELLIMVDACKRASARQVTAVIPYYGYARADRKTAGRESITAKLVANLLTMSGVDRVLAMDLHSSQIQGYFDIPCDHIYGSPVLVDYLQTRNLGEVVVVSPDVGGVARARAFAKQMHDAPLAIIDKRRAAHNVAESLTVIGDVAGKTAILIDDMIDTGGTICQGARLLRRSGAARVLCCATHAVFSPPATERLSEPGLFEEVVVTNSIPLAEERRFPQLRVLSVANMLGEAIWRIHEESSVSSMFR

SEQ ID NO: 22276 - protein, 575 aa, Cyanobium sp. PCC 7001
MKGSDLLARYLEHRGITHVFELIGGTITYLLDSLHLHTSIHIISMHHEQGAGFAAEGFARHTGLPGIAMATSGPGATNLLTAIGSCYFDSTPALFITGQINRDERKGDLPVRQLGFQETDIVAMARPITKAAILVDDPSDLPQVLEHAFDLALRGRPGPVLLDLPMEVQVADLPEPAWCSGSASGSTTSGGEADSTPEAEAFLETALADLAHAERPLILAGGGIRVSGAIEPFRRFVAALDVPVVHSLMGVDVLPSDDPNRIGLIGLYGNRWANIALCDSDCLLVLGSRLDSRQTGNDTTLFRGRRVLHHVDCDDAELNNRVKQCSTLRMDLGAFLRCGLRSPFLPLDCGAWRDHLVSCRRQWPDSGEVGTVSGINPNSLMHHLSAACPDAAAFVADVGQHQMWAAQSLQLREHQRFLTSGGMGAMGFALPAAIGACLAAGRHPVVVIAGDGGFQINLQELQTIRRNRLPIKMVVINNQCHGMVRQIQDVAFNARYQSTIWGYDAPSFTAVASAYGLPSALVAEEAQLPQALAAMMTDPDSAFLLEVVIDPAINAYPKAIAGRPLSEMEPLEKPH

SEQ ID NO: 22277 - protein, 562 aa, Cyanobium sp. PCC 7001
  misc_feature (416)..(422): Xaa can be any naturally occurring amino acid
  unsure (1)..(562): unsure at all Xaa locations
MALLVQKFGGTSVADVTRIQAVARRVALSREEGHELVVVVSAMGHTTDQLTGLARAISGDPPQREMDMLLATGEQVSIALLSIALHAEGVPAVSMTGPQAGIVTESAHGRARILEIRTERLRRLIDDGHVVVVAGFQGTSVGPGGTPEITTLGRGGSDTSAVALAAALGADACEIYTDVPGVLTTDPRKVADAQLMEQVSCDEMLELASLGAAVLHPRAVEIARNYGVPLVVRSSWSDAPGTLLTSGEPRPIGMGGLELGKPVDGAELESQQAVVALSHVPDRPGVAAQLFEALGAAGLNVDLIVQATHVGSGPGTYTNDIAFTLPETDLALAQLVCREVLAGLGAEVGDGGAQLSGEAGMAKISISGAGIMGRPGVAARLFDTLARYGINLRLIATSEVKVSCLVAGELGARALXXXXXXXAGISLDAIVQSERTHGSGSERSRDMSFTLRRDDRGRAEQALAPLLRQWPGSRFEEGPAIARVSAVGAGMPCTPGTAARMFRCLAEAGVNIELIATSEIRTSCVVAEHEGVRALQAVHATFGLGGSVQHRAEGTEAPEAAP

SEQ ID NO: 22278 - protein, 402 aa, Cyanobium sp. PCC 7001
MSPSPPQLLIPREYRPGEARVAATPETVQRLTAKGLRLAVEAGAGEPSGFQDRAYAEAGAELLSPETPSWEKVDGVLCVQPPAQERLEQLRPGALLVGLLAPYGADALVGALNRRQVSAMALELLPRTSRAQTMDVLSSQANIAGYKAVLLAAAALDRYVPMLMTAAGTIQPARTLILGAGVAGLQALATARRLGSVVYVSDVRPAAREQVESLGGRFVAPPELGDTPAEVGGYAQAATEAFLAAQRQQLEEQLAQADMVICTAQVPGRPAPRLISEAMLDRLRPGSVVVDLAVGQGGNCACTVAGQTVLRNGVQLIGADALPSSVPNHASALYARNVAALLEHLLTLPSAEAEVEAGLQGFSLNREDPIVAGCLITHAGRCWRPDVVGVAAEEPQLVGAGA

SEQ ID NO: 22279 - protein, 404 aa, Cyanobium sp. PCC 7001
MISRIFARDPAIMRVSTGSASQSDSRMVTVVVESFGIGRQRQAERRFTVPFAQLQSTMRTIARQGGRIKAVDVAGTLPEAPSSAPSEAQATPAAAPAPTAPSKPAAVSHAAVPVNLYKPKDPFIGTVTENYSLLAEGAIGRVNHITFDLAGGDPQLHYVEGQSIGIIPDGTDANGKPHKLRLYSIASTRHGDNMVGHTVSLCVRQLQYEKDGETINGVCSTFLCDIEPGAKVKITGPVGKEMLLPDDEEANVIMLATGTGIAPMRAYLRRMFEPAEREKNGWTFRGKAWLIMGVPTTPNLLYDADFEHYQSQFPDNFRYTKAISREQKNAKGGRMYIQDRVLENADEIFSMIEDPKTHVYMCGLRGMEPGIDEAMTAAAAAKGIDWSELRPQLKKADRWHVETY

SEQ ID NO: 22280 - protein, 403 aa, Cyanobium sp. PCC 7001
MMGRAKKAVLAYSGGVDTSVCIPYLKNEWGVEEVITFAADLGQGDELEPIRRKALDAGASQSLVGDLIEPFITEFAFPAIRANALYEGRYPLSTALARPLIARRLVEIAREVGADAVAHGCTGKGNDQVRFDVAIGALAPDLKVLTPAREWGMSREETIAYGERCGIPSPVSKGSPYSIDLNLLGRSIEAGPLEDPAVEPPEEVYAMTRSVQDAPEESQSITIDFRHGNPVAIDGEPLDPVSLIRRANALAGLHGFGRLDMIENRVVGIKSREIYETPGLLLLIRAHQELESLTLAADVVRTKRQLEQQWADLVYQGLWFGPLKDALDGFFDRTQRTVNGSVRLRLHKGNATVVGRQSAANSLYVPDMATYGADDRFDHRAAEGFIYVWGLPTRLWAASRRQG

SEQ ID NO: 22281 - protein, 451 aa, Cyanobium sp. PCC 7001
MFPRLSVSHPLALHLPAHGRGRGLTPALARLLRERPGSWDLPELPEIGGPLEAEGLVAEEQRACAALLGAERCWFGVNGASGLLQAALLALAPPGSRVLLPRNLHRSLLHACVLGQLQPVLFTPPFDPATGLWLPPRAEHLSRALLAALADGPLAAVVLVSPTYQGFGADLEALVPLVHGAGLPLLVDQAHGQGEALAAGADLVVLSCQKAGGGLAQSAALLAQGPRLDADALARALLWLQTSSPSALLLHSAAMSLRHPHSGAGRRQRSRALAIAAQLRRRLRALALPLVDGQDPLRLVLHTAALGINGLEADAWLLARGVIAELPEPGTLTFCLGTAPPRRVVWELPRALVGLRQALGGDPLPAFSPPPLPPVAEPEQPIATAWRAPAETLPLAAAAGRIAAEPLCPYPPGIPLLIPGERLDGARVVWLQQQQRLWPGQIADTVRVVRS

SEQ ID NO: 22282 - protein, 344 aa, Cyanobium sp. PCC 7001
MLPLSALTRCLQEEASAIAAAAERLDSQQVEATLELLESCRQRRAKLVVTGVGKSGIVARKIAATFSSIGLTAVFLNPVDALHGDLGIVAADDVTLLLSNSGETEELLAILPHLKRRGTSRIALVGRVESSLARGCDLVLDAAVDREVCPLNLAPTASTAVAMAIGDALAAVWMERAGISPVDFAINHPAGSLGRRLTLTVGDLMVPAGEIEPLHPEARLPVVIAHLTQGSPGRGSLGASWVHGSDPSQLAGLITDGDLRRTLQRHGPGDWDRITAAEMATTDPITVTPDVLAAEALELMERNRRQAISVMPVVSPDDPRRLEGLLRLHDLVQAGFSASVASPS

SEQ ID NO: 22283 - protein, 315 aa, Cyanobium sp. PCC 7001
MAPSLSPAAGADAPRAVFLDALSLGPVDLAPITAEAQLTCWPSTGPEQRLSRLQGAAVAITNKVCLDAPLLAQLPQLRLICTASTGTDQVDLEACEARGITVRHAGRYSRPSVVQITWALILELTCQLQLRRRQVLAGDWQRSPVFALVEPAFDELAGRHLTVVGAGDIGRGVAAVGDAFGMTVHPITSRTPAQELEVALRQADVVSLHAPLTAASRHLINAERLAWMKASAVLVNMGRGGLIDTPALVRALQEGALAGAALDVLEREPPGPELEPLKGVPNLILTPHIGWASRQARQRLVATLAAHLAAFRQGC

SEQ ID NO: 22284 - protein, 1509 aa, Cyanobium sp. PCC 7001
MAGERDACGVGFLASLKGERSHWVLQQALRGLDCMEHRGGCGGDGDSGDGAGVLCGIPWTYLEAVWPAAADSVSQHRGLGMVFLPAAAERRDEARRFCEAEAAQLGLRSLGWRPVPVDPSVLGPMARSTAPVIEQWLLAADVHGDALEGLLFRLRRRCGDRARETWGPGAGDLYFASLSNRTVVYKGMVRSEVLAAFYADLRDTRFAVSFAVYHRRFSTNTLPRWPLAQPMRLLGHNGEINTLLGNINWAKASEVNLEAVWGHAADDLRPVVNAAFSDSANLDATLELMVRSGRPITESLLTLVPEAFRDQPELADKPEIQAFYEYSACTQEPWDGPALLVFADGRSVGATLDRNGLRPARYCITSDGFVVMGSETGVVDLVESSIVEKGRLGPGQMLAVDLEQCRLLHNWDVKQEVASRHPYGAWLAEHRRTLLAQPWEDQRQLDDLELLQQQTAFGFTAEDLDLVIEDMAGAAKEPTYCMGDDIPLAVLSSKPHLLYDYFKQRFAQVTNPPIDPLREKLVMSLEMHLGRRGSPLRPEPASAAVLHLSSPILNEAELEAVGQQGLPSTTLSTLLSIEDGPAGLEGAINRLRSEAEAAVRGGSQILVLSDRGINATTTYIPPLLAVGAVHHHLLALGLRLQTSLVVDTAQCWSTHHLACLIGFGASAVCPWLTWETTRHWLAHPKTQKLIERGRLPELTAARVQANVRKALEDGLRKILSKIGISLLASYHGAQIFEAIGIGADLIDLAFRGTTSRVAGLSLADLASETLSFHAKAFPELNRTKLEFMGFVQYRTGGEFHLNSPEMAKALHAAVAAGPGYDHFSTYKTLLEHRPVTALRDLLELRPAATPLPLEQVESVESICSRFCTGGMSLGALSREAHEVLAVAMNRIGGKSNSGEGGEDPARFHVLQDVDAEGRSASLPTIRGLRNGDSACSAIKQIASGRFGVTPEYLRSGRQLEIKVAQGAKPGEGGQLPGPKVDPYIAWLRNSKAGVALISPPPHHDIYSIEDLAQLIHDLHQVHPAAKVSVKLVAEIGIGTIAAGVAKANADVIQISGHDGGTGASPLSSIKHAGTPWELGLTEVHRSLLTNGLRDRVLLRADGGLKTGWDVIIAALLGAEEFGFGSVAMIAEGCIMARVCHTNNCPVGVATQKEALRQRFTGLPEHVVNFFLYVAEEVRQLLSVLGVARLEDLIGRTELLQPRDVPLTKTRSLDLSCLIDPVADPADRSWLLHEHDAHGNGPILEDTLLADAAVMAAIEGHGTVERSLAIVNTDRSVGARLAGEIAARHGNRGFQGQLDLTFSGAAGQSFGAFLLQGMNVRLIGDANDYVGKGINGGRVTVVPQAGSRDPGSQVILGNTCLYGATGGELFALGRAGERFAVRNSGARAVVEGTGDHCCEYMTGGIVVVLGSTGRNVAAGMTGGVAFLLDESGGLADRLNPETVTLCDLTTPEQDELLRPLLEAHLQATGSTKAASILADWSSWKSRFKVLVPPSEKETVGLVEREAVAVG

SEQ ID NO: 22285 - protein, 353 aa, Cyanobium sp. PCC 7001
MQSTEPPANSRSDEPAAERAGEGVLLPVPDPAESARLLGDNPAAAAFRSGFVALIGRPNVGKSTLLNQLVGQKVAITSPVAQTTRNRLRAILTTPTAQLVLLDTPGIHKPHHLLGERLVKTARGAIGEVDVVLLLVDGSQRAGRGDGFIVELLRHCRAPVHVALNKHDLVSGDQAAALAQSYRDLLGGRGDVAMPERSEPLDWPLHPVSALTGEGTAELVEALSSDLPPGPHLYPADAVSDQPEQLLMAELIREQVLSHTREEVPHSVAVSIDRVVEDGPRTAVLATVLVERSSQKGILIGKGGRMLKTIGQGARLQMEKVFSGPVYLELFVKVVPGWRRSAARLAELGYRGD

SEQ ID NO: 22286 - protein, 572 aa, Cyanobium sp. PCC 7001
MPEPAAVPLPALAQRLLPSWLAAYQRPWLKPDLLAGLTTAAVVIPKALAFATIAGLPVQVGLTTALVPMLVYALLGTSRPLSVSTTTTLAILVGSELAVGSGGEASGAALATSAQLALLVGAMLIGAGVLRLGFLASFISESVLVGFKTGIGLVIVVDQLPKLLGVSIEKAGFFRDLAAVAAQVPAASLVTVALSGLLVLLLIVLQRRWPQLPAPLLVVAAAVVLSAALGLQQRGIAVIGAVAGGLPAFSLPPLGQSAQLWPAAVGIAVMSFTESAAAARAFRGPEEPPPNANRELLALGAANALGACFGAMAAGGGTSQTAVNRQAGARTQLAALVTAAAALATLLVLAPLIAVMPQAALAVVVVVYALPMIAPAEFLAIRRVRHAEFRWALVAFLGVVLLGTLKGILVAVILSLVALVQQEINPPVYAIGRKPGTDVFRPLSLRHSSDEAWPGLLLVRAEGRLFFANADGVAARIRRLIDQHRPRVVVLDGSALIDLEYTALKALTQAERQLQQKGIELWLAGLNPAVLAVVRRSELGQRLGRPRMRRNVERAVEHYLRTAGAGETAAGA

SEQ ID NO: 22287 - protein, 402 aa, Cyanobium sp. PCC 7001
MAPPLPPLYLDACATAPPAEEVLNAMASVHRRAWANPSSLHGFGLQAAEALERARLQAAGCLGCDPDCLVFTSGGTEAIHTALLGMAAAHPTGRLVITAVEHPATVAAAAALRQRGWQVAVVPVDRAGLVDLDRFEALLAPPTRLASVIWGQSEVGTVQPVQSIGELCRRAGVRLHVDAVQVVGHQPLAFNRLPVDLLSCAAHKLQGPRGVGALLVRPGVPFEPLLPGGGQESGRRGGTEPVALAAGFAAGLQLATERLQRQGGEDPLRPLRDALLHQLLQHPGLRLSGVDPFGDPAQRLPHHISLLVNDRRGRPVSGRRLVQALWRHGVAASSGSACSSGAGASAVAGMPSPVLSAMGYPPAEAASGVRLSLGPWLEPADLDAVPQRLTRALEALEGPPAG

SEQ ID NO: 22288 - protein, 379 aa, Cyanobium sp. PCC 7001
MIGYISDNLLLPILDFFYGLVPSYGLAIIALTVVIRLALFPLSAGSIRNARRMRIAQPVMQKRQAEIKSRYANNPQKQQEELGKLMKEFGSPLAGCLPLLVQMPILFALFATLRGSPFADVPYTLNLKVVPAEQAAAIETKPFNSASHSIFVTSTNHVPVIASLEAGNKLGVGSRETVSLHTKDGASFASVLDGVENGDAFSPSWSVTKGEGVVSVDQNGTITALSPGDATVEAKIPGLAARSGFLFIRALGQVGFMTDGSVNWDIAGLVGAFGATLFLSQILSGMGMPPNPQQSTANKITPVMITAMFLFFPLPAGVLLYMVVANIFQALQTFLLSREALPENLQAILDQQRAQQTVTVAAGPGGSGGRLPFEPKRKK

SEQ ID NO: 22289 - protein, 688 aa, Cyanobium sp. PCC 7001
MCGIGGIFHRQAQRPIDEQLLVNMAAIQVHRGPDGFGVRSLPGQGVGFCHARLSIIDLDANRGRQPFVSEDGQLLMAHNGEFYDFQAIRASLTAQGARFSSKSDSEILLRLYQRQGLEASLPLLRGEFAFALFDQGLDTLYLVRDRFGVKPQYWTLTDEGLVFGSELKVLFAHPGVQRRFSSEGLFHQLMQTMVPGTTAFEGVHQLRPGHVLTVQRRNGDFVIDDQPYWDVNFPRQGERDASRSEADHVAAVRQALLEAVEVRMVADVPVGCYLSGGIDSCSILGLAAAVSQNPVKAFTIGFDDSRYDETPIATAMAEATGADQLVMRLSGNELYGHLEETIWHTERTIYNTLAVAKFLMSREVNRSHYKVVMTGEGSDELFGGYPAFRRDMFLHGLAELPEADRQEWEQLLQEANQLVQGAMLAEEQVNDPALEAVVGFTPSCLQPWLACAPLVPDLLATEHRQACSGYAPGAAIAATLDPSQLEGRHALDRAQYVWIKTMLEGQILTWGGDRVDMAHAMEARPAFLDHHLAAVAVQVPPELRIKGKTEKYVLREAMRGLLPEQLYRREKFAFMAPPAHADEQKRAAMQSLADRYLSPSAIAEAGLLDAEGVAQLFARHDDPATSAATRVQLDAVINHLIGVQIMHQLFVAADLPAQARELADRLGWRLHREEEAQPAYALIGMSEG

SEQ ID NO: 22290 - protein, 331 aa, Cyanobium sp. PCC 7001
MLIPGLRRTGTQLSTLSEAGGIRQALMSSSPPIALLGTGLLGSAIGQRLLQRGLGLRVWNRHPERLQPLVALGAEACATAAEAVQPCRWVIAVLADGPACREVLLSAENLRWQGQRVVQMGTIAPETSRELAVALQRQGAAYLEAPVLGSRPEALTGTLQIMVAGDEQLFQEALPLLLALGPNPEWFGAIGSALDTKLALNQLIASLTHAFSLSLQLVQAAGVNVEQFMAVLRGSALHAPTFEKKLPRLLADDYRHPNFPTAHLRKDLLLFLASARQHGLDTMGLRCLADLLERARDTPLDQLDYSALHRLTGPVPPPADPAPPAAAPRSG

SEQ ID NO: 22291 - protein, 379 aa, Cyanobium sp. PCC 7001
MLAYLDHHASTPCDPAVQAAMEPWWSVHAANPSSRLHRPALEAAAAVERARGQVAQALDAAEATAVVFTSGATEANNLALKGVLEAALERGEPRQRLLTLATEHRAVLDPLRYLERHGFPLTVLPVQPDGLVDLEAFAAALGPEVLLAAVMAANNEIGVLQPLAAIAELCRARGVLLHVDAAQAAGHIPLAMADLGIDLLSVSGHKCYGPKGVGALLVRSGVAVAPQIHGGGQEGGLRAGTVAVPLVVGLGEALQRCCADQPERSGRLGALRDRLWQGLEPLGGMRCNGVGAPRLSHNLNITVGGVDGTALHRLLRRDLAVSSGSACSQGSPSHVLAALGLSRQEAAASVRFGLGRSTGEAEITRAIDAVRAAVDQLRG

SEQ ID NO: 22292 - protein, 107 aa, Cyanobium sp. PCC 7001
MDASVKQRIDALVSSSPIMVFMKGTKLMPQCGFSNNVVQILNALGVPFDTFDVLSDPEIRQGIKEYSEWPTIPQVYLKGEFIGGSDILIEMYNSGELREQLEVALAS

SEQ ID NO: 22293 - protein, 288 aa, Cyanobium sp. PCC 7001
MQHPSLFDTDGAIYMASRRDPAGCRVGLFGVPYDGTTSFRPGTRFGPAAIREVSSGLETYCPQLDRDLEDLAFADLGAVDIPFGAPEPVVAAVKRATQAVLGLGLKPLMLGGEHSISSGAVAAVAARHPDLVLVQLDAHADLRHTWLGAHHSHACAMRRCLEVLPSQRLLQIAIRSGTREEFSELRSSGRLVAIARMAEALRPLRGQPLYLTVDLDWFDPAVMAGTGTPEPGGFHWHHFAALVDELRHHELVAADVVELAPQLDPSGVSSVLAAKVVRSLLLLLGGTQ

SEQ ID NO: 22294 - protein, 271 aa, Cyanobium sp. PCC 7001
MIRPDAPVLLEIQDLHASVEDQPILKGVNLTIRAGEIHAVMGRNGSGKSTLSKVLAGHPAYTVTGGSVQYRGENLLDLDPEQRARVGLFLGFQYPVEIPGVSNLEFLRVSTNARRAERGEEELDTFAFEDLVKERLKVVQMDPAFLERSVNEGFSGGEKKRNEILQMALLEPVVAILDETDSGLDIDALRIVAGGVNHLASPDNATLLITHYQRLLGLITPDHVHVMAAGRILRSGGKELALELERTGYDWVDQEIARLDGSAERQPVEVG

SEQ ID NO: 22295 - protein, 253 aa, Cyanobium sp. PCC 7001
MMTASPTSPAKEKETILVVDDEASIRRILETRLSMIGYQVVTASDGMEALECFRESHPDLVVLDVMMPKLDGYGVCQELRKESDVPIVMLTALGDVADRITGLELGADDYVVKPFSPKELEARIRCVLRRVEKEQVAGIPNSGVITVGDLRIDTNKRQVYRGDERIRLTGMEFSLLELLVSRSGEPFSRGEILKEVWGYTPERHVDTRVVDVHISRLRSKLEDDPANPELILTARGTGYLFQRIVDPVAPEGA

SEQ ID NO: 22296 - protein, 301 aa, Cyanobium sp. PCC 7001
MAERIKFGEFVIFSLVLCGILYPISGSWQWNFPDDAGVGGGWLATLGFIDFAGSTVVHSFGAWAGLIGAMLLGPRIGKFVEGKPQAIPGHNLSIATLGCLILWIGWYGFNPGSVLAMNETVPYVAVTTTLGAAGGGIAATLMSQFTGGKPDLTMTINGILAGLVAVTAGCDGFSMPAAWVVGFIGGVLVVLSVAFIDGLKIDDPVGAFSVHGTCGIWGTLAVGLFNMDKGLLTGNGPAQLGIQIVGILAFAVFAIVASLITWSIIGAIFGGIRVTEKEEIEGLDIGEHGMEAYPDFAASAK

SEQ ID NO: 22297 - protein, 346 aa, Cyanobium sp. PCC 7001
MQFIDQARIAVKGGRGGDGIVAFRREKYVPAGGPAGGDGGRGGDVLLLADANLQTLLDFKYRRLFQAVDGRRGGPNRCTGASGDHLVIRVPCGTEVRDARTGILLGDLTAPGDELLVAAGGRGGLGNAHYLSNRNRAPEKFTEGKEGEEWTLQLELKLLAEVGIIGLPNAGKSTLISVLSAARPKIADYPFTTLVPNLGVVRRPSGDGTVFADIPGLIAGAAQGAGLGHDFLRHIERTRLLIHLLDAASPTLLEDLAVVERELSAYGHGLAQRPRLVVLNKIELLQPEDLAQALEAVEAAVDPGSRSVLAISAAASRNLDALLNLVWQELEAAKPAQPLGAPLGLG

SEQ ID NO: 22298 - protein, 610 aa, Cyanobium sp. PCC 7001
MTEPISGTASVCSESLADPSLSASAVGDPSQSLPSASPESGPQADAPTGGFAGFGFGPEILEALAAIGYSEPSPIQKAAIPELMLGRDLVGQAQTGTGKTAAFALPLLAGLDAEQRKPQVLVLAPTRELALQVAESFNSYAAQLPQVRTVAVYGGADFRDQIHHLRRGAQVVVGTPGRVMDHMRQGTLDLSELRSLVLDEADEMLRMGFIDDVEWVLGQLPEQRQVVLFSATMPAEIRRISQQYLNGPAEITIRTKAADASRIRQRFLTVPAPLKLAALERVLESETSEGVIIFARTKAITLTVAESLEAHGYDVAVLNGDVPQAQRERTIERLKNGQVDVLVATDVAARGLDVERIGLVINYDIPFDGEAYVHRIGRTGRAGRSGEAILFLTPRERRFLGGLERAAGKPIEPMEVPSNATINQNRLDRLRQRLTNALHKSAVSPEEQALLSEIVQRVAQEQTCTPEQLALAALELSLGGKPLLLHGNDDFTQVRSQGPNRRDGRESRDGRDFGNREPRRGRSERPVGAPEPDMERFRVELGWRDRIKPGNLVGAIANETGLQGRAIGRIQIFDTHSIIDLPKGMPEDIFQGLRNLRVLNKPLQISRFRG

SEQ ID NO: 22299 - protein, 644 aa, Cyanobium sp. PCC 7001
MNQRWRLIVLWLLPLAVVAFLGWQILSSGGIGNLSPKGPTTAPRNAAVARMSYGRFLDYVDAGRVTAVDIFDGGRSAVIEAVDPELDNRVQRLRVDLPGVAPELVNKLKDQGISFDVHPPRQAPPVLGILGNLLFPLLLIGSLIFLARRSSGMPGGPGQAMQFGKTKARFAMEAETGVKFDDVAGVEEAKQDLEEVVTFLKTPERFTSVGARIPKGVLLVGPPGTGKTLLAKAIAGEAGVPFFSLSGSEFVEMFVGVGASRVRDLFKRAKENSPCLIFIDEIDAVGRQRGAGVGGGNDEREQTLNQLLTEMDGFEGNSGIIIIAATNRADVLDSALLRPGRFDRQVQVDVPDIKGRLSILKVHSRNKKLAEDVSLETIARRTPGFSGADLANLLNEAAILTARRRKEATTLAEIDDAVDRVIAGMEGKPLTDGRSKRLIAYHEVGHALVGTLVKAHDPVQKVTLIPRGQAQGLTWFSPDEEQMLVSKAQLRARIMGALGGRAAEEVVFGHAEVTTGAGGDIQQVASIARQMVTRFGMSDLGQFSLEAGNQEVFLGRDLMTRSDGSDRMASRIDDAVRQIVQTCYEDTVRLVAEHRTCMDRVVELLIEKESLDGDEFRALVSEFTTIPEKERFSPLLTEAAFPAA

SEQ ID NO: 22300 - protein, 225 aa, Cyanobium sp. PCC 7001
MVSGIGSAGQNTQTLLEVIRSLSGSSIETIERSKTIFFPGDPAERVYLLRRGAVRLSRVYESGEEITVALLRENSLFGVLSLLTGQRSDRFYHAIAFTRVELLSAPASSVRKAIEQDASVGLLLLQGLSSRILQTETMIETLTHRDMSSRLVSFLLVLCRDFGVPGTEGITIDLRLSHQAIAEAIGSTRVTITRLLGDLRNEGLVQIDRKKITVFDPIALAKRFS

SEQ ID NO: 22301 - protein, 433 aa, Cyanobium sp. PCC 7001
MVATAATTSASHDISAMASGNSLPTAKPVLMGAGGSGQPQPRCGADLLSQRARALRPSLTLGIAARAKQLKAEGRDICSLSAGEPDFDTPAFIRQAATAALEAGHTRYGPAAGEPALRDAIAAKLSLENGVPTSREQVVVTNGGKQALYNLFQVLLDPGDTVLLPAPYWLSYPEIARLAGASVTLLPCEASRGFRLDADQLERAITPATKLLVLNSPSNPTGIVLSRRELEAVAAVLRRHPHVAVVCDEIYEFLLAPGHQHHSLAAVAPDLAGRVFTVNGFAKGWAMTGWRIGWLTGAEPVMAAAAALQSQSTSNVCSFAQYGAVAALEGSRDCVRAMAGEFNHRRALLSAGLQAIPGVALPTPEGAFYAFPDVSAYGLDSMTLCERLIDEVGLAVVPGVAFGDDRCIRLSCAAAPPTIEDGLARLGRFLASL

SEQ ID NO: 22302 - protein, 523 aa, Cyanobium sp. PCC 7001
MSSAPIPAPAADDSAAGLSKVEQAKADLCGLELRPRLAELAGEGWESLDEATLTIRLKWLGIFFRPVTPGRFMLRLRLANGVINADQLELLAEAVDRCGDYGSADITTRQNLQLRGLLFEDMPPLLEAMERLGLTSRQSGHDNPRNITGNPLAGIDPEEIVDTRPLVQAIQARLFQADGPRNLPRKFNVAVGGAPDSFLLHNDLAFLPAHHNGRLGFTVMVGGFFSAQRNELAIPLGLWLEADQLPDFSLAVLLHFERSGNRQQRNKSRLMYLIDALGLEAYRDAVLGLYGELAGPEALARVQPHDGGHLVNRAPRDGLGWNPQKQEGLAWMGLHVPMGRLDAPTMFDLADLARRFGSGELRLTEAQNVLIPGVPVGQRQELEGEPLLQRFRPAPGPLQAEAVSCTGNAYCSFALIPTKGTAQALVEELERRVELPHAVRTHWTGCPNACGQPYMGQIGLMGAKTRKDGQMVEAAKIFLGGSMGAEPRLAELHDKGVPLDELPDVIEQLLVERFGARRKAAAA

SEQ ID NO: 22303 - protein, 383 aa, Cyanobium sp. PCC 7001
MASQASAPPLTAPMASIGVPREIKRDERRVALTPDGVRELVSQGMEVRVEAGAGLGAGIADTDFTAAGARLVDQEEAWAAHLVVKVKEPQPEEFGFLRSDLVLFTYLHLAAYPDVGRALLEAGTTSLAYETVQLEDTSLPLLAPMSEIAGRLAAQVGAHLLEQPHGGRGILMGGCTGVRPARVVVLGAGTVGWNAARIAAAMDAEVFLLDRSPQRLRQLEADRRGRLVNLVSSRSLVERLVPGADLVIGAVLTPGGRAPTLVEEALVETMKPGSVIVDVAIDQGGCIATSRETTHTEPVHAVHGVQHYAVGNMPGAVPFTSTEALVSVTLPYILVMAGRGLAEAVTDRPELLSGLNTVDGAVCHPGVAKALGVAPRHPMACLR

SEQ ID NO: 22304 - protein, 396 aa, Cyanobium sp. PCC 7001
MVSPSGAEGAFDRQHPGEGFRALEKERQLPLTGWQQEVDQAHRFGLEAAESIIDRRISTFSRGELPHYAGINTFMKAPYIEDVNRVGEFDVAVLGVPHDSGTTYRPGTRFGPQGIRRISALYTPYNYEMGVDLREQIKLCDVGDIFTIPANNEKSFDQISKGVAHVFSSGAFPIILGGDHSIGFPTVRGVCRHLGDKKVGIIHFDRHVDTQEIDLDERMHTCPWFHATNMANAPAQNLVQLGIGGWQVPREGVKVCRERGTNVLTVTDICEMGLEAAAKFAIERATDGTDCVYISFDIDCIDAGFVPGTGWPEPGGLLPREALKLLELIVRNVPVCGLEVVEVSPPYDISDMTSLMATRVICDTMAHLVVSGQLPRKAKPGWISDICNMHVDQAWR

SEQ ID NO: 22305 - protein, 281 aa, Cyanobium sp. PCC 7001
MIAAGGKKAHVSIKNLLLRGFYSGSALGLALCLALTIMHQTGLPWIGSLIFPFGFASIVLFGMELVTGNFALLPMAVWAGKTTWGKTFRNWMWVWIGNFLGTGLVGILFAISLTSGGTADLATGTGDWVAVANKIIGLNKANTIVKYQNLGALGFFLAFLRGLIANWLVCLGVTLALVSKSVPGKILACWLPITAFQALGMEHIVVNMFLHTTGPLLGSGVSLGTVVFWNYLPVTAGNIVGGMVFIGMLFYSTHRSTMSDVLPPVHDEKLERELAAELGAR

SEQ ID NO: 22306 - protein, 386 aa, Cyanobium sp. PCC 7001
MSTSTLAALIAPHGGTLVDLMVAEADREAVRASAGRAVECSDRNACDVELLVVGGFSPLRGFMHEEDYDAVVAGHRTTSGLLFGLPIVFDTDDETIAIGDRLLLTYRGQDLAVLTVESKWEPDKAREAQGCYGTTSIEHPAVRMISGERGRFYLGGQVQGLALPERVFPCKTPAEVRATLPAGQSVVAFQCRNPIHRAHYELFTRALDAANVSDQAVVLVHPTCGPTQDDDIAGAVRFQTYERLAAEVNNPRIRWAYLPYSMHMAGPREALQHMIIRKNYGCTHFIIGRDMAGCKSSLTGSDFYGPYQAQDFARDNAPELGMETVPSLNLVYTEEEGYVTAEHAEARGLHVRKLSGTQFRQMLRGGEEIPEWFAFRSVVEVLRAAA

SEQ ID NO: 22307 - protein, 379 aa, marine gamma proteobacterium HTCC2148
MRSKLPDVGTTIFTRMSALAKECDAMNLSQGYPDFEAPQALREALAKAVMDGHNQYAPMAGLPALRDQLALQLKIHRGVDCNPDTEITVVPGATEGIFCAIMASVGHGDEVIVLDPCYDSYEPAIKLAGAAAVHVALEAHSFRVDWNAVAGAITPRTRMIVVNSPHNPTGATFSHDDLISLQQLVQQHDLLVCSDEVYEHLVYDGRQHHSVLQYPQLRERSFAHFSFGKTFSVTGWKTGYCVAPPALTAELRKVHQFVAFVAVTPVQQAVADFLATDPQYPATLANFYQQKRDLFCHALSSSRFRVSASGGTYFQLLDYSELSDLPDHQLCEDWTRKLGIASIPISVFYDSPPQQHYLRFCFAKSDTTLAKAAEVLCKI

SEQ ID NO: 22308 - protein, 413 aa, marine gamma proteobacterium HTCC2148
MSLIVQKFGGTSVGSIERIEQVADKVAGFRAGGHSIVVVVSAMSGETNRLIELASEIQEHPTPREMDVLVSTGEQVTTALLAMALNKRGVKAKSYNGSQVRILTDDAHTKARIKEIDDARLHADLKEGFVIVVAGFQGVDEHGNITTLGRGGSDTTAVALAAALKASECQIYTDVDGVYTTDPRVVDGARRLDKITFEEMLEMASMGSKVLQIRAVEFAGKYNVPLRVLHSFQEGPGTLITLEDDAEMETPTIAGIAFNRDEAKLTILGVPDMPGVAHHILGPIGEANIEVDVIVQNVADDNTTDFTFTVGRNDLPRAEEVLKKVAEEIKALEVRSDNKIAKVSVVGVGMRSHAGVASQMFAALAEVGINIQMITTSEIKISVIIEEKFLELAVRALHSSFELEEEPNDENAN

SEQ ID NO: 22309 - protein, 308 aa, marine gamma proteobacterium HTCC2148
MEAEAVSALTGRIGADFERACQLLLACRGRVIVTGMGKSGHIGCKIAATLASTGTPAFFVHPGEASHGDMGMITREDAIIALSNSGEVAEVVTLLPLLKRLGSPVIALTGNPHSTLALAADAHLNTGVETEACPLDLAPTSSTTTALVMGDALAIALLEQRGFTAEDFAFSHPGGTLGKKLLLKVQDVMQTGDSVPSVDAATPLSQALLEISNKGLGMTTVTNADGRLAGIFTDGDLRRTLDQQIDINNTPIASLMSTGTKTANPQMLAAEALRIMEEHEITSLVVLDDSGETRGIIHLMHLLHAGIA

SEQ ID NO: 22310 - protein, 502 aa, marine gamma proteobacterium HTCC2148
MDANLDKTNFTATLFVIFLVSVPLVLNPEGGAALVQQSYAFIATNFGWLYALAGIGAILVLAWLAFGRYGKVRLGAADETPEYSTYSWIAMLFCAGVGAGLMYWSAIEWAYYYDGPPFGAEPHSVEAAKWASSYGIFHWGFTAWAFYCLPTLAIAYPFYAQKVPVLKYSVGCHYWLEGKEESLPARAMDFLFMIAMIGGAGSSLGFSTPLIAALISRLTGIETGFGLEVGVVLLCVIIFATSVYLGLERGIKRLSDINMFVALVLLAFVFVAGPSLFIVKTSLNSIGTVIQNYVAMSFWTDPFTESRFFEDWTVFYWAWWIAYGPFVGMFVTRISRGRTIRQVIGGMLLYGTLGGALFYMVLGNFSLGLQMSGELDVLAVMAQSDGNQAIVASFDQLPLAGLAIGLFCFVSIIFAATTYDSASYILASSASHRLHPSEDPPRWHRSFWAVALAILPLTLMYIGGIKVAQTSVLVASLPILLTGVLSTIALIKSLQRDHSAQE

SEQ ID NO: 22311 - protein, 404 aa, marine gamma proteobacterium HTCC2148
MQKPIYFDYLATTPVDPRVVEKMVHCLSVEGNFGNPASRSHLYGWKAEEAVENARRQVADLLNADPREVVWTSGATESDNLAIKGVAHFYQKRGKHIITSKIEHKAVLDTCRQLEREGYEVTYLDPNKQGLVTPEAVAEALREDTVLVSIMHANNEIGTVNDIAGIGEVTRNAGVLFHVDAAQSAGKVELDMEAMKVDLMSLSGHKMYGPKGVGVLFVRRKPRVRLEAQMHGGGHERGMRSGTLATHQIVGMGEAAHVANEGMADEAVRLKALRQRFWDGIKDIEEVHVNGDMDQRLPGAINVSIAFVEGESLIMSLKDLAISSGSACTSASLEPSYVLRALGLNDELAHSSLRFSFGRFTTEEDVDVAVAQLRGAVGKLRELSPLWDMYQDGVDLSTIEWAAH

SEQ ID NO: 22312 - protein, 429 aa, marine gamma proteobacterium HTCC2148
MLFKDLGLSAELLRAVETQGYDEATPIQQQAIPLVLKGKDVLAGAQTGTGKTAGFTLPVLQRLQSSHAEGQKRHPRVLVLTPTRELAAQVHESVRDYGRFLPFRSAVIFGGVSINPQKQKLIKGVDVVVATPGRLLDHLQQRSIDLSKVEVLVLDEADRMLDMGFIRDIRKVLNAIPKKRQTLLFSATFSKEIKSLAAEFLHQPTEIQVTPQNTAAELVSQIVYPVDKKRKRELLSQKIGEENWQQVLVFTRTKHGANKLSEQLGKDGITSAAIHGNKSQGARTKALANFKQGSVRVLVATDIAARGIDIDKLPHVVNFELPNVAEDYVHRIGRTARAGQEGHAVSLVCVDELKLLSDIEKLLGTSIEKVNLPGYDVDPSIKAEPIQNGRGGRSSGGHRNNGGGSRGRGRSGNNGGSRAHSGGGNRRNG

SEQ ID NO: 22313 - protein, 613 aa, marine gamma proteobacterium HTCC2148
MASARKQATSAATNKASDWQLYGRLLRYVLPYWWVFALSLVGYMVYSLGNVLLADMMQFLLDALNKSEAADSGLVSRVAYRFFYEEGMDKLEFTRIAFPISLVILAFIRSMGFFVGTYFMNHVARNLIHTLRCELFDKMLVAPSAYYDSHSQGVLISKITFNVEQVSGAVTKALKIIVREGLTVMALLSYMLYLNWRLCLVFLAVAPAIALVVSVVGKHFRRYSRRIQASMGDVTQVSNESIGAYREVRIFGGQRQQSRRFFTASEYNRAQSLKLALLDALSTPVIQTLLALSLAALVWFALKPSLLADFSAGSLVAFLTAAGQLGKPIRSLSGVQAVIQRGLAAAEDIFAQLDQEEELDHGELDVSRVTGEISFQDLNFAYPGSETRVLQDVCLDIQAGETIALVGRSGSGKSTIVQLLARFYSPSSGRILLDGRPIEDYTLASLRKQLALVSQNVTLFHDTVFNNIAYGTLAESGPQAVEQALESAYAKDFIAQMPEGMNTMLGDDGGGLSGGQRQRIAIARAFLKDAPVIVLDEATSALDNESEHRIQKSLDTISRDRTTIIIAHRLSTVERADRIIVMDAGRIVASGTHEELLAGEGIYAQLYHQEFSD

SEQ ID NO: 22314 - protein, 517 aa, marine gamma proteobacterium HTCC2148
MTNDTALAVQDPADTSSQPGVDWLTFALSGGFLVLFVAVALIDIDSLSSYVGIAFGWSTRLFGAYWQLLLLVTFFIGLALAISRAGKVQLGGLDVPEVSSFKWVSMILCTLLAGGGVFFAAAEPMSHFVSPPPFYDVTPASNEAVYPALAQSFLHWGFLAWAILGSLTTIVLMHLHYDRGLPLKPRTLLYPVFGDRAINSWLGSVVDAACVISVVAGTVGPIGFLGLQVSYGLSQLLGTADNYGAQFSIILALIVVYTVSTVTGIQRGIQILSKLNIQIAVGLMLFVLLAGPTAFIFSSYLKSSLLHLQAFVPMALFRADHQWLDSWTVFFWGWFLGYGPLMAMFIARISRGRSIREMVVAISIISPIITTFWFTIVGGSGLAFELANPGVISEPFAGSNMPAALLAITQQLPFGAIITTAFLVLTFLFVATTGDSMTYTISIVMTGDDHPPIALRVFWGIIMGVVAMILVSIGSGGISALQSFIVVTAVPVSLILLPSLWAAPKIAYALAREQNLR

SEQ ID NO: 22315 - protein, 552 aa, marine gamma proteobacterium HTCC2148
MENTPISNFLQTIISDDLAEGRVAEVVTRFPPEPNGYLHIGHAKSISVNFGLAQANGGRCNLRFDDTNPEKESQEFIESIQADVKWLGYEWSGEVRYASTYFQQLYDWAVFLVEQGKAYVCDLNAEEARLYRGTLTEAGKNSPSRDRSVEENLDLLERMRAGEFDEGAKVLRAKIDMASPNMNMRDPILYRIRKVTHHQTGNDWVIYPTYDFAHGQEDAIEGVTHSICTLEFEDHRPLYDWFIESLPVNSRPHQYEFGRLNPSYTITSKRKLKQLVDEDVVIGWDDPRMPTVSGMRRRGYSPTAIRKFCDMIGTTRSDGVVDVAMLEFAIREDLNENAPRAMAVLNPLKVVLTDYPVEQVEELVTPCHPSREDLGERMLPFTRELYIDADDFREEANKKYKRLVLGKRVRLRNAYVIEADEAIKDEAGNIIEIHAHTIPNTLGENPEDGIKPKGVIQWVSAAHGERAELRIYDRLFNHESPDKGDNDFMDHLNPESLSLVKAAWVEPSLKSAVPEQRFQFEREGYFVADRYDHSSERLVFNKTIGLRDTWNG

SEQ ID NO: 22316 - protein, 407 aa, marine gamma proteobacterium HTCC2148
MDMTIVFGVAMFTAIVLALVAIILFARSALVSSGNVSIEINGEKTITVPAGGKLLQTLSESGLFLPSACGGGGTCAQCKCIINDGGGSMLPTEEGHFTKRDAAEGWRLSCQTAVKQDMKIEVPEEVFGVKQWECTVESNPNVATFIKELTLKLPEGEHVDFRAGGYVQLECPAHHVKYSDFDIEEEYRGDWEHFNFFKHESVVKEDVIRAYSMANYPEEKGVVKFNIRIATPPPGSEGIPAGQMSSWVFNLKPGDKVKVYGPFGEFFAKDTDAEMVFIGGGAGMAPMRSHLFDQLKRVHSDRKISFWYGARSLREMFYVEDYDMLARDNENFDWHVALSDPQPEDHWDGLTGFIHNVLFEEYLKNHPAPEDCEYYMCGPPMMNAAVIQMLIDLGVEPENIMLDDFGG

SEQ ID NO: 22317 - protein, 551 aa, marine gamma proteobacterium HTCC2148
MYVYDEYDQKIVDERVSQYRDQTLRYLDGKLSEEQFLPLRLQNGLYVQRLAPMLRVAVPYGLLNSHQLRKVAQLSRDYDKGYVHISTRQNIQFNWPALAEVPDMLAELATVQMHAIQTSGNCIRNTTTDQYAGVATDELEDPRPWCEIIRQWSTLHPEFAFLPRKFKIAVCGSDEDRAAIHAHDIGIELVRNNEGESGLRILVGGGLGRTPVIGVEICDFLEPSHLLTYLEAILRVYNQHGRRDNKYKARIKILVKAMGIAAFREAVEQEWKSLKGGASTLTQNEIDRAKSFFTEPAYAKLDAAETAATLNSQCKTDLIFANWVKRNTVAHRVSGYRIVNISLKATGYAPGDITDKQLELIADLADKYSFGEVRSTHQQNLVLADVEQTQLKDLWHSLQKAGLATANIGYLTDMICCPGGDYCSLANAKSIPVAEAIQSRFDDMDYVYDLGPLELNVSGCMNACGHHHIGHIGILGVDKKGQEFYQVSLGGHQGKDASIGKILGPSFKQDDMPEVIDKLLTTFVGLRQQEETFLETYRRVGIGPFKERVYA

SEQ ID NO: 22318 - protein, 540 aa, marine gamma proteobacterium HTCC2148
MNAEIEIAIEESGFYLGFNKVVAIGSKVIIATLVIWAAVFPQEAGAILGEIKTWSFARFGAWYMYVVAFFLATCTLLAVIPATGSIKLGQPDEQPEFSRFSWISMMFGAGIGIGMLTFATAEPLYHFSVNPDTILGYAQSESANNVRHAFKWSFLHWGLSAWGAYALVGLSMAFFSFNRGLPLTIRSGLAPLFGRSLNGGLGHAVDITAVIATILGVAVTIGFGVSQFAAGMYEISGAPWLMDSNGSPTNTGMLIALCVIMTASTLSALSGVSRGIKWLSNLNMWLSFTLLAFLLVFGGTSLAFKSLLIGIWDYMINLPSMLLTYWAPATADPAAELYHWQSTSWTVFYWAWWIAFAPFVGLFLARISRGRSIREFIVGAMLAPSLMCFIWITFAGGTAIDLELNGSAGGAILSAGQESQLFATLKLMLSDGLMPIMSSLVVLLLLTYLVTSADSAVLIVNTINSGGDESQKGHVHIVIWGVALTLVIAVLLIAGGMEALRTSMLVGALPFSLIMGLMGLALIKALIEDAFRNRDQKAND

SEQ ID NO: 22319 - protein, 315 aa, marine gamma proteobacterium HTCC2148
MAKELTDLAITRKSLYGMTEEPTYSGITSFLRRRYTRDLTGVDVAVTGVPYDLATTNRPGTRLGPRGIRAASTIMAWGDAVDGWNFDPFKDLAVVDVGDCNFDPGRPEQVPEAIYQHARDILNEDVALLSLGGDHFISYPLLRAHAEKHGPLSLIHFDAHCDTWEDEEGRIDHGTMFYHAAKEGIVDAAHSVQVGMRTFNVDSHGYQVYDADWVHENGAKATIDVIKETVGNRPCYLTFDIDCLDPAFAPGTGTPVIGGLSTQQARKILRGLAGINIVGMDLVEVAPAYDVSEITALAGATLALDMLCLYAKRPT

SEQ ID NO: 22320 - protein, 396 aa, marine gamma proteobacterium HTCC2148
MNSSFEAHFSAMSTRLEGDDSPVWAVHDEALERQSNGEDVYLLSVGDPDLATLPTTIRAAIDSLEKGRTHYAPGRGELGLREIIADIELRASGKPCDPDEVVIYPGATNAIYSVLACLLDTGDDIVVMEPMYVGYDGIFKSLALNKIGVPLDVDSGFTFDLASVKAAVTDTTRLVFINTPGNPAGNIIPAAKLQELAAFCLERNIWLVCDEVYSMITFDGEHISLRKAAQSLDNVIIVDGMSKSHAMTGWRLGWTVAPKKVADRLLAFTSSTIFGCCQFVQDAAAHALVNDEEYINGVREEYRQRRNYVCERVGGILGLSCDVPAAGMFVMIHVDLAGTDGLAFAENLLAEQGVSVLPGIGFGDCTEHYVRVSLAQPITTLRPAFDRIEAYCERQA

SEQ ID NO: 22321 - protein, 291 aa, marine gamma proteobacterium HTCC2148
MTAQNVGFIGLGDIGKPMATRLISEAFKLHVYDLLQPVVDELVEQGAEACQSVAEVAAQCMHIGICVRDDRQVEALLYGAEGILANAANGTVIAVHSTVTQSKLLQWAEDAHHSGLYLLDAPITGGARRAADGTLCYMVGGDEAVIDRCRSIFATSAEKVVHAGDLGAGIALKLCNNFIQYAEFVAMAEATRLAEASGLSVDVLREVGLSNGVINEQMHLFVSGRNNLALSCSEEQMADIFGPLGALGQKDLQCVLDSAGDHGIALPTAEFLRERIVDVFLARDESRPAVK

SEQ ID NO: 22322 - protein, 283 aa, marine gamma proteobacterium HTCC2148
MGGPMAKNLIKAGHEVTVFDLMPAACADLQQSGAAVAASAAEAVAGKEYVISMLPAGKHVAATYLGDDGLLARLDASTTVLDCSTIDAETARTVGEAASAAGIGFMDSPVSGGVAAAAAGTLAFMCGGSAEAFARAKIILADMGKNIFHAGPAGAGQVAKGCNNMLLAIHMIGSCEALEMGARNGLDPAVLSEIMLASSGRNWSLEVYNPYPGVMENAPASNDYKPGFMVDLMAKDLGLALGIAEQSGVDNRMGKLAQSLYEQHQQDGNGQRDFSSILEQLQD

SEQ ID NO: 22323 - protein, 145 aa, marine gamma proteobacterium HTCC2148
MNFFGKIVISVLAATAAWALLTFVTVAQPALVFLVLVIATLATAFLVTIPVSKAAVTASKPSNGSSKKQTTKASVTEGPREEGEVKWFNVSKGFGFITKDDGEEIFVHFRSIIGEGRRGLKDGQRVSFVEANTDKGPQAENVEPL

SEQ ID NO: 22324 - protein, 299 aa, marine gamma proteobacterium HTCC2148
MASQSKRCGYVAIVGRPNVGKSTLLNHILGQKISITSRKPQTTRHQVLGIKTENDSQVIFVDTPGLHKAEEKAINRYMNRAASSAIKHVDLILFLIDRTAWTEEDQMVLEQVQRTRIPTLLVVNKVDLLEDKNILLPHLQELADRGEFEAIVPVSALRQRNVDMLEQEILKYMPESEHFYPEDQITDRSQRFLAAEIVREKITRQLGDELPYSVAVEIEEFGLDNEIAHISALILVEREGQKRIIIGEKGTRLRSIGTEARVDMERLFDCKVMLRLWVKVKSGWSDDERALRSLGYDDT

SEQ ID NO: 22325 - protein, 70 aa, marine gamma proteobacterium HTCC2148
MSDRVSGTVKWFNNAKGFGFITREEEDADVFVHFRSIEGDGYRTLNEGQEVEFSLIEGPKGLQAEDVHKV

SEQ ID NO: 22326 - protein, 467 aa, marine gamma proteobacterium HTCC2148
MAKSFRSIGLARECESPENPGALEKRVALTPEDVAALVATGAEVAVEHHAGEGVGFSDEEYRAAGALLQSEDSIYRNKDLLIKFKGPSMASIEKMQPGTTLFCMAHFHSYPQRAALLQERRINVIAMEEVLESPRVQTNTRILGRMAMNKALTPFIENNTIGGTRVRVLDWTPRLDSAIRRAGNRDPRSLDVLQGNSKHDELTALGSEALYFYDSASFQDNNDILPRLQASGCHLFDMHEFEQNEGEDAIATYRAAHPPLEMGLRRIQCLHETGRAGARYGLELLRKNKPDLDLRYARVAVLGYGNVGQGAIHEAYAQGVGCVHVLGRTHTVKGRIDYWLRNADLVVNGAEQSPALRGINFLISNQQLQQLIPNGSVIIDLVGGSETNRSPVEPVINCSFLTDPHFVQDGVTVSALWGWPMMGMMRETAIRYSDQIRDVLLGPERLVDGLDTLTPGVARALVCGPFQ

SEQ ID NO: 22327 - protein, 462 aa, marine gamma proteobacterium HTCC2148
MLTTLIVYKVVLILIGFWAQRRVNSEQDFFLAGRQLGPWVAAISYAASAASAWTLLGMSGLAYSIGFSALWVALGAVLGCAASWFVLAPRIMREGEQQSLLSATELIAGNTQGTERNRLIALVSLIILFCFVVYIASQFQGAGNTFASTFNLDASQSILLGGSIILIYTLLGGFWAVSITDTLQGMLMIFTAILLPAAAVLHLGGPAQFYQALLATDSSNFAAPLGGNVGLIAAGTIAGSLSVGLSSLGQPHLVARFLALRDERALKQGQLIATAWYTVVFFGMCVVGFAGKVLLPELENSEQVFFALNSALFPSVVAAVLLAAVLSAIMSTADSMLLVTGTTVAHDLGLTRHYPQHALLASRLTIAVISLLAMAVAIYLPSTIFQRVLFAWVAIGSALGPAIVCHALGASIPAGRLLPAVGCGFLAAVVCYLLPNTPGDILERTGPFMLGLAILLLGRPRG

SEQ ID NO: 22328 - protein, 435 aa, marine gamma proteobacterium HTCC2148
MTFDQLGLSSALLRAIEKKGYSEPSPIQAKAIPAVLSGKDVMAAAQTGTGKTAAFTLPILQRLNASAPIKPHRIRALILTPTRELAAQVAQSVSTYGLHTPLKSAVVFGGVKINSQIAQLRRGVDILIATPGRLLDLHGQGEVDFGELEILVLDEADRMLDMGFIHDIRRILKLLPAERQNLLFSATFAAEIRELTKKFLQDPIEVEVASRNATADKVEQWVYPVDKKRKGALLRELVEEKCWTQVLVFSRTKHGANRLAQQLDKAGIEATAIHGNKSQGARTRALEDFKSGRLRVLVATDIAARGLDIAQLPQVVNFDLPNVAQDYVHRIGRTGRAGASGKAYSLVCADEIKQLNDIEQLIQRHLPREYIDGFEPEHEVPASAPLRKPRQPGRRPPKHSGGGSNAGKHTAKGRAGEGHKRPRRRRPRAGSGNRA

SEQ ID NO: 22329 - protein, 201 aa, marine gamma proteobacterium HTCC2148
MGLLSPILQTLENSLVLNGLVWDHSDLPQAAVLVMLSDEAEPRVLLGRRAKHLKNHPGEIAFPGGKREPEDLTPWVTARREAWEEVGVREELVHALGELSPLVTRTGFEVHPCIARVPAQLELKIDYGEFDSLFTQPLSCFADVDLFRLERMQVNGAERMVPHYQMNDDNIWGVTAAVLAMMANIAYDAGLDLQRDWNARP

SEQ ID NO: 22330 - protein, 394 aa, marine gamma proteobacterium HTCC2148
MSEESVVIVNGARTPMGGLMGSLSAVPATELASTAVAATIERSGIDAGSIDEVFMGCVLPAGLKQCPARQAAIGAGIPVSAGAVTVNKACGSGMQATIFAFDSIMAGNNKLVIAGGMESMSNAPHLLPPGARGGLRNGHGKLLDHMFIDGLEDAYTGRAMGSFAQETADERGLTREQMDAFAVESLNRAKRAIEEGALKAEIAPVTIHTRKGEVLIEDDEQPHKAAVDKIPSLRPVFAKDGTITAANASSISDGASALMLMAGSEATGHGVESMATIVGHSRHSQAPGEFTIAPIGAIKKLLKKTGWSIDDVDLFEINEAFAMVTMLAIDDLGLDHAKVNIHGGACAQGHPIGSTGSRIIVSLMYALKKLGKKRGIAALCIGGGEATAVAIELN

SEQ ID NO: 22331 - protein, 459 aa, marine gamma proteobacterium HTCC2148
MADAPFSSLPLPKDQLDNLISLGYASMTGIQAASLPLAFKGKDLIAQAKTGSGKTAAFSLPLLDKLNPRDFGTQALVLCPTRELATQVSGEIRRLARYRQNIKVVTLCGGQSIGPQIGSLEHGAHIVVGTPGRISDHLRKKTLNLTRVDTLVLDEADRMLEMGFVEDISSIIEQTPAARQTLLFSATYPDDIEALSARFQKQPERISVETMHNDQQIDQQFFVCQKSARLDGLVTLLNHFAPQTAVVFCNTKQLVRDVTAHLDESGIRALALHGDMEQRDRDQVLIQFRQQSCSVLVATDVAARGLDIDDLPVVVNFELPRETEVYVHRVGRTGRAGKAGLALSLFADSEQYKLEKIRQLLQQEPETKPIDSISVRGERMPPPPYATLCIAGGRKHKVRPGDILGALTGEAGIAGSTVGKINVMDFAAYVAVETSVADKALGRLLNGKIKGRKFKVRRL

SEQ ID NO: 22332 - protein, 372 aa, marine gamma proteobacterium HTCC2148
MLVGVPKEIKTLEFRVGLTTGSAEELVHHGHQVIVQSGAGEGIGLSDQMYRDAGAEIVVTAEEIFERSDMVVKVKEPQPNECKMLREGQVLFTYLHLAPDPEQTKLLKDSGCIAIAYETVTDDNGHLPLLSPMSEVAGRMSIQAGAHALEKHKGGSGMLLGGVPGVEAARVVVIGGGVVGTNAIRMAMGMEAHVTVLDRSLDRLKELDFQFGCMLNTIYSTREALWKHVTTADLVIGAVLVPGAAAPKLVTREMLAAMRPGSVVVDVAIDQGGCFETSRATTHSDPTYVEEGVVHYCVANMPGGVARTSTFALNNATLPYTLALADKGYKQALTDDVHLRRGLNVHCGDITYQAVADVLGYDYVPTENILGL

SEQ ID NO: 22333 - protein, 323 aa, marine gamma proteobacterium HTCC2148
MTKKVFVTHQLPGARIHDLSRYCELNTWMGPGLLGVENLRQELRGCHGLICLLTDRVDATLLAAVPDLEFVSSMSVGVDHVDLSALSARNIPLGNTPGVLVDTTADTAFALMLAAARRVVEADNFVRQGNWTQKNAWAPGFFTGKDVSGATIGIIGLGQIGQAVARRAAGFGMEILAWNRTSREVPGVESVSLEELLQRSDFVSLHVALSDETRYLMNAERIALMKSDAILINTARGGIVDEEALAVALADGHLAAAGIDVFENEPVSPDNALLSLKNVVVAPHIGSATTLTRGKMADIAVENAIAALEGRPMIHCVNPDVYR

SEQ ID NO: 22334 - protein, 618 aa, marine gamma proteobacterium HTCC2148
MSTQPAVSSFAELALSEPLQKALADVGYETPSAIQAATIPALIEGRDVLGQAQTGTGKTAAFALPILAQLQASSKKPQVLVLAPTRELAIQVAEAFQKYARYLKDFHVVPIYGGADYRGQLRQLQRGVQVVVGTPGRVMDHMRRGSLDLSALRTLVLDEADEMLRMGFIDDVEWILEQTPDDRQIALFSATMPTAIARIAKQHLNNPVHVAIEVQTMTNKSIRQRVWMMAGVHKLDALTRILEVEDFDGVIVFVRTRIATAEIAEKLAARGYSAAALNGDIPQKQREATIDNLKRGTIDILVATDVAARGLDVERISHVINYDIPYDVEAYVHRIGRTGRAGREGDAILFAANRERRLLRAIEKATGTIEKMELPSVEQVTDKRIGKFKQRITETLDTVELDLFRKLVEDYQGEYGVPVMDIAAALGAMAQGSKLLVAKPGKERSGQERSGQERPGKEKPRKDTSKKDKSAKERPSRTDRAEDSKKKFDSDKKKTRSSADSSPGGVRPESTPDKGLERYRIEVGHEHDVKPANIVGAIANEAEIDAEYIGRIEIYDDHSTVDLPEGMPKEIFTHLKSVWVSGQRLKISRADKSAGKKPHRKGPAKRKSKKSGPPKRDH

SEQ ID NO: 22335 - protein, 354 aa, marine gamma proteobacterium HTCC2148
MAKLTEQQLAKYRAMDRPAFDFAAQGVTEFFERAAEQGYNLDTTGFLQHPGFFQAPHRRSGDGVDIAMVGSPLDLGAIGLAGARHGPQAVREWSRNYGPINDSTGQIPFEQCSVIDFGDVEWSATDLKTRLEDIYQVFAGLGQEGCATLNCGGEHTTTFGCLKGLSEAHNDSFGVIHIDAHCDTMANWGGDVVNDGSIFRQAVLNGFIDPERTVQIGIRGRSNFLWEFSHDSGMTVITADEVFEKGTAYVIDKAREIVGNEKTYFSLDVDGLDSNYMMGTTGPEPFGLNPRQVRDIILGARGLNIIGADMVEMNPNRDSDGKSGHLAAALFFELLCLLADVRSEQQSCGATHWT

SEQ ID NO: 22336 - protein, 394 aa, marine gamma proteobacterium HTCC2148
MSDREVVVLSGVRTAIADFGGSLKDVPPTELAGQVVAEAVKRSGLEGADIGHCVIGSVTHSDRRDMYMSRVAALKGGLPIETPALTVNRLCGSGLQAVISAAQMILLGDCDAAVAGGAESMSRVPYWLPKARFGARMGDATMEDPMMGALTCPIGDTHMGITAENLADKYSVSREEQDELAAESHRRAQHAIEGGYFKDQILPIELKTRKGVTVFDQDEHVRMDATAESISGMRPAFKKDGSVTAANASGINDAAAAVVMMEKSVAQARGLKPMARMLGYALAGVDPAIMGIGPAPAVRQLLEKTGVAQDDIDIWECNEAFAAQALSVVKELGLDPAKVNPNGSGISLGHPIGATGALITVKALYELERTGGRYAVSTMCIGGGQGIAALFERV

SEQ ID NO: 22337 - protein, 397 aa, marine gamma proteobacterium HTCC2148
MQFPRRYAQRVAEIEPFRVVEVLQRATALQAQGRDIVHLAAGEPDFATAAPIVEAGRASLARGETYYTGAAGIPELRRAISDFYASEYSLDIAPSRIMVTPGASGALLLISALLMNPGDGMLMADPGYPCNRHFLRLVEGRGQLVPVDADTRYQLNSRLIETHWQPNTVGVMAASPANPTGTVLSMDELSDLSRAVKARRGYLVVDEIYHGLGFDAATPSVLSVDPDAFVINSFSKYFGMTGWRLGWLVAPEDAVAEMEKLAQNLFISMSTMAQYAALAGFEPATRAILDERRDTFRQRRDYLLPALQELGFEVPCAPQGAFYIYADASRFTSDSQAFCMNLLEQHGVAVTPGLDFGHHRAREHLRFSYTTSMERLEIAVERLAKVLGPDGLRASGE

SEQ ID NO: 22338 - protein, 406 aa, marine gamma proteobacterium HTCC2148
MSDVNKVVLAYSGGLDTSVIVRWLQDTYNCEVVTFTADIGQGEEVEPARAKAEAMGIKEIYIDDLREEFVRDFVFPMFRANTVYEGEYLLGTSIARPLIAKRLIEIANETGASAISHGATGKGNDQVRFELGAYALKPGIQVIAPWREWDLGSRESLMNYCAEHDIPVDFANAKKKSPYSMDANLLHISYEGDLLEDPWAEPEEDMWRWSVSPEAAPDEATYIELTYEKGDIVAINGETMSPATVLETLNKIGGANGIGRDDIVENRYVGMKSRGCYETPGGTIMLKAHRAIESLTLDREVTHLKDELMPRYAKIIYNGYWWSPERKMLQAAIDESQQVVNGVVKLRLYKGNVIVAGRQSEDSLFDESIATFEDDEGAYNQADAEGFIKLNALRMRIAANKGRDLL

SEQ ID NO: 22339 - protein, 587 aa, marine gamma proteobacterium HTCC2148
MSKPNGAISSLLPVIKLLRPYKLRLLAASLALLFTAAATLAMGRGLQVLIDQGFGGDSADLKDAIFLMLSIAAAIAVGTFLRFYLVSWLGERVSADIRKAVFDNIVRLHPGYFEANRSGEIMSRLTTDTTLLQTIIGSSFSMALRSSLTLIGALVMMVITNLELSLYIAVGVPLVLLPILIFGRRVRRLSNQSQDSIASVGSYAGEVIQHIRVVQSYTREPFESEAFAAEVERAFAIARRRIRQRALLICVAILLMFIGMSAMMWTGGQDVISGRMSGGELGAFVFYAIMVGSGVATISEVWGELQRAAGAAERLVELISTRSLIADPGDLSLPGNNPKPALALDKVTFRYPTRPEVAALENFTLPIEAGRSLALVGPSGAGKSTVFELLQRFYDPQSGCITLDGRNIRELGLRQLREHIALVPQQPALFTGDVSYNIGYGRPGAAQEDIEAAAQAAHAHEFINQLPEGYASHLGEQGVRLSGGQRQRIALARAILNDPKILLLDEATSALDTESEYHVQQALEKLMQNRTTVIIAHRLSTILHADCIAVMDHGKLIASGSHEELLQTCELYQRLARLQFKDEKDLS

SEQ ID NO: 22340 - protein, 1480 aa, marine gamma proteobacterium HTCC2148
MSTGLYRPEEFRDNCGFGLIAHTSGDASHRLLQTAIESLTCMTHRGGIAADGKTGDGCGLLMQMPASFMRTLGKECFGADLNDSFAVGQMFLSKDSARASAARTATETALTDQGLTVLGWREVPTDDSVCGEIALQTLPQIEQVFIDAPGLTETELSTRLFVARRKAEIACEGDEDYYICSLSGRVISYKGLVMPVDLPKFYLDLADERLETAICVFHQRFSTNTMPRWPLAQPFRLLAHNGEINTIEGNRNWAEARTPGFESELLPNIKEIAPLVNRTGSDSSSMDNMLDMLLTGGVDMARALRMLIPPAWQNMELMDPDLKAFYEYHSMHMEPWDGPAGIVLTDGRYAVCLLDRNGLRPARWVKTKDGFITLASEIGTYDYKPEDVVAKGRVGPGQMIMVDTHTGEVLQTEEIDDRLKSRQPYKRWLKEKAQRIEGTFGSEMISGIEREQLDAYMKMFQVSSEERDQVLRPLAESGNEAVGSMGDDTPMAVLSRRERSLYDYFRQKFAQVTNPPIDPLRETIVMSLETDLGGEKNLFHEGPEHADRVILSSPVLSQGKFTSLMQLDRVGFCVSKIDCTYAAQEMNLQQAIATVTNAAEQAVNDGATILVLSDRSIEKGRLPVHSLLAAGAVHHHLIKQGLRADANIVVETASARDSHQIACLLGFGATAVYPYLAYSVLEELIRCGEVLGEPSICYKNYRKGINKGLLKIMSKMGISAVSSYRGAQLFEAVGLAREVVDTSFCGVASRIEGSGFAELEKEQSTLSSRAWTPRKGIEQGGLLKYVHGQEYHAFNPDVVTTLQQAVASGDYADYQRYAALVNERPVATLRDLLKPVDSATAISLDEVEPVESILPRFDSAGMSLGALSPEAHEALAAAMNRMGARSNSGEGGEDSVRFGTERMSKIKQIASGRFGVTPHYLVNAEVLQIKVAQGAKPGEGGQLPGGKVNDLIARLRYSVPGVTLISPPPHHDIYSIEDLAQLIFDLKQVNPKALVSVKLVSEPGVGTIAAGVAKAYADLITISGYDGGTAASPLTSIRYAGSPFELGLAEVQQTLRGNNLRGSIRLQADGGLKTGLDVIKAAILGAESFGFGTAPMVALGCKYLRICHLNNCATGVATQHQKLRDDHFNGTVEMVMNYFNFVATETREWLARLGVASLEELIGRTDLLEALPGDTDKQSRLDLAPILHKDDSSEGQPEFCQVASNDPFDKGEKAEEMVAATLAAIESRSGGEFEFDVCNCDRSIGARLSGEIARRYGNTGMDENPLVLRLTGTAGQSFGVWNAGGLNMYLEGDSNDYVGKGMAGGKLVIYPPRASEFKSQDTTIIGNTCLYGATGGRLYAAGIAGERFAVRNSGAHAVVEGAGDHCCEYMTGGNITVLGPTGVNFGAGMTGGFAYVLDMDRTFIDKYNSELVEIHRVSSEYMEPYRNHLRGNIREYVEETGSEWGAYLLENFVDYVGKFWLVKPKAAEFDRLLSRLRNTD

SEQ ID NO: 22341 - protein, 380 aa, marine gamma proteobacterium HTCC2148
MRIAIPRETHPGENRVPIIPDVAKKLVRMGAELVIESGMGTGSGFTDAEYTDVGATLSSDRNELFSSADVLLRLRKPELSEIALMKRGCIHISYLDPFNEHALVNAFKEAGVTAISMEMIPRTTRSQKMDALSSQANLAGYQMVMEAAMALPRIFPMMMTPAGTLKPANVFVIGAGVAGLQAIATAKRLGARVTAFDTRPVVAEQVQSLGGKFLEIDLGETGETADGYAKELTPEQVDIQRQAQKDVIAKSDVVITTAQVFGRKPPVLVTQDMVEGMAPGSVIVDMAAETGGNVEGSVPNETVEWSGVTIIGKGNLAGEVARDASQMYSSNLFNLVEDNWCEDKHLFVVDFEDDILPGCIITHGGEITHDTIKNIVEGGA

SEQ ID NO: 22342 - protein, 211 aa, marine gamma proteobacterium HTCC2148
MQAVKAFGHDLELRRQLTQNLSELKVETQPLGDLKHAAVVLAVTRYRDEAAIIVTRRTHTLRSHTGQWALPGGRIDSGETPVEAALREMQEEINLSLDASQILGTLDDYITRSGYLITPVVVWNDTRWSKLIPNPDEVATISPFSFSELARNDSPLLSDVAGGDSQVLSMHFQDDVIFAPTGALLFQFREVALRGLSTRVLHFDQPRFAWQ

SEQ ID NO: 22343 - protein, 854 aa, marine gamma proteobacterium HTCC2148
MDKLTNQLQSALADAQSLALGKDHNFIEPVHLLGALLEQQGGSARPLLQKAGANLNNLRSEVQGAIDTLPTVNGDAGDVHVSQDLGRILNVTDKLAQQGGDTYISSELVLLAMLESKNKAGDLLKQCGATPAALKTAIDEVRGGDTVDNPEAEESRQALEKYTIDLTERAEQGKLDPVIGRDDEIRRTIQVLQRRTKNNPVLIGEPGVGKTAIIEGLAQRVINGEVPEGLKDKRILSLDLGSLLAGAKFRGEFEERLKSVLNELSKEEGRVILFIDEMHTMVGAGKAEGSMDAGNMLKPALARGELHCVGATTLDEYRQYVEKDAALERRFQKVLVEEPNEEDTIAILRGLKERYEVHHGVDITDSAIIAAAKLSQRYITDRQLPDKAIDLVDEAASRIRMEIDSKPEAMDKLERRLIQLKIEREAVKKDETAKEQVKHLDEQIEVVEREFSDLEEVWKAEKASLQGSAQVKSDLEQVKLEMESARRAGDLTKMSELQYGKLPELEKQLEEAQVAETVEHTLLRNKVTEEEVAEVVSRWTGIPISKMLEGDREKLLRMEDELHSRVVGQDEAVVAVSNAVRRSRAGLSDPNRPNGSFLFLGPTGVGKTELCKALAEFLFDSEQAMVRVDMSEFMEKHSVARLIGAPPGYVGYEEGGYLTEAVRRRPYSLLLLDEVEKAHPDVFNILLQVLEDGRLTDGQGRTVDFRNTVIVMTSNLGSHLIQEMASEDNYEKMKSAVMDVVGTHFRPEFINRVDESVVFHPLLQSQIRGIADIQLRGLESRLAERELNLEISEAFMEHLTVAGFDPVYGARPLKRAIQQELENPLAQGILSGDFSPGETISVGLEGEAAVFTST

SEQ ID NO: 22344 - protein, 579 aa, marine gamma proteobacterium HTCC2148
MLSGGEMIARALEDESVEYVFGYPGGAVLHIYDALFKDCKVPHVLVRHEQAATHAADAYARATGKPGVVLVTSGPGATNAITGIATAYMDSIPMVVLSGQVQSHLIGEDAFQETDMIGISRPIVKHSFMVRHAEEIPGIIKKAFHIAATGRPGPVVIDIPKDITRPDEKFEYNYPESVKLRSYAPAQRGHTGQIKKAARTLLAAKRPMIYAGGGVILGEGSDLLTQLAQDLNYPVTNTLMGLGCYPGSDRQFLGMLGMHGFYEANMAMHNADVILAVGARFDDRVTNTVDKFCPGAKIIHIDVDPASISKTVTADIPIVGPVKSVLTEMLSQIEQIREKDADLPDAGALQRWWQQIDEWRASHGLLTGRRYRESDMIMPQQVIESLYRSTDGNAYVTSDVGQHQMFAAQYYRFNKPRRWINSGGLGTMGFGLPAAIGVKLAFPDSDVACVTGEGSIQMNIQELSTATHYKTPVKIINLRNNYLGMVKQWQDMQYESRYSQVTYADSLPDFVKLMEAYGHVGIQVEKLDDLDDAMDEAFAMKDRTVFVDVLIDRMEHVYPMHIAPNGSMADMWLSKNERT

SEQ ID NO: 22345 - protein, 311 aa, marine gamma proteobacterium HTCC2148
MMVFSGNANQELAGKVASRLYLTLGKADVGKFSDGEVAVELNENVRGKDVFVVQSTCAPTNDNLMELLVMIDALRRASAQRITAVVPYFGYARQDRRVRSSRVPITAKVVADMMDAVGVDRVLTMDLHAEQIQGFFSCPVDNVYGSPILNDDIVAQNYENLMVVSPDIGGVVRARAIAKQLDEAELAIIDKRRPRANEAQVMNLIGEVDGRTCLLVDDMVDTAGTLCSAANALKERGALAVMAYCTHAVLSGKALENIRNSQLDQLVVTDTIPLSDEARKIEKIRQLTTADLLAESMRRVANEESISALFQ

SEQ ID NO: 22346 - protein, 318 aa, marine gamma proteobacterium HTCC2148
MTTRFNQPLGGNEMPRFAGHASMFRLPTQTNAEGLDIALVGVPLDIGTSNRAGSRFGPREIRCESVMVRPYCMYTQAAPFDSFQVADIGDVPLNTFNLLKSIDIIEGFFDDVLSHGAKTISMGGDHTVALPILRATAKKYGPVALIHVDAHSDTNDSMFGERITHGTIFRRAIEENLVQADKMFQIGLRTTGYSAEDFDWARNQGARVVPAEECWHKSLSPLMTEIRGVIGTETPVYLSFDIDGLDPSVAPGTGTPEPGGLSTIQGIEIIRGCWGLNMVGADLVEVSPPYDTTGNTSLLAANLMFEMLCSFPGCQRAR

SEQ ID NO: 22347 - protein, 395 aa, marine gamma proteobacterium HTCC2148
MIKPHGSDELNPLFVDNSEQRHALEAEAENLPSILLNSAAAANAVMLGGGYFNPLTGYMNLADAMAVAENMHTSSGLFFPVPVLNLTSEAGVEAGSRIALRDPNVEGNPVLAIMDVDAVESVTEEQIDFMAEKIFRTLDPNHPGVATFKSLGKTMLSGSIQVLNFSYFQADFPDTFRTAVEIRNEIAEHGWNKVVAFQTRNPMHRAHEELCRMAMEDLGTDGILIHMLLGKLKPGDIPAEVRDASIRKMVEVYFPENTVMITGYGFDMLYAGPREAVLHAVFRQNCGCSHLIVGRDHAGVGDYYGGFDAQTIFEEEVPEDALELQIYNADHTAYSKKLNKVVMMRDAPDHSKDDFVLLSGTAVREMLGKGIAPPPEFSRPEVAKILSDYYQLLDS

SEQ ID NO: 22348 - protein, 457 aa, marine gamma proteobacterium HTCC2148
MLNRRNLIAAMGGLALASRYGVLPAMAAEKRRLPWRNWSGSQQCLPQSRIAPASLAELQELVASTEGIIRPVGAGHSFSPLVPTDDTLVSLSRLGGVSDADSATLQATIGGGTRLGDIGQPLQDAGQALINMPDIDEQTLAGSLATATHGTGAGLGCMSTFVKGLQIVNARGELVDCDALNKPELFQAAKVSLGSLGLITQVRMQSVEPYRLRRETVWMEFEEMLENADSMADQHRNFEFYYVPFSGMGFTDVHDLTDEPVGTTGKNDPNEGAMELKMLRDWLEWSPTLRRLVLGSYASTIPDEITIGNSWKNYANERNVRFNEMEYHLPREAGLKALREIVATLESSHHEVFFPIEVRYVKGDDIWLSPFYQQDSMSIAVHRYFEEDYKPYFKTLEPIFRKYGGRPHWGKLNSLGSADFKELYPHWNDFAEVRAQMDPTGRFLNPYLRDLFMGETG

SEQ ID NO: 22349 - protein, 643 aa, marine gamma proteobacterium HTCC2148
MGKIIGIDLGTTNSCVSVLDGDAPRVIENAEGDRTTPSIVGYTDEGEILVGQAAKRQSVTNPTNTLYAVKRLIGRKFKDDVVQKDISMVPYTILAADNGDAWVQARDEKMAPPQVSAEVLRKMKKTAEEFLGEPVTEAVITVPAYFNDSQRQATKDAGKIAGLDVKRIINEPTAAALAYGMDKAKGDHTVAVYDLGGGTFDISIIEIAEVDGEHQFEVLSTNGDTFLGGEDFDMRLIEYLSQEFKKESGIDLHNDPLALQRLKEAAEKAKIELSSSQQTEVNLPYITADASGPKHLVVKLSRAKLESLVEDLVTRSMDPVKTALKDAGLSPSEIDDVILVGGQTRMPMVQKQVADYFGKEPRKDVNPDEAVAMGASIQGAVLSGDVKDVLLLDVTPLTLGIETMGGVATPLIEKNTTIPTKKSQIFSTADDNQTAVTIHVVQGERKQATGNKSLGRFDLADIPPAQRGVPQIEVTFDLDANGILHVSAQDKATGKEQSIRITASGGLSDDDIEQMVADAEANAEADAKFEELITARNTCDGLIHAARKTVEEAGEHATDEEKAAIEAAVSEAEEAVKSDDKEAIDAAATKLTEATGPVAQKMYAAQAEQAQAAGAGAEAGAQGEPAEDVMDAEFEEVKEDDKK

SEQ ID NO: 22350 - protein, 565 aa, marine gamma proteobacterium HTCC2148
MDLQRSLLIGAIAVLSFMLLTEWVAFKDDKAAIETAQATRLIANTDSNTAELPQVSEPTLFATDDDVPSTPELIEAEAPPQITQKNSGRIILVRTDSLQLAIDLNGGDIIELALPRYLEEIDNPDIPFVLLEQNDSRTYIAQSGLIGSNGIDSKGRALFTASADNFELSESDDTLVVDLNLTTADNIKVTKRFTFTRGEYLVEIDYIVVNNSNARWQANLFGQIKRDSTPAPSASQSGMGMQPFLGAAITQPDVRFTKFTFEDMLDDPFKAQLPGGWIAMFQHYFLSAWIPNSDQSHNYSTRVTQAGFNIAGFTSPALTLDPGQSGTTGAQFYAGPKDQYRLAEISPYLDLVVDYGWLWWIAKPLFWLLTNIHSFVGNWGTAIILLTVVVKAAFFKLSATSYRSMARMRKVQPQMLDIREQYADDKQKQSQAMMELYRKEKVNPMGGCLPILVQMPVFIALYWVLMESVELRHAPFALWIKDMSVMDPYFVLPILMGASMWFMQRLNPPPTDPMQAKIMQWLPIVFTFFFLWFPAGLVLYWVVNNLLSMAQQYVITKQIEKADPA

SEQ ID NO: 22351 - protein, 410 aa, marine gamma proteobacterium HTCC2148
MEDNIFQLQYALDTFYFLICGALVMWMAAGFAMLEAGLVRAKNTTEILLKNVALYAVSCTMYMICGYMIMYGGDLFLSSITGDGVAGAEEAATYAPSADFFFQVVFVATAMSIVSGAVAERMKLWAFLAFAVVMTGFIYPMEGSWTWGGNAVFGMYTLGDLGFSDFAGSGIVHMAGAAAALAGVILLGARKGKYGPQGQINAIPGANLPLATLGTFILWMGWFGFNGGSVLATASVESANSVAVVFMNTNAAAAGGLIAALLVAKIMFGKADLTMALNGALAGLVAITAEPSTPTALQSTLFGGIGGALVVFSIVTLDKLKIDDPVGAISVHGVVGLLGLLLVPLTNDGSSFSGQLIGAVTIFGWVFVTSLIVWGVLKAVMGIRVSEEEEYEGVDLAECGMEAYPEFTTK

SEQ ID NO: 22352 - protein, 184 aa, marine gamma proteobacterium HTCC2148
MPLLILDRDGVINQDSDDYIRSLDDWKPIPGSIEAIATLSKAGYQVAIATNQSGLSRGFFGLEELEAIHNHLCQLVEEQGGEIAGIFYCPHLPDDGCDCRKPATGLLRAIETELSEPVAERYFIGDSFKDLQAGRAMGCKPVLVLTGKGEKTRLQLESSNNDLVDSSGIPVYADLAAASRDILS

SEQ ID NO: 22353 - protein, 399 aa, marine gamma proteobacterium HTCC2148
MKFVDEASITVYAGKGGNGALSFRREKYVARGGPDGGDGGDGGSVFLEGDVNLNTMVDYRFVRSYRADIGEGGSGKNCTGRSGEDLILKVPIGTTVLDEDTGEILGDIQASGQQLKVAQGGFHGLGNTRFKSSTNRAPRQITPGSEGEVRSLKLELKVLADVGLLGLPNAGKSTLIRAVSSAKPKVADYPFTTLVPNLGVVKVEAHRSFVIADIPGLIEGASEGAGLGIRFLKHLTRNRILLHIVDMAPFDGTEPADSAVAIAGELGRFSATLAERERWLVLNKTDLIDAETFAERKTAVLAALDWQGPVYEVSAIKGEGTDALCGDLMNYLEELREQEKADPELAHADVELQQRMQEEARERIAELRSQHKRRADQEAEDDDDDDWDDEYDVDVEYVP

SEQ ID NO: 22354 - protein, 503 aa, marine gamma proteobacterium HTCC2148
MKPSNDWTVFLPSLLLVVLLGGGLIAYPEQGSHLTSLAMDFVTGQIGWLYLILGGVALIFAGWLAFGPYGNVLLGPEGEPPEYGELHWIAMMFTAGIGGSMIAWGVAEPLSYLQTPPFGIEPHSADALEWAHVYPIFHWGIIPWAFYAIPAVPVTYMLYIKKTPMMKVSAACESAFPLAKHPVASRLIDVIIALGIVGGTATSLGLGVPLVSAIIAELFGVVDNFTSKMTVLILWTVIFGASAYRGLKKGIKVLADFNMILAFAALLFVLIFGPTLFILKLTVNTGGLLIDNFFRMAFWTDPISRSGFPEDWTIFYWAWWIAFAPFVGLFLGRISRGRTIRQIILGIIGWGTLGTTTFLSIIGGYAIYLAKTDTLPVEEILAQAGMAVVTVQAINHLPGGNVALMIFLVLCVIFYATTLDSAAYTIASVCSKNLPNDQEPPRISRVVWAFALALLAVGLIATDRIKIIQASTVVFSLPLLPVLILMCVSLVKWLKADFGKTTK

SEQ ID NO: 22355 - protein, 327 aa, marine gamma proteobacterium HTCC2148
MMTVGFIGLGNVGAKLAGSLLRNDVALMVRDLDEDLAKSFLDAGAQWADSPAAMAQAVDVIITCLPSPAACAEVMEGEGGLLEALGPGKIWIEMSTTDYREVQRLGQKVKDLGAQPADCPVSGGCHRAATGNIAILAGCERSVFDAILPLLTILGRRVLHTGPLGSASKIKVMTNYLATANLVTLCEALVTASKTDLDLATVYEAIRISSGNSFVHETESQVILNGSRDINFTMDLVLKDIGLFQSMAEEAGVPLEISPQLIEIFEDGQSRFGEREWSPNIIRRLEEACDTRVLAEGFPAQMSDLEPEEAGYEVVPPGPIPAAGALH

SEQ ID NO: 22356 - protein, 109 aa, marine gamma proteobacterium HTCC2148
MDIIDTIKEQIESNAILLYMKGSPNQPQCGFSARTVQALMQCGERFAYVDILSNPDVRANLPKYANWPTFPQLWIGGELIGGCDIVTEMAESGELQTLIKETVAAQPAE

SEQ ID NO: 22357 - protein, 393 aa, marine gamma proteobacterium HTCC2148
MSLNPRDAVIVDYARSAMGRSKNGCFRNVRADDLSAEVIKGLLGRNTALDPAEIDDLIWGSVIQRGEQGMNLARMIVLNAELPHTIPAQTVNRLCGSSMSALQTAAANIMAGIGDVYLVGGVEHLGHLPMMDPANVDPNPRMGRSVAKAAGMMGMTAEMLALMHGISREDQDKLGLRSHQLAHKATIEGKFDREIIAIDGHDENGALVSVRTDETIRPETTLEGLAQLKPSFNPQGGTVTPGQSSQISDGASAMLMMSAEKALALGLKPIARVKGMALAGVDPSIMGYGPVPSTQKALKKLGLTIDDIDMVELNEAFAAQALPVLKDLGLLEQMEEKVNVHGGAIALGHPFGCSGTRITGSLLNVMEDRDLTLGISTMCIGLGQGITTVVERV

SEQ ID NO: 22358 - protein, 573 aa, Labrenzia alexandrii DFL-11
MKEQTRPTGDTPSFAELYTPKLVTVLREGYALPQLRSDAIAGLTVAIVALPLSMAIAIASGATPAQGLYTAIVGGFLVSLLGGSRFQIGGPAGAFIVLVAATVSQHGMDGLILATFLSGLMLTAAGFLRLGTFIKFIPFPVTVGFTAGIAIIIFASQIKELFGLSLDHEPGELLEKLVALWEARDSVTPSAFLVSAATVAIILGFRRWRPHWPGMLIAVSVAALATALLDLPVQTIGTKFGGIPSILPAPSLPELSIDKIMAVLPAAISFTLLGAIESLLSAVVADGMTGRRHRSNCELVAQGAANIGSSLFGGFCVTGTIARTATNVRSGAHGPISGMLHAVFLLLFMLIAAPLAAYIPLAALAGVLAVVAWNMIEKPAIAILVRSGWGEATVLASTFFLTIFRDLTEAIVVGFALGSVLFIQRMSKTTAVATHTPFVSRDEADDAHPRGNYDEEVLANPEVVVYRITGALFFGATASIGSVLDRIQDSHKALIVDFSSVPFLDSTGANMIEGLAHKAHNRGVAFWLTGASRDILRVFVTHGLKRPLVHYSASIDDALKSIAERPEERRGVA

SEQ ID NO: 22359 - protein, 399 aa, Labrenzia alexandrii DFL-11
MGFLADALARVQPSATIAVTNKARELKAAGRDVIGLGAGEPDFDTPENIKAAAIKAINDGKTKYTAVDGIPELKAAIAEKFKRENGLTYETNQITVGTGGKQVLYNALVATINPGDEVIIPTPYWVSYPDMVLLAGGEPVIVEADKSTFKITPEALDAAITSRTKWLIFNSPSNPSGAAYTEAELKALCNVLVKHPHVWIMTDDMYEHLVYDDFRFTTPAQVEPSLYDRTLTVNGVSKAYSMTGWRIGYAGGPADLIKAMAKVQSQSTSNPNSIAQWAAVEAISGTQDFIPKNNEIFKARRDLVVSMLNQANGITCPVPEGAFYVFPSCAGTIGKTTPSGKVIENDEDFVTELLETEGVAVVHGSAFGLGPNFRISYATSTEALEEACTRIQRFCGNLK

SEQ ID NO: 22360 - protein, 406 aa, Labrenzia alexandrii DFL-11
MAYGDIKKVVLAYSGGLDTSIILKWLQTELGCEVVTFTADLGQGEELEPARKKAEMMGIKEIYVDDLREEFIRDFVFPMFRANAVYEGVYLLGTSIARPLISKRLIEIAEETGADAVAHGATGKGNDQVRFELSAYALNPDIKVIAPWRDWTFKSRTDLLDFAEKNQIPVPKDKRGEAPFSVDANMLHSSSEGKVLEDPNEEAPNYVFQRTVDPTEAPDVVTEIEIGFEKGDAVSLNGEKMSPATLFAKLNDYGRDNGIGRLDMVENRFVGMKSRGIYETPGGTILLQAHRAMESITLDRGAGHLKDELMPRYAELIYNGFWFSPEREMLQALIDKSQEHVTGTVRLKLYKGNVIVVGRASPYSLYAEELVTFEDDHGAYDQKDAAGFIKLNALRLRTLAKRNQLG

SEQ ID NO: 22361 - protein, 74 aa, Labrenzia alexandrii DFL-11
MKGFIMTTGTVKWFNSTKGFGFIQPDNGGPDAFVHISAVERAGMHEIVEGQKIGYDMERDSKSGKMSACNLQAA

SEQ ID NO: 22362 - protein, 1043 aa, Labrenzia alexandrii DFL-11
MMLPAQAASDDLQQRLDMVWVLVAAGLVLLMQLGFMLLEAGMVRSKNSINVAQKNLLDLAVCVIIFAVFGFAVAFGAGGTWFAGYDDRLFLLSDVTPWALTVFAFQVMFCGTAATIISGAVAERMRLQAYVWCTVLTAAVIYPVFARWAWGGVLFPDAEAFLADRGFVDFAGSTVVHGTGAWIALAACIILGPRIGRFDAEGRAYRIQGHSSVLATTGAVALFVGWLGFNGGSTLAASWDVPKIFANTVLAAAAGTAAGYLAGKYRDGVVLPENSISGLLGGLVAVTAGCHFLSPGGALLVGAAGGATALFGALVLERYFRLDDPVGAISVHGFAGVIGTLGLAVLAPAEALPLGARVPQFLVQLQGILINFVWCFGVSILFLSVLNRFSPLRLSQQDEDIGLNEAEHGTRLGIGHVEDALDSLIAGKADLSMRLQVSKGEDSERLTRLFNALMDTVQSQEQAQSRVADAKRTQEEAERLSALANATFDAIVISVDGRILDGNKTFEELVGYSISELEMRGLYEFVETDVAGTLEDHLIKAEKEPREVVFVNRAGERVPVEIRTRVIAYRGVPTRVSALVDLRERKKAEAQILHLAQHDPLTDLPNRAVFNAELQQTMRRCEKKEQGAALLLVDLDKFKDINDLHGHPAGDAVIRVTAERLLSACRGSDTVARLGGDEFAIIQTSISFANQAEDMAHRLVAILSEPVNCGHGLIVKPGASIGVAMIAAGQSEEQVVSNADIALYNAKSAGRQTYCLFRKGMGAEVRQRREMEKDLHAALADDQFELYFQPRLNLATGNIVSYEALIRWNHPDHGLVSPVEFIPVAENSGQIIGIGKFVLERALAVAAQEIPTGNISLNVSPVQFRDKDFIEDVARAIKASGIPANRIELEITENTLIEDDARALSILTKLKDIGVKIALDDFGVGYSSLSYLSRFPFDCIKIDRSFVLEAQQNYNALAIIEAVVRLGKALDMRIVAEGLEDTENLCLLAAQGCHEVQGYLIGKPVPVNKLVRVAPKAVLAALDQIRFAAELGSDDIPPAEMAS

SEQ ID NO: 22363 - protein, 416 aa, Labrenzia alexandrii DFL-11
MRNAMSIFRPDGPSTWQRAAGLLERAKTERQHHPDFDKLQLRGWKAAEKEGMLPSAAWEKEKAWALRMGLTGSDSLTDKSIPTFARGELPHYAGINTFLKAPYIEDVTQVGAYDAAVIGIPFDGGTTYRPGTRFGPQGVRKISALYTPYNYEMGVDLREQMTLCDVGDIFTIPANIEKTFDQITRAVSHVASSGALPIMIGGDHSIGFPCVRGIAQCTSKRIGIVHFDRHIDIQEKDLDERMHTTPWFHATDLVNVPAVNLVQIGIGGWQVPREGVEVARERNTNIFTMRDVEELGLAETAARALELAWKDADAVYISFDIDSVDCGFVPGTGWPEPGGFLPREALELVSLVAKEGICGLEVVEVSPPYDCSDITALLATRVIVDVLGTLVSHGKMGSHKSIIDKPVSIPAGPDVE

SEQ ID NO: 22364 - protein, 442 aa, Labrenzia alexandrii DFL-11
MKKLVAKGAASLALLSLSALPVLAQDTEAAPAVTPEVAYIFNTLLFLIGGFLVMWMAAGFAMLEAGLVRSKNVSMQCLKNISLYSIAGLMFWITGYNLMYTGVDGGFMGSFGPYSFDPVGGDALDTGYSTASDWFFQMVFVATAASIVSGTLAERIKLWPFLIFTVVLTGFIYPIAGSWQWGAGWLSEMGFSDFAGSTLVHSVGGWAALAGAIILGARKGKYGTDGAVHPMPGSSMPLATLGTFILWLGWFGFNGASQLAMGSIGDVSDISRIFANTNMAAAAGVVAAVILTQVMYKKVDVTMALNGALAGLVSITAEPLAPSVWQAVFIGAIGGVIVVFTVPLLDKLKIDDVVGAIPVHLIAGIWGTLIVPLSNDGASYGTQIVGIVSYGVFTLVASGIVWFILKAAMGIRVSEEEEALGLDKVEVGVEAYPEFGTGSQRM

SEQ ID NO: 22365 - protein, 198 aa, Labrenzia alexandrii DFL-11
MFAVIKTGGKQYKVAADDLLRVEKLDAEAGSTVTFDEVLMVGSETDTTVGAPTVEGASVVAEVVDQGRNRKIIIFKKRRRQNSRRRNGHRQAFTLVKVTDILTGGAKPAKKAAPKTAAPKAEAKEDAPAADAGADDLKKLDGAGPAAVKKLNEAGITTFAQIAAMSADDIARVEEETGLKGKFERGNWVEQAKELAGN

SEQ ID NO: 22366 - protein, 536 aa, Labrenzia alexandrii DFL-11
MQRNISLLGLTFVAISGILGSGWLFVPMIAAQSAGPASLIAWLIGGIAMLLIAITFAEISTILPVAGGIGRVPQFSHGTVVSMAMGWTAWVGYNTAATIEVEAILRYSKTLAPWLYSNDNELSTGGLAVALVLLAVFTVINAFGVKLFARINTALTWLKILVPVLLAVVIISLSFKPSNFTNHGGFAPEGLRGILAAISSGGVIFSLLGFRHVIDLAGEAKNPKVNIPLALILSLLICLFVYGGLQIAFLGALDAAQLQNGWSGLHFGGDLGPLAALATAVGALWVVSLLDTTARISSFASGLVSVGSNARLGLAMAQNGLFPKFMETLSDKGVPLFSLLVNFVVAALFFFALPFDEVLALNTSTIVLSFIVGPIAVVALRKLLPDAPRAFTLPAAPVLGCLAFVVATLIIYWTGWHTMLHLGLSLAAGFVLLMIRGHHIGYANLDWREASWLAPYLIGIVVFSYLGSFGGGSGILPLGPDILLIAVFATVIYIGAIHLRLPQEKFARYMAQEKIEELAEYGTLEDDIYEGPFRKT

SEQ ID NO: 22367 - protein, 594 aa, Labrenzia alexandrii DFL-11
MSGLKRYFPILEWGKTYDKTTATSDLVAAVIVTIMLIPQSLAYALLAGLPPEVGLYASIAPLVAYAVFGTSRALAVGPVAVVSLMTASAVGQFAAQGTPEYLGAAIALAFISGLMLVVMGLFRLGFLANLLSHPVISGFITASGLLIASSQLKHILGVPAHGHTLYEILLSIAGHLDEVNWITLSIGAGATAFLFWVRKGLKRLLLGVGFKPFLADILTKAGPVAAVAVTTLASAVFSLGDKGVRIVGDIPSGLPMPQLPSFESELWLALAGPALLISVIGFVESVSVAQTLAAKKRQRIEPDQELIGLGTSNIASALSGGYPVTGGFARSVVNFDAGAATPAAGAYTAVGIALATLFLTPLLTHLPQATLAATIIVAVLSLVDFGAVKRTFAYSKSDFTAMAATILITLFFGVEQGVVAGVGLSIALYLYRNSRPHMAIVGVVPGTEHFRNIDRHKVVTGERVLTLRVDESLFFANSRFLEDKIYALVADRPNIEHVVLMCPAVNEIDASALESLEEINHRLSDSGVSFHLSEVKGPVMDRLKRTDLLNHLTGQVFLSQYDALVTLDPLTAHISESHTPKKAARSNVWAGPEI

SEQ ID NO: 22368 - protein, 387 aa, Labrenzia alexandrii DFL-11
MVAAFTFHTSERIVFENGAAAALDRHALDFLGDRPFLVTDPGIVSLGLQEECEASLTAAGHQIGRFSEVVADPPQKLVEDAVAAAKDHGATSIIGFGGGSSLDVAKLVALLLGSGEDLNDAWGIGNAKGPRLPLILIPTTAGTGSEVTPISIITVGADEKRGVVSPHLLPDLAVLDPLLTLGLPAHVTAATGVDAMVHAIEAYASKSANNNPLSRTLAVEALKLLGANIETAVFDPTNVSARGGMLLGSKLAGMAFANSPVAAVHALAYPIGGTFHVPHGLSNALVLPHVLAFNNAVAAPIYAELAPALFPELSDLASPTDRADTFARRLAALTEKLGLQTRLSEVGISEKDLPKMARDAMKQTRLLVNNPREVTETDAFNIYAAAL

SEQ ID NO: 22369 - protein, 538 aa, Labrenzia alexandrii DFL-11
MTTGADIIAQKLHGAGCRHAFGIPGGEVLALMQALDEAGLKFVLVKHENAGGFMAEGGWHADGAPGVLLATLGPGAANAINVVANAWQDRVPLIFLTGCVDHAEAESYTHQVFDHQQLLRPIVKASFSGRLGALDVMMEKALAIALDGQPGPVHIDVPIKVAETVTSEAWSSKFRSSPAGSAPVSGLGLETALELFAKAERPIVIAGVDAVNEGASHAISEFCRTYKIPLVTSYKGKGLLDENDPLALGGAGLSPKADGHLLPLINQSDCILSLGYDPIEMRINWRNPWPSDAPVIDVTPVLRTHGMHEAAATLRSAVVPALNLLAEVRDTSAVSWSGGEPAAVRKDLAEAFAPEQSGWGPGTAFHVLRDVMPDNTVATADSGAHRILVSQIWRCSGPRQMLQSSALCTMGCAVPLAMGHRLVDQTAPVIAFVGDAGLEMCLGELSTLRDLKIPVIICVLVDTSLALIELKQRNSQRPNVGVDFGETDFPAIAAAYGGYGVWIESADVLRQEAGAALERDGFTLLACRIAQRSYDGAF

SEQ ID NO: 22370 - protein, 673 aa, Labrenzia alexandrii DFL-11
MPRRGIREDPGNPKRSRFDAFKGLTGLLEREAKMAKVIGIDLGTTNSCVAVMDGKDSKVIENAEGARTTPSMVAFSDDGERLVGQPAKRQAVTNPTNTLFAVKRLIGRRFDDPTVAKDQKLVPFDIVKADNGDAWVEANGEKYSPSQVSAFILQKMKETAESYLGEKVEQAVITVPAYFNDAQRQATKDAGKIAGLEVLRIINEPTAAALAYGLDKNDGKTIAVYDLGGGTFDVSILEIGDGVFEVKSTNGDTFLGGEDFDMVLVDYLAAEFKKEQGIDLKNDKLALQRLKEAAEKAKIELSSSSQTEINLPFITADASGPKHLTLKLTRAKFEALVEELVKRTVKPMEAALKDAGLTAGDIDEVVLVGGMTRMPKVQETVHKFFGKEPHKGVNPDEVVAMGAAIQAGVLQGDVKDVLLLDVTPLSLGIETLGGVFTRLIDRNTTIPTKKSQVFSTAEDNQTAVTIRVFQGEREMAADNKVLGQFDLVGLPPAPRGVPQIEVTFDIDANGIVNVSAKDKGTGKEQQIRIQASGGLSDADIDQMVKDAEAHADEDKKRKELVEAKNQGESLVHSTEKSLADYGDKVSEEDKSAIESALGDLKTALAGEELEDIKAKTQALAEASMKLGEAMYQQAQADAEANAEGGDADAEKADDDVVDADFEEVKDDDDKKSA

SEQ ID NO: 22371 - protein, 540 aa, Labrenzia alexandrii DFL-11
MKEMGVVEKTVGEALIDLLEINGVDTVFGIPGVHTVELYRGLASSSIRHITPRHEQGAGFMADGYARVTGKPGVALVITGPGLTNTITAMAQAYQDSIPMLVISGVNTRDSLGHGRGMLHELPDQRAMMATLAVMSHTLLDPNDLPSVMERAFSVLKSRRPGPVHIEIPTDVMPQKITIEAWKPVIASGPRGAAAEVTYLAAKCRSAKRPVILCGGGSISAAQGIQRLAESLDAPLVTTVNARGMFAGHPLSIPASPSLKAVRALVSDADLVIALGTQMGQTDYDMYADNCFPELENLVRVDIDPDQLARGPSAALSILSTVDQLVTDLLSALPNHSAHCDGAARSKACREETFAALTPKMKAEIAVLETIRDTLPGCIIVGDSTQAIYSGNLYFEAGQPKGWFNAATGFGALGYGPPAAVGASLGEPGVPVVCIVGDGGFQFSLAEIGSAKDCEANVIFLVWNNDGYGEIRTFMEDSGIEPEGVTPSAPDFLKIAEGYGLPSIRLADVSELNDALIDMAKISGPALIEIHELETRGATA

SEQ ID NO: 22372 - protein, 404 aa, Labrenzia alexandrii DFL-11
MSETGTHPAPIVIAGAGIGGLTAALTLRRAGHEIVLIDKAKALSEVGAGLQLSPNACSVLDGFGLLQDLKALGHQPDNLRVWSGKTGDQISKVWLGSYLLERHGQPFIVIHRADLQGTLLKKVEATDGITLMLGTALTDAKTGDAGNLVCTYQTGETTGTLNCKALIGADGVWSTVRRLIPNHKNARFSGQVAYRSTLPIDKVPAQWRKDSGLWLHKDSHLVHYPIRSGEQLNIVALATEDWQDETWSAPAGKDELLHRFKDWPTDIRNLLNGPERWLKWALCTVKADGPWTHGQIALLGDAAHAMLPYMAQGAAMAIEDAAELANHFPVETENTAAALRAYERTRKPRAERIQETGFKNAKTFHMSGLPATARDMVMKFSKPESLAARFDYVYGWKPNQALPS

SEQ ID NO: 22373 - protein, 638 aa, Labrenzia alexandrii DFL-11
MNAHFRNFALWVIIALLLIALFQLFQSPTQNSVTDEIAFSEFMNKVDRGDVRSVTIQEQKISGSSTTGPFQTYAPEGAQYVEELRTKGVLINARPPAESSPLLGALFSWLPMLIILGIWIFVMRQMQGSGGKAMGFGKSKAKLLTEAHGRVTFEDVAGIDEAKEDLQEIVEFLRDPQKFQRLGGRIPRGVLLVGPPGTGKTLTARAVAGEANVPFFTISGSDFVEMFVGVGASRVRDMFEQAKKNAPCIIFIDEIDAVGRHRGAGLGGGNDEREQTLNQLLVEMDGFEPNEGIIIIAATNRPDVLDPALLRPGRFDRQIVVPNPDVTGREKILKVHMRKVPLAPDVDVRTLARGTPGFSGADLMNLVNEAALLAARRSKRLVTMAEFEDAKDKVMMGAERRTLVMTEEEKKLTAYHEAGHALVALHQEASDPIHKATIIPRGRALGMVMRLPEKDQVSLTRAKCKADLAVAMGGRVAEEMIFGYEKVTSGASGDIQMATKLARAMATQFGMSDKLGPLLYGENQEEVFLGHSVAKNQNVADETQKIVDAEIKSFVNQGYETAKKILGDHEDQLHSIAKGLLEYETLSGDEIKGLLDGKPPVRDTDDDQPIGRSSAVPKAGAKRGGDEPSGGMEPQPQA

SEQ ID NO: 22374 - protein, 535 aa, Labrenzia alexandrii DFL-11
MADTSHKKMLDPDPRVWDFETEYELGQDNIRPLGLDIHNPVFIVSGILIMGFVIAALANQEAAAEFFGWLRPWLTSTFDWFLVLSVNAITLFCLALIVLPVGKVRIGGKDAKPDYSYAGWIAMMFAAGIGIGLLFFGVLEPVYYNFSENGGARPLGIDITQPGNEYIGIVGTIHHWGLEGWAVYAAVGLSLAIFAYNLNLPLTLRSAFFPLLGEKVWGFWGHVIDTLAVFATLFGLTTSLGLGAQQVAAGLNEVFGIAPSPMLTVFIIVGITLIALGSVLLGMDAGVKRLSEINMIMAVGLFLFVVIVTGIGATFSRYFSVMVDYVTLLPALSNPFGREDSSYFHGWTTFYWAWWIAWSPFVGMFIARISRGRTVREFVLCALIAPTAVCALWMSTFGGAAIDMLNAGGAEGVRATVIDSYAPEGALFGFLKELPLYSIVAPISLVLIVIFFVTSSDSGSLVIDTITAGGKLDAPVVQRVWWCTLEGLVAIALLLGGGLNALQGAAVSMGIPFTLVVLIMCYCLWLALRSEYRKL

SEQ ID NO: 22375 - protein, 760 aa, Labrenzia alexandrii DFL-11
MSADKTSSKTSVSFTDQEALQFHQQGRPGKLEITPTKPMATQRDLSLAYSPGVAVPVRAIAEDPSKAYDYTTKGNLVAVISNGSAILGLGNLGALASKPVMEGKSVLFKRFADVDSIDLELDTQDVDEFINSVRYMGPSFGGINLEDIKAPDCFIIEQRLRELMDIPVFHDDQHGTAIIAAAGLINALHLTGRDMKDTKVVCNGAGAAGIACIELIKAMGIPNENVTLCDTKGVIYKGREEGMNQWKSAHAVDTKARSLYDALKGADVFFGVSVKGALTPDMLRVMAPNPVIFAMANPDPEITPEEAAEVRDDAIVATGRSDYPNQVNNVLGFPYIFRGALDVQAITINDDMKVACANALAELAREEVPDEVAAAYRGNRPKFGPEYIIPVPFDPRLIHAIPPAVAQAAMDSGVARRPIVDMEAYKHQLSARRDPVAGTLQRIFSKVRQQPKRVVFAEGEEEPTIRAATSFVSQGLGEAILIGREDEIQSMAERAGIDINRPGLSIQNARLSDRNADYAQYLYGRMQRRGYLLRDCQRMVNNDRNYWGAIMVARGDADAMVTGLTRNYSVALDTVRATIDPKPGHRVIGVSLALARGRTVLVADTAVIDMPNSEELADIAEEAAHVARKLGYEPRVAMLAYSTFGHPRGERSEKVIEAVKILDRRRVDFEYDGEMAADVALDMDRMAAYPFCRLSGPANVLVMPAFHSASISTKMLQELGGATVIGPLLVGFDKSIQIVPLGAKDSDIVNMAAIAAFNVT

SEQ ID NO: 22376 - protein, 348 aa, Labrenzia alexandrii DFL-11
MKFLDQAKIYVRSGNGGAGCVSFRREKYIEYGGPDGGDGGKGGDVIVECVDGLNTLIDYRYQQHFKAETGIHGMGKNRTGAHGGDVTLRVPVGTQILEEDNETIIADLTEVGQKVHLLRGGNGGFGNAHFKSSTNQAPRRANPGLEGEEKWIWLRLKLIADAGLVGLPNAGKSTFLATVSAAKPKIADYPFTTLHPNLGIVQIDGNSFAMADIPGLIEGAHEGTGLGDRFLGHVERTRVLLHLVDGSGEEDPGESYKVVRGELEAYGAGLTDKPEIVALSKCDALTEDMIAEKAANLEAACGQRPLILSSASGLNVDRALRMIVRAIDRDKEEAANQVPSPEQEGWHP

SEQ ID NO: 22377 - protein, 359 aa, Labrenzia alexandrii DFL-11
MAMIPMPDKDTPVWTDAEMLECVNVLPEAPNVKTFTFRPPSGNRFVYKAGQFITLDLPVPGGNVQRTYTISSSPVTQAYLSVTVKAQEGSIGTRWMLGHLVPGMQIKAFGPAGLFHLPSNPDGKFLFISAGSGVTPMMSMAGTLFERGEEPDICFIQCANRPAELIFRKRLEYMACRTNGLQLHFVVNQSDPYEVWTGYRGYFNQLMLGLMCNDYLERDVYCCGPEGFMEGVREILNALGYDMDRYHQESFQAPAETKEELTEFDDVVPQEDTKAHIVFTGSNVSAWCSETDTVLAVAKEAGLNIPSGCTFGVCGTCKVKKVSGDVHMVHSGGISDEDVEDGFILACCSNPIGTVEVEV

SEQ ID NO: 22378 - protein, 393 aa, Labrenzia alexandrii DFL-11
MRYASITDRLTHLGSGKWTVHLKAREMVDAGTPVIELTIGEPDIMPDKALLDEAERSMRAGRIRYSNGRGEPKIIAALTEKYRQRRPSISERNILCFPGTQTALFAVMLGLVEGGDAVLVPDPYYATYEGVIAATGAAMVPVPLRPENGFHLKPKDLEAAVTPNARVLLLNTPHNPTGAALTADEIAAIGEVCQRHDLWIVCDEVYEKLIFDRTFASPFDIEALQERTIAVSSISKSHAAPGFRSGWAVGPEEFCDRLLAVSETMLFGGQPFIADMTAMAVSGEFDTAERMRESYKRRAEILMEHLGGHGALRPMMPEAGMFLLVDVSGTGLDGETFATRLLDEKHVAVMPGASFGEQAAGFIRLSLTVADDTLREAAGRIATFADELAANVG

SEQ ID NO: 22379 - protein, 358 aa, Labrenzia alexandrii DFL-11
MARFHALQVTDIRRDTRDAVVVTLKPEAADKDAFDFIQGQYLTFRRDFDGEELRRSYSICAGKDDGCLKVGIKRVEGGAFSTWANEELKIGDRLDVMPPMGRFFTELEPEKVKSYLGFAGGSGITPILSIIKTVLAREPKSTFTLIYANRQTSSIMFREELEDLKNTYLGRFSVIHILETETQDIDLFTGRIDAEKMDLLFRLWVDAEEVDTAFICGPEPMMLTIADSLRKHGLSDEQIRFELFASSQPGRAKARTMSQAAAAGAGTCEVSVTLDGSTRNFQMEKNSTSVLEAAIANSMDAPFSCKAGVCSTCRAKVIEGEVEMEVNHALEDYEVRAGYVLSCQCIPVSDKVVISYDE

SEQ ID NO: 22380 - protein, 303 aa, Labrenzia alexandrii DFL-11
MDEAALQKFGPAFQVIYDPSLVDDEERLFQKLADADALIVRNRTQVGARLLDAAPNLRVIGRLGVGLENIDLGACAKRGVSVRPATGANTQSVVEYVLGAMLVLRRGAYTSNQEMLDGNWPRTALGAGGEVQGLTLGLLGYGEIAQAVAQVGLAFGMKIIAFDPYLADTDPAWTHVQSCGLEDLLARADVMSLHVPFTDATAGLIGASELSKMKSSALLINTARGEIVDEPALVSALKSGRLTGAAIDVFAKEPLDHAAAAVFKDCPNLILTPHIAGVTRQANVRVSHVTVENVLKVLAKEGV

SEQ ID NO: 22381 - protein, 407 aa, Labrenzia alexandrii DFL-11
MVGPALAQVYGHEYEENAAPIRDGEQPVVPLDTQDPSFNAWRTPLPSYEGQKENREPGLVDPQRFFGQGYMQLPTFLHQPLAFTPEDLAAGEVDVAIMGAFTDMGGGARGASRGPNAVRNSSIYLGYGARQPHMHVMVDPLQDMTVVDYGNAPNDMMSTERTIHAVRSFVRQAAEVQHEGGSRVIPFIIGGDHSLMYPDVAALTDVYGKGNVGVVHFDAHYDAGKYGMGHLINHGMPVYRLIEEGLVEGKNFIQVALRGYYPDEKAFEWMRDNGFRYHTMAEIERRGFDAVMEDVIKEANDGPEYIFVSFDIDTLDPAFVPGTGTPEPGGLMPREVFPIVRRLCAESNVVGFELVELAPLMDPTYVSALNANRVIRECLTGIAMRKQGLTEPHYLSPLTVTHGQGEN

SEQ ID NO: 22382 - protein, 379 aa, Labrenzia alexandrii DFL-11
MRIGVPKEIKNNEFRVGLTPDSVHEITAHGHEVFVETNAGAGIGASDANYEVSGAKILATAQEIFDAAEMIIKVKEPQAVERAMLRPHHILFTYLHLAPDEAQTADLVKSGATCIAYETVVDSQGGLPLLVPMSQVAGRLSVTAGAKCLEKINGGSGVLVGGVPGVEPAKVVVIGGGVVGSHAITMALGLGADVTVLDRNTQVLSNLSQTFGSALKTVYSTKAALEKQVLAADIVVGAVLVAGAAAPKLVTAEMISKMKPGSVVVDVAIDQGGCFETSKATTHSEPTYIVDEVVHYCVANMPGAVPRTSTYALNNATLPFALALADKGAKKALLDDANFLPGLNVHQGKVTCEAVATALGYDYVDPESALNSMAASRAA

SEQ ID NO: 22383 - protein, 393 aa, Labrenzia alexandrii DFL-11
MSASTDVVIVSATRTPVGSFNGSFANTPAHELGAHVIKAALEQAKVDGADVDEVVFGQVLTAGQGQNPARQAAIAAGIPDGATAWGLNQVCGSGLRTVAIAAQQIQTGDATVMIAGGQENMTQSPHCAPMRAGYKMGDYKMVDTMIKDGLWDAFNGYHMGQTAENVAEKWQITREQQDEFAVASQNKAEAAQKAGKFKDEITPFTVKTRKGDIVVEDDEYIRHGATMEAMQKLRPAFNKEGTVTAANASGINDGAAALVVMSAEEAEKRGLKPLARIASWATAGVDPTIMGSGPIPASRKALEKAGWSAEELDLVEANEAFAAQACAVNKDMGWNPDIVNVNGGAIAIGHPIGASGARILCTLLHEMVRRDAKKGLATLCIGGGMGVAMCLER

SEQ ID NO: 22384 - protein, 608 aa, Labrenzia alexandrii DFL-11
MISENRNTILAIVLSLIVLLAWQYFYAGPQLERQQAALQAQQEAEAAQQSAPGGVNPDAPTPSVAGSGTTVAPSATSPQGFASREQALSATQRVVIDTPRLEGSINLTGGRLDDLRLKDYHETVDRSSPTIVLFSPTGSPNPYYSDYGWVADAGASITLPGPDTIWSVNGSSDLTPSTPLTLSWDNGEGLVFNRTFSVDENYMFDVTQSVTNNSGDVVTLYPYGLIARKGIPETTGIWILHEGLLGVFGEEGLVEVDYSDLEEDGPVRPAAVDRGWLGITDKYWAATLIPTPGQEFQPGFSYAAQSGNFQADYLGNAVVVPAGGVGETSSYLFAGAKETNLLDAYEASLSIERFELLIDWGWFYFLTKPMFYAIDFLFHYFGNFGVAILLVTVIIKLFFFPLANKSYVSMSKMKLVQPQMTEIREKYADDRQKQQQALMELYKKEKINPLAGCLPILIQIPVFFALYKVLFVTIEMRHAPFFGWIQDLSAPDPTSLFNLFGLIPWDPPQLLMLGVWPLIMGITMFVQMKMNPAPPDPTQQMIFTWMPVVFTFMLASFPAGLVIYWAWNNSLSIAQQWVIMSRQGVKVELWDNIGSMFKRKKPAADDKS

SEQ ID NO: 22385 - protein, 69 aa, Labrenzia alexandrii DFL-11
MTIGTVKFFNSTKGYGFIQPEDGSNDVFVHISAVERAGLATLNEGDKVSFEVVQDRRSGKSAADNLSAA

SEQ ID NO: 22386 - protein, 406 aa, Labrenzia alexandrii DFL-11
MNGEVLTLDEFLSFNIAILVYFLGVRLNKQFAFLRHYNIPEPVSGGLMVATLALVAYGVFDKEISFSLGARDYLLYCFFTAIGLNARFSDLAKGGKPLLILLMLTVGYMLFQNVIGTGIAVAMGLPVGFGLLGGTISLVGGHGTAIAWGPRLVEQYGVVGAVEIGAATATLGLIAASLLGGPIGNYLIQVKGGKPDPNRPDEGPVIGIETDEEADTSVTHTGLMRAILVLNIAIGLGVALQEALVYGFNLDLPVFVCCLFCGIILSNTVPLIFKKMIWPARSRSLAVISDLALGIFLTMSLMSLQLWTIAGLAGPMMLILAAQIVGAGVFIIFILFPVMGRDYNASVLGAGFAGFALGATPTAIANMTAVTKQYGPAMQAFLILPLVSAFFVDLANAAIIVLFLGG

SEQ ID NO: 22387 - protein, 330 aa, Labrenzia alexandrii DFL-11
MLNAPFPIPDSIMTKPDILMPYRLLPIAEEELAKRFTVHKLHEAEDRQALLAEVGPKVRGVALGFGPFNQALLDQLPNLEIVAGFGVGYDHINVPACLAAKVMVTHTPDVLNEEVADTAIGLMIMAIRELGQAEQWVRDGHWAAKKPYPTTAATLRGRTLGIFGLGRIGKAIAKRAEAFGLDVHYHGRTKQNGVTYPYHATLTGLAEACDTLMVVAPGGPSTHHAVNAGVLEALGPDGVVINVGRGSVIDEAALIKALEDGTIYGAGLDVFEDEPNVPEALLALPKVTVLPHVGSASQATRNAMAMLVANNIRSWFETGAAITPVPEMGA

SEQ ID NO: 22388 - protein, 323 aa, Labrenzia alexandrii DFL-11
MAVDLPRQTDNAFLGDSLKGGSHEPTYGGVLSFMRRRYSRDLTGVDLAVWGIPFDASVSNRPGARFGPQGVRRASAIFDGDPQYPFEFDPFETLACVDYGDCVFDYGHNRDIPGHIEAQTREILQSGTHLFSIGGDHFVTYPLLKAHVEKHGPLALVQFDAHQDTWDDKGDRIDHGTFVGRAVREGLIDPEKSIQIGIRTHAPETCGLEILYGEEVELLGVNGVVELVKDRVGDAKAYMTFDIDCLDPAFAPGTGTPVAGGLTSREALMILRRLGDLNFVGGDVVEVAPAYDHADITSVAGASVALMYIGLLAEKQRQRTEGL

SEQ ID NO: 22389 - protein, 413 aa, Labrenzia alexandrii DFL-11
MKASTVRPIQTKQAGANIGDIMKSTNPVFTGIQTTVFETMSRLAMAHGAVNLGQGFPDVDGPEDIRETAAKALMDGPNQYPPMLGLPELRQAVADANKRFYGLEIDPQTEVLVTSGATEALSDAVMSLVSPGDEVVLIEPLYDCYLPLVERAGGIAVRVRVTPPHWHLDEAALKAAFSDKTKAVLINNPMNPTAKVFSDAELGLIADLCKQHDAYAICDEVYEHLVFDGHKHQPLMTFDGMRERTIRIGSAGKTFSLTGWKVGYITGPASMLDPIAKAHQWTTFTTPPNLQKAVAYGIGKDDSYYQGLADDLSAKRDRMAKGLSALGFEVLPCAATYFLTCGIAGTGLGDNDVEACEILVKDAGVAAVPVSAFYGSDAPTGFIRFCFCKQDAVIDEALERLSRFLTAAHAESA

SEQ ID NO: 22390 - protein, 397 aa, Labrenzia alexandrii DFL-11
MPTTQDRPIVISAARRTPLGAFMGALASVPSTLLGATAISAVLKDAGVSENVVDETLMGCVLPAGLGQAPARQAARASGLPDSCGATTINKVCGSGMKSVMLGHDLLKAGSAGIVVAGGMESMSRAPFLLPDMRGGRKAGSSEVIDHMMRDGLEDAYETGRPMGAFGEATAEKYQFSRSDQDGYAMETLERAQSAVLNGTFASEIVPVPVQTRKATILVEKDERPPQINSAKIPELRAAFGENGTITAASSSANADGAAALVLTSSETAHEHEMPVLAHIVGHATHAQAPEWFTTAPIPAIQKLIKQIGWTVEDVDLFEINEAFSVVAMAAAKELGIPRGKLNVNGGACALGHPIGATGARIVVTLLHALKARGLKKGIASLCIGGGEATAIAIQLA

SEQ ID NO: 22391 - protein, 554 aa, Labrenzia alexandrii DFL-11
MTQKTGGQLLVDALERHGAERVYCVPGESYLAVLDALHDASIPVTVCRQEGGAAMMADAHGKLTGKPGICMVTRGPGATNASAGVHVAAQDSTPMILFIGQIERGMREREAFQEVDYRQMFGGIAKWVAEIDHASRVPEFISRAYHVATSGRPGPVVLALPEDTLVELADAAQPPAWQQVETHPGLSQTADLQKRLWDAERPIAILGGSRWSEDAVAAFTRFAERFDLPVACSFRRQMLFDNLHPNYAGDVGIGINPKLLDRVKSSDLILLVGGRLSEMPSQSYTLLDIPSPAQQLVHVHADPEELGRVYRADLSINASPTGFCKAVEGLQPPAELKGAGEAATAHQDYLEWSGARPQTPGDLQMSGVMDWLENNLPEDAICTNGAGNYASWLHRFHRFRRFGTQAAPTSGSMGYGLPAAVAAKLTFPEREVVCFAGDGCLQMTMQEFGTACQDGANIILLVIDNGMYGTIRMHQERTYPGRPSATKLVNPDFAAMAHCYGAFGETVQTTDEFGPAFERARASGKPAILHLKLDPEAITPAASLSQIRTAAQQK

SEQ ID NO: 22392 - protein, 110 aa, Labrenzia alexandrii DFL-11
MSIQEWIKNEVDTNDVVLFMKGTPNFPQCGFSGQVVQILDYVGAPYKGINVLEDDELRNGIKEFTNWPTIPQLYVKGEFVGGCDIIREMFQNQELQGLMTDKGVQTAQSA

SEQ ID NO: 22393 - protein, 568 aa, Labrenzia alexandrii DFL-11
MQASETAKNGEQLVAKLKAIVGNRHVITNPRSMERFCKGFRSGEGNALAVVQPGTLLEQWHVLKACVEADKIVIMQAANTGLTEGSTPKGEYDREAVVMSTKRMDKIQLIDGGKQIVSFPGATLFSLEKLMAPLDREPHSVIGSSCIGASIIGGVCNNSGGSLVERGPSYTELALFAQIRDDGTLELVNHLGISLGDDPETILSRLEAGDYSDKDIEDTNLKASDTEYHSRVREIDSPSPARFNADKRRLHEASGCAGKLAVFAARLDTYPKPEAEAIFYVGTNDTQVLTRLRRHILAEFEDLPVSGEYMHSEIYDISKHYGKDTLVLIDKLGTDRLPGIFAIKGWVDARLSKIPLLPSNLTDRFMQVVTKLWPNVLPDRMEKFRNDYEHHLILKMRDGGVAEAEAFLETFFQKEEGSYFSCTPREGKIAGLHRFAAAGAAVRYQAVHSNQVEDILALDIALRRDDRDWFEQLPKDIEDGLVHKLYYGHFFCHVLHQDYIVKKGHDPKALKEKMLKILDQRGAEYPAEHNVGHLYKAKPDLADHYMRCDPTNTLNPGIGKMSRRKCYH

SEQ ID NO: 22394 - protein, 216 aa, Labrenzia alexandrii DFL-11
MTASTDTSATNLTDWSQHLEERLALAASVPTDRETGDHILNPDVGPYAFWKGPPRDAAVLIGIRNTAAGPSVVLTQRTPHLKSHAGQVAFPGGKIDPDDNGPVEAALREAQEEIGLDPAQAQPLGHLAPYLTGSGYRVTPIVAEVRDPVQFVPNPDEVEDVFEVPFEFLMNPANHQKLSREWQGKRRYFYAMPFAGRHIWGVTAGIIRSLYDTVYR

SEQ ID NO: 22395 - protein, 430 aa, Labrenzia alexandrii DFL-11
MTNFESLGLSSSLLSAIKDNGYEAPTPIQQKAIPLILDGQDLMGLAQTGTGKTAAFGLPLIERLLAEPRRAAPKGTRALILAPTRELVNQIAKNLISFLKTTPLRVTSVVGGVSINGQVKRMSKGTDILVATPGRLLDLVDRNAVDLGSASYLVLDEADQMLDLGFIHALRKIAGLVAKDRQTLLFSATMPKQINELAQSYLTDPARVEVSPVGRTADKVRQKVHFMDSKAKTGFLIDVLSDQPDDMSLVFCRTKHGAERLMRKMAQAGIAAGSIHGNKSQNQRERAIKELRSGAIKVLVATDVAARGIDIPGVSHVYNFELPEVAEAYVHRIGRTARAGADGDAVALCAPEEIGLFRQIEKLIGIDIEVASGEAPPLSAAKSAKRGKNNKSGGGGKPRFQKAAGAGDNDNGRRFAKNRRRRPQARKNAA

SEQ ID NO: 22396 - protein, 320 aa, Labrenzia alexandrii DFL-11
MTSHGYESGRLNLPFVGICTFGKYPYQPDWDAIDADVAVLGAPFDFGTQWRSGARMGPRAIREASTLFSFGHAGAYDFEDDITYLPAETTQIVDIGDADIVHTDTIESHKRIEFGVRKILEAGALPVVLGGDHSINIPCINAFDGEEPIHVVQIDAHLDFVDERHGVRYGHGNPMRRAAEKSYVTGLTQIGIRNVSSTARDGYEAARQMGSDIVSVRQARKLGIDVLLAKIPKGKRYYLTLDIDAFDPSIAPGTGTPSHGGFLYYEILELIDGLAKQGEIVGMDLVEVAPDYDPAGVTSVLAAQILMNTIGRILHQRSKS

SEQ ID NO: 22397 - protein, 307 aa, Labrenzia alexandrii DFL-11
MHDGDSDRRSRGRRGGKREFGGPQDFGSDFGGSDFGGDYGGGRDGGHRGGRDNDFGGGSGRGGYGGGGGGDRGGYGGGRDGGYGGGDRGGYGGGGGGRDGGGYGGGGRGGYGGGGGREGGYGGGDRGGYGGGGGGGGRDGGGYGGGGRGGYGGGGSREGGYGGGDRGGYGGGGGGRDGGYGGGGGGRGGFGGGNREGGDRPPRRDYPPVERGPRQSGVVKFFKSDKGFGFITPDDGETDVFVHISAVERSGLASLDSGQRISFETEPDRRGKGPKAVNLQMLEEDGSSGGADDQPVNDGTGEQPDYE

SEQ ID NO: 22398 - protein, 337 aa, Labrenzia alexandrii DFL-11
MTSPAQDPNTSESAELHMEYIVSAERALETEMAGLSALRVALKDGLAAPFQKACSLIQSISGRVIVSGIGKSGHIGTKIAASLASTGTPAFFVHATEASHGDLGMITQDDVVLALSWSGETQELASLVAYTRRFKVPLVAMTSRLDSTLGNASDIVLKLPSVAEACPHGLAPTTSALVQLALGDALTVALLEGRGFTVQDYKLFHPGGRLGASLKSAKDIMHSGEALPLVTASTPMTDGIVVMSQKGFGVLGVVDELNQLMGIITDGDLRRHVTTNLLEKTAGDIMTRGPKTVHPGALSASILELLNSSSITTVFVVEDSRPVGIVHMHDLLRVGAA

SEQ ID NO: 22399 - protein, 545 aa, Labrenzia alexandrii DFL-11
MSDDTSNQGIPDPDGAANMIDTDYEIGQDNIETQVGPFNLDIHNPVFLVSGLTIVAFVFLTLAFQTEVGPIFDAMRKWLTSNLDWFFILSGNVFVLVCLTLIVTPLGSVRIGGKDADPDYTYFGWFAMLFAAGMGIGLMFFGVLEPVYHMAFSSPLGVPSPFDADGNLIEENVAAAKAMGMAATIYHWGLHPWAIYAVVALSLALFSFNKGLPLTMRSVFYPIFGERTWGWPGHVIDILAVFATLFGLATSLGFGAQQANAGLEFVFGIPVSSTAQVFLIIGITLVALVSVMRGLDGGVKVLSEINMMIAALLLLFVIIAGPTMTIVSDFFANLGAYAREVVPLSMPFGREDDGFRQGWTAFYWAWWISWSPFVGMFIARVSRGRTVREFVICVLIIPSIVSVLWMTAFGGTAIHQVLTDSGSQVREYVIASYSPELSLFGMLADLPFASITSFIAIILVIVFFVTSSDSGSLVIDTITAGGKVDAPVSQRVFWCTFEGLVAIALLLGGGLGALQAMAVSTGFPFTIVLLLACYTIFKGLKDEPR

SEQ ID NO: 22400 - protein, 251 aa, Labrenzia alexandrii DFL-11
MLEIKNLHARIAEDETEILRGIDLTVNAGEVHAIMGPNGSGKSTLSYILAGKDDYEVTEGEILFNGENMLDMEPDERAAAGMFLAFQYPIEIPGVATMEFLKTAMNAQRKARGEDTLSIPDFMKRVKEAAAHLNVSMDMLKRPLNVGFSGGEKKRAEILQMSLLEPKLCVLDETDSGLDIDALRIVSEGVNKLRGPDRAMVVITHYQRLLDHIVPDVVHVLSKGKIVKTGDKNLALELEKNGYADIINAAA

SEQ ID NO: 22401 - protein, 393 aa, Labrenzia alexandrii DFL-11
MKDIVITSAARTAVGSFGGSLKDMAPIDLGTAAAKAAIERAGIQADQVEQAFFGNVIHTEPRDMYISRVASRQAGVPDHAPALTMNRLCGSGLQAIVSSVQAISMGDGDVTLAGGAESMSRSGYLMPAARWGQKMGDTTAHDMMTGALHDPFGIGHMGVTAENVAEQNNISRERQDAFALESHRRASEAIRNGHFKDQVIPLTVGRRGKETVFDTDEHVRHDAKIEDIAKLRPVFKKDGLVTAGNASGLNDGAAAITLMTSEKAAELGATPLVKIRAYGVAGVDPAVMGIGPVPAMQIAMKRAGITAADLDVVESNEAFAAQACAVNDLLGLPGEKVNPNGGAIALGHPIGATGAIIMTKLIYELKRTGGSLGAATMCIGGGQGIAIIVENAG

SEQ ID NO: 22402 - protein, 323 aa, Labrenzia alexandrii DFL-11
MSSLEVDVIRNQPLGGNQMPRFGGNASMMRLPVHDTAEGLDACFIGVPLDIGTSNRSGTRQGPRQIRAESCMLRPYNMATGAAPFDSLQVADVGDVALNTFDLKKSVALIEDAFDSVLKTGAVPLALGGDHTLTYPILRAIAKKHGPVALIHVDAHADVNDEMFGEKIAHGTPFRRSLEDGCLAADKVFQIGLRGTGYSPDDFNWSRRQGFTVIPAEDCWHTSLVPLMETIRQKIGDHPTYVSFDIDSLDPAFAPGTGTVEIGGLTIWQALEIIRGCRGLNVVGADLVEVSPPYDPSGNTALVGANLLYELLCVLPGVRYTDS

SEQ ID NO: 22403 - protein, 326 aa, Labrenzia alexandrii DFL-11
MIGVISYLVFFSTVAAILAIAVLGLNLQWGNTGLFNGGVVASFGAGAYGTLILGGTPQDGHLGGFDLFYPLALLGGMIFAGVLAWVVGKLTLRLRHDYLAIATFGVAVAFENVMRNATAVTGGAQGIRGFERPLQSLIGSGFTYNLVFLIAVLICLVLVYVFLERLTVSPFGRLLRAIREDETAARSLGKSPDKVRLAAFVTGSVIIGLAGSLYGTFYAFVSPQDVLPILTFQIWAMLIVGGAGNNKGAMAGAFLIWGSWTFSGWALSRFAPVEVQLYTGSIQFVLIGMVIVGMLLWRPQGLFPERLVVSQPGGGSRGKTQAEGLT

SEQ ID NO: 22404 - protein, 320 aa, Labrenzia alexandrii DFL-11
MEFLGLVNYALFMAIFIAIYALLVLGLNIQWGFAGLFNAGIAGFFAVGAYTSAILTTEAADGRIGGFDLHFVIGWIGAMIAAALVAWPIGKICLRFRSDYLAIASIGIAEIIRLVIKSEPALTNGARGIPGIPRPMSDIGYMESQVAYLIIVLAVLIAAYVLVERQFNAPWGRMMRAIRDNEDAAKAMGKDVEFRRLEAFIFGAALMGLGGALFAHFNRSITPEAIDPMVATFLVWIMLILGGSGNNRGAILGAAVVWIIWSVSEIATDRLPHEYAIQAKYIRLFLIGLMLQLVLRFRPEGLLPEPLRGDQRSAKDGADH

SEQ ID NO: 22405 - protein, 389 aa, Labrenzia alexandrii DFL-11
MDAQKNETPGRGGYRGEQENMGTKLTPVIAGFIPLLDSAVLVAAKEKGFAEREGIALQLIRETSWANIRDRLAVGHFDVAHMLAPMPIAASLNLTSLAVPMLAPMVLGLGGNAITVAIPVWRQMAGFGADPDGDPTSTGSALAKVLSKRRENGDSLLRFGVVHPFSGHAYELRYWLAAAGLDPDTDVEISVLPPQLMADALATGQLDGYCVGEPWNTAAVQAGTGRIATYKQAIWPDSPEKVLGVTRKWANAHPGTLSALMRAISDAADWCARPENLNELAKLLAGPNFLACSPGLCLPALGGDMRLGQNTRKSIPDFLTFSGGARAAPSPAQGVWFYSQMVRWGQAVSDPKADREAAAIFSPALYEEALGIGPDEGAQTIRLFDMGTV

SEQ ID NO: 22406 - protein, 572 aa, Labrenzia alexandrii DFL-11
MKHKGMVLAALAALFSAAIITLILPAAVRRMIDSGFGADDPALVNSYFAVLIGVVCALACASSVRYFLVMWLGERVVAEVRADVFAHMTRLSPSFYDSAKSGEILSRLTADTTQIKAAFGASASLAMRNTIMFTGASVMMVVTSPRLSVIVLAAIPIILIPIIGFGRKVRKRSRFAQDMLADASAYAGEMLGSVRTLQAFTHESRSSGIYRSAVETAFTAARQAITARAALTGFAILVIGSSIVAVLWIGASDVFAGRMTGGELSQFLLYSILAAGSLAALSEVWGELSQAAGAAERLSELLEITPEIRAPLNPIPLPDTPRGEIRFEDMSFAYQAAGNLPVVQDLTLTIAPGEKVAVVGPSGAGKSTLFSLLMRFYDPTSGAIRMNGVDLRDLDPDALRRNIALVPQDTAVFGASIAENIAYGLPDAKRQDIINAATAALASPFIETMTNGYDTLVGERGITLSGGQRQRIAIARAVLKQAPVLLLDEATSALDAESEQLVQRALDQLMEGRTTLIIAHRLATVLKADRIVVMDEGRIVETGTHQQLSAAGGLYAKLADLQFGNGKEAKAV

SEQ ID NO: 22407 - protein, 219 aa, Labrenzia alexandrii DFL-11
MMSDADLAADAAAREAARAMQLENLRADETTLRLLFTEARTHYGWQDQDVPDEVLKDLYEIAKMGPTSMNQQPMRVVFIRSDDAKDRLEPGLMEANRPKMRSAPVTAIIAYDLNFWEELPKVFPPNPAAQDIFKNNATAAQVNAFRNGTLQGAYFMLAARAVGLDVGAMSGFDNAKVDEEFFHGTSLKSNFLVNLGYADTDRIFRRLPRFDYTDVCQTL

SEQ ID NO: 22408 - protein, 382 aa, Labrenzia alexandrii DFL-11
MGGILVLNSGSSSIKFALFDESLDETLSGSATEIGGASDLKISSKDLVTKEASADLPDHAAALRAILNAVQTEGVDIANLAGAGHRVVHGGSVLQAAIRVDGQVIAEIERCSDLAPLHNPHNLAAIMALRDLAPDLVQVACFDTAFHASNPEVARRYALPDWPEMETLRRYGFHGISYQGLIKKLADVSETGVPNRLLAFHLGNGASLCAIKSGQSVATTMGYSPLEGLTMGTRTGNIDGNLVLRLAEENGIEDTKELLNKKSGLLGLGGLSDMRTLHAAETDASRFAVEHFCYWAVRHAGSMIAAMGGLDGIAFTGGIGENDAVVRQKIISGLRFLGATCDPQSNDSNRSRIDVSGSTVPIWIVKAEEEKTIAAETQKLIA

SEQ ID NO: 22409 - protein, 323 aa, Labrenzia alexandrii DFL-11
MPEQSPWVQRQKTLKQNIVLVGAPVEEGTGRRGCLMGPDAYRTAGLAATLEALGHYVLDDGNLQPVTVDDIRPPNAIVKNFGAYAGWTRSLFKKASDLGTGDSFPIYLGGDHSLAAGTVAGQAKAAAEKGRPLFVLWLDAHSDFHTLESTDSGNLHGTPLAFACGLPGFDAVLGTPLTHPVSANRVEIMGVRSIDEAERDFLVRHGAGVSDMRRIDEEGIGKLLHPFLNRVRAENGLLHVSLDVDFLDPDIAPAVGTTVPGGATFREAHLVMEMLHDSGLVTSLDLVELNPFLDDRGKTARLMVDLTGSLFGRRVFDRPTRSY

SEQ ID NO: 22410 - protein, 767 aa, Labrenzia alexandrii DFL-11
MSDKNKTESDLTEAALFFHEHPRPGKLEIQATKPLGNQRDLALAYSPGVAAPCLEIADDPSKAANYTARGNLVAVISNGTAVLGLGNIGPLASKPVMEGKAVLFKKFAGIDVFDIEVDQLNVDKFVDAVAALEPTFGGINLEDIKAPECFMIEAALRDRMKIPVFHDDQHGTAIIVGAAVRNGLHLAGKKIEEAKIVASGAGAASLACLNMLVSLGAKRENIWVTDIEGVVYNGRQSLMDQWKAVFAQETDKRTLGEVIDGADVFLGLSASGVLKPDMVERMGKGPLILALANPNPEIMPEDAKAVRDDVVMCTGRSDYPNQVNNVLCFPYIFRGALDVGATSINEEMKRAAVEAIAGLAQEEPSDVAARAYGGKTETFGPNYLIPSPFDQRLILRIAPAVAQAAMDTGVATRPIEDFDAYKDRLNRFVFRSGLIMKPIIQNAAKDPQKIIYAEGEDERVLRAAQVLLEDGIAKPVLVGRPDVLTARCERFGLKIRPDVDFEFVNPQDDPRYRDYVDEYLECVGRKGLPPTAARTVVRTNATVISALAVRRGEADALICGLEGRFTKHMRDIRQVIGVCDTARDLSAMSLLINSRGAMFLSDTFVTEDPTAEEISEMANLAAQEIRRFGIEPKVALLSMSNFGSRDTASSRKMREALDLIWERHPELEADGEMHGDSALSVALRERVMPNGKLKGEANLLLFPNLDSANIAHNLLKVATDALHVGPILLGTAKPAHILTPSVTSRGVVNMSALASVEAQTRAPEQSA

SEQ ID NO: 22411 - protein, 882 aa, Labrenzia alexandrii DFL-11
MTVVGVAVVYPVEAWAQSDQFALQSNLDHVWTMIAAGLVFFMQAGFLFLESGLVRSKNSINVAQKNITDFIFSTMMFGAVGYMLMFGTSWHGLFGWDPSLMMFDSLDDWGLTFFVFQLVFCGTAATIISGATAERVKLEGYMILAATTGLLIYPIAGHWAWGSLLISDNEPWLASMGFMDFAGSTVVHSVGAWISLAAIIIIGPRIGRFENGEVREINGHSAVLATVGCIILWVGWIGFNGGSTTAGTSTFAQIIANTMVAGAIGGMVQMILGRIHSGFYRPDYSINGVLAGLVSITAGCDAVTVWSALMIGATGSGIAFYGQRVMENTFKLDDAIGAIPVHGIAGFWGTIAVAFLARPEYLLAGSRMEQVFVQFIGAAAIFAWAFGVAFAVIWSVNKVWSGFPGGGFRVSEEDEVVGLNAAEHGATLGTGVLQGALKELAYSRVNLSARVDVEHGDEAGELAFLFNRVMTRLQKMDDARRARRLHVERARRTLDRIVTKLSGEMKDMMESQLDSLSAHSQTVSVEARRVKSTSAEASEGASSIGEASTHSRNAIEKTETAAEQLQHAMSEINQEVSSALEAMRYSANEANMTRDAANRMKAASQSIEGLIGVITQISEQTHLLALNATIEAARAGEAGRGFAVVAQEVKDLAEQTSKASEEVTQQVQQIRAVSDELDNKVSSIHEQLSGADATADKIDRVLVETNQSTGQITEDVRMLGGAAKDIAVSAGVIGNTSGGMAEASDSLGQTAEQVEHAVSELRSAFDGLLADILQGQDRRIFPRFDYVSNVDLELGGHSIEARVRNISIDGFMLERTSEMAGVEVGKEVHVRFPDFPVPLKANVSGTAEDRVNCQFDASACEDDSLNDLIDRLEVQNTEQQAA

SEQ ID NO: 22412 - protein, 389 aa, Labrenzia alexandrii DFL-11
MSRRSEPVYLDHNAGAPMRPDVRDAMITVLQDAGNASSVHTHGRKARGRIEEAREAVARLCGAKTRAVTFVSGGTEANMTALAPAWQDQGTPFYLDKLFRSAVEHPSVVTGGRFPAIDQAVVPVDSHGVVDLGALEDLIKDAAPSLISVMAANNETGVIEPLSDIAALAAKYSHFFHVDAVQAAGRMPIDIEAWGADVITLSAHKFGGPQGMGAVVVRSTARVPAPLMVGGGQENWRRGGTENVSAIAGFGIAAKAVLEDAADTSHFSALREKLEDGLRTVCPETVIFGEGTDRLVNTVCFAVPGIAAETALIAFDLERVSVSSGSACSSGKVSVSHVLTAMGVDEDTARGALRISMGWDTGTQEIERFLEVWPKIVDRLNPEARNKAA

SEQ ID NO: 22413 - protein, 394 aa, Labrenzia alexandrii DFL-11
MAPVILVLNSGSSSIKFSLYDGPAEQVTGQISGLGAKPHLNLEALLSGRKIDRALDSTDGNSHGAALGALLPILNEELGGRSVAAVGHRVVHGGTKHDLPVHITGAVMQELRVLEPLAPLHQPHNLAGIEAARAAFPGAEQVACFDTAFHRKHPWVNDTFALPRSFYDEGVRRYGFHGLSYEYICEHLKKHTPDAYEGKVIVAHLGNGASMCAIRAGQSIGSTMGFTALDGLPMGTRCGQLDPGAILYLMTTKGMSADEISDLLYKKSGLKGLSGLSQDMRTLSQSDDPRAAEAIEYYVFRVRRELGAMAAVLSGVDTLVFTGGIGENSALIRDRVCADQEWLGIQIDPALNNAGDGTISTQCSQVAVLVVPTNEEEMIRRHTEALLASHQFPA

SEQ ID NO: 22414 - protein, 337 aa, Labrenzia alexandrii DFL-11
MSDETSNEPDDFETDDDGTEFVAPKGRFDIPLPDPLGAMPSDTKAGFVALIGAPNAGKSTLINQLVGTKVSIVTHKVQTTRSIVRGVAMHGTAQLVFIDTPGIFKPKRRLDRAMVDTAWGGARDADVIALLIDARKGIDEEVEQILKRLKGQSAPKVLILNKTDVANREKLLKLAQKANEYLEFEETFMVSALTGDGTQQILDYFASKMPDGPWLYPEDQPSDLPLRILAAEITREKLFERLHQELPYISTVETERWETKKDGSARIEQTIYVERDSQKSIVLGKKGQTIKQISQASRSEISDIIEAPVHLFLFVKVRENWADDPERYREMGLEFPK

SEQ ID NO: 22415 - protein, 540 aa, Labrenzia alexandrii DFL-11
MTTKLHVYQSIARAIKDHGVETMFGLMGDANLFMVDSFVRDCGGRFVPAAHEGSSVLMALAYTHVSGAVGVATVTHGPALTNCLTAITEGVRGHLPIVLFAGDTPAENPRHLQGIDQRELIKATGAGFEQLRTPETVAMDVARAFYRAQVERRPIILNMPADFMWQEAAFEKHILNVFTAPGGVAEGGILDEAVGMIASARRPMILAGGGAIDARDELIRLADRLEAPLATTLKAKGLFQDHPYNIDIFGTLSTPAAYDLIAQTDCIVCFGTGLHDFTTDRGKLMRDKRIVQVDVEPTAIGGALHPDAALLADAGLTAETILYWLNEAEIPASGFTRELDTAALTAHPVDKKTTADGFVNYVGALERFEAALPKDRVLVTDGGRFMTEVWCRISAPDPNSFVNTANFGSIGLGLQEAIGAGIAAPDRPVVLFTGDGGFMMGGINEFNTAVRLGLDLIIVVANDSAYGAEHIQFLDRQMDPSLTTFQWPSFAEVATSLGGTGYEVRSDDELQTALNALENRKGPILIELRLDPHDVPRMRI

SEQ ID NO: 22416 - protein, 383 aa, Labrenzia alexandrii DFL-11
MKIAVPRETDAVETRVSATPDTIKKLIGFGATVVVEKDAGKLSRIPDQDYKDAGAEIAADYASTVGDADVVLKVRRPSAGELGAMKKGALVLASMDPYGNEKDVEAMAKAGITAFAMEFMPRITRAQVMDVLSSQANLAGYQAVIEGAAEYDRAMPMMMTAAGTVPAARVFVMGAGVAGLQAIATARRLGAVVTATDVRPAAKEQVESLGAKFVAVEDEEFKQAETAGGYAKQMSEEYQKKQAELVATHIAKQDIVITTALIPGRPAPQLVSKAMLESMRPGAIVVDLAVERGGNVEGAKPGKIATVAGVKVVGHLNMAARIGASASALYAKNLFAFLETMIDKEAKALKPDFEDELLQATVLTRDGKVVHPAFAPAESSGGE

SEQ ID NO: 22417 - protein, 589 aa, Labrenzia alexandrii DFL-11
MNAETDPNETIPLIRRLFGENLRTYLPQYALAFVFMGFVAATTAASAWIMRDVVNEVFVNRDQQMVYVIAGVVMLIFAVKGVSTYGQLVVLARVGNAIIASLQKRLFDHILQLDQAYYDRKSLAEINVIVTQGVNSARMTMDMVVVSLGRDLLTLIGLVIVMVVQNPLLSFFAFVIMPPAVIGVAILIRRVKKHMNRQVVSTAKITAALQETVLGVRVVKAFGMEDAMRGRMGHSVEDVERQANKIATLSARTSPMMDTLGGFAIAMVIFYGGYSVVELGQDPGSLFSFITALLLAYDPARRLARLNVNLGREMVGLRLMYDLIDERADLKDRDGAKPLAVSSGEIVFDDVRFSYGDGAALSGASFKAEPGKMTALVGASGAGKSTVFSLIERFYDPQSGEILIDGQPVQEVQVATLRRSIAYVGQDAYLFNMSLRENIGVGVPGATEADIIEAAKAANAHDFITTLPDGYNTSAGEGGNNLSGGQRQRIAIARAMLRDAPILLLDEATSALDAESEAKIQSALETLMTGRTTLVIAHRLSTVRHAHQIHVMDQGRVVESGTHDRLYDHDGIYRRLCDLQFQDKTEAAE

SEQ ID NO: 22418 - protein, 328 aa, Labrenzia alexandrii DFL-11
MADLGPTNPAPHQKDLRLMKIVAGNSNRALAEEISQYLDVPLAKCQVRRFADQEIFVEIQENVRGEDVFVVQPTSYPANDHLMELLIIIDALRRSSARRITAVIPYFGYARQDRRASGRTPVSAKLVANLITEAGADRVLTLDLHAGQIQGFFDIPTDNLFAAPVMTRDIKERYATDNVMVVSPDVGGVVRARALAKRIEAPLSIVDKRRDKPGESEVMNIIGDVNGCDCILVDDIVDSGGTLCNAADALLAKGAKSVTAYITHGVLSGGAVARVTSSKLKELVITNSIEPTAAITAAPNIRAISIAPLMGEAINRTALEKSVSSLFN

SEQ ID NO: 22419 - protein, 342 aa, Labrenzia alexandrii DFL-11
MFNQTSFAPAASLWELFMSDPFFQPVSGFDLPRFAGVPTFMRLPHVELDNPRLPEVQIGLIGAPWDGGTTNRPGPRHGPRQLRDASTMIRAQNGDTGVRPFELVNCADLGDVGPNPASVDDSLHRMTTYYDEVLDAGVVPLTAGGDHLCSLPILRAIANKHGPVGMIHFDSHTDLFKSYFGGMQYTHGTPFRRAVEEELLDPKRVVQIGIRGTAYDFEDRDFAESVGIRVIAIEEYFARGVQDVLAEAKEIAGQGATYVSYDIDFVDPAFAPGTGTPEVGGPNSFEALQVARMLDGVNIVGADLVEVSPPFDQSGGTAFLGVSIMFELLCNMALTLKGAEQE

SEQ ID NO: 22420 - protein, 391 aa, Labrenzia alexandrii DFL-11
MKTISGFDRIGEENAFAVLARATQLASEGHDIINLGIGQPDFQTPDHIVEAAIKALRDGHHGYTPATGIAPLREAVSADLHKRHNVDSNPDNVVILPGGKVTMFMAILMFGEPGVDILYPDPGFPIYRSMIEFTGARPVPVPIREENNFAFSAEETLSLMTDKTRLLILNSPANPTGGVTPRSEIERLVKGLAAFPDAAVLSDEIYSQMTYDGMEHVSLLSFPEIRDRLILLDGWSKTYAMTGWRLGFSLWPDQLIDKARKLAVNAWSCVNAPAQYAALAALTGPQDAVHAMVREFDQRRKIVVEGLNAIDGITCKTPLGAFYAYPNIKQTGWQAKKLASALLEDAGVAVIGGPDFGVLGEGYIRLSYANSSENIQRALKRIEIFLSGQKS

SEQ ID NO: 22421 - protein, 325 aa, Labrenzia alexandrii DFL-11
MGVAATAAGATTLEDVKGKGFIQCGVSQGLPGFSNPDAQGNWTGLDVDLCRAMAAAVFGDASAVKFTPLSAKERFTALQSGEVDVLSRNTTWTMSRDTQLGLNFAGVNYYDGQGFMVRKDLGVTSALEMSGASVCTNTGTTTELNVADYFRANNMPYEIVAFEKADEVVAAYDAGRCDVYTTDASGLYAQRLKLTNPGDHMVLPEIISKEPLGPVVRQGDDEWFNIAKWTLNAMINAEELGVTSANVDEMKASDNPSVKRLLGAEGAFGEAIGLSNDWAYNIVKNVGNYEESFNANVGPDTPLGISRGVNALWSNGGFLYAPPVR

SEQ ID NO: 22422 - protein, 658 aa, Labrenzia alexandrii DFL-11
MDAQNLDWIKVGHVDDLPEGRVKTVTARTTSICLSHFDGQWAAMENHCPHQRGPLGEGSIEKGADGKCWIRCPWHGWDFDPLTGKPPGGHEDSGQELYPLKVESGEIFVGLDPEPEHERTVTDVMAETMVNWGVKRIFGMVGHSNLGLADAIRRQVNKGKLGYIGIRHEGAAAFAASAYGKLTGKPAACLTIAGPGATNLLTGLWDAKVDRAPVLALTGQVQTQVFGPGAFQDIDLKSAFESVSRFSQPVLSTSKHAELMSLALKTALVERDVANLIFPDDVQTLPSAKEAGHPQGRLSRIEVTPSSEDLEEALKLINGAKRPAIVLGYGAKDVRDKVIALAEKMDAPVLTTFKGKGLIPDTHPLSAGVLGRSGTPIASWFMNEADLIVSLGSSFSNHTGIAPYKPIIQVDFERMQLGKFHPVTLPVWGEIGTFCDAVLGQVKRPADAPDQKAEVAERWAIWREEKERRLSEERTGGIHSAAVFKALTELCPEDAIIPVDVGNNTYSFGRYFEPRGQRILMSGYLGSIGFSLPAALGAWCATQDFEEYRGRKVISISGDGGFGQYAMEFTTAVKYGMNITHILLNNSELGKISKEQRSGEWPVWETSLTNPSFAAFARLCGGHGHRVTEAGELHSAIAEAIAHDGPSLVEIVTDADLV

SEQ ID NO: 22423 - protein, 468 aa, Labrenzia alexandrii DFL-11
MKLRDTLKFTRRTALGTLLAVTALAPATGAMADMLDVEKDELTFGFIKLTDMAPLAVAYELGYFEDEGLFVTLEPQANWKVLLDRVITGELDGAHMLAGQPLAATIGFGTKAHIVTPFSMDLNGNGITVSNEIWEMMKPNIPKMDDGRPQHPISAAALKPVVEKFIDEGKPFNMGMVFPVSTHNYELRYWLASGDIHPGFYSETDISGQIMGEALLSVTPPPQMPATLEAGTIYGYCVGEPWNQQAVFKGIGVPVITDYEIWKNNPEKVFGMTKEFTEENPNTTLAITKALIRAAKWLDENDNANRMEAVEILARSEYVGADAEVIANSMTGTFEYEKGDKREVPDFNVFYRYFATYPYYSDAVWYLTQMRRWGQITEHKPDSWYDEVAKSVYLPDTYLKAARMLVEEGHVAEEDFPWDSDGYRTPTPAADIIDGIPYDGKQPNAYIDSLPIGLKGKQVVDGNEVVGG

SEQ ID NO: 22424 - protein, 280 aa, Labrenzia alexandrii DFL-11
MALTKILRKEEGKIMFRNFTAAALFTFAAALPTQADTLDDVVDRGELRCGVVLDFPPIGYRDANNEPAGFDVDYCKDLAAALEVEATIYPVTWAERLPVIVTGRADVVFGATSDSLARARTVGFTIPYAIYYAQGVVNADSGIESFEDIRGKRVAGAIGTVPEQEWLKIAEEWGEEHLYQGYQSENEVFLAVAQGKADIGITTNTAVKPITDQYDTVLAGPRMPWTTDYTSVVGKREDVTWLNFLNLFVTHQVRSGRYAELWGKYVGGEAPELRIPGVLY

SEQ ID NO: 22425 - protein, 591 aa, Labrenzia alexandrii DFL-11
MCGICGEVVFSSGQADTSRVDRMAQAMAARGPDAMGVTMRGRVAFGHRRLKIIDLSDQGAQPMQDPELGLSLVFNGCIYNYQELRAELSGKGYRFFSTSDTEVILKSWKEWGRDCFTRFHGMFAVAIHEHDSGRIHLARDRFGIKPLYVSEAEGRLAFASSLPALLKGGNIDRSIDKVALQHYMSWHSVVPAPRTILNGVRKLGPATVRTYETDGSFKNTVYWEPDFRKSEEDVNRSADDWRDLVLEGLRKAVRRRMVADVPVGVLLSGGVDSSLIVGLLAEEGQKDLATFSIGFEEANGEKGDEFQYSDLIANHYGTNHNKIFIPSSELLDNLPGAIGAMSEPMVSYDNIGFYLLSREVSKHIKVVQSGQGADEVFGGYHWYPKLTGSNQPVADYADAFFDRSEEQLNEAISPDYHCDRNESIAFVETHFGMAGADDPVDKALRLDTNVMLVDDPVKRVDNHSMAWGLEARVPFLDHELVELAGRIPSEHKLAQEGKGVLKEAARLVVPSEVIDRPKGYFPVPALKYIQGPYLEMVRDTLTNSKAKGRGLFNPAYLEKLFENPTQYITKLRGSELWQVALLEMWLQEQEA

SEQ ID NO: 22426 - protein, 226 aa, Labrenzia alexandrii DFL-11
MTMAASQAPVGEALATLRAEAQDVVRSLRERITKLDDDAIDLILRQARSHYAWQDKPVTRDTLELLYEITAAGPTSMNTCPARFFFIESQAAKERLAKSLKDKNIDKMMSAPVAVIIAHDLDFWKELPFLFPHEDRRPHFEGKPEHSETTAFRNGTLQGAYFMIAARALGLDVGAMSGFSNKIVDEEFFTGTKLKSNFLCNLGYADESALFQKLPRLPFETACKFL

SEQ ID NO: 22427 - protein, 70 aa, Labrenzia alexandrii DFL-11
MRENGTIKFFNHDRGFGFITPENGGKDVFVHVTAFEQAGIGTPVEGAKVSFVAEDDRRGRGKQAAQLELL

SEQ ID NO: 22428 - protein, 416 aa, Labrenzia alexandrii DFL-11
MARLVLKFGGTSVADLDRIRNVARHVKREVDAGHQVAVVVSAMSGQTNKLVQFCRDASPLHDAREYDAVVASGEQVTSGLLAIVLQDMGVNARSWQGWQVPIKTDENHGAARIREIDGAFLTERLEQGQVAVLAGFQGISPDNRISTLGRGGSDTSAVAIAAAIKADRCDIYTDVDGVYTTDPRIVPQAQRLDRVSFEEMLEMASLGAKVLQVRSVEMAMVHGVRTFVRSSFDDPDAPQTGQDGLPVGTLICDEDELVEQQVVTGIAYAKDEAQISIRDVADKPGVAQSVFGPLADASINVDMIVQNISPDGKTTDITFTVPEADFARAKKVLEDNRDEIGFQNLEGAADVVKVSVIGIGMRSHAGVAAQCFSGLASKGINIRAITTSEIKISVLIDSAYAELAVRTLHSLYGLDG

SEQ ID NO: 22429 - protein, 328 aa, Labrenzia alexandrii DFL-11
MAKKKPVVVVTRKLPDVVETRMRELFETRLNESDRPFSQAELVEAVRTADVLVPTVTDRIDSSVLSQAGENLKLIANFGNGVDNIDVVTANNRGINVTNTPGVLTEDTADMTMALMLAVPRRLSAGIHALESGDWAGWSPTWMLGHRIWGKRLGIIGMGRIGQAVARRAKAFGMSIHYHNRRRVPGSIEEELEATYWESLDQMLARMDVVSIHCPHTPGTFHLLSARRLKLLKKDAYVVNTARGEVIDENALIRMLEAGELAGAGLDVFEHEPAVNPKLVKLDNVVLLPHMGSATIEGRIEMGEKVIINIKTFMDGHRPPDRVLPSML

SEQ ID NO: 22430 - protein, 318 aa, Labrenzia alexandrii DFL-11
MTLKNKWVQLAILAAIILILPAFFPSGYYYRVGALVFVNALSVVGLVILIGYAGQISLGHAGFAGIGAYACALAPVHLGIPPVLAILLGAAISAVLALLIGRPILRLKGYYLGVATLGFGILVSMVLSNERGLTGGPDGMAVPSLGLRPLLRDMGLRLSGGEFWYIFNAAALLTGIWIALNLYQSATGRAMRALHGSETAAQTVGIDVSRFKLQAFIISAVYASVGGSLLALQNGFITPDVAGFMHSVEMVTMAVLGGVGSVLGATFGAAVLTLLPQILTVFHDYEHLVLGLVMILVMIFLPLGLLPSLAARIRWRGV

SEQ ID NO: 22431 - protein, 528 aa, Labrenzia alexandrii DFL-11
MAPKVLISDKLSPAAVQIFKDRGVEADFLPDVGKDKEKLREIIGQYDGLAIRSATKVTEKIIAAADNLKVVGRAGIGVDNVDIPKATARGIIVMNTPFGNAITTAEHAISMMMAVARQIPAADASTQAGKWEKSRFMGREITGKTLGLIGCGNIGSIVAERGIGLKMKVIAFDPFLTPERALALGVEKVELDGLLSRSDFITLHTPLTDKTRNTIDAAAIAQMRDGAYLINCARGGLADEQAVRDALDSGKLAGAAFDVFVDEPAKENVLFGAPTFVSTPHLGASTEEAQENVALQVAEQMCDYLLSGAVRNALNMPSITAEEAPKLAPFVRLAEQLGSFAGQLTETGIERVRLEYAGAVADMNVQALTSAALTGLLTPLLQTVNMVSAPILAKERGMQIEEVRRDKQGAYETYIRLTVETERQSRSVAGTVFADGKPRIIQVKGINMEAELGEHMLYITNEDKPGFIGHLGMELGNNEVNIATFNLGRTAPGEEAICLVEVDAPVSKEVMARLETVSHVKQVKPLRF

SEQ ID NO: 22432 - protein, 262 aa, Labrenzia alexandrii DFL-11
MLKRFAGLAGAAMAAVMLLAAPASAELKDILAAGKIKIATPENFPPFGALGADGEYEGYDIDVAKMIAEDLGVELELVPVTSKQRIPFLETDRVDLVIATLGANPERAKSIWFSHAYAPFFSGAFAKPDVAVSSIADFAGKKIAVTGGTLEDLAITEDAPDGAEIIRFGDNAATIAAYVSGQADVIVTGNMVALGISNDNPEFNLEPKFIIANSPSFIGVKTGNMDLLQWVNVFVLHKKLNGKLNGLSVKWLKTPLPPLPAL

SEQ ID NO: 22433 - protein, 722 aa, Labrenzia alexandrii DFL-11
MVMARSGRLLIGTQVIRSSRKNPMTELMSLAPALKAALAKRGYETLTPVQESVLTEAPANADLLVSAQTGSGKTVAFGLALASTILGEEETLGKPGAPIALAIAPTRELALQVKEELTWLYGEAGAVTASCVGGMDPRMERRTLDRGVHIVVGTPGRLRDHIERGALDLSELRAVVLDEADEMLDMGFREDLEFILDAAPENRRTLMFSATVPKPIAELAKRFQKDAVRLSTINAREQHVDIDYIAHPVAPNERENAIINVLRLHEAEKAIVFCQTREGVSRLTARLANRGFRIVSLSGELSQEQRTAALTAMKNGTARVCVATDVAARGIDLPNLDLVIHADLPTGKAALLHRSGRTGRAGRKGTCVLMVPFPRRRQAERTLHFANITATWKGAPTSDEIRAKDKERLLADPVLSAELEEEERVIAGELLALHSAEQLAAAFVKLRQSRLPAPEEVGELNETALQGRDAGSRGGRSAEIKNNFEDGVWFSLSLGHRQRAEPRWILPLICRAGHVTKKEVGAIKIFQNELYFEISGKHGEKFASTVKREGTGEENVTIKLLDARGGQMPQPPKEDNFRGGGNRGRGDRDRGPKDRGDRGDKGGYQNRRPRRGDAPDYEEMGREDTLKPKRGPKRDFDAPRGKKRSRDDVDAAPHHPAYEPLDMKALAKDGDAPRKARKPRDADGDAPRKGKPKAAAKPSGAKKKAPKKNKPSRAQRKADRTQ

SEQ ID NO: 22434 - protein, 439 aa, Labrenzia alexandrii DFL-11
MADALKIGVAGLGTVGASVVQLLEKHAGQIERRTGRSLTVTAVSARNRTRDRGIDTSGFTWFDDPVTMAKEAELDIFVELIGGEDGPAEQSVRAALSRGVHVVTANKALIAKYGVDLARVAEENNACLNYEAAVAGGIPIVKTMRESLAGNEVSRVYGILNGTCNYILTRMEAEGISFEDCLADAQRLGYAEADPTFDIEGNDTAHKLAILTSLAFGTEIDADSIFMEGITSITTADIQAADELGFRIKLLGVAQRTDTGIEQRVHPTMVPKSSAIARIDGVLNAVAVDGDYVGEIVLVGPGAGGNATASSVVADITDIARGDQTPVLGMPATDLVPYERARMRLHEGGYYIRLSVYDRPGAFGEIARCMGDAGISLESIVQKRAAAEDRDRDSADAPQPVILITYETTEIAIKEALDVVMSKGVVAEQPQMIRIEKLK

SEQ ID NO: 22435 - protein, 390 aa, Labrenzia alexandrii DFL-11
MTALIDTLSHEARMAPESGIVEVFNAGQGRDDVIPLWAGEGDLPTPQFICDAAKRSLDNGETFYTYQRGIPELRSALAGYHQRVFGKAFAPERFFVTGSGMQSIQLAVQAIASSGDEVLVPTPTWPNIEAALGIRGVKPVSVPMREVLEGWELDVNDLEASITPKTAAIFLNSPSNPTGWVASEEVLRQVLGLARKHGLWIIADEIYALFYYGEANRAPSFYDIADEDDQIIYVNSMSKNWAMTGWRIGWISAPEALGQVLENLIQYSTSGVPMFSQRAAVSALNDGHTFLEQQVGLAKDGRACVVQGLGALNRVRIAAPQGAFYLFFSIDGVEDTRKFAMDCVRETGVGLAPGTAFGNGGENYIRLCFARQRAHLEEAIQRISVWLPEI

SEQ ID NO: 22436 - protein, 217 aa, Labrenzia alexandrii DFL-11
MKFFVDTADTAEIQELEATGLLDGVTTNPSLIAKSGKNFKDVIAEICKITNGDVSAEVAATDFDTMIKEAHVLRAIADNVVIKLPLTFDGLKACKQLTSEGTKTNVTLCFSANQALLAAKAGATYISPFIGRLDDINLDGMELIREIRVIYDNYGFDTEILAASIRTPNHVKDSAIIGADVVTVPPATLKSLIKHPLTDKGLDAFLSDWAKTGQSIL

SEQ ID NO: 22437 - protein, 392 aa, Labrenzia alexandrii DFL-11
MRTPIGRYGGALSQVRADDLAAIPLQALKERNSKVDWEAVADVILGCANQAGEDNRNVARMAVLLSGLPVSVPGTTVNRLCGSGMDAIGMAARAIRAGDAELMLAGGVESMSRAPFVVGKATTAFSRNAEMYDTTIGWRFKNKKLEKAFGTHSMPETADNVAEDYKISREDQDKFAAESQRRWAAAQEAGVFNDEIVPVSIPQRKGDPIVVDTDEHPRPGTGVEALAKLRGVNGPDLTVTAGNASGVNDGSAAALIASEEAAGANGLTPKARVVAMAAAGVPPRVMGIGPVPATQKVLGLAGLTLEQMDVIELNEAFASQSLAVLRELGLPDDAPHVNTNGGAIAIGHPLGMSGSRLVLHAANQLQRTSGQYALCTMCVGVGQGISLVLERV

SEQ ID NO: 22438 - protein, 552 aa, Labrenzia alexandrii DFL-11
MYRYDEFDASFVNQRTEQFKDQVRRRMAGELSEDEFKPLRLMNGLYLQLHAYMLRVAIPYGTLNGRQMRKLAHIARTYDKGYGHFTTRQNIQFNWPKLEDTPKILEELAEVEMHAIQTSGNCIRNVTADHFAGAAADEIADPRPYAEILRQWSSLHPEFSFLPRKFKIAITGAPNDRAAVQVHDIGLQLTRNEAGEIGFEVFVGGGLGRTPMIGRKVRDFLPEEDLLAYSEAILRVYNRYGRRDNKYKARIKILVHETGLEDLKADIEGEFEKIRYGVLRLPDEEVRRIEAYFVPPPLEVGSDISAKVEVRRETDAAFAQFLAHNLNPHRVPGYTSVTLSMKPIGGIPGDASDAQMDVIADLAERYGQDEIRISHEQNVILPHVKLDDLPALFDQLVAADIAEGNAGLITDIIACPGMDYCALATARSIPVAQRISERFGTAERQAEIGELKIKISGCINACGHHHVGHIGILGLEKKGEEFYQVTLGGSANENASIGEIVGRGFSSEEVVDAIETLVDTYLELRSGKDETFLDAYRRVGEAPFKEALYGAA

SEQ ID NO: 22439 - protein, 479 aa, Labrenzia alexandrii DFL-11
MWGVIDPEGLQAVAREIVDQYFVSRGWFVMLSVTIMLLFCLGLTFTRFGDIRLGADDDRPEYSTPTWIAMLFAAGMGVGLLFWAVAEPLTHFAFLKDKISVPEAADSALLATNFNWGIHAWAIYGTTALSIAYFSFRRGTPMLVSAPLKSLFPGEKWAWVVGWFSDFMAIAAIAIGVGGSIAMGVFQVADGVSVLAGTQTAAPWLVGLIFLVMVIAYIPPLMVDLSTGMAKLSNIAMSLAIALVAYTIIMGPTEFLMNSVIGGIGMYIADVIPAGFRTFTFYGDEVGRWFQDWTLTYMVWWIAWGPFVGVFVARISKGRTIREFVLGVLIGPTLFSTIWFGAFGGVGIFETLNGKGELLALTQTNVERMTFALLDRLPFATVTTLATILAAFLFIVTSVVSAAFVLGMFSTGGNQNPSVKIKVIWGGLLGVLGAAMLLSGSMSAVRTLIALGALPFVFITAMLFACLIKALILDNPKET

SEQ ID NO: 22440 - protein, 341 aa, Prochlorococcus marinus str. MIT 9202
MAGINASAILEASRESIEQNLFLKNKKIIFTSGATESNNLALIGFARNYYKKTGNYGHIITLKTEHKAVLEPLNQLKKEGFLVTEITPEKDGLISEGQFEKNIRGDTFMVSVMLANNEIGVIQPIENISRICKSRGIIFHSDFAQCLGYIELGNLLSDVNMITMSAHKIYGPKGIGLLLIDEEINLEPLIFGGDQEYGLRSGTLPLPLIVGFAKAIEIAVFNQKKNAEKLLSYRNTLLEGLLENNSGLLINGSIERRLPHNLNLTVLDLNGAKLHKLLKSKIICSSGSACSNGEPSHVLLSLGRSFKEAESSIRLSIGLSTNSKDIKQSINIITNTIRSLR

SEQ ID NO: 22441 - protein, 226 aa, Prochlorococcus marinus str. MIT 9202
MTKNLFDNENAIYMGAKRNPENCSIGIFGVNYDGTCSFKPGARFGPEAIRQVSSCLETYCPKIKKDLEDILYVDFGSILIDKNDSKSVIESVKSATNYLISKRLSPIMLGGEHSITRGAIEALVKKYPDLILIQLDAHADLRESYIGNEHSHACTMKRCLEVLPEKKILQVGIRSGTKEEFEIMHSNHQLVNFYPGGNAHELKQALLPYAKSPIYLTIDLDWFDPS

SEQ ID NO: 22442 - protein, 107 aa, Prochlorococcus marinus str. MIT 9202
MDNLTKDKIQKLIDSNPLMVFMKGTKLMPQCGFSNNVVQILNSLGVEFGTFDVLSDFAIREGIKEYSDWPTIPQVYLKGEFLGGSDILIEMYNSGSLKEKIEIELAS

SEQ ID NO: 22443 - protein, 327 aa, Prochlorococcus marinus str. MIT 9202
MQFIDQANIILKAGKGGNGIVSFRREKFVPAGGPSGGNGGRGGSVILIADNNLQTLLDFKFKREIIAEDGCKGGPNKRSGASGEDTILKVPCGTEIRDIKTGIILGDLTKHKQSLTIAIGGRGGHGNAYYLSNQNRAPESFTEGKDGEIWEVQLELKLLAEVGIIGLPNAGKSTLISVLSSARPKIANYPFTTLIPNLGVVRKIDGNGCLFADIPGLISGAADGVGLGHDFLRHIQRTKILVHLIDSIAENPLHDFEIIEQELKKYGKGLLDKERIIVLNKMELVDDDYLKIITKKLEDLSKRKVLVISSSLKKGLSSLLSEVWKRI

SEQ ID NO: 22444 - protein, 390 aa, Prochlorococcus marinus str. MIT 9202
MENNFIYLDNASTTPLSENVLNIINLTYRNYWHNPSSTYELGIKCSKYLEKIRSKIAYIFEADPEDIIFTSGSSESTNIVFNNINEKFKNGRVVISNVEHQATTICSNKLRKQNWDIYEWMVNNDGILNISNIEKILTNETKLVSIIWGQSEIGTIQPVQFIGSKCEELNIMFHLDGTQILSNGIFSWKDLKCDFLSLSAHKFGGPKGIGILLTKEKSRQILKNKDISLTQEYSIRQGTQALPLIAGMYESLKNINGKIKLYDYITEFPSNNIIKLKNYLFQKIKDNNHIKITGSINHRLPNHISFLLLNKLFEPIRAYKIVNFMSENRIAISSGSACSSSSGKPSSTLKNIGLKDDELYSNIRVSLGSINNKLEIDKFLELIQICIEKF

SEQ ID NO: 22445 - protein, 463 aa, Prochlorococcus marinus str. MIT 9202
MSISSYLTKKFSKSLFFPAHNRGTALPKKLVTLLKNRPGYWDLPELPEIGSPLSQNGLITKSQREFSDKFGAKGCFFGVNGASGLIQSAIIAIANPGETILMPRNVHISVIKTCAMQNINPIFFDLEFSSVTGHYKPITKIWLENVFKKINLDENKIVGVILVSPSYHGYAGDLEPLIDVCHQKNLPVLVDEAHGSYFLFCENLNLPKPALSSNADLVVHSLHKSLNGLTQTAVLWYKGNLINERNLIRSINLLQTTSPSSLLLSSCEESIKDWLNKKSLSKYQKRILEAKSIYKKLIQKNIPLIETQDPLKIVVNTSKAGIDGFTADKFFYRNGFIAELPEMMTLTFCLGFANQKDFPDLFEKLWHKLLLNSKKSKSLEVLQTPFKLVQAPEIEIGIAWRSETRSIPFSESLNKISGDIICPYPPGVPLLVPGEKIDIDRFNWINNQSLYNKDLVNFNIRII

SEQ ID NO: 22446 - protein, 586 aa, Prochlorococcus marinus str. MIT 9202
MALLVKKFGGTSVGDIKKIKNIARNICQSKEAGNEIVVVVSAMGQATDDLNCLAESISKNPNRRELDMLLSTGEQVTIALLSMALNEFGIPAISMTGSQVGIITESIHGKARILDIKTERIQNYINQGFVVVVAGFQGTTLSHTGSMEITTLGRGGSDTSAVALSTALGAETCEIYTDVPGVLTTDPRIVPSAKLLDEISCEEMLELASVGASVLHPRAVEIARNYGIKLCVKSSQSESSGTLLESQIQPLPLKRGSLELTKTVNSLEVLENQAVFSLSNIPDRPGIAAQIFEKLSEASINVDLIIQATNDGNNNDITFTVSDLEVKKTAEQCELITSQLGGEYNLKTKMTKLSIQGAGIMGRPSVSADLFDTLSQANINVRLIATSEIKVSCVIEINNLPKAIRFVAEKFKLSDTQIFINPINKKQDQPEVRGIALDKNQVQVSFRKLPDRPGVAASICLALAENNLLFDTIVQSERISSLKTKDISLTMNKQDREKANLVFEALTKKLPGSYIEDGPAIAKVSTVGAGMAFKVGTAGKIFRALANQNINIEMIATSEIRTSCIVLEKDCDNAVSAIHNHFELEK

SEQ ID NO: 22447 - protein, 613 aa, Prochlorococcus marinus str. MIT 9202
MCGIALHFERNEISKNGFYDVEKMLEKTSHRGKDSRCIEEFKSKKNKFNVFLGHNRLSIFDTSDAGKQPFTSINKRFTIIFNGEIYNYKELKNQLINKEGITFRTNCDTEVFLELWSIYGHKCLKKIHGMYSYCILDKEKESLFVGRDPFGIKPLWFYNDKNHYQFCSELKPLLWLRKDGISNCLTQEGLNSYLLLGYVPHTIEFFKGYKQILPGYLYEFNQKGFSKRSISFKEISKPSLNKIKKEINLATQSDVSLGCFLSGGTDSSVIASVVDNSRKVNSYTVDYKANNKSFSMDDINAAKLIASKLHHNHQVIKLDEKEILDNFKLAIKCLSLPVDDTSIASLHAIAKKSNQDGIKVLLSGTGGDEIYGGYLRYFKRRFFRGISSFLRLHTLNLIYNEKLYFIFNNLEKLCSARILLLLFRLLEPGFDTLMAASGSKRFFIYLKNKRNYSLHSLLIKSFKNINKKNLHLESIQKEIIYDSLFYLNDLLLKPFDEILMKYTIEGRPALIPPKLYHSRFEQSFLNNSYQKSKKSLRDILFNKRLSKLIVKNKSGFGAPIKEIVLSNKLEISNSIKNLLSTGLFDENFIREIYSSNDTTTIFRLFALSCWLQK

SEQ ID NO: 22448 - protein, 860 aa, Prochlorococcus marinus str. MIT 9202
MKIVPSEFSNSAWNCFIFAKKIAYKNYQQNVDSDNLLLALIKEDHITKNILKKNNVNLKDLEREIISSLNAKAKMKNKQDNLYIGETLHKIFLKANDIKNTLNDVVISTEHLVYGFTYDDNYGFQILKQKCIPEFLEIIKKMKSDPALKNEFDSSNESLEKYGIDLTQSARDGILDPVIGRDEEIRRTIQILSRRTKNNPVLIGEPGVGKTAIVEGLAQRIINGDVPSALQDRKLISLDMGSLLAGAKYRGEFEERIKNILKKVKESDGKIILFIDEIHTVVGAGASGGSLDASNLLKPMLARGELRCIGATTINEHKQNIEKDPALERRFQKIKVEAPSINDTVSILRGLRERYEVHHSVRISDNALVAAATLSERYINDRFLPDKAIDLIDEAASRLNMVITSKPEEIDEIDRKVLQFEMEKLSLKRETDDFSIERLERINSELISLKDKQTELGAQWKKEKDEIDEISTIKEEIESVQLQIDQAKRSFDLNKAAELEFGTLNSLQKKLKEKSESLVNSQKNGDTSLLRQEVTFDDIAEVVSKWTSIPVQNLNQSEKDKLLSLESILKEKIIGQDSAIRAVADSIKRSRTGLNDPSKPLASFLFLGPTGVGKTELSKVTAKIIFDSNSSITRLDMSEYMEKHSVSKIIGAPPGYLGFESGGQLTEAVRKNPYSLILLDEIEKAHKDILDILLQVLDDGIITDGQGRTINFKNSIIVLTSNLGSQSINDLSVRKEDTNEIKKVVDNEIKKFFKPEFLNRLDEIVIFNNLELNDIKEIAKIQLQNLEKRLNKKNLKFKITDEAINQLVENSFDHAYGARPLKRIIQKQIETKISNNILNNHYLNKDEINIYLVNGEINVD

SEQ ID NO: 22449 - protein, 486 aa, Prochlorococcus marinus str. MIT 9202
MTTALQTPQRRSRSKLQDASLVNGPMLLLRSIRGFSSNRSMLWLATVPLALFGLGIFNLSAHAADLPELNAAFLANNLWLLIATILVIFMNAGFAMVEAGMCRSKNAVNILAKNLFVFALAVTSYWFIGYSLMYGGSVADGWLYFGGLFFDPTVTADMVTDAGLVPTVDFLFQSAFAGTAATIVSGLVAERVKFGEFVVFAIVLTAFIYPIAGSWKWNGGWLDSLGFVDFAGSSIVHSVGAWAGLVGAMLLGPRIGKYSDGKPQAMPGHNMAIATLGALVLWIGWYGFNPGSQLAMDQWVPYVAVTTTLAAAAGAIGATIVSTLTSGKPDLTMIINGILAGLVSITAGCGDMTLAGAWFAGLVGGIIVVFSVAALDAAEIDDPVGAFSVHGVCGVWGTIVIGLWGTAVQGDGAGMGLFNGGGINLLLVQALGAAAYAIWTLVTCWIAWSVIGGLFGGIRVSEEEETQGLDIGEHGMEAYPDFASAK

SEQ ID NO: 22450 - protein, 398 aa, Prochlorococcus marinus str. MIT 9202
MKSHKSMSQVNLSDRALSIEPSLTLQISAKANQLSTEGVDICNLSAGEPDFDAPKEVIEATSKAIFDGFTKYGPAAGNLDLRKAIANKLQIQNNLNYEFENVMVTNGAKQAIYNLFQVSLNTGDEVIIPSPYWLSYPQMVRLAGGKPIFTHSSAEDGFKINIEDLKSKISSRTKFIIINSPNNPTGRVMSKEELLQIADLARENPNINILSDEIYELILKKEFKHYSLSSLANDLKDRIFIINGFAKGWAMTGWRIGYLVGPKDVIKASSALQSQSTSNVCSFVQKGALEALKINNEFFSMINSHYDQRRRLLYEGLNNINGIYIEEPNGAFYAFPKLPNSSITSVDFCNKALQDYGLVVVPGKAFGSNQCIRISCAASEIKIKDGLQRLEKAISKFY

SEQ ID NO: 22451 - protein, 394 aa, Prochlorococcus marinus str. MIT 9202
MVYSQAKVIAGGLAHIPIVIGIFYFIMTFFNKRAIEYAEANKPKKVEKKVEKPVIKAKSAAPTKVEVQKNTSDNSDIQTEPPINKEVPNIEKKPMKKKHADVPVNIYRPKTPYEGTVIENYSLLKEGAIGRVNHITFDLKGSDPFLNYVEGQSIGIMPAGQDANGKPHKLRLYSIASTRHGDNFEGNTVSLCVRQLQYEKDGETINGVCSTYLCDIKPGDKVKITGPVGKEMLLPEEEDANIVMLATGTGIAPMRAYLRRMFEATEKEKNNWNFKGKAWLFMGAPKSANLLYEEDLQRYLSDFPDNFKYTKAISREQQNTKGGRMYIQDRVLESANELFNMIEDEKTHIYLCGLKGMEPGIDEAMTKAAQEKGLNWSDLRPQLKKAGRWHVETY

SEQ ID NO: 22452 - protein, 617 aa, Prochlorococcus marinus str. MIT 9202
MNKRWRNVGLYVLAVITVIFIGTSVFDKPTTENATKTLRYSDFIEAVQDKEISRVLISPDNATAQVVENDGSRSEVNLAPDKDLLKILTENNVDIAVTPTKLANPWQQAVSSLIFPVLLIGGLFFLFRRSQGGNAGGGNPAMSFGKSKARLQMEPSTQVTFSDVAGVEGAKLELTEVVDFLKSPDRFTAVGAKIPKGVLLVGPPGTGKTLLAKAVAGEAGVPFFSISGSEFVEMFVGVGASRVRDLFEQAKKNAPCIVFIDEIDAVGRQRGAGMGGGNDEREQTLNQLLTEMDGFEGNSGIIIVAATNRPDVLDSALMRPGRFDRQVTVDRPDYAGRLQILNVHAKDKTLSKDVDLDKVARRTPGFTGADLANLLNEAAILAARKDLDKVSNDEVGDAIERVMAGPEKKDRVISDKKKELVAYHEAGHALVGALMPDYDPVAKVSIIPRGQAGGLTFFTPSEERMESGLYSRSYLQNQMAVALGGRVAEEIVYGEEEVTTGASNDLQQVANVARQMITKFGMSDKIGPVALGQSQGGMFLGRDMSSTRDFSEDTAATIDVEVSELVDVAYKRATKVLSDNRTVLDEMAQMLIERETIDTEDIQDLLNRSEVKVANYI

SEQ ID NO: 22453 - protein, 404 aa, Prochlorococcus marinus str. MIT 9202
MQQVKKVVLAYSGGVDTSVCIPYLKKEYGISEVITFVADLGQGEDLELIRQKALNSGASQSILGNLVNSFVERYAFPAIRANALYLDKYPLSTALARPLIAENLVNIAREFSADAVAHGCTGKGNDQVRFDLAINALGPDLKIITPAREWNMSREEAILYGEKFGIPAPVSKKSPYSIDVNLLGRSIEAGILEDPMQEAPEDIFAMTSSIDNSPDSPLDIEIIFKNGFPVGINDEFLTPVEIIKKANVLAGEYGYGRIDMIEDRVVGIKSREIYETPGLLLLIKAHKELESITLNPDVVDFKGIVEKKWGQIVYQGFWFGPLKDSLDAFISSTQTSVNGRVKIRLYKGNAIVIGRMSEKNSLYRDDLATYSKDDVFKHSLAEGFIYMWGMSNKIWAELNSKITD

SEQ ID NO: 22454 - protein, 147 aa, Prochlorococcus marinus str. MIT 9202
MTNSKKSSNNSLKSHELYAIAETSGQQFWFEVNRYYDIDRLKAKDKDKITLDKVLLLKDKDSITIGKPYVKDAKIELEVVSHIRDKKILVYKMRPKKKTRRKMGHRQELTRVMVKSIKVGKSTPKSSSKKEETVKKETKPKSEKSTN

SEQ ID NO: 22455 - protein, 236 aa, Prochlorococcus marinus str. MIT 9202
MENLLEIKSLNTYYGESHILRDVDLNVQSGEMVCLIGRNGVGKTTLLKSLIGLLKQKKGDIYLLGENINRKEPHQRARKGMAYVPQGREIIPYLSVEENLMLGMESLPGGLSKNKKIDPFIYDLFPILKDFLQRKGGDLSGGQQQQLAIARALLGNPQLLLLDEPTEGIQPNIVLDIENAINQIIRDTGIGVLLVEQHLHFVRQANRYYAMQRGGIVASGNTSELSQAVIDKFLSV

SEQ ID NO: 22456 - protein, 323 aa, Prochlorococcus marinus str. MIT 9202
MQNKESNFNLTNSRLRLVSGTTNPKLAEEIASYLGIENVPLISKRFADGELYVQIQQSIRGCDVFLIQPTCAPVNDSLMELMIMVDACKRASARQITAVIPYFGYARADRKTSGRESITAKLTANLLEKSGVDRVLAMDLHSAQIQGYFDIPCDHIYGSPVLIDYLESLNLEEVVVVSPDVGGVARARAFAKLMKDAPLAIIDKRRSAHNIAESLTVIGEVKGKTAILIDDMIDTGGTICSGAHLLKKEGANRIFACASHAVFSPPSYERLSIKDLFEQVIVTNSIPVIKDDFPQLKVLSVANMLGEAIWRIHEESSVSSMFR

SEQ ID NO: 22457 - protein, 257 aa, Prochlorococcus marinus str. MIT 9202
MKESDPILEVENLSASTDDLPILKGVSLTVYPGEIHAIMGRNGCGKSTLSKIIAGHPSYNITNGNIKFLGENINSLEPEERAQSGIFLGFQYPIEIPGVSNLEFLRVSTNARRKFLNKEELDTFDFEELVKKKLELVKMDHAFLSRSVNQGFSGGEKKRNEILQMALLEPKIAILDETDSGLDIDALRIVASGIKKISNQQTGIILITHYQRLLDEIEPNYVHVMSDGQIIKTGESDLALELEKKGYEWTDNFIKET

SEQ ID NO: 22458 - protein, 528 aa, Prochlorococcus marinus str. MIT 9202
MTKVLITDPIDQTGIDILSQVAQVDQKIGISESELASIIGDYDALMIRSGTQVTEEIINSSSKLRIIGRAGVGVDNVDVKAATQKGVLVVNSPGGNTIAAAEHTIAMMLALSRHIPFANSSTLLGKWERKKFVGNELFNKKLGVVGLGKIGAHVAKVANALGMEVYGYDPFVSNERAQQIQVKLSELGDLFQQSDYVTLHLPRTPETENLVNMDVLKSMKSSAKLINCARGGLIDEEALAEALNKSLIGGAAIDVFSKEPLESNSPLLKVEKNLILTPHLGASTREAQENVAVDVAEQIRDVLLGLSARTAVNIPGLSPDIMDSLKPHLQLAETMGLLISQLSGGQIQKLEVKLQGEFVQHPSQPLIIASLKGLLSKALGDRINYVNASLEADSRGITVVESKDEARPEFASGSLQLTTYGDNGDHSVAGSIFADGELKIMSIDQYPVNVSPSRYMLVTRHRDMPGIIGKLGSLLGSNNVNIASMQVGRKIVRGEAVMVLSIDDPIPNKLLDTIIEVEGITNANPVTL

SEQ ID NO: 22459 - protein, 593 aa, Prochlorococcus marinus str. MIT 9202
MALKKDSNSLGSKHEKSQNKDSSLLEFKNLDNKKEIESQLLEVSKRDDNENGFLDFGFNQSILNSLINKGYKNPTPIQKAAIPELMLGRDLLGQAQTGTGKTAAFALPLIEKLTDNKELNAKVLVMTPTRELATQVAESFKSYSSESSNFKTVAIYGGTDYRNQISALKRKVDVVVGTPGRIMDHIRQGTFKIKHINCLVLDEADEMLNMGFLEDIEWIIDQLPENKQMVLFSATMPSEIKNIAKKYLNDPAEILIKSVKKETQLISQKFLYVQRHHKLDALKRILELNNEGVIIFVRTKLLTTSIAEALENSGHTVAVLNGDIPQNQRENTVDRLKKGFINILVATDVAARGLDVERIKLVVNYDFPFDKETYTHRIGRTGRAGRSGEAILFVNQREKHFLRNLENSTRTKIEEINIPSNKIINEKRMEKLIDNVNESSLAKDENEENKSLIIDVLDNLKEKYSMDDSNIAMAAINLVIGNKSFFVNDDDSWINKQNNTDRNRSNRNNNNRMRNSNRRNNYQNDSFETYKFNFGKFDGVRVANIISSICNSTNINGRSIGKIQIFNDYSLVDLPRDLHRETKNKLKKIKVRN

SEQ ID NO: 22460 - protein, 210 aa, Prochlorococcus marinus str. MIT 9202
MEVIKGLDGASTEMVERSKTIFFPGDPAERVYLIRRGAVRLSRVYESGEEITVSLLRENSLFGVLSLLTGHRSDRFYHAIAFTRVEMITAPANSVLRAIEEDASVGLLLLQGLSSRILQTETMIETLTHRDMSSRLVSFLMVLCRDFGVAGEKGITIDLRLSHQAIAEAIGSTRVTITRLLGDLKDSGLLNIERKKITVFDPIALAKRFN

SEQ ID NO: 22461 - protein, 363 aa, Prochlorococcus marinus str. MIT 9202
MQSISPEIIFRGNYAWEKSLPLISKLTKNPLILGRSIHTNNLRNKIFIDLKNQNLSVNSAELQFDCCYEDILRVKSIILNNNNDSVIATGGGKVLDSGKLIAESLNIPCITIPLSASTCAGWTALSNIYTKDGQFIKDVALGSCPKILVYDHKFIQTAPSRTLASGIADALAKWYESSITSSTIDDGLVQQAIQISRVLRDQLLIDGEKAFKGQYENDPSWRNIIEACGLTAGLVGGIGGEKCRTAAAHAFHNAITQIITPNKFLHGEIVGVGLLLQLRLEEMKNNNKLANQSIKQLFLLMQKLNLPTTISQLGINVFENNNLEKIADFTCRDKSEIHFLPFEIHKRDIIKVITNFEQQIIKT

SEQ ID NO: 22462 - protein, 1524 aa, Prochlorococcus marinus str. MIT 9202
MGESIKRIVGPYQDSYSPNGIIGEKDACGVGFIANVNGIESNWILKQSLKGLNCMEHRGGCGGDSDSGDGAGILCSIPWNYLEQDVHFKNKKEYEKGLGMVFMPHEKEKIEECKSICEKEAEKLSINKTFWRKVPVNNEILGPLAKANAPFICQWILYIDKKDHPDIERLLFQLRKRIEKKIIETFKNHVGDCEFYFASLSSQTVVYKGMVRSEVLSEFYQDLKEESFKVSFSVYHRRFSTNTLPKWPLAQPMRFLGHNGEINTLLGNINWAKASETHIDNFWGELSNEIKPIVDVNKSDSSNLDATLEINIRSGQPITDSLLKLVPEAFREQPEIELRANIKAFYEYSATLQEAWDGPALLVFTDGNFIGATLDRNGLRPARYSITNDGFVIMGSETGVVDLVEEKIIEKGRLGPGQMLAVDFNQNRILRNWEVKSEAAQRHDYQNLLTNRTIKIENNEWITDCELKDLELLQQQTAYGFSAEDNDLILDSMASLAKEPTYCMGDDIPLAVLSSKPHILYDYFKQRFAQVTNPPIDPLREKLVMSLEMHLGERCSPFKVKDAKPFIHLKSPILNEKELFSIKKSEIKSQTISTLFEINEGIKGFEGKLHDICEQSGKAVNNGCSLIIISDKGISSTKSFIPPLLAVGAIHHYLLKKEIRLKASLIIETGQCWSTHHLACLIGYGVSAVCPWLIFESGRHWLKHPKTQKLIESKKIDSLSTDQVQTNIKKALEDGLRKILSKIGISLLSSYHGAQIFEAVGLGSDLINLGFDGTTSRIAGITLKELANESISIHTKAYPEIDLKKLEFLGFVQFRNYGEYHSNNPEMSKALHSAVKKGPGYEHFKLYKELITNRPTTALRDLLTIDSNRESIPINEVESVESICKRFCTGGMSLGALSREAHEVLAVAMNRIGGKSNSGEGGEDPARFNVLNNIDENTQSATLPFIKGLKNGDTACSAIKQIASGRFGVTPEYLRSGKQLEIKMAQGAKPGEGGQLPGPKVDSYIAKLRNSKPGVALISPPPHHDIYSIEDLAQLIHDLHQVHPKAKVSVKLVSEIGIGTIAAGVSKANADVIQISGHDGGTGASPLSSIKHAGLPWELGLAEVHKSLLDNNLRDRVLLRTDGGLKTGWDVVIAALLGAEEYGFGSVAMIAEGCVMARVCHKNTCPVGVATQKEELRKRFKGLPDNVVNFFIYIAEEIRQILSTIGVKTMEEIIGNKEFLTKRNISLPKTENIDLTSLVNDEISYEDRSWIKHSNNAHSNGTVLEDSILTDAQFIDAVTTHGEFSKKIEIKNTDRSVCAKISGELAQHYGNKGFEGAINLIFNGHAGQSFGAFLLKGMIIKLIGEANDYVCKGMNGGILTIIPPRIDKNSSEQVILGNTCLYGATGGKLYALGKSGERFAVRNSGAVAVTEGAGDHCCEYMTGGIIVILGSTGRNIGAGMTGGVAFILDEKNDLEKKVNKEIVSIYEIKTPKQEQILLEIINEYHDNTQSPKAATILKDWINFKNLFKVIIPPSELEMLGLRNQ

SEQ ID NO: 22463 - protein, 383 aa, Prochlorococcus marinus str. MIT 9202
MLKKINKLTKILIPSETSSGERRVSATPEAVKKLKDLGCDVYIESSAGKLSGFNDLSYVESGGKIINELDQKIWSEADIVFCVQTPSEDHLTKLKEGAILLGLLNPYGNKELLRIINSNKVSALSLELLPRISRAQSSDVLSSQANIAGYKAVLLAASELDRYFPMLMTAAGTVQPAKVVVLGGGVAGLQAVATAKRLGAIVFVSDIRPAVKEQVESLGARFIELPEVDEKPAEAGGYAKAVTPEFLSKQKATLTKYLSEADVAICTAQVLGKKAPVLIDAPMIKKMRSGAVIIDLAVSQGGNCEGTKSNETIIKDGVKLIGAGELPSSVPYDASSLYAKNLTSLITPFIKDGLIKLDKEDELISGCLLSDEGVILQNKVFEN

SEQ ID NO: 22464 - protein, 587 aa, Prochlorococcus marinus str. MIT 9202
MTLTSRSFSKGSSKHEKPVWITGADALMDSLKIHGVKVIFGYPGGAILPIYDAVHKAEQDGWLKHYMVRHEQGGSHAADGYARSTGEVGVCFGTSGPGATNLVTGIATAQMDSVPLVVVTGQVPRPAIGTDAFQETDIFGITLPIVKHSWVIRDPSDIAKVVSEAFFIASSGRPGPVLIDIPKDVGQEFFNYQRVLPGEIIPKGFKRNGEINDCDISKAIKLIEDSERPLLYVGGGAISSGAHDEIKNLAKNYQIPVTTTLMGKGAFDEKDNLSVGMLGMHGTAYANFAVTECDLLIAIGARFDDRVTGKLDTFAPNAKVIHIDIDPAEVNKNRRVDVAIVADVSKAVLKINEQSLKKKFTCQTKNWLEKIDFWKHKHPLYDPPKEGEIYPQEVLLKVRELSPEAYITTDVGQHQMWAAQYLRNSPRKWISSAGLGTMGFGLPAAIGVKAALPNSDVICIAGDASVLMNIQELGTLSQYGLKVKLIIINNRWQGMVRQWQESFYDERYSSSDMSCGEPDFVKLAESFGVKGYLISDRKRLQNELKNALDHDGPALINILVRRGENCYPMVPPGKSNAQMVGYVNCED

SEQ ID NO: 22465 - protein, 303 aa, Prochlorococcus marinus str. MIT 9202
MANYRSGFVTLLGRPNVGKSTLINKLIGEKITITSPVAQTTRNKLKGILTTENGQIIFVDTPGVHKPHHRLGEILVKNAKSAINGVDMVIFVIDSSEAPGKGDEYILNFLIDNKTKFIVVLNKWDLVNKEFRNFRLDQYRRFFGMNRNFQSVSASQGQGCSELVDMVLNFLPEGPKLYGEETICDQPLDNLLSDLVREQVLKNTREEVPHSVAVKIEKREELKRKNGKVFTAILATIIVERSTQKSILIGKKGSMLKMIGQSARSNMSKLIDGPVHLELFVKVIPNWRKKESRLIEFGYEEDF

SEQ ID NO: 22466 - protein, 391 aa, Prochlorococcus marinus str. MIT 9202
MELQQKNKTYANGLIPPYGGELKNLIIKDKNLKNDLISKATYEFECSERNACDVELLMVGAFSPLEGFMDENNYNSVIKNNRDLNGLLFGLPIVFDSNNDNVKAGEKILLTYKKQKIAVLEVSSKWEPDKSLEAELCYGTNSFDHPAVKMIFNERGRFYIGGRVYGFELPIREFPCKTPEEVRSTLPSNYDVVAFQCRNPIHRAHYELFTNALLSENVSPNSVVLVHPTCGPTQQDDIPGKVRYLTYKELEQEISDERIKWAFLPYSMHMAGPREALQHMIIRRNYGCTHFIIGRDMAGCKSSATGEDFYGPYDAQNFANKCADELMMKTVPSKNLVYTKEKGYITAEEAKELNYEIMKLSGTEFRKKLRDGDPIPEWFAFKSVVDVLRRS

SEQ ID NO: 22467 - protein, 656 aa, Prochlorococcus marinus str. MIT 9202
MSNNNDVNDRLWRIANIENLPMGKVVGIDLGTTNSCVAVMEGGKPTVIANAEGFRTTPSVVAYTKNQDQLVGQIAKRQAVMNPENTFYSAKRFVGRRVDEVNEESKEVSYSIEKSGSSVKLKCPILDKQFSPEEVSSQVLRKLADDAGKYLGDKVTQAVITVPAYFNDSQRQATKDAGKIAGLEVLRIVNEPTAAALAYGLDKENEKILVFDLGGGTFDVSVIEAGDGVTEVLSTSGDTHLGGDDFDRCIVDHLANTFKSNEGIDLRQDKQALQRLTEAAEKAKIELSNATQSEINLPFITATPEGPKHLDLNLTRAKFEELAASLIDRCKTPVERAISDAKISTSEIDEVVMVGGSSRIPAVLDLVKKIIGKEPNQTVNPDEVVAVGAAIQGGVLAGEVKDILLLDVTPLSLGVETLGGVMTKMINRNTTVPTKKSETYSTAVDGQTNVEIHVLQGEREMASDNKSLGTFRLDGIPSAPRGVPQIEVTFDIDANGILSVTAKDKGSGKEQSISITGASTLSDNEVEKMVKDAESNASADKEKREKIDLKNQAETLVYQTEKQLGELGDKIDAAAKSKVEEKSNALKEATSKEDYESMKKLLEELQQELYAVGSSVYQQPGNQPPSSSAAGGPDQSDSNEKGGDDVIDADFTETKD

SEQ ID NO: 22468 - protein, 574 aa, Buchnera aphidicola (Schlechtendalia chinensis)
MEMLSGSEMIIQSLIDQGIKYIFGYPGGAVLDIYDSLKSTKKIKHILVRHEQGATHMADGYARATGKIGVVLVTSGPGATNSITGIATAYMDSIPIVVISGQVSSSLIGYDAFQECDMIGISRPIVKHSFLVKKTEDIPITFKKAFWLASSGRPGPIVIDLPKDILNSYNKKPYIWPIEVNIRSYNPITKGHSRQIKKAIDILKLSKQPVIYAGGGVISANCHNELKELAEKLNIPVTTSLMALGAFPGNHPQNLQMLGMHGTYEANMAMHYADVILAIGVRFDDRTTNNVKKYCPNATIIHIDIDPTSISKTITAHIPIVGNAKNVLQQILVFINSNMFVKEFYCLKKWWIKIQSWKNKNSLNFDTNSDNIKPQSVIKTIWKLTKGKAFITSDVGQHQMFAALYYSFQKPRRWINSGGLGTMGFGLPAALGVKLAFPNETVICVTGDGSIQMNIQELSTAMQYELPILILNLNNKSLGMVKQWQDIIYSGRHSHSYMKSLPNFIKLAESYGHSGISINTPKELEKKLQLALEKLQNGHLVFVDIKIDASEHVYPMQIRDGGMNNMLLRKNGQK

SEQ ID NO: 22469 - protein, 238 aa, Prunus serrulata var. lannesiana
MGRGRVQLKRIENKINRQVTFSKRRTGLLKKAHEISVLCDAQVGLVVFSNKGKLFEYATDSCMDQILDRYERYSYAERQLVEPDFESQCNWTFEYSRLKAKVELLQRNQRHYLGEDLDSLTLKEIQSLEHQLETALKQIRLRKNQLMHESISELQKKERAMQEQNNLLAKKIKEKEKAAAEEVHNWEQQNNGLNLLPQPLPCLNMGGTQQDEFLQVRRNQLDLTLEPLYSCNLGCFAA

SEQ ID NO: 22470 - protein, 656 aa, Ulva pertusa
MAKSAPAIGIDLGTTYSCLGVWQHDRVEIISNDQGNRTTPSYVAFTDTERLIGDAAKNQVAMNPTNTVFDAKRLIGRKFTDMAVQDDIKHWPFTVTKAAGDKPMLQVQYKGETKTFAPEEISSMVLTKMRDIAQSYLDGTVKQAVVTVPAYFNDGQRQATKDAGSIAGLEVLRIINEPTAAAIAYGLDKKSGGERNILIFDLGGGTFDVSLLSIDEGIFEVKATHGDTHLGGEDFDNRLVGHFTQEFKRKYKKDITNNPRALRRLRTAAERAKRTLSTTAQTTLEIDALYEGVDFYTSITRARFEELCMDLFRKCMEPVEACMRDAKLSKGEIHDVVLVGGSTRIPKVQALLQEFFGGKELNKSINPDEAVAYGAAVQAAILTGEGSSKVQDLLLLDVAPLSLGIETAGGVMTALIPRNTTIPTKKEQTFSTYSDNQPGVLIQVYEGERKFTRDNNLLGKFDLTGIPPAPRGVPQIEVVFDMDANGILNVTATDKGGGKSNKITITNDKGRLSKEDIECMVQEAEKYKAEDEAQQKKVEAKNTLENYAYSMRNTISDQTGDKLSEEDKATVTKAVEETISWLDANQLAEVEEFESKQKELEGVCNPIVSKMYGGAGGMPGGMPGGMPGGMPGGMGGDMPGAGAAAQGDGPTIEEVD

SEQ ID NO: 22471 - protein, 660 aa, Ulva prolifera
MAKSAPAIGIDLGTTYSCVGVWQNDRVEIISNDQGNRTTPSYVGFTDTERLIGDAAKNQVAMNPTNTVFDAKRLIGRKFTDMAVQDDMKHWPFTVTKAAGDKPMLQVQYKGETKTFAPEEISSMVLTKMRDVAQSYLDGTVKQAVVTVPAYFNDGQRQATKDAGSIAGLEVLRIINEPTAAAIAYGLDKKSGGERNILIFDLGGGTFDVSLLSIDEGIFEVKATHGDTHLGGEDFDNRLVGHFTQEFKRKYKKDITNNPRALRRLRTAAERAKRTLSTTAQTTLEIDTLYEGVDFYTSITRARFEELCMDLFRKCMDPVEACLRDAKLSKGEMHDVVLVGGSTRIPKVQSLLQEFFGGKELNKSINPDEAVAYGAAVQAAILTGEGSSKVQDLLLLDVAPLSLGIETAGGVMTALIPRNTTIPTKKEQTFSTYSDNQPGVLIQVYEGERKFTRDNNLLGKFDLTGIPPAPRGVPQIEVVFDMDANGILNVTATDKGGGKTNKITITNDKGRLSKEDIERMVSEAEKYKAEDEAQQKKVEAKNSLENYAYSMRNTISDQAGDKLSEEDKATVTKAVEEAISWLDANQLAEVEEFESRQKDLEGVCNPIVSKMYGGAGGMPGGMPGGMPGGMPGGMPGGMGGDMPGAGAGGQGDGPTIEEVD

SEQ ID NO: 22472 - protein, 242 aa, Lolium multiflorum
MGRGKVQLKRIENKINRQVTFSKRRSGLLKKAHEISVLCDAEVGLIIFSTKGKLYEFATDSCMDKILERYERYSYAEKVLISTESEIQGNWCHEYRKLKAKVETIQRCQKHLMGEDLESLNLKELQQLEQQLESSLKHIRSRKSQLMHESICELQKKERSLQEENKILQKEKQKAHTQQAQLEQTQPQTSSSSSSFMMGEATPATNRSNPPAAASDRAEDATGQPPARTVLPPWMVSHLNNG

SEQ ID NO: 22473 - protein, 392 aa, Thalictrum dioicum
KVGLKKGPWTPEEDQKLLAYIEEHGHGSWRALPSKAGLQRCGKSCRLRWTNYLRPDIKRGKFSLQEEQTIIQLHALLGNRWSAIATHLPKRTDNEIKNYWNTHLKKRLSKLGIDPVTHKPKSDALSSINGQTKADSNLSHMAQWESARLEAEARLVRESKLRSTSMNNQLGLSSSGVDPGQQLNKATSTSTQPQCLDVMKTWQGIWSKPTKCGLLTGEGSTGGLDLESPTSTLCFSDNSMPVLTVGFSDNPMPSLDLIPNSSGTSEGVPAVKEECDEEYMGGGEYKRMVNSVNTGLQDMGFSTTVDSPWASESSKGGNEHIPVTNFIEGFTNLLLGNSIHDRMRNSVDNTSGDSSDNADADAMDCEEFEENKNYWNNILNLVNSSPSDSPTF

SEQ ID NO: 22474 - protein, 315 aa, Cucumis sativus
MASINVSYFFIVLFLLAFSANAELSSHFYSKSCPRLKWIVRAGMAKAVNRDKRMGASMLRMFFHDCFVNGCEASVLLDDTPTMRGEKNAFPNRNSLRGFEVIDDIKTEVEAACKETVSCADILALAARDGADLLGGPFWDVRLGRRDSRTASESEANNNLPAPSSNLSTLISMFAVKGFNANEMTAMSGAHTIGMGQCQFFRTRIYNDTNINSAFAAQRRANCPLNGGDSNLAPLDSTDIKFDNKYFIDLINQCGLFHSDQELSNGGSQDALVRTYSMNSITFRKDFENAMIKMGNLSPASGTITEIRKNCRVVN

SEQ ID NO: 22475 - protein, 306 aa, Bacillus anthracis str. CNEVA-9066
MFAILTPALISGAFAERMRFSAFLIFILLWTTIVYNPVAHWVWGVGGWLRELGALDFAGGNVVHITSGVAGLVLAIFLGKRKNINGTSPHHLPFTMLGAGLLWFGWFGFNVGSALSLNDVALTAFINTNIAAAASALTWMLSEWFFQSKPTAMGAACGAVSGLVAITPACGFVTPFSALLIGAIGGVLCFGAVFFLKTKFGYDDTLDAFGCHGIGGTWGGIATGLFATTTVNGDGANGLFYGNAALLFKQFVAIGATYAFTIIMTYAIIKAINFFLPVRVDEHEEHMGLDISMHGEKAYEYTERVN

SEQ ID NO: 22476 - protein, 98 aa, Bacillus anthracis str. CNEVA-9066
IETGGKQIKVEAGQAIYIEKLDVEAGETVTFDKVLFVGGENVKVGSPVVEGATVTAKVEKQGRAKKIIVFKYKAKKNNRKKQGHRQPYTKLVVEAINA

SEQ ID NO: 22477 - protein, 400 aa, Bacillus anthracis str. CNEVA-9066
MKNQYIEILVRIMLKHIPNAANKSVLFAFYNGVVTTYSYFHYESMKVFEHGSEGLPSNEIMDNIQRVRHTGESNWTAFVLTVKRNGLYEVDYYDDLNPTLESGSALLLLAYTHYHIEPTSDFSKLQLKSAIKAESFKKTLNYACMRNDIETVKEKLINIKLSTLNKKGPDRKTPLHIACLNENIEIVTLLVEAGADLKIKYHGETPFALACRKGNVEIIKYLISQGENANEIMVGKVTPLHLISSSGNQEIVHYILERITNINAVTNRKRSALHYAVEDNNLEAAKVLIDNGIDMELLEEYKRSALSLACDRNKPEMAGLLLENGANIHSTGQGKVTPLHSACERGFIEVVRVLLQHQPNLHAKATLYSMPRNENLKETPIETAKRLGYDEIVDLLSSKL

SEQ ID NO: 22478 - protein, 205 aa, Nicotiana benthamiana
MEGAYYIRCHILTVFLILVAFTCSSFMKSVSAARPAAGDTNTEFIRTSCKSTTYPNLCFSSLSSRATAIGVSPQLLAHESLTVSLETAQSTSAMMLKLAHVRGLTPREVGAMHDCVEELSDTVDEMRKSLGEMKQLRGKDFDLKMNDIQTWVSAALTDEDTCTEGFAGKVMNGKVKTVVRGKILEVAHLTSNALALINSLAALHG

SEQ ID NO: 22479 - protein, 682 aa, Magnaporthe grisea
MLRTVGRKALRGSSKGCSRTISTLKPATATIAKPGSRTLSTPATATATAPRTKPSASFNARRDPQPLVNPRSGEADESFIGKTGGEIFHEMMLRQNVKHIFGYPGGAILPVFDAIYNSKHIDFVLPKHEQGAGHMAEGYARASGKPGVVLVTSGPGATNVITPMADALADGTPLVVFSGQVVTSDIGSDAFQEADVIGISRSCTKWNVMVKSADELPRRINEAFEIATSGRPGPVLVDPAKDVTASVLRRAIPTETSIPSISAAARAVQEAGRKQLEHSIKRVADLVNIAKKPVIYAGQGVILSEGGVELLKALADKASIPVTTTLHGLGAFDELDEKALHMLGMHGSAYANMSMQEADLIIALGGRFDDRVTGSIPKFAPAAKLAAAEGRGGIVHFEIMPKNINKVVQATEAIEGDVASNLKLLLPKIEQRSMTDRKEWFDQIKEWKEKWPLSHYERAERSGLIKPQTLIEELSNLTADRKDMTYITTGVGQHQMWTAQHFRWRHPRSMITSGGLGTMGYGLPAAIGAKVARPDALVIDIDGDASFNMTLTELSTAAQFNIGVKVIVLNNEEQGMVTQWQNLFYEDRYSHTHQRNPDFMKLADAMDVQHRRVSKPDDVGDALTWLINTDGPALLEVMTDKKVPVLPMVPGGNGLHEFITFDASKDKQRRELMRARTNGLHG

SEQ ID NO: 22480 - protein, 516 aa, Bacillus anthracis str. A1055
MIKKENSVFYISILLTTLFIIWGITPASWIQGYDLQSVTSSLNSFILNKFGWFYSLLMTAMIILATYLAFSKYGSIRLGKDGEKPKYSYPSWLSMLFGAGMGIGLLFYGIAEPISHFTDPLTGKAGTEESAKLAMQYSFFHWGLFPWALYAMVALTIAYFTFRKQKGSTIGATVTPLFNRSKNSPIGKTVDILAVLATVFGIVPSVGIGAQQIAGGLSYLFPSIHNTLLTQLVLIAIFAVLYLTSAQTGLDRGIKYLSNLNFSLAGILLVSFLLLGPTVFIMKYFTSTLGSYIGALPSMGLNLGAFNEKSSSWIENWTIFYWGWWISWSPFVGTFIARISKGRTIKEFIFGVVLVPTLICTFWFAVFGGTAIHMEMFQSLGVADEIAKNGTEIGLFAVISHLPFSTFLTIIGLILVATFFVTSADSATFVVSMQTSNGSLSPKNSLKLIWGLTIAIIAAILLQSGGLNALQIAAIIAALPFSIVVVLMVTSLFKELRKEDINSQTKEVPKKIKKVM

SEQ ID NO: 22481 - protein, 428 aa, Bacillus anthracis str. A1055
MKNKAIGLFQGIALYISAILGSGVLFLSGVTASIAGPASIVSWFIVIIISFPLAYSFASLARIFPDSGGAATFVRNSFGYHLGNIVGWFYFVTAAVGQTIVSLTGAFYVSQAFGFSHFETILIAVFILVIAGVSNYYGVNVSGKVALILSSLLLILLASAVFVAFPRMQWGNFNPFVPNGWFSVGNAITVIFWSFFGWEAICNLAEHFKRPEKDIVKGAVISAVVIGLLFLALSLVTIGTATYGSQESNLSPIGVIMGYTVGGGAKVVTAVLALIICTGTANAFVASLTQLGYSLSRDGAFPKFFSRLHATTQIPRQMVLFVICFSVAGVLVTKALSLTFDDILFIPTSLGILVYVLSMAAGVKLFRKNTPAWWASLISFILCLLVIPFFQLYIFVPLIVVAIYTIYMILSNKIFAYKGGLKSNEGSK

SEQ ID NO: 22482 - protein, 607 aa, Bacillus anthracis str. A1055
MCGITGWVDWKEDLSNQHVILKKMANRIQHRGPDAEGFWFSPRAAFAHRRLIVIDPEGGAQPKTFRAGDYTYALTYNGEIYNFRELREQLQKCGHTFETHSDTEVLLHAYLEWKEDCVQHLNGIFAFALWDDQKQRLFLARDHLGVKPLFYTERNDSIIFGSEIKALLAHPSVPAEIDADGINEIFGLGLFRTPRCGVFKHIEEVRAGHSITFTRDKKVVTKYWNLESKVHTDSIEDTSSHILSILQDTVKRQLIADVPLVCMLSGGLDSSGITALAGKEFAAENKTLHTYSVDFVNSAKDFELTFARTGLDAPWVKRVSEHVGTSHHDIIVNAEELANHLFVPLRAKDLPSAGEMETSLYLLFCEMKKDATVALSGESADEVFGGYPWFHQEELLYVDKFPWLTNWKNTSPLLLHEISNQCNLENYIDTRFQEAILEVPTLEGESKKSAKQRQMFYLFLTRFLPFLLDRKDRMSMAVGFEVRVPFCDYRLVEYLWNVPFNIKSIDNIEKGILRRALKPALPDDVRNRRKSAYPTSQDPQYLQTIRHLSLDMCSNKNNPIFSLINHSTLLAIADGSNKEINNFEARSAMEYMLKVNEWLKTYHIHIA

SEQ ID NO: 22483 - protein, 473 aa, Bacillus anthracis str. A1055
MNQNRIPLYEALIEFEERRRLSFHVPGHKNGLNFPQEVVEEFKDILSIDVTELSGLDDLHSPFECIDEAQQLLADVYGVNKSYFLINGSTVGNLAMILSCCGEHDIVLVQRNCHKSIINGLKLAGANPIFLDPWIDEAYNVPVGIHDEIIKEAIEKYPNAKALILTHPNYYGMGMDLEASIAYAHTHKIPVLVDEAHGAHFCLGGAFPQSALAYGADMVVHSAHKTLPAMTMGSYLHINSRLVKEEKVSTYLSMLQSSSPSYPIMASLDIARFTIARIKEKGHDEIVEFLQEFKEELSTIPQIAILQYPLQDGLKITVQTRCRLSGYELQSVFEKVGIYTEMADPYNVLFILPLQVNKKYMKAIEMIRVALQYYEVKDKTESIRYTYKGEISPLPYTYKQLEEYETKVVPIEEAVGMVAAEMVIPYPPGIPLIMYGERITSGHKEQIMYLEKAGARFQGSTKYMKVYDIESRF

SEQ ID NO: 22484 - protein, 330 aa, Bacillus anthracis str. A1055
MRDNAKGDGTVKPKVYIAEPVPTFVENYLSEHCDYEKWEQNEKVPRDVLLEKIQDKDGLLNFGSAINEELLEAAPNLKVVSNISVGYDNFDLQAMAKHNVIGTNTPYVLDDTVADLVFALMLSAGRRVCELDSYVKNGEWNAEIGKEHFGLDVHHSTIGIIGMGRIGEAVAKRAKFGFDMDVLYYNRRRKEEAEQKFDATYCDLQTLLKQSDFIVLLTPLTDETYHLIGEKEFSFMKETAIFINASRGKTVDEEALIDALTEKKIFAAGIDTFTQEPIQKDNPLLSLQNVVTLPHIGSATLKTRQQMAMTAAENLVAGLQGKTPPNIVRG

SEQ ID NO: 22485 - protein, 492 aa, Bacillus anthracis str. A1055
MSTQMLTLTSISIYMLGMLVIGYFAYKRTSNLTDYMLGGRTLGPAVTALSAGASDMSGWLLMGLPGAMFSVGLSSSWIAIGLTLGAYANWLYVAPRLRTYSEIANNSITIPEFLEHRFQDKSHMLRLISGLVIMIFFTFYVASGLVSGAVLFENSFGMNYHVGLFIVAGVVVAYTLFGGFLAVSWTDFVQGIIMVIALILVPTVTIMNVNGLGPAFSTIKSIDPTLLDIFKGTSVLGIISLFAWGLGYVGQPHIIVRFMAISSVKEIKSARRIGMSWMIFSVVGAMFTGLIGIAYYSDKGLKLSNPETIFLELGKILFHPLITGFLLAAILAAIMSTISSQLLVTSSAITEDLYRTFFKRSASDKELVFVGRMAVLVIALVGCALAFKQNDTILALVGYAWAGFGSSFGPAILLSLYWKRMTKWGALAGMISGAATVIIWTQFKFLKEFLYEMIPGFTISLLVIVIVSLLTQPSKEIEEQFENFEKQHSDNL

SEQ ID NO: 22486 - protein, 365 aa, Bacillus anthracis str. Western North America USA6153
MEQFINPRVKDIQISGIRQFSNMIQNYDNLISLTIGQSDFPTPSLVKEAAKRAITENYTSYTHNAGLLELRKAACNFVKDNYDLHYSPETETIVTIGASEAIDVAFRTILEPGTEVILPAPIYPGYEPIIRLCGATPIFIDVRETGFRLTAEALENAITEKTRCVVLPYPSNPTGVTLSKKELQDIADVLKDKNIFVLSDEIYSELVYEQTHTSIAHFPEMREKTIVINGLSKSHSMTGWRIGLLFAPSYLAGHILKVHQYNVTCATSIAQYAAIEALTAAKDAPKMMRHQYKKRRDYVYNRLIQMGLTVEKPTGAFYLFPYVGHLTSSSFDFALDLVKEAGLAVVPGTAFSEYGEGYLRFVLCI

SEQ ID NO: 22487 - protein, 364 aa, Bacillus anthracis str. Western North America USA6153
MTETIKCIGCGVEIQTEDKNEVGYAPASSLEKEQVICQRCFRLKHYNEIQDVSLTDDDFLRILNGIGKSDALVVKIVDIFDFNGSWLPGLHRFVGNNKVLLVGNKADLIPKSVKHDKVKHWMRYSAKQLGLKPEDVFLISAAKGQGIAELADAIEYYRGGKDVYVVGCTNVGKSTFINRMIKEFSDETENVITTSHFPGTTLDLIDIPLDEESSLYDTPGIINHHQMAHYVGKQSLKLITPTKEIKPMVFQLNEEQTLFFSGLARFDYVSGGRRAFTCHFSNRLTIHRTKLEKADELYKNHAGDLLSPPTPEELENMPELVKYEFNIREPKTGCCILWIRMGYCERTRSKNCCTRTKRSKCFIT

SEQ ID NO: 22488 - protein, 630 aa, Bacillus anthracis str. Western North America USA6153
  misc_feature (613)..(613): Xaa can be any naturally occurring amino acid
  misc_feature (616)..(616): Xaa can be any naturally occurring amino acid
  unsure (1)..(630): unsure at all Xaa locations
MCGFVGCLCENPREFSETEKHQFENMNTMIFHRGPDDEGYFRDEHVQFGFRRLSIIDLEAGHQPLTYENDRYVIIFNGEIYNYVELREMLLEKGATFATQSDTEVIIALYAHMKEKCVDYLRGMFAFMIWDREEKKLFGARDHFGIKPLYIAQQGDTTFFASEKKSIMHVMEDKGVNPTSLQHYFTYQYGPEPETLTIDVNKIEPGHYFVKEIGKEMEIHRYWKPYFNASSATKEEHIQAIRDVLYDSVKVHMRSDVPVGSFLSGGIDSSIIASIAREMNPNLLTFSVGFEQRGFSEVDVAKETAEKLGVKNHNVFISAKEFMDEFPKIIWHMDDPLADPAAVPLYFVAKEARKHVTVVLSGEGADELFGGYNIYREPNSLKMFSYIPSPGKSVLKALSGALKEGFKGKSFLERGCTPIEERYYGNAKIFREEEKAELMKYYNESVNYMDITKPLYNEIKDYDDVSKMQYIDMFTWLRGDILLKADKMTMANSLELRVPFLDKEVFDVASKIPTEFKIANGTTKAILREAARGIVPDHVLDRKKLGFPVPIRHWLKDEMHDWAINIINESKTEHLIDKQYVLNLLEAHCADKGDYSRKIWTVLAFMVWHQIYXEHXYDTNKVPRRNETCV

SEQ ID NO: 22489 - protein, 340 aa, Bacillus anthracis str. Kruger B
MMIYLDYAATTPMSVEALQTYTKAASQYFGNEQSLHDIGGTASSLLQVCRKTFADMIGGKEQGVFFTSGGSESNYLAIQSLLNAQNKKHIITTPMEHASIRSYFQSLKSQGYTITEIPVDKSGLIRLVDLETAITEDTVLASIQHGNSEIGTVQNIAEIGALLKKYNVLFHSDCVQTFGKLPIHVFEMGIDSLSVSAHKIYGPKGVGACYINPQVRWTQVFPETSHEKGFRPGTVNVPGIASFLTAAENILKNQQEESLRFKELRSYFLEQIQTLPLEIEVEGHSTSCLPHIIGVTIKGIEGQYTMLECNRRGIAISTGSACQVGKQEPSKTMLAIGKNV

SEQ ID NO: 22490 - protein, 569 aa, Schizosaccharomyces pombe
MTKDAESTMTVGTYLAQRLVEIGIKNHFVVPGDYNLRLLDFLEYYPGLSEIGCCNELNCAFAAEGYARSNGIACAVVTYSVGALTAFDGIGGAYAENLPVILVSGSPNTNDLSSGHLLHHTLGTHDFEYQMEIAKKLTCAAVAIKRAEDAPVMIDHAIRQAILQHKPVYIEIPTNMANQPCPVPGPISAVISPEISDKESLEKATDIAAELISKKEKPILLAGPKLRAAGAESAFVKLAEALNCAAFIMPAAKGFYSEEHKNYAGVYWGEVSSSETTKAVYESSDLVIGAGVLFNDYSTVGWRAAPNPNILLNSDYTSVSIPGYVFSRVYMAEFLELLAKKVSKKPATLEAYNKARPQTVVPKAAEPKAALNRVEVMRQIQGLVDSNTTLYAETGDSWFNGLQMKLPAGAKFEVEMQWGHIGWSVPSAMGYAVAAPERRTIVMVGDGSFQLTGQEISQMIRHKLPVLIFLLNNRGYTIEIQIHDGPYNRIQNWDFAAFCESLNGETGKAKGLHAKTGEELTSAIKVALQNKEGPTLIECAIDTDDCTQELVDWGKAVASANARPPTADN

SEQ ID NO: 22491 - protein, 1477 aa, Lotus japonicus
MDQKDIVRFLTTTVDSFIQDRLINKEQRTQHKEQCAERLAAEDGSGDKDTEVEYSDQAVLANLDWGIEALEEAINTYNMETKLARLDYAEKMLQVCAMLNPKQKIAGVPNSYLSAWAHLNLSYLWKLRNNVQNCISHALEMFIVDPFFTRIDFAPELWKSLFLPHMSSIVGWYSEERHRLMMEVIPDSADLSFTADFEQFFNESLVLTMRPHQLEKLQKLEQLYGESLDENTKLYAKYYNDCMNSDSSSSKKAVPMLPIAEPPMTPLHELSRTIPDFVKFGPILPKSAGFSLAPRSKDVLNETIRENVTSSNLKEEKLSIWGAKDTIIEENEDDSDSELENESVDSDDKNNIFSPGMKMMKYEGVETKVDLSCQRNQIPSPDIFSPLDSPRTAPNNSSPNPDMHSKRDSKFLRLSSSRIREPTISDSLTSSPDISIDNISNADNEVMVLKNIQRKNDNQTLSMNHENENSLILNGSSLCESDDGYQSFNSLPKLEKLSMGSKPPKDFVCPITGQIFCDPVTLETGQTYERKAIQEWLRTGNTTCPITRQPLSASILPKTNYVLKRLITSWKEQNPELAQEFSNVNTPRGSSCSPSAKDIPMLSTRQRTTDSPNHKNKDYARQRSNRFMPAAITTSPTSVLSQAAVETIVNSLKPYISSLCTSENLPECEEAVLKIARLLKDSKTNPQIHSYLSKPTIINGLVEILSASRNREVLRTSIYILSELIFTDDSVAETLNSVDSDFDCLATLLKNGLAEAALLIYQLRPVFAQLSAHELIPSLVDVIQNKNEELDDFQLVIDPKDAAIAILEQTLMGGDEYSRSLNASSVISANGIPTLVKYLERMEGRRSVVSVLLCCMQAEKSCKNLIANRIELSPVLELFHSGNDSVRGTCVEFLSELVQLNRRTSCNQILHTIKDEGAFSTMHTFLVYLQMAPMEHQLAVASLLLQLDLLAEPRKMSIYREEAVETLIEALWQKDFSNTQMKALDALLFLIGHISSSGKSYTEAWLLKIAGFDQPYNALMKVEQLGQHDNDLIETMEDEKNALNSWQKRIASVLCNHENGSIFKALEECLKSNSLKMAKSCLVLATWLTHMLYTLPDTGVRDVARKSLLEEVINVLQSSKNLEEKILATLALKTFISDPSTHEALRVYAKSIYRTLRRLKKYSVVAVDIMKVILNLKSVDVTELWSCKEVVELDLSSNGEVLSMVYLNGQVLSGHTDGTIKVWDARKRIPRVIQETHEHTKAVTSLCSSGDRLYSGSLDKTIRVWTIKSDGIKCIDVYDIKEAVHELAANDKLACYVSQGTGVKVFNWSEAPKLINFSKYVKSLAVAGDKLYCGCSGYSIQEVDLSTYTSNSFFTGTRKLLGKQTIHSLQIHDDYLFACGSSVDATAGKIFSLSQKMVVGSLSTGLDIHRIAINSDFIFAGTKFGTIEVWLKDKFTRVASIKMAGGHTKITSLVSDVDGMMLFVGSSDGKIQVWALD

SEQ ID NO: 22492 - protein, 66 aa, Bacillus anthracis str. Vollum
  misc_feature (30)..(30): Xaa can be any naturally occurring amino acid
  unsure (1)..(66): unsure at all Xaa locations
MQNGKVKWFNSEKGFGFIEVEGGEDVFVHXSAIQGEGFKTLEEGQEVTFEVEQGNRGPQATNVNKK

SEQ ID NO: 22493 - protein, 428 aa, Bacillus anthracis str. Australia 94
  misc_feature (129)..(129): Xaa can be any naturally occurring amino acid
  unsure (1)..(428): unsure at all Xaa locations
MFIDQVKIYVKGGDGGNGMVAYRREKYVPKGGPAGGDGGKGADVVFIVEEGLRTLMDFRYQRHFKADRGQHGMSKGQHGRKSEDLLVKVPPGTVVKDEKTGQILADLVTHGQTAVIAKGGRGGRGNSRXATATNPAPEIAENGEPGQERDVILELKVLADVGLVGFPSVGKSTLLSVVSSARPKIAEYHFTTIVPNLGVVETGDNRSFVMADLPGLIEGAHAGVGLGHQFLRHIERTRVIVHVIDMSGLEGRDPYEDYVTINNELKEYNLRLTERPQVVVANKMDMPDAEENLQAFKEKVGDEVKIFPISAVTKQGVRDLLFEVANLIETTPEFPIHEVVDESDTSVMYKFETEGVKFDITRESDGTFVISGYDIEKTFKMTDFSRDESVRRFARQMRGMGIDEALRARGAKDGDIVKILEYEFEFID

SEQ ID NO: 22494 - protein, 607 aa, Bacillus anthracis str. Australia 94
MCGITGWVDWKEDLSNQHVILKKMANRIQHRGPDAEGFWFSPRAAFAHRRLIVIDPEGGAQPKTFRAGDYTYALTYNGEIYNFRELREQLQKCGHTFETHSDTEVLLHAYLEWKEDCVQHLNGIFAFALWDDQKQRLFLARDHLGVKPLFYTERNDSIIFGSEIKALLAHPSVPAEIDADGINEIFGLGLFRTPGCGVFKHIEEVRAGHSITFTRDKKVVTKYWNLESKVHTDSIEDTSSHILSILQDTVKRQLIADVPLVCMLSGGLDSSGITALAGKEFAAENKTLHTYSVDFVNSAKDFELTFARTGLDAPWVKRVSEHVGTSHHDIIVNAEELANHLFVPLRAKDLPSAGEMETSLYLLFCEMKKDATVALSGESADEVFGGYPWFHQEELLYVDKFPWLTNWKNTSPLLLHEISNQCNLKNYIDTRFQEAILEVPTLEGESKKSAKQRQMFYLFLTRFLPFLLDRKDRMSMAVGFEVRVPFCDYRLVEYLWNVPFNIKSIDNIEKGILRRALKPALPDDVRNRRKSAYPTSQDPQYLQTIRHLSLDMCSNKNNPIFSLINHSTLLAIADGSNKEINNFEARSAMEYMLQVNEWLKTYHIHIA

SEQ ID NO: 22495 - protein, 545 aa, Bacillus anthracis str. Australia 94
MLLEKGATFATQSDTEVIIALYAHMKEKCVDYLRGMFAFMIWDREEKKLFGARDHFGIKPLYIAQQGDTTFFASEKKSIMHVMEDKGVNPTSLQHYFTYQYGPEPETLTIDVNKIEPGHYFVKEIGKEMEIHRYWKPYFNASSATKEEHIQAIRDVLYDSVKVHMRSDVPVGSFLSGGIDSSIIASIAREMNPNLLTFSVGFEQRGFSEVDVAKETAEKLGVKNHNVFISAKEFMDEFPKIIWHMDDPLADPAAVPLYFVAKEARKHVTVVLSGEGADELFGGYNIYREPNSLKMFSYIPSPGKSVLKALSGALKEGFKGKSFLERGCTPIEERYYGNAKIFREEEKAELMKYYNESVNYMDITKPLYNEIKDYDDVSKMQYIDMFTWLRGDILLKADKMTMANSLELRVPFLDKEVFDVASKIPTEFKIANGTTKAILREAARGIVPDHVLDRKKLGFPVPIRHWLKDEMHDWAINIINESKTEHLIDKQYVLNLLEAHCADKGDYSRKIWTVLAFMVWHQIYVEHKYDTNKFHEETKRAYSLV

SEQ ID NO: 22496 - protein, 330 aa, Bacillus anthracis str. Australia 94
MRDKAKGDGTVKPKVYIAEPVPTFVENYLSEHCDYEKWEQNEKVPRDVLLEKIQDKDGLLNFGSAINEELLEAAPNLKVVSNISVGYDNFDLQAMAKHNVIGTNTPYVLDDTVADLVFALMLSAGRRVCELDSYVKNGEWNAEIGKEHFGLDVHHSTIGIIGMGRIGEAVAKRAKFGFDMDVLYYNRRRKEEAEQKFDATYCDLQTLLKQSDFIVLLTPLTDETYHLIGEKEFSFMKETAIFINASRGKTVDEEALIDALTEKKIFAAGIDTFTQEPIQKDNPLLSLQNVVTLPHIGSAPLKTRQQMAMTAAENLVAGLQGKTPPNIVRG

SEQ ID NO: 22497 - protein, 553 aa, Capsicum annuum
MDKGWGLTLESSSSSDKVGFFMNKPVFGFNLSPRLNPAEMFPSSDDKRAIVNEVDFFSEKKPIVKKENSQGDRTDQCVVNTGLQLVIANAGSDQSTVDDGISSELVLEDKRAKIQLAQLQVELQRMNSENQRLKGMLTQVNNSYSALQMHLVTLMQQQQQQQQQQQMISRTESTHAHEVVEAKFNDEKKQEKEGTIVPRQFMELGPSGSKADPLDEPSNSHTSSEERTLSGSPRNNMELLSRDKAIGREESPESESWAPNKVPKLMNSSKPVEQPTEATMRKARVSVRARSEAPMISDGCQWRKYGQKMAKGNPCPRAYYRCTMAVGCPVRKQVQRCAEDRTILITTYEGTHNHPLPPAAMAMASTTSAAANMLLSGSMPSADGLMNTNFLARAMLPCSSNMATISASAPFPTVTLDLTAQNSNAALPNYHQRVNHANNAQFQFPLPAGLNHPNFIASMSAPQMPQVLGQAMYNQSKFSGLQVSQDNIHHPSISHDTLSAATAAITADPNFTAALAAAISSIIGCGSHPNNNGNSTMSGPSSNNNNTSSFPGN

SEQ ID NO: 22498 - protein, 437 aa, Bacillus anthracis str. Australia 94
MLSIKGQKWRNWTGNVEGTPHYTMYPESIQDVVEVIELARKKGKKIRVVGSGHSFTPLVQTEEILVSLDEMKGIVNIDTEKMIAEVWAGTKLHELGKLLEEKGYAQENLGDIDSQSIAGAISTGTHGTGITFGSLSTQVIEITAVLSTGETIVCSEMENVEYWRAFQLSLGMLGIIVRIKLNIIRAYSLVYESEKQSLATVMNKLEEYKKNRHFEFFVFPYSDEVQVKVTNETTGKKSDLKWHKLKVELLENKVFSLLSKGCKWFPSISKGVSRLSAKAVPNTKIIGPSYEVFATSRAVPFYEMEYSVPSKYMQAVVEEISNLIEKKKYKVHFPIECRYVKRDDIWLSPAYGRDSAYIAVHMYKGMKYAAYFGEVEKIFLKYEGRPHWGKMHTLTYEKLQNIYPELHSFLKVRKLLDEAEMFSNPYTEKLFTIMKKS

SEQ ID NO: 22499 - protein, 559 aa, Klebsiella oxytoca
MDNQHQPRQWAHGADLIVSQLEAQGVRQVFGIPGAKIDKVFDSLLDSSIRIIPVRHEANAAFMAAAVGRITGKAGVALVTSGPGCSNLITGMATANSEGDPVVALGGAVKRADKAKQVHQSMDTVAMFSPVTKYSVEVTAPEALAEVVSNAFRAAEQGRPGSAFVSLPQDVVDGPVHARVLPAGDAPQTGAAPDEAIARVAKMIAGAKNPIFLLGLMASQTENSAALRELLKKSHIPVTSTYQAAGAVNQDHFTRFAGRVALFNNQAGDRLLHLADLVICIGYSPVEYEPAMWNNGNATLVHIDVLPAYEERNYTPDVELVGNIAATLNKLSQRIDHQLVLSPQAAEILVDRQHQRELLNRRGAQLNQFALHPLRIVRAMQDIVNSDVTLTVDMGSFHIWIARYLYSFRARQVMISNGQQTMGVALPWAIGAWLVNPQRKVVSVSGDGGFLQSSMELETAVRLKANVLHIIWVDNGYNMVAIQEEKKYQRLSGVEFGPVDFKVYAEAFGAKGFAVESAEALEPTLRAAMDVDGPAVVAIPVDYRDNPLLMGPLHLSQIL

SEQ ID NO: 22500 - protein, 723 aa, Tuber borchii
MSSPSRPERPHRHDADPLTRLLRDSEGSADHGTFTSQHFRDSRPGSPRVVPTTTGPEPTDSIRLGLSRPATFLKRATATAELAENAGVKRPWLMYMSYYIPCIGWIGRYKWSYLLGDVIAGDTTTVTMASFYIPMALSLSANLANLPPIHGLYAFAIQPLVYSLLGSCPTMAVGPEAAGSLLMGSAIRLTNEHHGSPFDDHDGDDFQNAKLAGLITAMAGLIAFVAGFVRLGFLDSVLSRALLRGFISAIGFVILVDQAIPETGLFNLAKEHGITHGSTFTKAVWLITNHKKVHGLTFAVAAVSFSIIITGRYLKKKFEKRAPYIVFLPDRFLVVVLSAIFTYVFRWNEQGLEILGTVDTSSGVFQFHFPFQLQHVTKLRETLSTAFLISVLGFFESVVAAKSLGTTLDINISSNRELIALGTANILGGCFQALPAFGGYGRSKVNKATGGRTPVSGMVLSTLTILCVYFVLPYFYYLPRCVLCAMISVVAVTLLEEAPEDISFFYRIHAYGDLATMLLVFLTTIIWSLETGIGIGVGISLIQVVRSSTHARIEILGRVPGTDTFRSAEEVPASELEEVEGCLIVKMTEALTFANTGELKNRLRRLERYGDARAHPSLPRLRGRSVPGGGGTSNVIFDVKGVKRMDGSGTQVLREIVDGYARRGVAVWFSRAPQVNSRLWMGFVESGIMERVGGREHFVGSIDEALRLTEGSRGGSRAGEVGV

SEQ ID NO: 22501 - protein, 911 aa, Vitis labrusca x Vitis vinifera
MNPEKFTHKTNETLAGAHELAMNSGHAQLTPLHVAVALITDHNGILRQAIIGAGGNEEAANSVERVFNKALKKLPTQSPPPDEIPVSTTLIKVVRRAQSSQKSRGDTHLAVDQLILGLLEDSQIGDLLKEAGVSTSRVKSEVEKLRGKEGKKVESASGDTTFQALKTYGRDLVEQAGKLDPVIGRDEEIRRVIRILSRRTKNNPVLIGEPGVGKTAVVEGLAQRIVRGDVPSNLAEVRLIALDMGALVAGAKYRGEFEERLKSVLKEVEEAEGKVILFIDEIHLVLGAGRTEGSMDAANLFKPMLARGQLRCIGATTLEEYRKYVEKDAAFERRFQQVYVAEPSVPDTISILRGLKERYEGHHGVRIQDRALVVAAQLSSRYITGRHLPDKAIDLVDEACANVRVQLDSQPEEIDNLERKRMQLEVELHALEKEKDKASKARLVEVRRELDDLRDKLQPLMMKYKKEKERIDELRRLKQKREELLFALQEAERRYDLARAADLRYGAIQEVEAAIANLEGTTDENMMLTETVGPEQIAEVVSRWTGIPVTRLGQNDKERLIGLAERLHQRVVGQDQAVSAVAEAVLRSRVGLGRPQQPTGSFLFLGPTGVGKTELAKALAEQLFDDENLLVRIDMSEYMEQHSVSRLIGAPPGYVGHDEGGQLTEAVRRRPYSVVLFDEVEKAHIAVFNTLLQVLDDGRLTDGQGRTVDFTNTVIIMTSNLGAEHLLSGLVGKCTMQDARDRVMQEVRRHFRPELLNRLDEIVVFDPLSHDQLRKVARLQMKDVASRLAERGIALAVTDAALDVVLAESYDPVYGARPIRRWLEKKVVTELSKMLIREEIDENSTVYIDAGVSGKGLAYRVENNGGLVNASTGQKSDVLIRIPNGQRSDAAQAVKKMKIEEIEDEEDEMDL

SEQ ID NO: 22502 - protein, 615 aa, Streptomyces diastaticus
MCGISGWLAFDRDLTKEQATVDAMTGTMAYRGPDAGGTWVDRHVALGHRRLAVIDIEGGTQPMRVDTPNGPVAITYSGEVYNFTELREELRRHGHRFRTASDTEVVLRGYLQWGEALADRLNGMYAFAIWDSRNEKLVMIRDRMGIKPFYFHPTADGVLFGSEPKAILAHPMFKRVIEADGLFELLSVCKTPGHAIWSDMREVRPGSLVVVDRAGLRERTYWKLTTQEHTDDRDTTVTKIRELLEDIVRRQLVADVPQCVLLSGGLDSSSITALSARELAAHGEKVRSFSVDFVGLADNFRPDNMRATPDSPFVHDVADHVGSLHEDIVLPHTALTDPDARRAVLAAKDFPSGLADVDVSLYMLFKAIREHSTVALSGETADELFGGYPWFQDPVAQRAGIFPWMVPVLSEWSKANALGLLNPDLIAMSDLGTYVKDRYSEAVAGVEPLPGEDVQERRMRVMSHLHLTRFLQVLLDRKDRISMAVGLEVRVPYCDHRLVEYVYNTPWAMKSFDGREKSLLRAAAGDLLPRSVVERLKSPYPSTQDPGYAGGLQQMGKQLLSEPDHPIFQLVTRASLDKMVKLDPAKMPDAIREQLDRMMDIATWLEMYQPEIRMS

SEQ ID NO: 22503 - protein, 580 aa, Nitrosomonas sp. AL212
MYRYDEYDQQIVNERVMQYRDQVRRRLSGELSEEEFLPLRLQNGLYMQIHAYMLRIAVPYGLISSKQMRMFAHIARKYDRGYGHFTTRQNIQFNWLKLEDTPDILADLASVEMHAIQTSGNCVRNITSDEFAGVAQDEVVDPRPYAEILRQWSTFHPEFAYLPRKFKIAISGGKEDRAAIYAHDIGLAVIKNTQGEIGFRVLVGGGLGRTPIIGSEICDFVPWQHILTYVESILRVYNEYGRRDNKFKARIKILVKALGIDEFKRRVEADWAGLRDGPGTLTIEEVDRVASFFSDPSYETLPDHDSKLNEFKADSRSFSNWLSRNVRPHRVPGYAIVVLSLKKPGSAPGDATAEQMEAVADLADRYSFGELRITHKQNLVLADVRQKDLISLWQEATEHELTTPNIGMLTDIISCPGAEFCTLANARSIPLAKVIAECFEDLDYQHDIGEITLNISGCVNACGQHHIGNIGITGVEKKDHDEWYQVSIGGAEGNDSSISKIIGPSFTFNQVPEVIERLIHVYLRERMETERFIETVRRIGHAPFKEHVYATGFMAQEEKVADKHIVEPAQYEVPYYSPRF

SEQ ID NO: 22504 - protein, 375 aa, Nitrosomonas sp. AL212
MHIGIPAEIRSGETRVAATPETVKKYTAKGVHKVLVQLGAGAGASIPDSAYQEAGAMIVTDVAELYAQSQIVLKVRGPESNELAMMRKDAVLLGLLSPHQKDGVDALAQHGLTAFAMEKLPRISRAQNMDVLSSQANIAGYKAVIVAANIYQKFFPMLMTAAGTVKAARVLVLGAGVAGLQAIATAKRLGAVVEAFDVRPAVKEQVESLGAKFVEVPLSDEEKAQAETAGGYATEMSDDYKRRQGELVHERAISADIIITTALIPGRPAPVLIKENTVQAMKQGSVIVDMAVEAGGNCPLSELNKNVLKHGVHLIGIANLPGLVAADASTLYARNLMNFLNLMLDQENDALKIDRSDEIIAGTLLCAGGDVVGKP

SEQ ID NO: 22505 - protein, 67 aa, Nitrosomonas sp. AL212
MATGTVKWFNDSKGFGFITPDDGSEDLFAHFSAINMSGFKTLKEGQKVSFDVTQGPKGKQASNIQAT

SEQ ID NO: 22506 - protein, 309 aa, Nitrosomonas sp. AL212
MNTLIISTSSFDIDNNPPLQQLLQKGMRIITNPHRRKLTEDEIIELLKAGSIGMIAGIEPLTERVFQAAPNLKVISRCGTGLDSVDLSAAGNRGIAVLNTPEAPAQAVAELTLGFILSLLRQIGTIDQAVRKGEWPRTQGRLLAAQTVGIIGLGHIGRRVARLCQAFEATVIAHDPHATPVPEGVTLLPLDQLLASADIITLHLPYSPATHHLLDTRAFAAMKPEAIVINAARGGLVDENALADALKSGKVSAAALDVFEHEPYQGELLEFNNVMVTSHIGSLARESRQRMEIEAAENLLQGLIKAGVI

SEQ ID NO: 22507 - protein, 638 aa, Nitrosomonas sp. AL212
MNNLIKNMAIWLVIALVLMTVFNQFSVRQPTQVPMEYSQFITELNQGRIAKVIIEGRTLKGTKSDGRRFTTYAPSDPWMVSDLLKAGVIVEAKPEEEPSMLMSIFISWFPMLLLIAVWIFFMRQMQGGGRNGGAFSFGKSKARMLDKSANTVTFNDVAGCEEAKEEVAELVEFLRDPTKFQKLGGRIPRGVLMVGSPGTGKTLLARAIAGEAQVPFFSISGSDFVEMFVGVGASRVRDMFEQAKKHAPCIIFIDEIDAVGRQRGAGLGGGNDEREQTLNQLLVEMDGFEGAMGVIVIAATNRPDVLDPALLRPGRFDRQVTVPLPDIRGREQILHVHMRKVPLSPDVKADILARGTPGMSGADLANLVNEAALFAARSNKRLVDMDDFERAKDKIFMGAERRSMVMPEHERRNTAYHESGHAVVAQLLPKTDPVHKVTIIPRGRALGVTMQLPTEDRFSMEREEILQRISVMFGGRIAEEVFMKQMTTGASNDFERATDLARQMVTQWGMSDELGPMVYGENEGEVFLGRSVTTHKNMSEATMQKVDAEVRRIVDEQYAIARKLIEENKDKIEAMTQALLEWETIDSDQIKDIMEGRPPRPPKPPQIISSTANDGSSTEETEEQGESQAPREVAKETD

SEQ ID NO: 22508 - protein, 497 aa, Nitrosomonas sp. AL212
MSSVIDLFSYSIAAMLGVAFIGIVVTWFIQDITQKKHSVLRNYPVIGRLRYILERQGKYFRQYFFTNDRDEMPFNRATRGWIYKNAKNKGSLVGFGSTHDLRQPGSVIFVNAAFPIQEEDQLPTPSLQIGKGYCEHPFEAKSIINISGMSYGAISKPAVRALSLGAAQADCWLNTGEGGLSPYHLEGGCDLIMQIGTAKYGIRDEHGNFSPQRAKELSKVVKAFEIKLSQGAKPGKGGLLPANKVHSEIAAIRGIPENQNSISPNRHKDINNIDELLDKIHFIRELTGRPVGIKTAIGGWNFINEVCDHINRRGLEYAPDFLTIDGGEGGSGAAPQTLMDHVSLPISEALPRVVDALLQSGLKNRIYVVAAGKLVTSAEGAWALCAGADFVNTARGFMFSLGCIQAMRCHLNTCPTGVTTHDERLQNGLVVEEKYLRVANYARNVNKEINMIAHSCGLHHARQFKREHVRIVETAGKSVALNILYPYPEVPRKINLD

SEQ ID NO: 22509 - protein, 860 aa, Nitrosomonas sp. AL212
MRFDKLTTKFQQAFADAQSIAVGQDNPTIEPQHLLLALLQQDDGSTLSLLQRSGVNTTPLLENIKQTIYRLPKVENSGGEVTISRSLNNLLNVADKEAQKRNDQFIASEMFLLAVLQDKGEVGALLKQYGANTAALEKAINAVRGGEQVGSAEAEGNREALKKYTLDLTERARQGKLDPVIGRDDEIRRAIQVLQRRTKNNLVLIGEPGVGKTAIVEGLAQRIINGEVPESLKDKRVLVLDMAALLAGAKYRGEFEERLKSVLKELAQDEGKTIVFIDELHTMVGAGKAEGAMDAGNMLKPALARGELHCVGATTLDEYRKYIEKDAALERRFQKVLVEEPSVEVTIAILRGLQEKYEVHHGVDITDPAIVAAAELSNRYITDRFLPDKAIDLIDEAAARIRMEIDSKPEILDKLDRRLIQLKIEREAIKKEKDEASQKRLQLLEEEIKHKEREYDDLAEIWKAEKFQVHGSQQIKEAMEKLKLEIEAATRKGDWQKVSELQYGRLPQLEAQLQQTAGNESTSALTPRLLRTQVGAEEIAEVVSRATGIPVSKMMQGEREKLLLMEQKLHDRVVGQDEAVRLVSDAIRRSRAGLADPNRPYGSFLFLGPTGVGKTELCKALAGFLFDSEDHLIRVDMSEFMEKHSVARLIGAPPGYVGYEEGGYLTELVRRKPYAVILLDEVEKAHPDVFNVLLQVLDDGRMTDGQGRTVDFKNTVIVMTSNLGSQMIQEMSGNEYQAIKQAVMNEVKTYFRPEFINRIDEVVVFHALGEKHIHSIARIQLHSLEARLAKLEIQLIVSEAALTALSQAGFDPVFGARPLKRAIQTQIENPLAKEILEGKFVAKDIIQVDYHDGMISFSKK

SEQ ID NO: 22510 - protein, 590 aa, Nitrosomonas sp. AL212
MQNSQKSTQTRWQAVKMAASFITPYKRQVIYSLLALLFTATITLSIGQGIRLLIDQGFATQSKDLLSQYVAIFLLLVIALAAGTFTRYYWVTWLGERVIADIRQNVFNHLIHLHPGFFEQNRSLEIQSRLTADMTLLQTVIGSSVSFALRNLIMMIGGIIWLFITNAKLTALVMICVPLVVAPILIYGRRVRHLSRQSQDKIAAVGAYVGEVLGQIKTVQAYNHQSIDQSTFHDQVEAAFAVAKQRTTQRALLITIVIILVLGAVGLMLWVGGMDVIEGRISAGELAAFVFYSVIVGSAVASISEVIGELQRAAGAAERTVELLQAPNLIQSPEKPHPLQKVSGNITLDQLCFAYPSRPEVWVINKLSLTIRAGETLALVGPSGAGKSTLFDLLLRFFDSQSGGIKLEGIDIRNVDLVALRQCFALVSQNPALFYGTISENLRYARPDATDAEVEAAAKAAFAHDFICMLPQGYQTQLGDSGLGLSGGQKQRLAIARAVLADAPILLLDEATSALDAQSEFWVQQALQHLMRNRTTLVIAHRLATVQSADRIAVLDHGRLDALGTHAQLLQSSPLYSQLATLQLQSHITG

SEQ ID NO: 22511 - protein, 521 aa, Nitrosomonas sp. AL212
MIFWRVKSLDAILATAEKKSLHRSLGPWQLTLLGVGAIIGTGIFVLTAEAAQKAGPGMMLSFIIASFVCIVAALCYSELSSMVPVSGSAYTYSYAVLGELVAWMVGWALILEYSVAASAVAVGWSGYFVGLLDNSLGITIPFELANGPFAGGIINLPAVFVCILVVGLLVVGTRESASFNAVLVTIKIAALILFIALTLPVAEIENFQPFLPLGEAGVIAAASSIFFAYVGFDAVSTAAEETKNPQRNVPIGLISSLVICTIFYILVSAGAIGSIGAQPILDETGKGLMPGSIALAEQCQSLVAIGQQPLVCSREALALVLREIGWEKFGNLLGLAAFLALPSVVLMMLFGQTRIFFVMARDGLLPEILSRVHTRFKTPHIVTYVTGIGVTIAAAFFPVGKLADISNSGTLFAFMVVALAVMILRTRDKHRARPFRAPIIWLVGPLAVIGCITLFWFLPHDAKLVFPIWSGIGLIFYFLYGYRKSHLALGIDTSSGGEDIISPIRPLADRSQDSTKSKNKD

SEQ ID NO: 22512 - protein, 321 aa, Nitrosomonas sp. AL212
MTNDDRTKTNGVIVRESPYGMQREPTFSGILSFLRRKYSKDIDGAELVVSGIPFDLAVTNRSGARFGPQAIRLASAEVASTKPYPWGFDPFENFTVIDFGDCFLDVHNPLTIHQAIIEHARHILASGARMLTFGGDHYITYPLLKAHAEKFGEPLALIHFDAHSDTWPDDSPDSLNHGSMFYKAIKDGLIDPKHSVQIGIRTWNDDFMDMHILDATWVHRHGTDVVVAEVERIVGNRPAYFTFDIDCLDPAFAPGTGTPVCGGLSTAQALSIIRGFSRLNLIGMDVVEVAPAYDHSQITALAAAHIACDLICLLAKRKAEK

SEQ ID NO: 22513 - protein, 297 aa, Nitrosomonas sp. AL212
MTLHANFRTGYVAIIGRPNVGKSTLLNKLVKQKISITSKKAQTTRFRINGILTDEQTQFVFVDTPGFQTHYASVLNTAMNRVVTQSMREVNVILFVIEAMCLDQRDIAVLKILPANVPIILVVNKIDKLADKNRLLPFLGEVAQVVKFSDIIPVSAMYKIQLAELLNTIRNYLPVSEPLYDKDEITDRSERFLAGEFIREKLFRLVGDEIPYSTSVVIDQFKLENHLHKVYATILVDKPNQKAIIIGKKGEKLKQIASQARKDMELLFGEKVYLEVWVKVKSGWADSESVLRNLGYE

SEQ ID NO: 22514 - protein, 102 aa, Nitrosomonas sp. AL212
MNVEDLIEQQITTHPVVLYMKGTLDQPQCGFSANAVNILKACGVDDIFSVDVLADPEVRQGIKDFSNWPTIPQLYVNGEFIGGSDIVTEMYQSGELQKLFEN

SEQ ID NO: 22515 - protein, 354 aa, Nitrosomonas sp. AL212
MKFFDEAIIQVYAGKGGDGVASFRREKYIPKGGPDGGDGGRGGSIFAVADRNINTLIDYRFARIHRAKKGENGQGSDRYGKSAEDIVLRMPVGTIIKDINTGETLADLTHDQQKILLAKGGSGGIGNLHFKSSTNRAPRQFTQGEPGQEFELKLELKVLADVGLLGMPNAGKSTLIRAVSAARPKVADYPFTTLQPNLGVVRVDHNRSFVMADIPGLIEGAADGVGLGHRFLKHLTRTRLLLHVIDMTPLDAETDLIHEARALAGELEKYDESLYQKPRWLVLNKTDMMPEQERDELCRQFVDKLEWKENYFIISALTGEGCKHLIYAIMEYLEQHLPPQDGNSILENEIPDQC

SEQ ID NO: 22516 - protein, 103 aa, Nitrosomonas sp. AL212
MYAVIKTGGKQYKIQVGEKLKIEQLKVENGSELIIDQVLMVADGDKVSVGVPLVNGAKVSATVLGQGRHDKIRIFKMRRRKHYQRHQGHRQNYTEIEITGISA

SEQ ID NO: 22517 - protein, 267 aa, Nitrosomonas sp. AL212
MAYVKPEEIVENMLQAGAKKAGLPVRQLLIRGFLAGAFLGYATTLAILTATQTGWGMAGALVFPVGFVMIVLLGLELATGNFALIPIAVKAQRTSLGRLFVNWTWVLIGNLIGSVAYAYLYCIVATKMGTIDPETIPALQRTIAIAETKTLEYAKLGFDGTITAFTSAILCNWMVTLGAVMAFTSSTTAGKIAAMWLPIMTFFGLGYEHAIVNMFVIPAGMWLGADITVADWWLWNGLPVIAGNLFGGMMFTGFMLYWSYGRTSHQD

SEQ ID NO: 22518 - protein, 404 aa, Nitrosomonas sp. AL212
MKKINKAVLAFSGGLDTSVILKWLQDTYQCEVVTFTADIGQGEEVEPARAKAKQLGVKEIYIDDLREEFVRDFVFPMFRANTIYEGEYLLGTSIARPLIAKRQIEIAKETGADAVSHGATGKGNDQVRFELGYYALQPDIQVIAPWREWNLTSREKLLQYAEQHNIPVEMKKKTGSPYSMDANLLHISYEGRVLEDPAVEPEESMWRWSVSPEKAPDAPEYLDVEFRCGDAVALNGVELSPAGVLEKLNRLGGKHGIGRLDLVENRYVGMKSRGCYETPGGSILLRAHRAMESITLDREVAHLKDDLMPRYAELIYNGYWWSPERRMLQVMIDASQERVNGWVRLKLYKGNITVVGRDSPADSLFDSNIATFEDDAGVYNQGDAAGFIKLNALRLRIAAKRRSV

SEQ ID NO: 22519 - protein, 397 aa, Nitrosomonas sp. AL212
MELSSRVQAIKPSPTLAVTARAAKLKSEGKDIIGLGAGEPDFDTPQHIKDAAIAAINKGQTKYTAVGGTPGLKSAVVAKFKRENNFDFDAKQILVSCGGKQSFFNLVLSVINPDDEVIIPAPYWVSYPDIVLIAEGKPVFISTGIEQNFKISAQQLEAAITSKTKMFVINSPSNPSGAVYTLDELKALGEVLRKHPKIIIATDDMYEHIMLTGQRFGNIANACPDLFPQTIVLNGVSKAYSMTGWRIGYCGGPAHIISAMENIQSQSTSNPSSISQAAAEAALNGDQSCIRPMVTAFKERNIFVTEQLNQVNGVQCLPSQGAFYAFADVRQSINTLYEKNLINTPNDIVFSEYLLEKAGVAVVPGSAFGCEGYMRLSFATSMENLKQALSRMKNLLK

SEQ ID NO: 22520 - protein, 229 aa, Nitrosomonas sp. AL212
MSLSTESCSPESIDKFFENNADRLIKAYPSIQEINIPNKDFLYRQGDLGTYVFWIKGGIVKLSYLTVQGSEITIALLKSGDVIGDLRPDKQAREESAQALGNVSCYRMAYNDFKALLLHYPALAWQVLEETYVRKQKIEHKLRIILTQPIEMRLAATLLELAKMFGVQCTHGYALEIHLTQQDVADLIGASRPVVSTVLNDFRSRGMLEYTRDQICVNDAALVDYCEAM

SEQ ID NO: 22521 - protein, 385 aa, Nitrosomonas sp. AL212
MEPVYFDHNATTRIDDAVLEAMLPYFQREFGNASSRHCYGLNARRAIDKARRQVADAAGVQPAQVIFTSGGSEANNLFIRGAADSLKPGNLFISAIEHPCVLKPAQALSRRSCDAWAMHQLAVNTSGQVDLDAASNAMQKYKPGLVAVMLANNETGVIQDVAPIAESARSHGAYVHTDAIQGLGKIPLDFSTLKVHAMTLSAHKVYGPKGAAALIVDKRLLLKPLIYGGGHENGLRSGTENVPAIVGFGVACELAQARMAETAQHVSILRDQLEKGLASMDATIFGTAAARIPNTCYFALPDIEGDTLVVKLDKAGFAVAAGAACSSVNPGQSHVLNAMQVDPMLARCAVRVSLGRSNTLEQVDAFLRATQHIVAELKQTSSLSF

SEQ ID NO: 22522 - protein, 567 aa, Nitrosomonas sp. AL212
MSAELTGAEITIRCLQEEGVKCIFGYPGGAVLFIYDELFKQDKVRHILVRHEQAAIHAADGYARSSNKVGVALVTSGPGVTNAVTGIATAYMDSIPMVVISGQVPTNAIGLDAFQEVDTVGITRPCVKHNFLVKDITELAHTIKKAFYIASTGRPGPVLVDIPKDVSQQKTKFVYPDKVSMRSYNPVTKGHAKQIKKAVELILSAKRPVVYAGGGVILSNAAPQLTEMTQMLNFPCTNTLMGLGGYPATDKQSLGMLGMHGTYEANMAMQYCDVLIAVGARFDDRVIGNPKHFFNENRKIIHIDIDPSSISKRVRVDIPIVGDVLDVLKELIKLLKTEKDKPDHVALKEWWKQIDLWRERDCLKFDRKSKIIKPQMVIEKLFEITKGDAFITSDVGQHQMWAAQFYKFDKPRRWINSGGLGTMGFGMPAAMGVQLANPNGKVACVTGEASIQMCIQELSTCKQYKLPLKIINLNNRYMGMVRQWQEFFHGNRYAESYMNALPDFIKLAESYGHIGMKIEKPEDVGDALKESFKLKDQLVFMDFITDQSENVFPMVPGGKGLSEMILV

SEQ ID NO: 22523 - protein, 564 aa, Nitrosomonas sp. AL212
MKEKSETNLHVESTPSNFIRNIIEEDNRSGKWNGRVETRFPPEPNGYLHIGHAKSICLNFGIARDYGGVCHLRFDDTNPEKEAQEYVDSICDSVSWLGFDWGQHLYYSSDYFNQLYEFAEYMIDCGKAYVESLSADEIRELRGTLTDPGKNSPFRDRPIAESLDLFRRMKAGEFPDGQYVLRAKIDMASPNINMRDPVIYRIRHVHHQRTGKQWCIYPMYDYTHCISDALERITHSLCTLEFEDHRPLYDWVLDQLVDKVPCHPQQIEFARLNLTYTVMSKRKLIELVESKLVDGWDDPRLSTLAGVRRRGFTPRAIRLFAERIGISKADSWIDMGVLEDCLREDLNENAPRRIAVLKPVKLIIDNYPENQQEDCFAPNHPQKPEWGKRAIPFSKILYIERDDFMEVPTKGYFRLAPGVEVRLRYAFIVKCVQVDKNTQGDIEAIHCTYDPDTKSGTPGAESRKVKGNIHWLSVKHAQAAEIRLYDRLFTDPYPDSGGKDYKTSLNSHSKQIITAYVEPSLCEAKPEQSFQFERNGYFIADRMDMQSDKPVFNRAVTLRDSWGN

SEQ ID NO: 22524 - protein, 457 aa, Nitrosomonas sp. AL212
MSFEKLNLHPSILKAIQEAGYTTPTPIQQQAVPELIAGHDVMASAQTGTGKTAAFMLPALHTLATPAQIRSRGPRVLVLTPTRELALQVSEAAKKYGKYLPRINVVSILGGMPYPLQNKLLSQPVDILVATPGRLIDHIQRGRIDFKRLQMLVLDEADRMLDMGFIEDVETIAAATPATRQTLLFSATLDNAIDRVAAKLLKTPQRIQVSSPKSKLDNIEQRLHYADDMSHKNRLLDHVLRDETLKQAIVFTATKRDADSLADTLYAQGYAAAALHGDMNQRERNRTLTRLRNGGLRVLVATDVAARGIDVADITHVINFDLPKFAEDYVHRIGRTGRAGAAGIAVSFASVKDSMHLTKIERYTGQRIASHTIPGLEPRIKPRFHGNGPRGTAPNVTQKRKRAPFSGFDSRPSFGAPGESDRNRNGQRTRTLGPDNRGNTFRNNNGNRANYQAARAK

SEQ ID NO: 22525 - protein, 409 aa, Nitrosomonas sp. AL212
MAFYVQKYGGTSVGSTERIKNVARRVAKFHSQGHQIVVVVSAMSGETNRLIALAHEVQVNPDPRELDVMISTGEQVSISLLAMALMELDIQARSYTGSQVKILTDSTHTKARILNIDEDKIRADLAAGYVVVVAGFQGVDEQGNITTLGRGGSDTTGVALAAALKADECQIYTDVDGIYTTDPRVVAEARRLNTITFEEMLEMASLGSKVLQLRSVEFAGKYKVKLRVLSSFEDEGQGTLITFEEDEDMEQAVISGIAFNRDEAKITVLGVPDHPGIAYQILGPVADANIDVDMIIQNVGHDGLTDFSFTVHRNEFNNTMNILKEKIQPHIGARDVLGGDRIAKVSVVGVGMRSHAGIASKMFRVLAEEGINIQMIATSEIKISVVVDEKYMELAVRVLHKAFDLEQAP

SEQ ID NO: 22526 - protein, 371 aa, Nitrosomonas sp. AL212
MRIGVPKEIKIHESRVGLTPTAVRELVAHGHQVMVQKNAGIQIDLDDGKYQSAGAEIVETPQEIYAKADLIVKVKEPQPNEIPLLRQGQVLFTYLHLAADPVQTQGLIDSGCIAIAYETVTDRFGGLPLLAPMSEVAGRMAIQAGAHALELDQGGRGMLLGGVSGVPAARVVVIGGGVVGTNAARIAMGVEAHVTVLDKSIHRLQQLDFQYGSRINTVFSTVDALEEHVSSADLVIGAVLLPGGAAPKLVTHEMVKRMNRGAVLVDVAIDQGGCFETSKPTTLANPIFTVDGVVHYCVSNMPGAVARTSTFALNNATLPFVVTLANKGYRKALMEDVHLRNGLNVCQGRLTHEAVARDLKLEYTPATAVLD

SEQ ID NO: 22527 - protein, 399 aa, Nitrosomonas sp. AL212
MTKQTQEAYIVAAVRTPVGKAPRGMFKNVRPDDMLVHVLRAVMKQCEGLDPKAIDDVIVGCAMPEAEQGINVARVGLLLAGLPDNVAGMTINRFCASGLQSVALAADRIRLGEADVMIAGGTESMSMVPMMGNKVSMNPMMFEHEENVAIAYGMGMTAEKVAEQWKVSREDQDEFALTSHQRAIKAIQSGEFQQEIAPYPVDEKRPDLITHQVREKVVIKDTDEGPRADTSLDALAKLKPVFAAKGSVTAGNSSQMSDGAGAVVLMSEAAMQRFNLSPIGRFIGFSVAGVPPEIMGIGPIKAIPKVLAQTGIKQDDLDWIELNEAFAAQSLAVIRDLGLDRNKVNPLGGAIALGHPLGATGSIRVATLLHGLRRHKQKYGMVTMCIGSGMGAAGVFEAL

SEQ ID NO: 22528 - protein, 179 aa, Nitrosomonas sp. AL212
MKLIILDQTGVINQCSDTFIRTPEEWIPIPGSLEAIARLTHSGYRVVLATNQSSIGRGLIDMATYNAINDKMYKAIHHVGGRIDAIFFCPHTYADKCACRKPATGLFDEIMQRYGVNLTNVAVVGDSLKDLQAAAAVGAIPVLVLTGHGQITQTCQEIPFNTQIFADLSVVADTLIGEE

SEQ ID NO: 22529 - protein, 316 aa, Nitrosomonas sp. AL212
MSYDSLMVFTGTAHPKLAQDVVKHLNIHLGRANVGRFSDGEIMVEILENVRGKDVFVLQSTCAPTNDSLMEILVMVDALKRASASRITAAIPYFGYARQDRRPRSVRVPITAKVVANMLTTVGVDRLLTMDLHSDQIQGFFDIPVDNIYGMPILLGDIWKHNYQNLIVVSPDVGGVVRARHLAKRLECDLAIIDKRRPKPNEAKVMNIIGEVKDRTCVIIDDLVDTANTLCEAAKALKEHGARTVLAYSTHAVLSGSAVERIQNSALDKLVVTDTIPLRNDAMACDRICQLSIANLLAETMLRISNESSLSSLFME

SEQ ID NO: 22530 - protein, 644 aa, Nitrosomonas sp. AL212
MAKIIGIDLGTTNSCVAVMENGKPKVIENSEGTRTTPSIVAYTEDNEVLVGASAKRQAITNPKNTLFAVKRLIGRRFDEEMVQRDIKMVPYSIVKADNNDAWVEVRGKKIAPPEVSAQVLMKMKKTAEDYLGEAVTEAVITVPAYFNDSQRQATKDAGRIAGLEVKRIINEPTAAALAFGLDKKEGDRKIAVYDLGGGTFDISIIEIAEVEGEHQFEVLATNGDTFLGGEDFDSRVIEYLVDEFKKESGIDLKKDMLALQRLKDAAEKTKIELSSSQQTEVNLPYITADASGPKHLAVKITRAKLESLVEDLIERTVGPCRTAIKDAGLTASDIDDVILVGGQTRMPKVQDKVKEIFGKEPRKDVNPDEAVAVGAAIQGGVLKGDVKDVLLLDVTPLSLGIETLGGVMTKLIQKNTTIPTKAQQVFSTAEDNQTAVTIHVLQGEREMASGNKSLGQFNLSDIPPSPRGMPQIEVTFDIDANGILHVSAKDKATGKENKIKIQASSGLSDDEIERMVKDAEAHAEEDHKALELISSRNQCDAMIHSVKKSLKEHGDQLSSEEKAKIEAALKDAEDVLKADNKDEIDAKTQALTEAAHKLAEKMYQQKEPQEPQAQSGSDSTSGHSEKPVEGEVVDAEFEEVKNKK

SEQ ID NO: 22531 - protein, 504 aa, Nitrosomonas sp. AL212
MTRKDVQRDFLASVVVFLVALPLCMGIAIASGVPPVKGTITGIVGGLVVGFLAGCPLQISGPAAGLTVLVFDMIQRFGVDKLGIVVLAAGAIQILAGFLQLGQWFRAVSPAVIQGMLAGIGVLILASQFHIMIGDTPKESGLENILTIPEAMRKGLIPHEGDDPSHWVSAHIGILTIAVIILWQFLVPKRFQFIPAPLVGVLVASGVAYVQNLSIDYIEFQDSLGSSIDFLRMEDFASLLDPSLLSMAISIAFIASAETLLCATAVDQMHLGSRTRYNREMSAQGMGNLLCGFLGALPMTGVIVRSKANIQSGGRTRVSAILHGGWLLLFAGLFPQILERVPIASLAALLVYTGYTLINVQAIRTLSMFGRGEVAVYAVTLVTIVTTNLLIGVLAGFGVALAKLIYSTNTLKVSVDSGTNDKPISIKFSGAATFVSLPKMANILDDIPLKQNVHLDFDDLRYIDHACLNLLVSWKRFYEVRNGTVSFDWKTLENRLLGGKWGQE

SEQ ID NO: 22532 - protein, 411 aa, Nitrosomonas sp. AL212
MTMRPILKSRKLTNVCYDIRGPVLERARQMEEEGHHIIKLNIGNPATFGFDVPEEILQDVIRNLSDASGYCDSKGLFAARKAIMHYTQEKQIKNVQLDDIFIGNGVSELVVLAMQALLDNGDEVLIPMPDYPLWTAAVVLSGGIAKHYLCDEESGWLPNLDDIRAKITPKTRAIVIINPNNPTGALYPEELLLEIIEIARQHQLIIYADEIYDKILYEQATHTSIASLAEDVLFVTFNGLSKNYRAAGFRSGWAVVSGEKNHARDYIAGLNMLASMRLCANVPSQFGIQTALGGYQSIYDLTLPTGRLMRQRDVAWKMLTDIPGVTCFKPQSALYLFPRLDPEIYPIEDDQKFALQLLLEEKVLLVQGSGFNWMQPDHFRVVFLPNVDDLTEAVGRIAHFLHHYRKRHGTY

SEQ ID NO: 22533 - protein, 67 aa, Nitrosomonas sp. AL212
MATGTVKWFNDSKGFGFITPDDGGEDIFAHFSAISSGGYKSLREAQRVTFDITTGPKGKQASNIVPQ

SEQ ID NO: 22534 - protein, 393 aa, Nitrosomonas sp. AL212
MRDVVVLSGVRTAIGDYGGSLQQIAPADLAAKVVREAVLRAKIDPNDVGHLVFGNVIHGESRDMYLARVACINGGLPHHTSALTVNRLCGSGLQAIISASQSIILNDTDVAVAGGAESMSRGGYLLPALRWGQRMNDGGTVDMMVGALTDPFDHVHMGITAENIAEKWKISRAEQDAFAAESHRRALSAINNDYFKEQILPVEIVVGKKTVLFDTDEHPREDTNLESLGRLRSIFKREGTVTAGNASGINDSAAAVVLMESGVARKRGLKPMARLVAYGHAGVDPKFMGLGPVPAVQMALQRASIKLDELDVIESNEAFAVQACAVAKELQFDPEKTNPNGGAVALGHPIGATGCILTIKALYELQRVGGRYALVTMCIGGGQGIAAIFEKHE

SEQ ID NO: 22535 - protein, 301 aa, Nitrosomonas sp. AL212
MANIGFIGLGIMGKPMAEHLIKGGHSLFLHSRSRVPEDLIALGGREFLSPKEVAQHADIIMTMLPDTPDVEKVLFSDNGIIELLRFGSEQVKTIVDMSSISPLETRKFASRINALGHDYVDAPVSGGDVGAQNATLTIMVGASATVFEKVRPILGLLGKNVVHVGENGAGQVCKIANQIIVSSAIEAVAEALLFVSKAGVDPDKVRRALLGGFAASRVLEVHGERMINRCFEPGFRIELHQKDLNIALDSASALGVSLPNTATVRELFSACLAHGGAKWDNSAIVKILEKLADHEIRKHRE

SEQ ID NO: 22536 - protein, 264 aa, Nitrosomonas sp. AL212
MIVNNSKTLLVVQGLRASINGTEILRGIDLTIKSGEIHAIMGLNGSGKSTLAKVLAGHAAYEITAGTVRFEDKDLLEMAPEDRARAGLFLAFQYPIEIPGVANTQFLRLAYNTIQAQRGKEELDPLEFDDFVREKMKLLDMNPDFLDRSVNEGFSGGEKKRNEILQMALLEPKLSILDEMDSGLDIDALKTVANGVNHITNKDNATILVTHYQRLLDYVVPDFVHIMQSGHIVLTGGKELALELETRGYDWVTANKRSIAGAIA

SEQ ID NO: 22537 - protein, 642 aa, Nitrosomonas sp. AL212
METKKLLLIIIFSTSLLFLWDAWQKELYPPSSQVMPGATSTESSNQRHDPLPVPGDELAASAAESSAVLGIEGVSPSVTPNLFPIGEKIQVKTDMVIAEIDTAGGDIRQLGLIEHPSREDINKPYELLLDKTARFQVAQSGLIGDGLPNHKTKYTVEDNKYSYQLEPGQEKVVVRLVAPEADGIQVTKIYTFHRGSYVIDVEFEIANHSEAAIIPFSYFQMLRDPNEPVGAGALVHSYTGAAMYTDDEKFLKIKFSDLDKNKAEYPTNADNGWIAMLEHYFLTAWLPEPGSPREYFAKRLAPNQYTAGVIAPVGTVEPDRVKNISMPFYAGPQEQNKLAELAPGLELTVDYGWLTVLAKPLFWLLSFYHSWTDNWGIAIILLTLTVKLIFFPLSAAGYRSMAKLRVVTPKLQRIREQYASDRQRMHQAMMEFYKEEKINPMGGCLPILVQIPVFIALFWTLLAAVELRYAPLALWITDMSVPDPYYVLPVIMGVSMWVQSKLSPTPADPIQAKVMQIMPIAFSIFFFFFPSGLVLYSLCNNILSIAQQWQITRMYENKAEEEANKDRNKKKTKNGPEPAKENLQLTVSVEDAEANTAPVEAASAVSTDKNEKPQIKQTVASGRNKAPVKPKSNSIAKKTKRK

SEQ ID NO: 22538 - protein, 762 aa, Nitrosomonas sp. AL212
MQRTDYSSFSHLPLSWTDEITAQLIDQETILAWLPIDLDTQLHFSAGLIVVTNKRLLAKMLGDEAWQAWHYRNGLSLTQRDYAGIGCLELYDPHARLSFWRYRRGNDAAVSRLIHRFTEQRDYHLAGKLAPSSDGLTQCPSCSTYLSSEEVCTVCEKQNHTPPSTWTLFRLWRFAQPYKGRLLIGFLLTLCSTAATLVPPYLTMPLMDNVLIPYQNGQPINRDLVTLYLSGLLGASILAWILGWARTYMLARVSERIGADLRTATYEHMLNLSQEYFGGKRTGDLMARIGAETDRINLFLSLHLLDFATDVIMIAMTAAILLSINPWLALVTLVPLPIILWLIHSVRHRLRIGFEKVDRIWAEVNNVLADTIPGIRVVKAFAQEKREAARFHAANQRNLHVNDRVNRVWSLFTPTVTLLTEVGLLVVWVFGIWQISQDEITVGVLTAFLAYIGRFYIRLDSMSRIVSITQKAAAGTKRIFDILDQVSSVPESPDPIHLPVIQGRIELRNVAFRYGTRSIVRDINLTIQPGEMIGLVGHSGSGKSTLVNLICRFYDVTEGVMLIDGHDIRTLSIAEYRKHIGLVLQEPFLFFGTIAENIAYGKPDATREEIVSAARAAHAHEFILRLPHGYDSLVGERGQALSGGERQRISIARALLINPRILILDEATSSVDTTTEKDIQQALDNLVRGRTTIAIAHRLSTLREADRLIVLDRGMIVEIGSHTELMTQQGYYYRLWLAQARNVDTEDKTLAPIEAHSSRGSV

SEQ ID NO: 22539 - protein, 420 aa, Nitrosomonas sp. AL212
MNIKSIFKLGVLGLYGAAIGAASLALTLTVDVNTAAAHGERSQEPFLRMRSIQWYDLKWQPKVTKVNDIATMTGKFHLAEDWPRAVGKPDRAFFNVGSPSPVFVRLSTKLNGEPTFISGPLIIGRDYEFEVKLKARIPGRHHMHAMVNVKDAGPIAGPAAWMNISGSWDDFTNPVTTLTGKTIDLETFNFSNGIFWHVLWTGLGVFWIGYFVAKPMFLPRSRVLLAYGDELLTSPTDRKFGMAMAILTCALVWGGYRYTESVHPYTIPIQAGESKVEPMPIAPNPVAIKVTHANYDVPGRALRVTMEITNNGDSAVNIGEFTTAGVRFVNPLGQKHLDPDYPKELVATGLTMDDDRGIEPGETREVKMEAKDALWEVQRLMALLGDPESRFGGLLMTWDDDGNRYINSIAGAVIPVFTKL

SEQ ID NO: 22540 - protein, 388 aa, Nitrosomonas sp. AL212
MSSNISFEQLGLSTDLLRAISEQGYTNPTPIQQQAIPIILKGFDVMGGAQTGTGKTAGFTLPMLQKLESHANSSTSPAKHPTRALILVPTRELAIQVYESVRAYGKYVALKSAVIYDGVNIDVQIAAIRSGVEILVATPGRLLDHLQQKNLILSKIEILILDEADRMLDMGFLPDIKQIIQMLPDQRQNLMFSATFSEEIKKLAGKILKSPILIEVAKQNSVSDLISHIVYSVESKNKQEFLIDMIKKKNLQQVLIFTRTKHGADHLAQKLNSRDILSSVIHGDRNQLQRTQALDNFKCGLIRILVATDVAARGLDIEELTHVINFELPNNPEDYVHRIGRTGRAGAKGFAISFVSREETVLLGGIERLLGIKIQVEESNSGLKKSTN

SEQ ID NO: 22541 - protein, 416 aa, Diospyros kaki
SRPPNSGAKHIAYNYQDLVFAPYGPRWRMLRKICSGHLFSAKALDDFRHVRQEEVGVLTRGLASAGQARPVNLGQTLTVCATNALGRVMLGRRVFRDDDSGGGVDEFKQMVVELMVLAGVFNLGDFVPALEWLDLQGVAAKMKKLHRRFDVFLTGILEEHKRHPGGGQKHTDLLSTLISLKDADTDGEGGGRLTDTEIKALLLDLFTAGTDTSASTVEWAMAELIRHPKILARAQIELDSVVGRNRVVTEPDLPKLTFLQAIIKETFRLHPSTPLSLPRMAAESCEINGYFIPKGSTLLVNVWAIARDPEAWADPLEFRPERFLPGGERPNADVRGNDFEVIPFGAGRRICAGMSLGLRMVQLVTATLIHAFDWALPEGEEPEKLNMDEAYGLTLQRAVPLMVHPRPRLAGHVYGA

SEQ ID NO: 22542 - protein, 491 aa, Diospyros kaki
MQVATATPCSSGRLLRLLAILAAALLLFSAQPASSAGQSVKYLPGYDGELPFHLQTGYISVEDSELFYYFIESEGNPLEDPLMLWLTGGPGCSSLYGIIYEMGPMEFDIHNYTGGLPKLRYYPDAWTKTASIIFLDQPVGTGFSYSTTQEGWPSSDTKSSEQSYEFLKKWLEENPQYLKVQLFVGGDSYAGKIVPLVTRLIADGNKNGGTPYLNLKGMVLGSPRTDNIIDENSKVVFAHRMALISDEMYENAKEACNGSYSNAAPNNTACHLAIEEITRCIRDLFRGNILEPRCLFVAPPQTESDAIHAERRSLQAQAQEEDEDEDGTLDFLLSPPRIQNLWCRAFNYVLAYEWGNDIAVQEALHVRQGTVAYWMRCNFSLSYTKDIHSVVSVHEYLKTIALQVLVASGDRDMVVPFVGTVKWIKALDLSVSEYWRPWFLDGQVQGYTEKYDNNGYYLTYVTVKGAGHTAPEYHRKQVYHLFDRWIHYYPV

SEQ ID NO: 22543 - protein, 350 aa, uncultured bacterium
MSRVTIQPSGKTVDCAHGDTVLTALEKAGYALPNNCRAGACGECKVKVLSGQYDQGMVLDMALSQEERRQGFGLMCMAKPISDDMVIEWGTADAKPKLFPPRENVLFVVTDKRAIAARVVELRLRPVGKPIRYWPGQYVTVGDPRAGFPARAYSISNAPRPDGELVLHVARADGGVTSQWIHDELPVGESIKINGAYGTFIGDPAVDTPVLCLAAGTGLAPILSLAEAALRRGFRKPVMLLLSARTREDAYAQGMLAWWRTKHRNFDYRITLTREQHDGFLHGRVDTVLPDLLPDLSRHTIFAAGSPEFTACCVDTCNSLGAAEDMIYTEGFFSVQQPVVASAERLLPTP

SEQ ID NO: 22544 - protein, 368 aa, uncultured bacterium
MTIGYCNFILHAILEEIVTLVQAIPASGETASGFTRLRVKAVIAETADASSIVFETPDEQANAFRYKPGQFLTLRVPVNGEDELRCYSLASSPATGENLKVTVKRVADGRVSNWLLDNLGAGDNLLVMPPKGIFCLQEGVGSVVLFAAGSGITPVISILKQVLLTTARKVKLVYANRDRNSIIFREELERLRDFHKGRFELVHRLDTEQGILTAQDAGAHADPAGQHYLCGPAPFMQAVKDGLRAAGVPDARILMESFDLAEDEPATEAAPVSDGANVAKVTVRYRGADYAIEVLETETVHTAAKRQGLNLPFSCKAGFCGLCIARVTAGQVSLKDNLGAISDGQIAEGLTLTCQALVRSAEATVVFE

SEQ ID NO: 22545 - protein, 398 aa, uncultured bacterium
MSNSLRIIIAGGGIGGMAAGLSLLRKGFDVRIFEQAPALTEVGAGVQISPNGSRALDALGAFERLKVLSCTPETKQFRHWKTGRSWPLFDLGDVAIAKYGYPYLTVYRPDLLDALAQGVRAIDPDAIALGTKAVGLDQDEKGVRLTFENGETAQGDILIGADGVRSRIRECLWGGDNPGFSGMVAWRGVIPMESLPEHLRKMVGNTWVGPGGHVVNYPLRGGKIMNFVGTIERDDWQVESWSTLGTAEECSRDFAGWHDDIHIMIGKAPSLLKWALMGRDPMSKWTKGRVTLVGDACHPTLPFLAQGAVMSIEDGVVLGRCLAAAADPLEALVTYENARIARTSRMVLGARDNTRRFHNPELETEESADAYMQREWSREPIKDRYDWLYSYDAEKVAL

SEQ ID NO: 22546 - protein, 398 aa, uncultured bacterium
MKSKPHILIAGGGIGGLAAALALLLRGFDVDVYEQAAELKEVGAGIQISPNGNRALDSLGVCDRLSAMSSHPEAKNVRLWNTGRTWDAFDLGTEAVRRFGYPYLTVYRPDLLQVLVDGVRAIKPDAVHLDRRAAGFRQRGGSVVLQFADGTEAGGDALIGADGVHSQIRSQLWGATMAKFTGMVAWRGVIPMERLPENHRGPIASAWVGPRGHILHYPLRGGRVLNFVATIEREDWQTESWSAQGTAEECARDFAGWHEDIQIKIRAAPTLFKWALMGREALDRWTQGNVSLLGDACHPTLPLLAQGAVMAIEDAVILGRCFEKYDTVNVALEAYEAVRRPVTKKKVDGALDNLKRFHSPLYEAEETAGPYIEREWGREAIVNRYDWIYSDDITRTPI

SEQ ID NO: 22547 - protein, 391 aa, uncultured bacterium
MTDVVISAAKRTPMGAFQGELSDLKATELGAAAIRAALADSGVSAATVDETIMGIVLPAGVGQAPARQASLGAGLPLATPATATSKVCGSGMKAVIQACSQIQSGQSKVVVAGGMESMSQAPYLAPSTRSGARLGHSKLVDHMFFDGLEDAYEGGLMGTFAERCAGDYQFTRDAQDAFAITSLKRALAATEEGLFVKEIVPITISSRKGETVVSIDEQPRNARIDKIPQLKPAFAKDGTVTAANASSISDGAAALVLSSREAAREQGAAICAKIVGHSAHAQEPALFTTAPVGAVQKLLDRIGWTVADVDLWEVNEAFAVVAMAFMQDLGLDHDRVNVNGGACALGHPIGASGARILVTLLHALEQRDLKRGIAAICIGGGEALAVAIERE

SEQ ID NO: 22548 - protein, 353 aa, uncultured bacterium
MSYEITIEPTGDVIEVEEGQTILDAALRQGVWLPFACGHGTCATCKCQVVEGEYEVGNASPFALMDMERDEGKILVCCATAESDMVIEADIDVDPDFLGYPVEDYRATVAEIIDLSPTIKGIHLELDGDMDFQAGQYINLNIPGVEGVRAFSIANQPSIKNRIELHVRLVPDGAGTSFLHRQLKVGDVLDLSGPYGQFFVRKSAPEDLIFIAGGSGLSSPQSMILDLLEAGDRRHITLFQGARNVAELYNRELFERLAAEHDNFDYVPALNEPEADDHWEGFTGFVHEAAVAHFDGKFGGHKAYLCGPPPMIDAAITALMQGRLFERDIHMERFLTAADGADGSTRSALFKRI

SEQ ID NO: 22549 - protein, 353 aa, uncultured bacterium
MSYEVTIEPIGETVEVEEDQTILDACLRAGIWLPHACCHGLCATCKVQVLEGDVEHGEASPFALMDFEREEGKCLACCAVPESDLVIEADIEEDPDAEVHPVEDFQGRVTAVEDLTPTAKRVTIELDRPMSFQAGQYLNLELPGIDQARPFSMANPPSRGDTVELHVRLVPGGEATTYIHEKLAAGDEVKVSGPYGRFFVRRSAPESMLFLAGGTGLSSPKCMVLDLLEHGETRQITLLHGARNLAELYDRELFEELAAKHDNFTYIPALSEPLEEDGWDGATGYVHDVAKAHFDGEFRGNKAYMCGPPAMIDACITTLIQGRLFERDMYMEKFLSAADAAQDSQRSPLFRKL

SEQ ID NO: 22550 - protein, 354 aa, uncultured bacterium
MTYQLTIEPLGATIDVEEGQTLLDAALRQGIYIPHACGHGLCGTCKVQVADGDVDHGAANPFALMDFERDEGKTLACCATLQSDATIEADIDDEPDAQIIPMRDFEATVARIEQLTPTIKALHLRLDQPIRYQAGQYVQVQIPGVEGGRAFSIANAPGADGQSSEIELNVRQVPGGAGTTWLHESLQEGARLQLSGPYGRFFVRRSAAMPMVFMAGGSGLSSPRAMILELLASGCTQPITLVYGQRSAQELYYDAEFRALAARHPHFTYVPALSQAADSDGWDGARGFVHEAARAHFGGSFAGHKAYLCGPPPMIEACIGTLMQGRLFERDIYTEKFLSAADAQQARSPLFRTI

SEQ ID NO: 22551 - protein, 322 aa, uncultured bacterium
MNEETPVTTGLGMDGRPEGFRSGFACFVGRPNAGKSTLTNALVGSKIAITSSKPQTTRHAIRGIVHRADAQMVLIDTPGLHKPRTLLGERLNDLVHETWSEVDVIGVCLPSDQRIGPGDTYLVSQIAELPHRPKLVALATKSDLVSGERMRDHLVSIQALEEKLGIRWEHIVPVSAVSGEQVDEVADVLVSLLPEGPAYYPDGEITDEPTETLVAELIRECALEGVRDELPHSIIVTIEEMGLREGRPEDKPLLDIFANLIVERDSQKGIMIGHKGSHLREVGTAAREQITRLLGTPVHLDLRVKVLKEWQRDPKYLNRLGF

SEQ ID NO: 22552 - protein, 472 aa, uncultured bacterium
MSKVLTSLPVGERVGIAFSGGLDTSVAVAWMREKGAIPCTYTADIGQYDEPDIESVPGRALEYGAELSRMVDCREALVEEGLVALMCGAFHIRTAGKVYFNTTPLGRAVTGMLLVRAMKEDQVDIWGDGSTYKGNDIERFYRYGLMANPNLRIYKPWLDVDFVNELGGRDEMSQWLSERDLPYRDSQEKAYSTDANIWGATHEAKKLEHLDAGFDIVEPIMGVAAWRDDVEIAPENVTITFEQGRPVAINGEDFSSNPVALVMKANEIGGRHGLGNSDQIENRIIEAKSRGIYEAPGMALLHIAYERLLNAIHNEDTIANYHNEGRRLGRLMYEGRWMDPQSLMLRESIVRWVGSAVTGEVSIRLRRGDDYHFLDTSGPSLSYHPEKLSMEKVGDAAFGPEDRIGQLTMRNLDIADSRSRLERYAQVGIIGGATAELVGQLESGGALAIAAGTPEDEAAEALDRAAIDIGLD

SEQ ID NO: 22553 - protein, 354 aa, uncultured bacterium
MTYQLTIEPLGAAIDVEEGQTLLDAALRQGIYIPHACGHGLCGTCKVQVADGDVDHGAANPFALMDFERDEGKTLACCATLQCDTTIEADIDEEPDAQIIPVRDFAATVERIERLTPTIKALHLRLDKPIRFQPGQYVQLEIPGLGQSRAFSIANAPGADGECAQVELNVRHVPGGAGTTWLHEQLQEGARLRLAGPYGRFFVRRSARLPMVFLAGGSGLSSPRSMIHALLAGGCTEPVTLVYGQRSRDELYYDDEFRALAQQHPQFTYVPSLSAEPEGSDWSGARGFVHQAAQAHFQGNFAGHKAYLCGPPPMVEACIATLMQGRLFERDIYTEKFLSAADAQGARSPLFKRV

SEQ ID NO: 22554 - protein, 476 aa, Clostridium perfringens ATCC 13124
MRNIPIINGISMYLREEIVPFSMPGHKNGRGFKGFEEILLQGDLTEVEGLDNLQHPEGIIKEAEDKLSKLYKSKKSYFLVNGSTCGNLIMIFSLFKEGDKVLVERNCHKSIMNGIIMRKLKPVFINNIFHSKLKAPVGIDLNHLKEQISLNKDLKGIILTYPNYYGVGVNIDETIKIAREANLKVGIDSAHGAHFGFNNLLPESVQELKADIVVMSAHKTLPSLTQTAWMHVNNEDFIEEIEFYKNIFMSTSPSYMFMMSLDYSRNFLEEHGEEAYNNLFKIIEDFKNDIKDLSYFKILDKEFLINELEKNIKINDIKIDNSRIVLNLRENLNGNKLLDYLRSKNIQCEMSDNKNVVLIPSPFNTEEDFKILKYALKSCDINCLKDEEIDFYLTDLPEKKLEPFEVLDLEYERININDAVGKIVAESIVPYPPGVPMIIMGEVIEERHIKLLNEYMKSKVDLIGIKDKKVKVIKNK

SEQ ID NO: 22555 - protein, 308 aa, Ricinus communis
MPSARFRIPIYQQDFPVNSQEFDFHDQPMGSFSDMVFGFLEHGEDQSFQASPSSEDSYENEALDEEEDEEKENGGFQEDKSFWDNQHQLLQATLCRTSSLESGIRNITKETIKEIQMAGTTCGCGKPMVGGCRKCLMAEVSGRLRNAGYNSAICKSKWRSSPDIPSGEHTFLDVIDNSSSKKGEIRVIIELNFQAEFEMAKASEEYNSLVRKLPEIFVGKVERLNNVIKILCLAAKKCMKQKKMHLGPWRKRRYMQAKWLGTCERTVASIPSFSMGYSGKVSKPKSSMLTVDLLDLLPNMHCTAVEVV

SEQ ID NO: 22556 - protein, 212 aa, Ricinus communis
MEVSNLRPRRGVIAFSILLFSTLIISSSATLPLTNNTSTQYVETSCRNTTYPKLCYDSLAIYATKIDSNPKMLAYVSMNVTLTATRSASELMKNLSRLKSLTPRQAAAIADCVAEIGQAVYELKKSIGEMGRATSGSGTDPIIINDVQTWVSAALTDDTTCMDGFAGHAIDGEVKNIVKENMTKVARLTSIALALINSFGSSSQGENSALVL

SEQ ID NO: 22557 - protein, 226 aa, Ricinus communis
MAALLLGHALLIAILILHFPTYINSSPPTAPLPSNTNTQYIRTTCNYTTYPRLCYHSLSIYASKIKTNPKLLANTALNITFKATESTSRLMKKMSRIHGLNPGVAAALVDCMEVVGDSVYELQRSIGEMGHASGANFYGVMEDIQTWVSAALTDDTTCIDGFDEQPNLNGNVKRIDLDSIFWFRFAIYVELYFLPVPSSDEVSYLRLDYKCGIVTREVILYSFHIG

SEQ ID NO: 22558 - protein, 198 aa, Ricinus communis
MAKLVLCLLVLSIAGKAGSASSPIDFIKASCKATRYPDLCVQCLSGYASAIQQNEQHLAQTALSVSLTRAKSAGDYVKKLTKVRGIKAREYRAVKDCIDNMGDTVDRLSQSIRELDHMGRAVGKDFVWHMSNVQTWVSAALTDENTCLDGFAGRHMDGNVKAAIKSRVTNVARVTSNALALVNRFASRHRKAASGETP

SEQ ID NO: 22559 - protein, 575 aa, Ricinus communis
MENRARPICSPSSLEQTHFVDIHEVLPEEEEEQEEEEGKTRIQDKARRGQSRLFKVREAKRPTNRSFSRQVSLETGFSALKRESKAKDERKINLPRSGRSFGGFDSATRINVEARKGDFSIFKTKSTLSKQNSLLPGRKERDNVETQRVDASNELDDSVHEGVPAGRYFAALRGPELDEVKDYEDILLPKDEKWPFLLRFPIGCFGICLGLSSQAVLWKALAKSPATKFLHITPFINLVLWLLAAAVLLSVFFTYILKCIYYFEAVKREYFHPVRINFFFAPWVVCMFLAISVPPVLAPKTLHPAIWCIFMTPYFLLELKVYGQWLSGGKRRLCKVANPSSHLSVVGNFVGAILASNVGWKEVGKFLWAVGFAHYLVVFVTLYQRLPTSEALPKELHPVYSMFIAAPSAASIAWESIYGDFDGLSRTCYFIALFLYISLVVRINFFTGFRFSVAWWSYTFPMTTISVATIKYAEQVPSVPSKVLALVLSFMSSAMVSVLFVSTFLHAFVWRTLFPNDLAIAITKKRLVKEKKPLKKAYDIRRWTRQALNKQNPESKNFDGENDDLITDGSAVRHL

SEQ ID NO: 22560 - protein, 322 aa, Ricinus communis
MAAADESMQNLPLVLLHRPPSFTLPLKDRLSAHFQLLDPVLAQEPANSLNSVRALVCVGYAPITSETLSVLPSLELIVASSAGLDHIDLKECRGRGITITNASVAFAEDVADQAVALLIDVLRRISAADRFVRSGLWPMKGDYPLGFKLGGKRVGIVGFGSIGSEVAKRLEAFGCRIAYNSRRKKPSVPFPYYANVLDLAAESDILILCCSLTEETHHLINGNVMKTLGREGVIINVGRGSLIDEKELVQFLVQGKIGGAGLDVFENEPYVPKELFSLDNVVLSPHVAVFTPESIEAILELIFSNLKAFFSNEPLLSVVQPE

SEQ ID NO: 22561 - protein, 323 aa, Ricinus communis
MAHHLFFNRMVLTIFLIVLSSMQSHAQLSSNFYDNTCPNALSTIRTAIRSAVSRERRMSASLVRLHFHDCFVQGCDGSILLDDTSSMTGEKFARNNNNSVRGFQVIDNAKAQVESICPGIVSCADIVAVAARDASVAVGGPSWTVKLGRRDSTSASQRLADANLPGFTDSLESLISLFERKGLSARDMVALSGAHTIGQARCLTFRGRIYNNASDIDAGFASTRRRQCPANNGNGDGNLAALDLVTPNSFDNNYFRNLIQKKGLLQSDQVLFSGGSTDNIVNEYSRSPSTFSSDFASAMVKMGDIEPLTGSQGEIRRLCNVVN

SEQ ID NO: 22562 - protein, 321 aa, Ricinus communis
MASHLSFACMILTIFFIPNYSSLCQAQLSSNFYDNTCPNALTTIKSAIDAAIESEQRMAASLIRLHFHDCFVQGCDGSVLLVDTPTFTGEKSARNNANSIRGENVIDDAKAQVESICPGIVSCADILAVAARDASVAAGGPSWTVNLGRRDSTTASLAQANSDLPGFSDPLNRLISLFSDKGLNERDMVALSGAHTIGQAQCVTFRDRIYNNASDIDPDFAATRRGNCPQTGGNGNLAPLDLVTPNNFDNNYYSNLMAKRGLLASDQILFSGGSTDSIVNEYSTDSSSFDSDFAAAMVKMGNISPLTGTQGEIRRLCSAVN

SEQ ID NO: 22563 - protein, 322 aa, Ricinus communis
MASRLSFACMILTIFFIINYSSLPCQAQLSSNFYDNTCPNALTTIKSAIDAAIESEQRMAASLIRLHFHDCFVQGCDGSVLLVDTPTFTGEKSARNNANSIRGENVIDDAKAQVESICPGIVSCADILAVAARDASVAAGGPSWTVNLGRRDSTTASLAQANSDLPGFSDPLNRLISLFSDKGLNERDMVALSGAHTIGQAQCVTFRDRIYNNASDIDPDFAATRRGNCPQTGGNGNLAPLDLVTPNNFDNNYYSNLIAKRGLLASDQILFSGGSTDSIVNEYSTDSSSFDSDFAAAMVKMGNISPLTGTQGEIRRICSAVN

SEQ ID NO: 22564 - protein, 320 aa, Ricinus communis
MASRLSLLCMVMLMIFSSLPCKAQLSSNFYDNTCPSALSTIKGAISTAVSREQRMAASLIRLHFHDCFVQGCDGSILLDDTPTMTGEKTARNNANSVRGFDVIDNIKSQLESRCPGIVSCADIVAVAARDASVAASGPSWSVNLGRRDSTTASRSLADSNLPAFTDSLDRLTSLFGSKGLSQRDMVALSGAHTIGQAQCVTFRGRIYNNASDIDAGFAATRRSQCPAASGSGDSNLAPLDLVTPNIFDNNYFRNLIQKKGLLQSDQVLFSGGATDSIVNQYSRDSSVFSSDFASAMVKMGNISPLTGSQGQIRRVCNVVN

SEQ ID NO: 22565 - protein, 274 aa, Ricinus communis
MGFGISDHGTCNTGLGLGLICHEKEENSSQHQSDRHRQGKKKKLSLKYDHMFPSLTLGLPQEAYASVNKVEPDLQPQASSPSAVSSFSNSSVKKERDSGGGGGGEEVDGERVSSRVSDEDEEGSPRKKLRLTKQQSAILEDNFKEHSTLNPKQKQALAEQLNLRPRQVEVWFQNRRARTKLKQTEVDCEVLKKCCETLTEENNRLQKELQELKSLKLQAAPFYMQLPAATLTMCPSCERIGGGGDGSSSTSTITVGVGSKPHFYSPFTHPSAAC

SEQ ID NO: 22566 - protein, 197 aa, Ricinus communis
MAFAGTTQKCMACDKTVYLVDKLTADNRIYHKACFRCHHCKGTLKLSNYNSFEGVLYCRPHFDQLFKRTGSLDKSFEGTPKIVKTDKPADGEKPNAAKVSSMFGGTRDKCFGCKNTVYPTEKVTVNGTPYHKSCFKCIHGGCVISPSNYIAHEGRLYCKHHHNQLIKEKGNLSQLEGDVEKESTTQNANGREVAAES

SEQ ID NO: 22567 - protein, 598 aa, Ricinus communis
MAGTSLSSSNLIFTQDKLSWKLSLSSFPPLPTTPFNRRQTRSSQKFLVLATLMDAKPTVLVAEKLGEAGLDLLKSFANVDCSYNLSPEELCTKISLCDALIVRSGTKVTREVFERSGGRLKVVGRAGVGIDNVDLSAATEHGCLVVNAPTANTIAAAEHGIALLTAMARNIAQADASLKSGKWQRSKYVGVSLVGKTLAVIGFGKVGSEVARRAKGLGMHVIAHDPYAPADRARAIGVELASFEEAISLADFVSLHMPLTPATSKMFNDDTFSKMKKGVRIVNVARGGVIDEDALVRALDSGIVSQAALDVFTEEPPPQGSKLVLHENVIATPHLGASTTEAQEGVAIEVSEAVIGALKGELAATAVNAPMVPAEVLSELAASVVLAEKLGRLAVQLVSGGSGVQSVKVTYASSRDPDDLDTRLLRAMIIKGLVEPISDVSVNLVNSDFTAKQRGIKIIEERIVLDGSLENPLEYIQVQIANVESKFGTAISESGEIKVEGRVKEGKPHLTMVGSFGVDVSLEGSLILCRQIDQPGMIGKVGSILGEENVNVSFMTVGRIAPRKQAVMTIGVDEEPNKEALKRIGEIPLVEEFVFLKL

SEQ ID NO: 22568 - protein, 247 aa, Ricinus communis
MEASVAQMGQKRNRKGAAKNLETSVTSSGESEHEAHILTERERRKKMRTMFTNLHALLPQLPAKADKSTIVDEAIKYVRTLEETLQTLEKQRQEKLQGATFADSSEPSVITVQTEAVESREAFLAIQGPSKNYPRATKMPHMLPVSLTPACFQTWFSPNVVMNMCGDDAQISVCSVKKPGLLTSIVYILQKHKLDVVSAHISSDQFRSIYMIHAHAGGACGQYPEALSVEDTFKLAAGEMNLWLLSC

SEQ ID NO: 22569 - protein, 480 aa, Ricinus communis
MSKWLSKIFKGSSHNISEGHYRGNYGQDPNYYAPSTSGVEWSEQENEDINRAIEWSLLEENQTGKRVINNENQLEEDEQLARAIQEILNVESPPRYGYGYGNGNGNGNDEPRLSLFLCRICAGCNTEIGHGRFLNCLNAFWHPECFRCHACNLPISDYEFSMTGNYPYHKSCYKERYHPKCDVCKYFIPTNPAGLIEYRAHPFWIQKYCPSHEHDGTPRCCSCERMEARDTGYIALSDGRKLCLECLDSAIMDTNECQPLYLDIQEFYESLNMRVEQHVPLLLVERQALNEAREGEKNGHYHIPETRGLCLSEEQTISRVLKRPKFGAGNRAMGMVTEPYKLMRRCEVTAILILFGLPRLLTGSILAHEMMHAWMRLRGFQHLSQDVEEGICQVLAHMWLESQLASSSGISAASSSASRASKRGTRSPFERKLGEFFKHQIESDTSPVYGDGFRMGQRAVQKYGLEKTLDHIRMTGRFPY

SEQ ID NO: 22570 - protein, 229 aa, Ricinus communis
MASSGFGESSRPPQSPQFSSNYSNGDAGNFECNICFDLAQDPIVTLCGHLFCWPCLYKWLHFHSQSKECPVCKALVEEEKLVPLYGRGKTSTDPRSKSIPGVNIPNRPAGQRPETAPPPEPNHFAQHGFGFMGGLGGFAPMATARFGNFTLSAAFGGLIPSLFNLQVHGFPDAAMYGTATGFPYGFSNSFHGGHAHGYHQHQGQGQQDYYLKRLLFFIGFCVLLALIWQ

SEQ ID NO: 22571 - protein, 474 aa, Ricinus communis
MAYVATIPSSSFLSLQFCSDKLLFAHLLPERCCQRNNKSDTLRTYKVSCRISKLKEAPPASFIREPHKYFDQVIITVRSGDGGHGAILNMPQPQQKSSDVKSKKKQNKKSSYKRDFDGSLILPMGGHGGDVVIYADEGKDFLLEFHSKSRFNAKRGGNVDAMGVLNSLLHDGFAAPTLRIPVPVGTVVKHKRGKLLADLTQPGDEILVARGGQGGISLLDAPEHRRKRLMALTTNVLRDDSDKVLVLGQPGEEVNLELILRVVADVGLVGLPNAGKSTLLAAITHARPDIADYPFTTLMPNLGRLDGDPTLGAAMYSSEATLADLPGLIEGAHLGKGLGRNFLRHLRRTRLLVHVVDAAAEDPVNDYRTVKEELRMYNPEYLERPHVVVLNKIDLPGAKDRLSSLTEEISEIGSSEIFNGDRNDKEIEDYPAPLAVVGVSVLKGIRVNEMLKEIRTALKNCRDSNEASEPSAIP

SEQ ID NO: 22572 - protein, 481 aa, Ricinus communis
MENGNGESGGMQILRTFSTFGVSSQMGSSNMRQSFNPDNSNSNKRIGVPPSHPNNLQVIMASRSNSHNLNRGAFSHSRSLSQSAVFSFDCLPPLSPLPCLSSGSNQSDPVLTDISIEDKGLSAPSPVTATSGLKVNNDSLPPRRGHRRSMSDSVPLAFSAMIQASPQLIPIGKNSGIEKQSALVKHELDGDGNVQGKSQGEVVDDLFSAYMNLDSIDTLNSSGTEDKDLDSRASGTKTNGTESSDNEVESRVKDGLKRSAGGDIARAPRHSRSLSMDSYIGNLQFDDESLKFPALGLQGGQQSPRNSIDGKLANFNLEFGNSEFTEAELKKIMANEKLTEIAMADPKRAKRILANRLSAARSKERKTRYILELEQKVQTLQTEATTLSTQVTVLQRDSTALTSQNNELKFCLQAMEQQAKLKDALNEALVAEVQRLRLAAAELRGDIHQQLPINQQMLKLQLQQRTHLNTHQIEQEEQKQL

SEQ ID NO: 22573 - protein, 425 aa, Ricinus communis
MQSSSFPCIKSSLIDPDGGSLVDLVVPESQRELKANEAASMPKVKLTKIDVEWVHVICEGWASPLKGFMRENEYLQSLHFNCLRMEDGSLVNMSLPIVLAIDDETKERIGSEKNVGLVAPDGELIATLRSIEIYKHNKEERIARTWGTTAPGLPYVEEYITPAGNWLVGGNLEVLKPIKYNDGLDDYRLSPKQLRKEFDMREADAVFAFQLRNPVHNGHALLMNDTRRRLLEMGYKNPILLLHPLGGFTKADDVPLDVRMEQHSKVLEDGVLDPKTTIVAIFPSPMHYAGPTEVQWHAKARINAGANFYIVGRDPAGMGHPTEKRDLYDPDHGKKVLSMAPGLEKLNILPFRVAAYDTLAKKMAFFDPSRAQDFLFISGTKMRTYARTGENPPDGFMCPSGWEVLVRYYQSLQVEEAQKATVLSA

SEQ ID NO: 22574 - protein, 362 aa, Ricinus communis
MAATVNAAVSLPTTKSSSSLPARISTTPERISFNKGFLYSRNVSFSGRTLTVKAQVTTEAPAKVVKESKKNDEGVTVNKFKPKNPYVGTCLLNTKITGDDAPGETWHMVFSTEGEIPYREGQSIGIIPDGIDKNGKPYKLRLYSIASSALGDFGDSKTVSLCVKRLVYTNEQGEIVKGVCSNFLCDLKPGAAVTMTGPVGKEMLMPKDPNATIIMLATGTGIAPFRSFLWKMFFEKHEDYKFNGLAWLFLGVPTSSSLLYPDEFQKMKEKAPENFRVDYAVSREQTNDKGDKMYIQTRMAQYAEELWELLKKDNTYVYMCGLKGMEKGIDDIMVNLAARDGIDWIEYKRQLKKSEQWNVEVY

SEQ ID NO: 22575 - protein, 949 aa, Ricinus communis
MEEGVFSPGTMLGTRVDSAMDFDYMDKLLLEGCWLETIDGSEFFNPSPSSSAAFIDSFLWPIPEVNNDDLASTPSQKSNPEEEQIALPHRNSLLNETQDGSPLNTEAIGQDMGSVVTLGNNAAEASEVSRRWWIGPSAIPGPKTSVRDRLITALSYIKDFTKDKDVLIQIWVPVNSGGRRFLVTHDQHFAVVPNCERLANYRDISINYHFSADENSKDMVGLPGRVFLGKVPEWTPDVRFFRSDEYPRVDHAQQYGVRGTLALPVFEQGSRTCLGVIEVVTTAHKIIYHPELESVCRALEAVDLQSSGIPGMQNVKVCDMSYQSVLPEIHELLRSACETHQLPLAQTWVPCIQQGKGGCRHSDENYIRCVSTVDRACYVRDTSIQVFHEACSEHHLLKGQGVAGEAFLTNQPCFTSDITSYAKTEYPLSHHARMFGLRAAVAIRLRSVHTGTADFVLEFFLPVDCTDPDKQKKMLTSLSIIIQQVCRSLRVVTDKELEEENYFLVSEVVDPSDGRLTRDEMLRVGHMYSESYAGDISWTSCLTVARQSGNDGSLCQIEKQKVPMGEKFMQHKKNQEDNSLKRNIECGGDSSVAEGSFSSVCMGKTAEKRRTKAEKTITLQVLRQYFAGSLKDAAKSIGVCPTTLKRICRQHGINRWPSRKIKKVGHSLQKLQLVIDSVQGASGSLQIGSFYTNFPELVSPKLSRSSQFSTSKQSEHPEPSSIQPEEGIFSSQAAAPKSPSPSSSCSQSSSSSHCVSSGTQKTPSSCTVPTSEDPMLGEGNAILKRVRSDAELHASSQAEQNLLPRSQSHKSLREQPNLGYLPPLPKTSSCASQEIDAQRVKVTYGNENIRFRMPSSWGLTDLLGEIARRFNIDDINRYDLKYLDDDSEWVLLTCDDDLEECLDIVKQWHFMTSVACFELCRRSRLEVAVFSDSFEVSIESAGQTAELVK

SEQ ID NO: 22576 - protein, 145 aa, Ricinus communis
MKGGKSKADAKNSKLSVNKKPVKATKKAGKAAKDPNKPKRPASAFFVFMEEFREQYKKEHPKNKSVAAVGKAGGDRWKSMSESEKAPFVAKAEKRKIEYEKKLKAYNKGQAEGPKEEEESEKSMSEVNDEEEDDEEGSAEEDDDE

SEQ ID NO: 22577 - protein, 331 aa, Ricinus communis
MEDERDAEDAIRGLDRIEFGRKGRRLRVEWTKQERGIRRPGNSRRSSTNTRPSKTLFVINFDPHHTRTKDLERHFEPYGRIVSVRIRRNFAFVQYESQDDATKALEATNMSKLMDRVISVEYAVRDDDERRNGYSPDRGRDRSPDRRSHDRKRSSSPYRRERGSPDYGRGPSPGPYRRERASPDYGRRRSPSPYKRDRASPDYGRASSRSPYRRERPGSDHGRGSSRSPYHRERASPDNGRGHSASPYQREKASPDNGRDRSRSPYGRERTNPDNGRGSSRSPYEKDVNSPENGRRTSPNSMHEERDSPNEGGIESPMHERFQSRSPPADE

SEQ ID NO: 22578 - protein, 213 aa, Ricinus communis
MVRGKIQMRRIENATSRQVTFSKRRNGLLKKAYELSVLCDAEVAVIIFSQKGRLSEFASNEMQKTIERYRKHAKEVQAAGSVAKEQHVQELTEESAALVKKIEELEISQRKLLGQGLSSCSIEELQEIHSQLERSLSNIRSRKVQLFKEQMEQLKAKERLLLEENIRLREKCAENHWQHPTQRKEIKTYLNSSSKKKSEVETELFIGLPEMHC

SEQ ID NO: 22579 - protein, 948 aa, Ricinus communis
MSIKESFSNVANVLLDWDDVHNGDFCSWRGVFCDNVSFSVVSLNLSNLNLDGEISTAIGDLRNLQSIDFQGNKLTGQIPDEIGNCASLYHLDLSDNLLDGDIPFSVSKLKQLEFLNLKNNQLTGPIPATLTQIPNLKTLDLARNQLIGEIPRLLYWNEVLQYLGLRGNSLTGTLSQDMCQLTGLWYFDVRGNNLTGTIPDSIGNCTSFQILDLSYNQINGEIPYNIGFLQVATLSLQGNKLTGKIPEVIGLMQALAVLDLSENELVGPIPPILGNLSFTGKLYLYGNKLTGPIPPELGNMSKLSYLQLNDNQLVGNIPPELGKLEQLFELNLGNNDLEGPIPHNISSCTALNQFNVHGNRLNGTIPSGFKNLESLTYLNLSSNNFKGRIPLELGHIVNLDTLDLSANSFSGPVPVSIGGLEHLLTLNLSRNRLDGVLPAEFGNLRSIQILDISFNNVTGGIPAELGQLQNIVSLILNNNSLQGEIPDQLTNCFSLANLNFSYNNLTGIIPPMRNFSRFPPESFIGNPLLCGNWLGSICGPYEPKSRAIFSRAAVVCMTLGFITLLSMVIVAIYKSNQQKQLIKCSHKTTQGPPKLVVLHMDMAIHTFEDIMRSTENLSEKYVIGYGASSTVYKCVLKGSRPIAIKRIYNQYPYNLREFETELETIGSIRHRNIVSLHGYALSPCGNLLFYDYMDNGSLWDLLHGPSKKVKLDWETRLKIAVGTAQGLAYLHHDCNPRIIHRDVKSSNILLDDNFEAHLSDFGIAKCISTAKTHASTYVLGTIGYIDPEYARTSRLNEKSDVYSFGIVLLELLTGKKAVDNESNLHQLILSKADDNTVMEVVDQEVSVTCMDITHVRKTFQLALLCTKRHPSERPTMPEVVRVLVSFLPAPPTKKPCSAPPKPIDYAKFVIDKGQQQPAPKNQLAQQENNSSDAQWFLRFREVISKNTL

SEQ ID NO: 22580 - protein, 189 aa, Ricinus communis
MALQIHSTSFLANNKSFQYHHLLYSKPKSKLTIQSQKPTPDNSTAPKKPTPPGLGFGSSSPSSSSSSKASGTDVSNKKKHKGKRERASIIRRSPVERPAFVSQEIDEAKAKEQGRNESAFLLAWLGLGGIILVQGIILSASGFLPDEWDKYFVKYLYPSFTPTVFLFVAGTVTYGVLKYLQNEELKDQK

SEQ ID NO: 22581 - protein, 196 aa, Ricinus communis
MVKPTLLLLLVSVLLYISSTATSAAAPAAASNFIKASCRTTTYPALCIQSLSAYATSIQQNPLQLTQTALSVSLENAQSTRTFVYKLTKFKGVKPREMAALKDCLEEIDDTADRLSKSYNELKNLGHYKGKDFQWHMSNVETWVSAALTDENTCTDGFAGKALNGKMKSSIKARIVKVAQVTSNALSLINKYASKH

SEQ ID NO: 22582 - protein, 206 aa, Ricinus communis
METKTITSPCLQVSTLFLITFLVFISNTQNSLAITTTKTSKTTYKNYLKTACNSTTYPKICYNTLSPYTSTIQTNDLKLCNAALTITLKAASNTSAMVKSLSKQKGLSKGEVAVIKDCQYEIEDSVDELKQSLKALKNLKGSADMEFQIDNIKTWISAAITDENTCTDGFEGMKVSSKVKSKIKKSIVNVNRLTSNALALINKLSY

SEQ ID NO: 22583 - protein, 185 aa, Ricinus communis
MFCHSLVKIVFLVFFCFANTCSGASDDFIKTSCGATRYPDLCYQTLSAYASSIQENPLQLANAALNVTLESAESTSNSVLNMLKAHNLSPKEAGAISDCVENMKDSVDELRESLMTMTDLEGPDFNMKMSNIQTWVSAALTDEDTCMDGFEGNAMNGKVKNTIRSYIEKVAQLTSNALALINKVA

SEQ ID NO: 22584 - protein, 201 aa, Ricinus communis
MASVSSNTFSNFLLILLAISFHINSSSAGRNLAQTTSTEFIRTSCSTTTYPRLCYSSLKIHASKIQTSPMLLANAALNVTLASTRSTSTMMQKLSKSHGMKPREVSAMQDCMDELTDSVDELRKSIDELGKAQGSKFGLMMNDVQTWVSAALTDESTCSDGFAGSTMNGELKTLVRQQTVKIAHLTSNALSLVNSYASVHG

SEQ ID NO: 22585 - protein, 567 aa, Ricinus communis
MAPKTLVTFFSPVSLPHNLTHFNTKFLKFNSRKTTPIFCKSTQSQQKPVSDTQLPLSIPETSGTGAAAPTPGEQFLERQQAFQAAKLVMKEAKKKRRREKVREKALKVNSMVVCCYGCGAPLQTLDQEAPGYVQPDTYELKKRHHQLRTVLCGRCKLLSHGHMITAVGGNGGYSGGKQFVSADELREKLSHLRYERVLVVKLVDIVDFNGSFLARIRDLAGANPIILVVTKVDLLPKETDFNCIGDWVVEATTKKKLNVLSVHLTSSKSLVGIAGVVSEIQKEKKGRDVYILGSANVGKSAFINALLKMMAQRDPAAAAARKYRPIQSAVPGTTLGSIQIDAFLGGGKLFDTPGVHLHHRQAAVVQSEDLPILAPRSRLRGQSFPVCSLQTDKFESNGLNGFSIFWGGLVRIDVLKVLPETSLTFYGPKALQFHIVPTDEADEFYQASKELGVLLTPPTGIEGAKDWKGLGIIRQLQIKFEDAERPASDVAISGLGWIAVEPVSKSRRKPVLNLEETAKELHLAVHVPNPVEIFVRPPLPVGKSGSEWYQYRELTEKEEEIRPKWHF

SEQ ID NO: 22586 - protein, 256 aa, Ricinus communis
MKEATLYQDPNFCHHQYPRTSSYTSLFPCLTENWGDLPLKVDDSEDMVIYNFLRDAVSSGWSPLDFITTTTTAAAVKAEPTDDLELPTTPARFLTQETTASNILLLQTTSPENKETVSIDLVQKQNNKVAKGRHYRGVRQRPWGKFAAEIRDPAKNGARVWLGTYETAEEAALAYDIAAFRMRGSRALLNFPHRVGSPEPVRVTAKRRESEMAPGSGSAKRRKSLAANEGYETGTVALQVGHKIEMMPVGEQLLVS

SEQ ID NO: 22587 - protein, 422 aa, Ricinus communis
MAAFSYQQHHPFHLDSVFLPSASAIKNLSGFLEKGNSIINTNYFSQFYPPLETTPDLDVRFHETSPPIDHSSMVAALSDNEPSSVTKKQSTDSSTVVDKFESGEQVTQKLAPMDKKRKSSFNSAQSKDARDGRGKKQKKCNNEVKEDKKPKAEKKDQKKVPDQEPPTGYIHVRARRGQATDSHSLAERVRREKISERMKILQRLVPGCDKVTGKALMLDEIINYVQSLQNQVEFLSMKLASVNPLFYDFGMDFDALMVRPEGLNSLASSLPLMQQCPPTTAFADSTATATTTTAATSTFVTANNYSLMDASAPFLLPGQRPSDFIQMNKDKSFLIHLGSPTTCALLSTKINTIAALQKHLLAMGCQSQTKPEREKKQKNIENQLKRSFFGFNISSNEEGFLKSIGILKMNKRGSVGCSKISG

SEQ ID NO: 22588 - protein, 392 aa, Ricinus communis
MASKGSIRLYFPCDFRNTLQKKNMKMDMVMARSGFSYSLNPIAPKIPRFYVVANASNPQRVDTINGKKVNGIHVAESSNSYADQNKMNATAGLVLDGNVDHQPLHKWLLGRFVDERLVYSQTFIIRSYEIGPDKTATMETLMNLLQETALNHVTSSGLAGDGFGATREMSLRKLIWVVTRIHIQVQRYSCWGDVVEIDTWVDGAGKNGMRRDWIIRDYNTKEIITRATSTWVIMNRETRKLSKMPEQVRQELVPFYTNRIAIAKENNDVEKIDKLTDETAERIRSGLAPRWSDMDANQHVNNVKYIGWILESVPINVLEDYNLTSMTLEYRRECRQSNLLESLTSTTEHSNNNSCNRKAHLEYTHLLRMQADKAEIVRARTEWQSKSNRKTI

SEQ ID NO: 22589 - protein, 382 aa, Ricinus communis
MDWNLTATSWNLTEFKQEAIPNLDSFDSRSASFADNRSSGDFSIDLKLGRVSHSNDQAINQWKQPGADSKMECSSPSVSTKRARAANNGTQVAYCLVDGCSADLSNCRDYHRRHKVCELHSKTPQVTIAGQKKRFCQQCSRFHSLEEFDEGKRSCRKRLDGHNRRRRKPQPDLLSRPASFLSNYKGNHLLPFSSTHVYPSTTVVSSAWSGVVNTEADAAGRYSVQQRMNMIGKHSPFFGSSLSSSSSSSYKGGKQLPFLQVDNNHSPLNHQTASPPPPLSHAASICQPLLRSITMDESSVISSYSMFCDKLAPTTTQVRDSDCALSLLSSAKAQISGNHMLQPNSVPLAHSAEPMDSVLVSNGRDAWSSTDNAPQTLPFNWE

SEQ ID NO: 22590 - protein, 660 aa, Ricinus communis
MAATSAATATSIPKPSAAPSSSTSTSRSPISISRFTLPFSLNPQKSTAHRSLHITNAISKPATTIPATTAPVPQPSPNPRFAPDEPRKGSDILVEALERQGVTDVFAYPGGASLEIHQALTRSPIIRNVLPRHEQGGVFAAEGYARSSGKPGVCIATSGPGATNLVSGLADALLDSVPIVAITGQVPRRMIGTDAFQETPIVEVTRSITKHNYLVLDVDDIPRIVQEAFFLATSGRPGPVLIDVPKDIQQQLAVPNWNTPIKLPGYMSRLPKVPNDSHLEQIVRLISESKKPVLYVGGGCLNSSEELRRFVELTGIPVASTLMGLGAFPVGDELSLQMLGMHGTVYANYSVDKSDLLLAFGVRFDDRVTGKLEAFASRAKIVHIDIDSAEIGKNKQPHVSVCGDVKLALQGMNKILESKGAKSKLDFKAWREELNEQKVKYPLSFKTFGDAIPPQYAIQVLDELTNGNAIISTGVGQHQMWAAQFYKYKRPRQWLTSGGLGAMGFGLPAAIGAAVANPGAVVVDIDGDGSFIMNVQELATIRVENLPIKILLLNNQHLGMVVQWEDRFYKANRAHTYLGDPSNESEIFPNMLKFAEACGIPAARVTRKEDLRAAIQEMLDTPGPYLLDVIVPHQEHVLPMIPSGGAFKDVITEGDGRTQY

SEQ ID NO: 22591 - protein, 125 aa, Ricinus communis
MGSLFSSTKKTKEEIEMALNKAKDLSNSAPVVVFSKTYCGYCNRVKQLLTQLGANFKIIELNEEADGDDIQAALAQWTGLRTVPNVFIGGKHIGGCDSTLDKYQKGELLPLLNDAGAIANNSAQL

SEQ ID NO: 22592 - protein, 861 aa, Ricinus communis
MVSRSCINLLELPSGDMLNLPRTPRSIPRVMTVPGILSDTDGDGSNDGDSDTPSSGCQKKKIIVANFLPLNAQKDSKSGKWTFSFDEEALLLQMKDGFSIDTEVVYVGSLKADVDTSEQEEVSQKLLDEFNCVPTFLSPDLYKMFYHGFCKHHLWPLFHYMLPMCPDHGDRFNKLLWQAYVSANKIFADKVMEVINPEDDYVWVHDYHLMVLPTFLRKRFYRVKLGFFLHSPFPSSEIYRTLPVRDEILKALLNADLIGFHTFDYARHFLSCCSRMLGLDYESKRGHIGLEYFGRTVYIKILPVGVHMGRLEYALNHPSSSIKVKEIQKQFAGKKLIVGVDDMDIFKGISLKLLAMEQLLHHNPELRGKVVMVQIVNPARSAGKDVQEAERETHSTTKRINSIFGFPGYEPVVLIDRPVPFYEKTAYYALAECCIVNAVRDGMNLIPYKYIVCRQGTSKMDEALGVASGSPHASTLVVSEFIGCSPSLSGAIRVNPWDVEAVADALNVALTMSDLEKQLRHEKHYRYISSHDVAYWARSFMQDLERACKDHYSKRCWGIGFGLNFRILSLSPSFRKLSNEHIISAYKRTYRRAIFLDYDGTVVPQTSIVKTPSSEVISVLNSLCSDPKNTVFIVSGRGKDSLSDWFAQCENLGIAAEHGYFIRWTRMSNWETSSLAADFDWKKMAEPVMKLYTEATDGSYIEAKESALVWQHQDADPDFGSWQAKELLDHLENVLANEPVVVKRGQHIVEVKPQGVTKGFVAEKVLSAMIAKGKSPDFVMCIGDDRSDEDMFESISSTASNLSFPSAPEIFACTVGQKPSKARYYLDDTVEVLALLQGLATASSPKPRCITEVQVSFDNGA

SEQ ID NO: 22593 - protein, 354 aa, Ricinus communis
MCRILCEIEQKYGFPINPPPFSPPSSISTTPYDEDDSTLASSSSSSFNRISPVILLVIIILAVIFFVSGVLHLLVRCLLKRSHFSAIFHSNRYPEISRSHSLQRQLQQLFRQHDSGLDQAFVDALPVFYYKDIMGLKEPFDCAVCLCEFSDRDRLRLLPMCSHAFHIHCIDTWLLSNSTCPLCRGTLLSSSLPMENPSFNFDVLREVSNGLPSDGDNDGSSNGQKTGITTEESVVEKRVFSVRLGKFRSLNEGETSGERGREETRSNLDARRCYSLGTVQYVVGDSNLQVALSHHDSINVRGEYESSAVDGDVEGKKINGRTRGDSFSVSKIWLWSKKNKFPSSTTTNMDVFFS

SEQ ID NO: 22594 - protein, 319 aa, Ricinus communis
MANASAGSGAGGSGSNFSVLLQSQRGACAASQPLDAFFLSGSSPSFLGSRSMVSFEDVHQVNGSTRPFFSSFDHEENADDDLDEYFHQPEKKRRLTVDQVQFLEKSFEVENKLEPERKLQLAKDLGLQPRQVAIWFQNRRARWKTKQMEKDYDVLQTSYNSLKADYDALLQEKDRLKAEVNLLTDKLLLKEKEKVNSEVSDKDALSQELSKKPIGDSASEVEVSKASTVAFKQEDISSAKSDIFDSDSPHYTDGVHSSLLEAGDSSYVFEPDQSDVSQDEEDNLSKSLLPPYVFPKLEEADYSDPPASFEDHAFWCWSY

SEQ ID NO: 22595 - protein, 651 aa, Ricinus communis
MEDHALMRRSGHGGLPKEEIPPPDSSSGGGDDQGSCREDIVAKVGNKRPYHETDDIKSSLSEPNKDLSWNKQVGIATNKERPTMDFYSKASSSSPKQQDNWLESARAEMEEVRKENQRLKLYLGQMMKDYQALQKQFYEIIQQEETKKSTSTVDNHDHNLDHHQTVEEPELVSLSLGRFSSDYSIKDGKSKTSSQGKDDNEIANNEGLFLGLDCKFEVSEVINGNEQSLRPSPVDSFEEQPKEEDGETWPPKVLKNTMPGGEDEALQQNPLKKARVCVRARCDTPTMNDGCQWRKYGQKIAKGNPCPRAYYRCTVAPSCPVRKQVQRCADDMTILITTYEGTHNHQLPLSATAMASTTSAAASMLLSGSSSSSRTGPNHSSPTTSIPADLHGLKFFLSNNSYDSKQFNLHNSSLSTSPSHPTITLDLTNSSNPPSSSTFINRPFSSTYPPVPKFAPPNTLNFGSSESSGMPWSNGFFSYGNNTSQPYNKNPLIGSLNLGRSIMENNIFQSYMQKKTPATTTTHQQALPDTIAAATKAITADPSFQSALAAALTSIIGTGNSGSSGVGSGGGSLNLGSGDNMAQNLKWGENFSVASSCSSTITTPKGNACATSYLNKTTSTNSQPGNLMLLPPNSLPFSSPKSPNDSRDHAS

SEQ ID NO: 22596 - protein, 244 aa, Ricinus communis
MESINILKGYDKVDSNLENQNPHPHLHPHHSNSTKKPIIITLTISAILLLTLIITLTLAALIHESNTEPPESIPQSNSAESIRTICNLTRYPTSCFTSISSLNVSIKPDPEAIFNLSLQVSIQELKNVSTLLKTLNDVNSQAAINDCSSQFDDALGKLGDSLLAMKVGPGEKALTLEKINDIQTWISAAMTDQQTCIDGLEEMESVVLDEVKAKMVNCNQFLSNSLAIIAKMQSLLEMFDLKLH

SEQ ID NO: 22597 - protein, 221 aa, Ricinus communis
MWGGNTADYGEFPLFDSIQQYLLEDHEFQTLTSVPPFNSFQENSSLTSLLLTDPSFDVDDIDDRISCSFSSTDLLDEWINSSDQLDSTVNIKAEIPDEVASTLEDAVTSPNAETAGKKNAPSKGWQYRGVRRRPWGKYAAEIRDPKKNGARVWLGTYETPEDAALAYDQAAFKMRGCKAKLNFPHLIGSNDYQPPVRVSPKRRSLDPTTLLINHDSPKRRR

SEQ ID NO: 22598 - protein, 225 aa, Ricinus communis
MFGANSSLAGDDLAFLDSIRQYLLEDDFETLPKVNLFDCSSSTSLPSIGACNGLPFKLDNLLDIDEENIETPLSQFDSEVEKTTVPAATIISESQKAVTSEEEVAMALKENTPSKGCQYRGVRRRPWGKYAAEIRDPKKNGARIWLGTYEKPEDAALAYDRAAFKMRGARAKLNFPHLIGSDEYEPIRAGNNKRKRCSPERSSSSSSSSCLHQSLMIVLQIQRGE

SEQ ID NO: 22599 - protein, 294 aa, Ricinus communis
MEDKDDGLGLGLSLSLGGQEKHQNQPSLKLNLMPFPSLFMQNTHHSTSLNDLFQSSDRNADTRSFQRGIDMNRMPLFADCDDENGVSSPNSTISSLSGKRSEREQIGGEEMEAERASCSRGGSDDEDGGAGGDDGSRKKLRLSKEQSLLLEETFKEHNTLNPKQKLALAKQLNLKPRQVEVWFQNRRARTKSKQTEVDCEYLKRCCENLTQENRRLQKEVQELRALKLSPQLYMHMNPPTTLTMCPSCERVAVSSSAAPSRQPPNSQPQRPVPVKPWAALPIQHRPFDTPASRS

SEQ ID NO: 22600 - protein, 218 aa, Ricinus communis
MPNLSLSLLLLVLSIFSISGPVESRLDRNSPARANIYKLCKNTTYPILCFQYLSIFPISVTENPKRVARAALLVSLYRVQKTRVFIKKASIKLKAKKGKEISYKVKDYQVVEDCLEVFGDGVDDLSKSIIELHHLQGLEGQERKTYGDCDMSCHVSNIQTSLSAALSDASTCVDEFDDFLRRKRLGKLMATIKAKALNAEQATTNGLDLFCQFAKCAN

SEQ ID NO: 22601 - protein, 215 aa, Ricinus communis
MASLRLSLSLLLFSIFCISRLVEPAPAVRSRSRSESRAHIEASCRATRYPALCVQLLSGFPSSTIQNPQQLAQAALSASLYRARHTRSYMLKVANELEAMKAKDYQAVKDCLDQINDTVEQLSQSIRELRRLGSQEEAVGRGNVFWHISNVETWTSAALSDVSYCVNEFPGRRMSKLKATIKGKVLNVAQATSNALALFHRYAARYKAGATTQKP

SEQ ID NO: 22602 - protein, 338 aa, Ricinus communis
MTVIGRRGIHYLQKLKAANIPAELIEKGQNRVIDASLTLIRERAKLKGELVRALGGAKASSSLLGVPLGHNSSFLQGPAFAPPRIREAIWCGSTNSTTEEGKELNDPRVLTDVGDVPVQEIRDCSVDDDRLMNVISESVKLVMEEDPLRPLVLGGDHSISFPVVRAVSEKLGGPVDILHLDAHPDIYHAFEGNKYSHASSFARIMEGGYARRLLQVGIRSITKEGREQGKKYGVEQFEMRTFSRDRQFLENLKLGEGVKGVYISIDVDCLDPAFAPGVSHIEPGGLSFRDVLNILHNLQADVVAADVVEFNPQRDTVDGMTAMVAAKLVRELTAKISK

SEQ ID NO: 22603 - protein, 260 aa, Ricinus communis
MGRSWKLFQDGAFNVGGSSKYIVALKVIFKEQIEKYRIHHQLKREMEIQTNLCHPNVLRLYGWFHDDERIFLILEYAQGGELYKELKKKGFLCEKQAATYIASLTNALSYCHKKDVIHRDIKPENLLLDHEGRLKIADFGWSVQSRSKRHTMCGTLDYLAPEMVENKAHDYAVDNWTLGILCYEFLYGAPPFEAESQKDTFRRIMKVDLTFPSHPPVSAEAKNLITRLLVKDSSKRLSLQKILEHPWIIKNADPMGIYKE

SEQ ID NO: 22604 - protein, 328 aa, Ricinus communis
MASTDSQESFPKVLLFIKPPAFTVIGEESFTSTKFRYLKAYESPLPLHQFLAQHAQSVQAILSSGGAPVTADILRFLPSVRVIVTTSAGLNQIDLPECRRRGISIANAGDVYSADVADLAIGLLIDVLRNISASDRYVKQGLWSSKGDYPLGFKLSGKRIGIVGLGSIGYEVAKRLDAFGCYISYNSRKQKFYVSYPFYPNVCELAANCDALVICCGLTDQTFHMINEQVFSALGKNGVVVNIGRGPIIDEKELIRCLVEGEIAGAGLDVFENEPNIPQEFVSMNNVVLSPHCAVFTPESMKDLSELVVGNLEAFFANKPLLSEYLDE

SEQ ID NO: 22605 - protein, 333 aa, Ricinus communis
MANHPQNYQQPQSLLPEVLVLERSPVFKFHEHRLSQKFHFLKAWESQLPLHQFLAAHAYSVQVLLSSGRDPVTANNIRLLPSLRLIVTTSAGLNHIDLQECRRQGIAIATAGSLYSEDVADLTVGLFIDVLRKISASDQYVRQGSWPTKGDFPLGFKLRGRQVGIVGLGSIGLEVAKRVEAFGCKIMYNSRNKKPSVPYPYYSNVCELAANCDVLIICCGLTDQTRHMINKEVFEALGKEGVIVNVGRGVIIDEQEMVQRLVQGEIAGAGLDVFENEPHVPKELTVLNNVVLSPHRAVHTTENLVALCELVIGNLEAFFSNKPLLTPITAIDD

SEQ ID NO: 22606 - protein, 157 aa, Ricinus communis
MQDTIERYRRHVKEHQTNKKPTDENMQHQLKSEAGNLMKKIELLEVSKRKLLGQGLGSCNLEELQQIEQQLEKSVSSIRARKNQVFKEQIEQLKEKEKQLAAENARLSEKCGVQALPGLKEQEENRPYEEGSPVSDVETELFIGPPETRTKRFPPRN

SEQ ID NO: 22607 - protein, 509 aa, Ricinus communis
MSFFLPFENPIGDAVSTVRFAPHSNNLLISSWDSSLRLYDVDSFLLRLEAPSQAALLHCCFHSETVAFSAGSDGCLRRYDLHLGSNDTIGSHSDIATSVEYSDQTSLVISAGFDKNIMFWDLRLAKSPAYLRNLGAEVASMSLSGFDLMLAVGKSVNVYDLRNMGKPVHFKENHTDVQIKCISSFPYRRGYAVGSVDGRVALEFLDPSNSNEGYTFRCHPKSRDGRTHLVSINDIVFNPLVCGTFVTGDNDGYIITWHNESKRRLCEFSRYPNSVASLSFNHLGELLAIASSYTYQEANEMYGKCPPKYLYRRWMTGRSFSAGDSSKDMTTVVICSVEKFSVAVAASAAAMSDEEHHFESKADAGASKTYPQQAGTIRKNGYIVIKNRPCKVVEVSTSKTGKHGHAKCHFVGIDIFNAKKLEDIVPSSHNCDVPHVTRTDYQLIDISEDGFVSLLTENGNTKDDLRLPTDENLLSQIKDGFAEGKDLVVTVMSSMGEEQICALKDIGPK

SEQ ID NO: 22608 - protein, 459 aa, Ricinus communis
MATLNYLSSCYYKNNHSNSIVDLKSERQRLRILIAGGGIGGLVLALAAKKRGFDVKIFEKDLSSVRGEGMHRGPIQLLSSALAVLKAVDENVANQILETGCVTGDRINGLADGVSGEWFTKFDLSTPALKRGLPVTRVICRMALQDILLNAVGFDIVRNKSKVVDFMEDSSKVTVILEDGQKYDGDVLVGADGIWSKVRSKLFGQEDAKYSDYTCYSGLTDFVPIYIDTVGYRVFLGLNQYFVASDVGNGKMQWYAFHRQPPNNSVPPAGKRQWLLELFRDWCTEVTTLISETPEDMILQRDIYDRDVIYPWGIGRVTLLGDAAHPMQPNLGQGGCMAIEDCYQLILELDKFNKSGLDVQQSEEIFSVLRRYEKKRIFRVSMVHAASRMASKVLTTYQPYIHFQSGPMSHLSSRRITKPSVHVARLLLQIFLPQFMTWMIAAHGTSELRSPVYCMLYLL

SEQ ID NO: 22609 - protein, 378 aa, Ricinus communis
MELGLSLGDASKPLGFIEKARDVSSKRRLGFCMGLSIDPNPRNEQQDADHHHDEQEAEEDGDKGKHSSNNYSTDTAATTSTIKIKRAAPDHDLIDTDHQHHRRPSTDPPIIQLDLLPNTPVVVPRHHHHALLWPSSDNGSYDAKGLDVNRLPAVEEAEDGAALSSSTPNSAASSFQMDFCIYGKGGNHHEGERASSRASDEDENGSARKKLRLSKEQSAFLEESFKEHNTLNPKQKLALAKQLSLRPRQVEVWFQNRRARTKLKQTEVDCEYLKRCCETLTEENRRLHKELQELRALTSSNPFYMQVPATTLTMCPSCERVATTSTATATTTTTTTTTKNNISTEPASSKGTGLSLSTKTRLYPFVHTQTHSHQPTAS

SEQ ID NO: 22610 - protein, 958 aa, Ricinus communis
MKHIFKKLHIGSGHEPNHRPNETPSPSQSCSSDHRTSSVNAPASPPSTSSSPEDYQIQLALALSASASNSEFREDHENDQIRAATLLSLGGNHNNHTHNPTHRIDMPRNKGELAAEALSRQYWEYNVLDYEEKVMDGFYDVFSRSPVVQAKMPSLTELETNPGSSSFEAVVINRAMDHALEELVQVAQCIALDCPATDVGILVQRLAEVVTGHMGGPVKDANIMLARWMERSTDLRKSLHTSALPIGSIDIGLSRHRALLFKVLADNIRFPCRLVKGSHYTGIEDDAINIIKLEDEREFLVDLMADPGTLIPADVLSAKDTTFKSYNPNINIIAGLQSPNESEIIYTRSSPSFGEGSSQNSSMDGSLPLDRRSSNETAESLASFSGASSNVGVGSSGGPSKVASSNQHGNISSLAIGYKGGRGTHAVADAVRMNVNVIPYGQNSLEDSRNLFSDLNPFQIKGTGKSFMHNKPAENKVEDFHGQKDNLLPGRPPAPLKWKNRYAYNEVPRKKEYDYIEGLFPGISREPNGYNQSSLASSSSTMSEKVYPQGLNSSSSSNTSSRDGDAWNSSSGTNSALASGMNQCYKSSLVEEANSDFKESPRDAKNFQNDAEVTIRDDENNEIGFQDRRKCTHDRFMGINLKLKESSSSSIDSGKNKVDQIFDDVDVGECEIPWEDLDLGERIGLGSYGEVYHADWNGTEVAVKKFLDQDFSGAALAEFKREVRIMRRLRHPNVVLFMGAVTRPPNLSIISEFLPRGSLYRILHRPHCQIDEKRRIKMALDVARGMNCLHSSIPTIVHRDLKSPNLLVDKNWNVKVCDFGLSRLKHNTFLSSKSTAGTPEWMAPEVLRNEPSNEKCDVYSFGVILWELATLRLPWSGMNPMQVVGAVGFQNRRLEIPKDIDPKVAMIIWQCWQSDPNARPSFAELTTALKPLQRLVIPSHLDQPSSPLQQEISVNSTP

SEQ ID NO: 22611 - protein, 161 aa, Ricinus communis
MLGWRQAISKLTSLKVASDTNNVCRSLWSSKVRKGSWTPEEDDLLRKCIQKYGEGRWCLVPTRAGLRRCRKSCRLRWLNYLKPDIKRGAFTEDEVDLLIRLHKLLGNRWTLIACRLPGRTANDIKNFWNTNLGKKKIVSCKKGDNVKEKTQKTTKIDVIKP

SEQ ID NO: 22612 - protein, 582 aa, Ricinus communis
MSYGEDSKRKKRLAIIGVSSFLLVAMVVAVTVSIGFNNDGESEDDINGKNHKSKEVSASMKAIKTLCQPTYYKQTCERSLAKSAGNTTDPKELIKIAFKLAEKQIDSASKKSLTLLELEKDPRTRGALNSCKELMTMSINELRSSLEKVADFDFSQLDELMADIKTWLSAAITYEETCLDAFENTTTNAGEKMKKALKTAMEMSSNGLDIVSGISSVLTDLQIPGVSRRLLQDDIPVAGHGDISQAFPAWIDPGTRRLLSAPPSNIKPDLVVAKDGSGDYKTILEALPQIPKKSNETFVLYIKEGIYEEYVEFNRSMTNLVVIGDGPDKTRITGSKNFVDGINTYRTATVAVIGDNFVARNIGFENSAGAIKHQAVALRVSSDYAVFYNCSMDGYQDTLYTHAKRQFYRDCTVSGTIDFVFGDAPVVFQNCTFLVRKPLENQQCIVTAQGRKARRQPSAIIIQNSTITAHPELEPVKDQYKSYLGRPWKEFSRTIIMETFIDDLIQPEGWSPWFGSFGLKTCWYGEYNNYGPGSDMKNRVKWNGIKPVSRQHAIDFTPGRFLRGDSWIKPTGVPYAPYLTRP

SEQ ID NO: 22613 - protein, 535 aa, Ricinus communis
MTFVNFLFIIFLLLPSSLQVFSIVIPSSLDTQTLIMQACTGVGNQDSCLSNMLAELGKKGTRNATSVLSAAMQASLNEARLAIDTITKFNALSVSYREQLAIEDCKELLDFSVSELAWSLAEMEKIRAGDNNVAYEGNLKAWLSAALSNQDTCLEGFEGTDRHLENFVKGSLKQVTQLIGNVLALYTQLHSMPFKPSRNGTITNTSPEFPQWMTEGDQELLKFGTLGVHVDAIVSLDGSGHYNTITQALNEAPNHSNRRYIIYVKQGIYRENIDMKKKKTNIMLVGDGIGKTVVTGNRNFMQGWTTFRTATVAVSGRGFIARDMTFRNTAGPENHQAVALRVDSDQSAFYRCSMEGYQDTLYAHSLRQFYRECNIYGTIDYIFGNGAAVFQKCKIYTRVPLPLQKVTITAQGRKNPHQSTGFSIQDSYILATQPTYLGRPWKQFSRTVFINTYISGLVQARGWLEWYGNFALGTLWYGEYKNYGPGASLSGRVKWPGYHIIRDAATAKFFTAGQFIDGMSWLPSTGVKFTAGLSN

SEQ ID NO: 22614 - protein, 758 aa, Ricinus communis
MPLSELICRLSKGKFDSSSQEKNTTCSTDLSAGPENDFLELVWENGQIQSSRARKISNGVQSQTSKFRDKDISIGIGNGNNTKMGRFGAMDFGLDEVPMSVPSVEMGLNQEDDMVPWLNDPIDDSLQQDYCHEFLAELSGVTVNEHAQNSFASSDKKCNGNQSVRDSHTASVHNGLSLEQGHMPRVSSGRDGDATRSRTTASQLYSSSVQQCQASFPHFRSRISANNAESTNNSTHVASSGDPIRGSPSGGGFPSIKAQKQVPVLATTNSSLMNFSHFSRPVALAKANFENIGTRAGSGISSIERIGSQDKGSIASSSNPAESMLNETFSGLKKETSSRCRPVMVSSKVDDKPLDHRPAEEPLLAKQPEAMENDCKNDKNHCQFAASATKGLADGEKTAEPIVASSSVCSGNSMERVSDEPMQNLKRKHRETEESEGPSEDVEEESVGGKKAAPARGGTGSKRSRAAEVHNLSERRRRDRINEKMRALQELIPNCNKVDKASMLDEAIEYLKTLQLQVQIMSMGAGLYMPSMMLPPGVPHMHVAHMSQFSPMGVGMGFGMGMPDMIGGSSGCSMIQVPPMHGAHFPSPPMSGPSALHGMGGSNLPMFGLSSQGHPMPYLCPPVMPMSGGPLLRTTLGLNAGGVAGPTDNLDSAPGSSSKDSIRNVNSHSIQNGGANSSMNQTSTQCQVTNERFEQPALVQSSAQASEVDSGALKSADENDNAPSEANGKHALATIALLIIIIKRGMGMGWTLNEVDSY

SEQ ID NO: 22615 - protein, 1124 aa, Ricinus communis
MSSSRPSHSSSNSVRSRHSARIISQTAVDAKLHADFEESGSSFDYSNSVHVTSSTGLDHAPRSDKVTTAYLHHIQKGKLIQPFGCLLALDEKTYKVIAYSENAPEMLTMVSHAVPSVGDHPVLGIGTDIRTIFTAPSASALQKALGFGDVSLLNPILVHCKTSGKPFYAIVHRVTGSFIIDFEPVKPYEVPMTAAGALQSYKLAAKAISRLQSLPSGSMERLCDTMVQEVFELTGYDRVMTYKFHDDDHGEVISEVTKPGLEPYLGLHYPATDIPQAARFLFMKNKVRMIVDCRAKHVKVLQDEKLPLELTLCGSTLRAPHSCHLQYMENMDSVASLVMAVVVNEGDEDDDSPTSVQPQKRKRLWGLVVCHNTTPRFVPFPLRYACEFLAQVFAIHVNKELELENQIVEKNILRTQTLLCDMLLRDAPLGILTQSPNITDLVKCDGAALLYKNKIWRLGVTPSDLQIRDIAVWLSEYHMDSTGLSTDSLYDAGYSAALSLEDVVCGMAAVRITSKDMLFWFRAPTAAEIRWGGAKHEPGEKDDGRKMHPRSSFKAFLEVVKTRSLPWKDYEMDAIHSLQLILRNAFKDAETMDADAKAIHSRLSDLKIEGMQELEAVTSEMVRLIETATVPILAVDVDGLVNGWNTKIAELTGLPVDKAIGKHLLTLVEDGSIDLVKNMLFSALQGKEEQNIQFEIKTHGSKVESGPISLVVNACASRDISENVVGVCFVAQDITGQKTVMDKFTRIEGDYKAIVQNPNPLIPPIFGTDEFGWCSEWNPAMAKLTGWKREEVMDKMLLGEVFGINRACCCLKNQEAFVNLGVLINNAMTSQVPEKVSFSFFARNKKYVECLLCVSKKLDREGAVTGVFCFLQLASQELQQALHIQRLSEQTALKRLKTLAYIKRQIQNPLSGIMFSRKLMEITELDAEQKQLLHTSAQCQRQLSKILDDSDIDSIVEGYLDLEMVEFTLHEVLIAAISQVTIKSKGKGIRIVNDAAEVIMTETLYGDSIRLQQVLADFLAASVDFTPPGGQLTIAAKFTKDQLGQSVHLVHLELRITHAGGGIPEPLLNQMFGSDGDVSDEGVSLFISRKLVKLMNGDVQYLREAGKSSFIVTVELAAGRKSQA

SEQ ID NO: 22616 - protein, 378 aa, Ricinus communis
MKVARKGIVPDGPGSVKLTPIDSDDLWFAYNLISPGDSVMAVTVRKVLRQAASGGRDAERVKLKLEIKVEAIDYDKVGSALRIRGKNVLENEHVKIGAFHTLELELHRPFVLRKEIWDSLALDILSQASDPGASADLAVVLMQEGLAHIFLVGKSMTSTRSRIETSIPRKHGPAIAGYESALNKFFEHILQAFLKHIDFSVIRCAVIASPGFTKDQFHRHLLLEAERRQLRPIIENKSRIVLVHTSSGYKHSLKEVLDAPNIMNMIKDTKAAQEVRALEEFFDMLSNDPARACYGPKHVEVAHERMAVQTLLITDDLFRNADIPTRKKYVNLVNSVKDSGGNAHIFSSMHVSGEQLAQLTGIAAILRFPLPDLEDIEM

SEQ ID NO: 22617 - protein, 160 aa, Ricinus communis
MAEHAVFSLSATMKASSPTFKIASPPLPFLPSSSRSLSLSLSFPRLSTNIAFKLKSNPIRCVLSPELKTTLDKVVTSQKVILFMKGTKEFPQCGFSNTVVQILNSLNVKYETINILENEVLRQGLKEYSSWPTFPQLYIDGEFFGGCDITVANVLKVLGE

SEQ ID NO: 22618 - protein, 556 aa, Ricinus communis
MAAALHFGGGKVACHPVFPKKALQCQAFGFANSVAVPSSKGLFKSVKFSSCTSRVLRVSCEGRNIDVLERNKSESSIDGNVESEKQFTCVMKFGGSSLASAERMREVADLILSFADETPIIVLSAMGKTTNKLLLAGEKAVCCGVTNVNAIDELSFIKELHLRTVEELKVDKSVVATHLEELEQLLNGIAMMKELTPRTRDYLVSFGECMSTRIFAAYLNKIGAKARQYDAFDMGIITTDDFTNADILEATYPAVAKRLHGDWISDPAIPIVTGFLGKGWRSCAITTLGRGGSDLTATTIGKALGLREIQVWKDVDGVLTCDPNIYQRAEPVPYLTFDEAAELAYFGAQVLHPQSMRPAREGDIPVRVKNSYNPNAPGTLITRARDMSKAVLTSIVLKRNVTMLDIVSTRMLGQFGFLAKVFSIFEDLGISVDVVATSEVSISLTLDPSKLWSRELIQQASELDHVLEELEKIAVVNLLQHRSIISLIGNVQRSSLILEKVFNVLRTNGVNVQMISQGASKVNISLIVNDDEAEQCVREFFPSHPARLACGNMTSL

SEQ ID NO: 22619 - protein, 863 aa, Ricinus communis
MEIEKKHIMTNLFLSSSLSSSWMAILLVLLYSFVFASAADTSSFAPADQILISCGSKSLSAIPDGRVFKTDHEAQSLLKTEEDILVSAPSADVPSPIYLSARIFVQESTYAFTMKSPGWHWFRLHFFPFNNTRFDLQSATFSVSTDKYVLLHNFNVNNQTKPFLKEYLVNVTDPKVTLKFQPMKNSAAFINAIEVVSAPDILISDEGSGLFPVSSFSGLTNYGYQVVYRLNVGGPLITSKNDTLWRTWENDKPFLKDQSLAQSVSIPTSSIKYGTGTSPLIAPATVYASAQEMAESKTMLPNFNVTWKFEVDTAFNYLVRLHFADIVSKSLNDLYFNVYINGKTAISGLDLSSITNQLAAPYYKDIVVNSTLMSNGLNVQIGPMNEDTGSTNAILNGLEILKMSNSVDSLDGEFGVDGRMAIASRSTVAAVGFAMMFGAFVGLGAMVIKWHKRPQDWQKRNSFSSWLLPIHAGDTSFMTSKTSLGSHKTNMYSSTLGLGRYFSFSELQEATKNFDQSAIIGVGGFGNVYLGVIDDATQVAVKRGNPQSEQGITEFQTEIQMLSKLRHRHLVSLIGYCDENDEMILVYEYMSNGPFRDHLYGKNLPPLSWKQRLEISIGAARGLHYLHTGTAQGIIHRDVKTTNILLDDAFVAKVADFGLSKDAPMGQGHVSTAVKGSFGYLDPEYFRRQQLTDKSDVYSFGVVLLEVLCARPAINPQLPREQVNLAEWAMQWKRKGLLEKIIDPILVGTINPESMKKFAEAAEKCLAEHGVDRPSMGDVLWNLEYALQLQEAFSQGKAEDETKSSASVAASPAVVAAAPAPATPTSDNRPVSIPEENKSPAEVQAIDEHSGTAMFAQYGLNGR

SEQ ID NO: 22620 - protein, 574 aa, Ricinus communis
MGDTEEANSEMMQRLHSSFGTTQSSSKQQPFSSMTQLEIPHLNQTQNRARHFAHFAQNFSTDSSKRIGIPPSHPNQIPPISPYSQIPVSRPGNQQMGSQNFSPGPTHSRSLSQPSSFFSLDSLPPLSPAPFRDSSSTSVADPVSTDVSMEERDANSHSLLPPSPFNRGNASRVAESLPPRKAHRRSNSDIPFGLSYVMQSSPPLIPLRPSGGLERSVSGKENSSVAKPTQLVKKEWERGNDSIAEGMGERKSEGEVVDDLFSAYMNLDTIDALNSSGTDDKNGNENREDLDSRASGTKTNGGDSSDNEAESSVNESGSSLLRAGVNSSTEKREGIKRSAGGDIAPTTRHYRSVSMDSFMGKLNFGDESPKLPPSPGSRPGQLSPSNSIDGNAFSLDFGNGEFSGAELKKIMANEKLAEIALTDPKRAKRILANRQSAARSKERKMRYISELEHKVQTLQTEATTLSAQLTLLQSPYLTTLNEALTAEVRRLKLATAELSGDSEPTKGMVQQLSINPQMFQLQQPQPSQLNMHQLQQQQQQQQPSPSQINIHQLQQQQSQSQQNGNTTSNSETNQ

SEQ ID NO: 22621 - protein, 615 aa, Ricinus communis
MSHHETSTKYDYVTIYSPKILHFYSLFRPYPNSYTKATMDSTVSPVTIEEDGHELTDMVSTSKRKGGWNSAIFIILLEVAERFAFYGVAGNLITYLTNDLHQPTAAAAKNINTWIGVSSIFPILGAFIADSFLGRFKTILFASIIYFTGMVLLTLSVSVVPTHHREMAFFIALYILAIGEGGHKPCVQTFAADQFDEEKPEEKAAKSSFFNWWYLSIAVGATVAVFVVIYIQDNVGWTEGSAMLAGVLVVALMVFLMGIKRYRIEAPCGSPYTTVAQVFVAAAKKQRVSETREGWGLCCVDEKDGADDLEGQPKVRVLARTKQFRFLDKAMIIDNIDISNKTRNPWRLCTLNQVEEVKQVLRLIPIWLSCLMFTAIIVQTHTFFIKQGSTMIRSIGPHFLFPPASLQSLTGMTILIAVPIYDKFFVPIARKITGHPSGITMLQRIGIGLFLSILEMVVAALVEAKRVSTAFEHGLIDTPKAIVPMAVWWLLPQYMISGLADVFTVIGLQELFYDQMPVAMRSMGAAAYISIIGIGSFINSAVISVVQAVTSRRGHVWLGDNVNRSHLDYFYWVLAVLSALNLCVYVWIASGFVYKKVEGDHEEKEMEEKEKGVES

SEQ ID NO: 22622 - protein, 305 aa, Ricinus communis
MASGNPFFDDLRSKPEVIDPPPSEDMMDVGESVNDPAQTAMKPNVTVSSSVRELLECPVCLNAMYPPIHQCSNGHTLCSGCKPRVHNRCPTCRHELGNIRCLALEKVAASLELPCKYHSFGCVGIYPYYSKLKHESQCVYRPYNCPYAGSECTVIGDIPYLVAHLKDDHKVDMHNGSTFNHRYVKSNPHEVENATWMLTVFSCFGQYFCLHFEAFQLGMAPVYIAFLRFMGDDNEAKNYTYSLEVGGNGRKMIWQGVPRSIRDSHRKVRDSFDGLIIQRNMALFFSGGDRKELKLRVTGRIWKEQ

SEQ ID NO: 22623 - protein, 392 aa, Ricinus communis
MADRHQYPSLMQKVASQIHLSSSLSHDVQYRYGGSQSPALHQRQFTHGNYCNAAFQYPMTRACEASPDLPLIASTASPVFVQAPSEKGFASFATDFLMGGVSAAVSKTAAAPIERVKLLIQNQDEMIKAGRLSEPYKGIGDCFSRTIEDEGMMSLWRGNTANVIRYFPTQALNFAFKDYFKRLFNFRKDRDGYWKWFVGNLASGGAAGASSLLFVYSLDYARTRLANDAKAAKKGGGRQFNGLVDVYRKTLQSDGVAGLYRGFNISCFGIIVYRGLYFGMYDSLKPVVLTGKLQDSFFASFALGWVITNGAGLASYPIDTVRRRMMMTSGEAVKYKNSLEAFSVILKNEGAKSLFKGAGANILRAVAGAGVLAGYDKLQVILLGKKYGSGGA

SEQ ID NO: 22624 - protein, 347 aa, Ricinus communis
MDEVQIPEYYLCPISLQIMKDPVTTITGITYDRESIEQWLRTTAKDTPTCPFTKQPLPRDADLTPNHMLLRLIQAWCTANAKNGIDPIPTPKPSLSKTYVLKLVKDLQVPYLCVQALKKMEALATENERNRACMMEAGVAKGLVPFVIRCFKERMIKGIEEALKILDLTWNSSEEIKLLIKDNYDFIDSLIWVSGCNMDNHVVVKIQSMLVLKKTIELATTSLLERLKPDFFRGIVRVLKENISQQALKSALLILIEVCPWGRNRIKIVEAKAVFVLIELELEKPEKNITELIFNLLAQLCSCADGREQLLKHAGSIAMISKRILRVSPATDDRAVHVLGLVILTNK

SEQ ID NO: 22625 - protein, 414 aa, Ricinus communis
MEIDIPCHFLCPISLQLMRDPVTVSTGITYDRENIERWLFACKNNTCPVTKQVILNDEDLTPNHTLRRLIQAWCTLNASHGIERIPTPKPPIDKTQIAELLNDCNTFPHLQLKYLRRIRSITLESERNRSFLEAAGAVDILASIVVNDNSTSVEISIDDDPEFTRASDEALSILYLLKISDSKLKNLIAKDRGVFVESLIQILKHSNYQSRAYSTMLLKSIFEVADPIQLITIRPEILTEVVHVLRDQISQQTSKAALKLLVEVCPWGRNRIKAVEGGAVTVLIELLLETSDRRSCELTLIILDLLCGCAEGRAEFLKHGAGLAIVSKKILRVSHVASDRAVRILCSICRFSATPRVLQEMLQVGVVAKLCLVLQVDSGCKSKERAREILRLHSRVWKNSPCVPAYLMSCYPSS

SEQ ID NO: 22626 - protein, 184 aa, Ricinus communis
MAENKRSIGTVKWFSAQKGFGFIAPDDGGEDLFVHQTSIQSDGFRTLSEGQPVEFSVDFGEDGRTKAVDVIPRSRRGGRGGFGRGFYGGRGRGGGGGYSGGGRGDGGVYVRRGRGGRSGGGGAGGSACYNCGRYGHLARDCYQGGGGGGGGGSRRFGGGGGSGACYNCGEEGHFARDCANIDRN

SEQ ID NO: 22627 - protein, 462 aa, Ricinus communis
MQSQCTWTGTRMPLPIILKPSTFSILKHLPTKRTNLFSTRSPISNYPSLMATFSTASTTEKDAPSGQNDSTQKSQQPLQVAKRLEKFKTTIFTQMSSLAIKHGAINLGQGFPNFDGPEFVKEAAIQAIRDGKNQYARGYGVPDFNSAIVDRFKKDTGLVVDPEKEVTVTSGCTEAIAATILGLIDPGDEVILFAPFYDSYEATLSMAGAKIKCVTLQPPDFAVPIDELKSIISKNTRAILINTPHNPTGKMFTREELTTIASCCIENDVLVFTDEVYDKLAFEMDHISMASLPGMYERTVTLNSLGKTFSLTGWKIGWAIAPPHLTWGVRQAHAFLTFATSTPMQWAASVALRAPDSYFEELKRDYMAKKAILVEGLKAVGFKVFPSSGTYFVVVDHTPFGLENDIAFCEHLIKEVGVVAIPTSVFYLNPEEGKNLVRFTFCKDEGTLRTAVERMKEKLKRK

SEQ ID NO: 22628 - protein, 832 aa, Ricinus communis
MDREANLPKNNIARPILNSDSTSSSSSSFSSSSSPPEFLRHVQAAFKRHRALGTMQTNSLMPRRILVPQRDTSQTSAASSDVYPKKFHDVINPSSQVQSRKDSSSTIMHTKNPVIAVVRETPEDASITPPPISATTITKTFGESFNVQRDQSKSAIECKENNPIPASFSHVESQHVDSKRKVQFSIANNATSQEMEWDASNPVEALNVINEESKHRNFQNVDSDVCLRSDGAGSLLAKRTMAVQDQLHQLRNFLSQPVTQSSVIGTSCATTTSVHSTSAPILNSTTYCSCSHPEGGTHAAVEPAVEPLGDLNASSQHASQKNMEQLSNPSLRDTSGMLIDQTSIAAQPSTSVINAQIKEHPVPRENEGRLAKGTDIPKNPSYVCEKPTKERVSADDVTDVQPQDPSSKNPPSDVKLESSKPEKQEKVTGGKGASVPRKKNYDPDLFFKVNGKLYQRLGKIGSGGSSEVHKVISSDCTIYALKKIKLKGRDYATAYGFCQEILYLNKLKGKNNIIQLIDYEVTDKSLLREVMNESMSNKDGRVKDDGYIYMVLEYGEIDLAHMLSQKWKEMDSAYQTIDENWLRFYWQQILQAVNTIHEERIVHSDLKPANFLLVKGSLKLIDFGIAKAIMSDTTNIQRDSQVGTLSYMSPEAFMCNECDANGNTIKCGRPSDIWSLGCILYQMVYGRTPFAEYKTFWAKFKVITDPNHEITYESVPNPWLLDLMKKCLAWDRSERWRIPQLLQHPFLVPPIPTQLSIPKEEDCKLLQLVAEACADNQEASKLWYDIRQLLKDPIASLTSQSLTSQNQQCKLLSQMSMLCFQLRECLSKLERE

SEQ ID NO: 22629 - protein, 658 aa, Ricinus communis
MGSQAADQTLRWEELQQLDIDDAKTSQLERANWVMNSPDPPGLLSELVASVKAIVFPHGKKTPKQAGATKPAISFLQSLFPILSWGRGYRVSKFKSDLMAGLTLASLSIPQSIGYANLAKLDPQYGLYTSVVPPLIYSVMGSSREIAIGPVAVVSMLLSSMIQDIQDPVADPAAYRKLVFTVTFFAGTFQAIFGLFRLGFLVDFLSHAAIVGFMAGAAIVIGLQQLKGLLGISHFTTKTDVVSVLHSVFTSIDHPWSPLNFVLGCSFLIFLLFARFIGRRNKKFFWLPAIAPLISVILSTLIVFLAKADKHGVNIVKHIKEGLNPSSVHDLQFNGPHVGQTAKIGLISAIIALTEAIAVGRSFASIKGYHLDGNKEMVAMGFMNIAGSLTSCYVATGSFSRTAVNFSAGCETVVSNIVMAITVLLSLELFTRLLYYTPIAILASIILSALPGLINIHEICHIWKVDKLDFIACIGAFFGVLFASVEIGLLVAVTISFLKILLNSIRPGIEELGRIPRTDTYSDINQYPMAIKTSGILTVRINSALLCFANANFIRERIMSWVTEKDDKTEDNTNGRIQAVILDLSTVTNIDTAGIIALEELHKKLLTHETELVLANPRWQVMHKLRVAKFLDRIGREKIFLTVGEAVDATVTTKLNSC

SEQ ID NO: 22630 - protein, 338 aa, Ricinus communis
MERYEILKDIGSGNFGVAKLVRDRWTKELFAVKFIERGQKIDEHVQREIMNHRSLKHPNIVRFKEVRLTPTHLAIVMEYAAGGELFERISNAGRFSEDEARFFFQQLISGVSYCHSMQICHRDLKLENTLLDGSTAPRVKICDFGYSKSTVLHSQPKSTVGTPAYIAPEVLSKKEYDGKIADVWSCGVTLYVMLIGAYPFEDPDDPKNFRKTIGRILSVHYSIPDYVRVSIECKHLLSRIFVVNPEKRISIPEIKDHPWFLKNLPIELMEGGSCQSHDVNNPSQNIEEVVSIIQEARKAVVLPKSGNNLLEGSMDLDDADADADCEDIETSGDFVCPL

SEQ ID NO: 22631 - protein, 268 aa, Ricinus communis
MKRFSSPESFAALLSISSSKEEKTTQKSNQVYSREFQAMLDSLEEEDCTEETTLTTTEKKRRLSMDQVKALEKNFEVENKLEPERKIRLAEELGLQPRQVAIWFQNRRARWKTKQLEREYVTLKTNYEALKLDYNNLERDNESLNLQLKELKAKMREGNAESSQSVKEECPVSESENNASVQSQSHEFSDNNNSNGSFKDNISDLSSHTLMNWIQLSDSRAILGNGYQVYQPHLVKLEEHHSLFNIEESCNFLSVDQAPTLHWHFTEQ

SEQ ID NO: 22632 - protein, 327 aa, Ricinus communis
MAVRIQNLPKKNYGQVHFTFSCPSWWNSNEQQSPRFLSKNISFKVESTPQLNREAKHLGLQHLDQDSSSAQSVGQSHNEVGAVGGTSSEDQCISSESGEDESCGKNAEGRMKPVLLFSAPEISRNPSQTDNSRSMAHAPVPYADHYFGELFTPYGPKDIMGSQILGMTAARVALPLDLADDGPIYVNAKQYHGILRRRQSRAKLEARNKLVKARKPYLHESRHLHALNRVRGSGGRFLSKNKVQQLDANATSSRQGVSDSILHLHSKNETSQLENCPYSRTLKSCTDVTSVSNGDAIYRQQDHWFSGTAVRFGGGMQTSGGHMYSGT

SEQ ID NO: 22633 - protein, 312 aa, Ricinus communis
MTPTYHSSFPPFTIDLNEDQHHHQLIFCSKTTTEDASSSSSISYPIFINPPQEEVGYYHKELQPLHHQEVDNIYASHGRSWDHRIIKNENENGQELSVCKKEDKSTSIEDQRDNSSVKWMSSKMRLMRKMMTTDQTVNTTQHTSSMHKLEDKEKSRSLPLQDDYSSKNLSDNSNNTIRVCSDCNTTKTPLWRSGPRGPKSLCNACGIRQRKARRALAAAQASANGTIFAPDTAAMKTNKVQNKEKRTNNSHLPFKKRCKFTAQSRGSRKKLCFEDLSSTILSKNSAFQQLFPQDEKEAAILLMALSYGLVHG

SEQ ID NO: 22634 - protein, 415 aa, Ricinus communis
MKGMKGKLLKKLKTIKPIGYLKQDRVLLVNAADGFVETLSKIPIFKSQAHFTPEKPDEDQERGKENTGILVINQEPDDIIDVSELMKDLEEDEMEVDEDKENIGPLLKQGNDPVGVVKDNMEDTNSVKMELSSFRQTPLSEIDISSFRRPDLNSGTLFDPNLLAAFEQAVKEHIRMSEAERQARTEKENIERSKEEERFEQENVESNKLARLEEENPGNSQEPIEIQARIEEVDLEEEPPLKTRRIEAEEEEEDNDPLLGFEEKCPPGGSDSVILYTTTLRGVRKTFEDCNSIRFLLESFRVIFYERDVSMHTEYKEELWRVLEGKILPPRLFIKGRHIGGAEEVLRLHEQGKFRQLFQGIPADGSIGRCEGCAGFRFVLCFHCNGSHRVVEDDGLSRNCQDCNENGLIICPLCC

SEQ ID NO: 22635 - protein, 313 aa, Ricinus communis
MQDIHSIGGGGRLFSGGGGGDRRLRAHHHQNQQALKCPRCDSLNTKFCYYNNYNLSQPRHFCKNCRRYWTKGGVLRNVPVGGGCRKTKRSKPKHTTTTTTNSTITAPTISTNTSTILAQEEERKSSNSHSSSESSSLTATNTATGLEAASSSASATTNILNNGIGESKLYVHPNTNTTSFEHGLLEQESDCGIFSEIASLTSLITSSSNDHLQFGFGNLMTQHSLENNQQWHQQQKMVGICGQNDMAGGLVDQTVHIELSALQINDRSGKGGPLDWQASGGDQSLFDLPNAVDQTYWSQSQWTDQDQPTLYLP

SEQ ID NO: 22636 - protein, 612 aa, Ricinus communis
MEGFEGMHGFGGGERVPLLGRGGGKKRYDTSRDDHLRDLQLGDAVPENTFSDKCSDQAAHVGFGRVASLAKPDRKFGGKIIDIVLRHARTPEEKAEALDDIKNTILEIFVIVIVGSVCTALRAWLFSATSKRVVARLKNSSCSCICCFSCCRYKCLHYYNYGSLRYMSALILPPSKNRNLKEDMTKVVIYANFQPALVLYVRIAFSNEYSWIKKYESDPILLMKYYESDPILLMKYPESFGAIRVVRSFAKEEYEISRYPEKVEETLMLGLKQAKVVGLFSGCLNAASTLSIIVVVIYGANLTITGSMTTGALTSFILYSLTVGASISGLSGLYATAMRAAGASRRVFQLLDRTPSMPKLGNKSPLGDQDGEVEFDDVWFTYPSRPNHMVLKGIKLKLQPGSKVALVGPSCGEKTPLANLIERFYDPTKGQILLNGVPLVEISHEHRHRKAIYGTDQYSEPGTCSFQLFCRGEHSLWVRKMENPHEFISQFPDKYQTYVGERGIRLSGGQKQRIAIARAVLMNPRILLLDEATSALDAESEYPVQDAMDSLMKERTVLVIAHRLSTVQSANTVAVVSDGQITESGTHEELLSKDRIYAALVRRQLQGPKTEI

SEQ ID NO: 22637 - protein, 548 aa, Ricinus communis
MENNGTTKLNSSSNGHYTSASKPISAPTLGYHLARRLVEVGVSDIFSVPGDTTLTLFDYFIAEPGLNLVGCCNELNAGYAADGHARARGVGACAVTFTVGGLSILNAIAGAYSEDLPVICIVGSPNSNDYYGSKRILHHTIGLPDFSQELRCFQAVTCHQAIINDLNNAQEQIDKAITTCLQESKPVYISISCNLVAIPHPSFINKPIPLVFTAKMSNQMALEVAVEAAAEILNKAVKPVLVAGPKLRAAKACNAFIPFDASLLGGPIFDDLSSLGYSLLFNKKKAIIAEPDRIIIPEMPVLGPIILKDFLKRLAKRLDHNKTSYQNYKRIYVAEEVLPNLDPEEALKVNVMFKHIQKMLLGDMVVVAEVGDSWFHCQKLKLPQGCGYESQMLYASIGWSVGATLGYAQAEPDKRVIAFIGDGSFQMSPQDVSTMLRCGHKSIIFLINNGGYTIEAEIHDGPYNIINNWNYTELVNAMDNAVGRCWTVGCGEELIRAMETAMVDKKECLCFIEVIVHRDDTSKELLQFVCRLASANSRPPYLQMSYGN

SEQ ID NO: 22638 - protein, 595 aa, Ricinus communis
MEKNGTVKPTSCNDGHYTSPPKFISAPTLGYHLARRLVEVGVSDIFSVPGDTTLTLFDYFIAEPGLNLIGCCNELNAGYAADGYARARGVGACAVTFTVGGLSILNAIAGAYSEHLPVICIVGGPNSNDYGSKRILHHTIGLPDFSQELQCFQAVTCHQAIINDLDNAQEQIDKAITICLQESKPVYISISCNLVAIPHPSFIHKPIPLVFTTKISNQMVLEVAVEAAAEILNKAVKPVLVAGPKLRAAKACNAFVQLAKSCGYAFAVMPAAKGLVPENHPHHFIGTYWGAASTVFCAEIVETADASLLAGPIFDDLSSLGYSLLFNKKKAIIAEPDRIIIPEMPVLGTIVLKDFLKRLAKRLDHNKTSYQNYKRIYVAEEVLPKLDPKEALKVNVMFKHIQKMLIGDMVVVAEVGDSWFHCQKLKLPQGCGYESQILYASIGWSVGATLGYAQAKPDKRVIAFIGDGSFQMSPQDVSTMLRCGHKSIIFLINNGGYTIETEIHDGPYNVINNWNYTELVNAMDNGFGRCWTAKVGCEEELIGAMETAMVDKKECLCFIEVIVHRDDTSKELLQLVCRLASANSRPPYLQMSYGN

SEQ ID NO: 22639 - protein, 912 aa, Ricinus communis
MDPGKFTHKTNEALASAHELAISAGHAQLTPLHLAVALITDPNAIFSQAISNAGGESASQAAQRVLNNAIKKLPSQSPPPDEIPPSTSLIKVIRRAQALQKSRGDSHLAVDQLILGLLEDSQIGDLLKESGIAAGKVKSEVEKLRGKEGKKVESATADTNFQALKTYGRDLVEQAGKLDPVIGRDEEIRRVVRILSRRTKNNPVLIGEPGVGKTAVVEGLAQRIVRGDVPNNLNDVRLIALDMGALVAGAKYRGEFEERLKAVLKEVEEADGKVILFIDEIHLVLGAGRTEGSMDAANLFKPMLARGQLRCIGATTLEEYRKYVEKDAAFERRFQQVYVSEPSVVDTINILRGLKEKYEGHHGVRILDRALVVAAQLSSRYITGRHLPDKAIDLVDEACANVRVQLDSQPEEIDNLERKKIQLEVEHHALEKEKDKASKARLSEVVKELDDLRDKLQPLIMKYKKEKERIDEIRRLKQKREEIQFAIQEAERRYDLARVADLKYGALEEVDAAIARLEGSSTDENLMLTETVKPEHIAEVVSRWTGIPVTRLGQNEKERLIGLAERLHQRVVGQDQAVSAVAEAVLRSRAGLGRPQQPTGSFLFLGPTGVGKTELAKALAEQLFDDENQMVRIDMSEYMEQHSVSRLIGAPPGYVGHEEGGQLTEAVRRRPYSVVLFDEVEKAHLSVFNTLLQVLDDGRLTDGQGRTVDFRNTVIIMTSNLGAEHLLSGLTGKTSIEAARDRVMLEVRKHFRPELLNRLDEIVVFDPLSHDQLKKVARLQMKDVALRLAEMGIALAVTDAALDYILAESYNPVYGARPIRRWLEKKVVTQLSRMLLREEIDENTTVYIDAASNQDDLDYRVEKNGGLVNAATGRKAEVLIQIPSVPKSDAAQAVKKMRIEEIVDNDEDEMHE

SEQ ID NO: 22640 - protein, 160 aa, Ricinus communis
MSDEEHHFESKADAGASKTFPQQAGTIRKNGHIVIKNRPCKVVEVSVSKTGKHGHAKCHFVAVDIFNSKKLEDIVPSSHNCDVPHVTRTDYQLIDISEDGFVSLLTDNGNTKDDLRLPTDENLLSQIKDGFAEGKDLVVTVMCSMGEEQICALKDIGPKN

SEQ ID NO: 22641 - protein, 174 aa, Ricinus communis
MSRDRDPLVVGRVIGQVLDPFVRSISLQVTYSTKVVNNGCELKPYQVVNQPRVDIGGDDLRTFHTLVMVDPDAPNPSDPNLREYLHWLVTDIPAMTGASFGQEVVCYESPRPTVGIHRFVFILYRQLGRQTVYAPGWRQNFSAKDFAELYNLGSPVAAVYFNCQRETGCGGRRR

SEQ ID NO: 22642 - protein, 237 aa, Ricinus communis
MSLNKAVYKNRKATLKKKAEELSILCDVPVALVCYDPDGKVDTWPEDKSKVDEILTEFARKQNLKLPSSETTAKNKNGNQDLQVMENGNILDEEKKKKRKNAVKKVYKTWDERFDYLPEEDLIEILEVIESKEKSLAQRVKAEEVGKKRKGTQVDDDDDGLVTLRLGRYDYSASSSSSGNLTKDKGKCSIESSSNGSDFRHGIAKGIGDLGVQLEESRKVTEAVPITMPQKTIQFYF

SEQ ID NO: 22643 - protein, 494 aa, Ricinus communis
MDKSLFLCMSVCMLFNFVLIQAAPRHALVTHLPGFNGTFPSKHYSGYVNVTVNVNSRKNLFYYFVESERDATKDPVVLWLNGGPGCSSLDGFVYEHGPFDFEAGNQEGDLPTLHLNQYSWSKVASVIYLDSPAGVGFSFAQNTSLYRTGDRKTASDTHRFLRQWFLQFPEFVSNPFYIAGESYAGVYVPTLAAEIVRGIKLGVRPVINFKGYLIGNPVTDYIFDGNALVPFAHGMGLVSDDIYQEAVAACNGTYYDAKTKECGTALDKVNNAVDQLNIYDILEPCYHGNGLFGNARLPDSFRTLGKQIRSLPVRKRIFGRAWPFRAPVLQGLVLSWPQLLSNMNIKVPCVNDEIATAWLNNEEVRKAIHAGSDSEIGRWELCTGKLQYWHDAGSMLQYHKNITSEGYRALIYSGDHDMCVPFTGTQAWTRSLHYKIVDEWRPWMSSVGQLAGYLQGYEKNLTFLTIKGAGHTVPEYKPREALDFFSRWLDGTPI

SEQ ID NO: 22644 - protein, 458 aa, Ricinus communis
MVIIAMDKLFVLGISFCIILSSAFTEAAPKASLVTSLPERSPLKDPVVLWLNGGPGCSSFDGFVYEHGPFNFQEHKKGTLPILHLNPYSWSKVASIIYLDSPCGVGFSYSQNATKYITGDLQTAADTHTFILKWFKLYPEFLDNPFYISGESYAGIYVPTLAAKIVKGLKIGVKPRINFKGYTVGNGVADNYFDSTLVALVPFAHGMGLISDDIYEEIQVGCSGNRIKPCLLAVRKGAKSLGDLNFYNILEPCYHNPKEEGNTSLPLSFQQLGESERPLKVRKRMFGRAWPLWGQMKDGTLWPQLAYHGSVLCFNDETATAWLNDERVRKAIHAKPKSIAGPWELCTDRLNYSSYGAGSMLPYHKNLTLQGYRALIYSGDHDMCVPFTGTQAWVRSLGYKIVDQWRPWISNYQVAGYLQGYANNLTFLTVKGAGHTVPEYKPRESLDFYSRWLEGKPI

SEQ ID NO: 22645 - protein, 491 aa, Ricinus communis
MAKSKLYFFWVLSVCLALRIESAPQDALITQLPGFNGTFPSKHYGGYVSFEEKNLFYYFIVSERNPSEDPVVLWLNGGPGCSSFDGFVYEHGPFNYEEGQPKGSLPMLHVNPYSWSKVSNIIYLDSPCGVGLSYSNNTNKYTTDDWHTAVDTHTFLLKWFNIYPEFVKNPFYISGESYAGIYVPTLAFEVVKGIKSGVQPSINFKGYLVGNGVTDTDFDGTLISLVPFAHGMGLISDNIYEDVQAACYGNHTGPGDDCPTSVDKVYEALAGLNIYDILEPCYHDPSVYKDGKGNRSSVPVSFQELGVTEKPLRVRKRIYGRAWPLRGQLTPGTLWHQVAAQGSVTCFNDEVATAWLNDDTVRKALHAESKSIAGSWELCSSRISYSRFSSGSMIPYHKNLTIQGYRALIYSGDHDMCVPFTGTQAWTRSLGYKTVDEWRSWTSDDQVAGYLQGYDYNFTFLTIKGAGHTVPEYKPRESLDFYSRWLDGKPI

SEQ ID NO: 22646 - protein, 478 aa, Ricinus communis
MDKHLNLFSAITFCVLLSFSFIEAAPKGNIPHLFHLVCRYVSFDEKNLFYYFIVSERNPSKDAVVLWLNGGPGCSSFDGFVYEHGPFNYQEGQQKGSLPTLHLNPYSWSKVSSIIYLDSPCGVGLSYSKNTSKYTNDDLQTAADTHTFLLKWFELYPEFVTNPFYISGESYAGIYVPTLASEVAKGMLSISVQGYLIGNGASRSQYDGINALVSFAHGMGLISNDIFEEIQSTCKGNYYNPTANCDSSLDKLDRSISGLNIYDILEACYHDPESQQKAKGNSSLPDSFKQLGVTDRPLKVRTRMFGRAWPLWRLEKNGKFPLWPELASQGSVPCFSDEVATTWLNDDSVRKAIHAEPKSIAGPWELCSSRIDYEYGAGSMISYHKNLTTQGYRALIYSGDHDMCVPFTGTQAWTRSLGYKIVDEWRPWMSNGQVAGYLQGYDKNLIFLTIKGAGHTVPEYKPQESLDFFTRWLDGKTI

SEQ ID NO: 22647 - protein, 389 aa, Ricinus communis
MDYPFYANRFGYPQSSRYYDHHHSPYSSKQVPVDHRTPPSCKVVMIPVTDGSERQLPLPLMSKETRLDGAVNIQKVFRGFMVRKSVKKIGEIKSEVDEIEKILMSETRELMRKDSKERLKVNEMLMRLLLRLDSVRGVDSGVRDLRRAVIKKVIKLQELVDSIVANNVAKDEDLANQTLETTDIPPNVEDSSFNSNNFENAVNQTQNHAVDSTCDCVSNVSKEEEGEEEAAAPAEELTAIRENVDVSECMEMSSSSGSSIQGESSQADSSDSLEKQPDDEKEVGDNEKDQDQFCGGEGNKEEMAVCRKSRELLEKMMEDNEKMMGLMTQLFQRNEMQTRLLSSLSQRVEQLERAFMCERSKRSKKKRHSAGLADCLESTQDCKKSSGKR

SEQ ID NO: 22648 - protein, 404 aa, Ricinus communis
MGYNLKTPWRLTELENQKIPRIAQTAVSNSSFTLNQVTGYCSVDLKLGNSGDLEDKLVEKFSGPGDSLMESSSSGSSKRVRTPANGTHIPSCLVDGCASDLSKCRDYHRRHKVCELHSKTPKVFIKGLEQRFCQQCSRFHSLVEFDEGKRSCRKRLDGHNRRRRKPQPDSMPVNSARLFSNHQELEAKKIRFQALLKCLCHIAGTRYLQFGGSQIFSTTGASSGWAGAVKPENDPMLYTNQSSLNFSSGKNLFPGSMSHSYRGGKQFPFSHCTSSTLPGESVCQTILDVRSTLGSSSGNQKMFSDGVNQVIDSNGALSLLSSPQAETREIGLSHMVQPDLNPPAQSLIPSLNFSNLGMEGGPVESVLVSDGSHNGNLHSQDMFQTGPDESSASGSHQRLSFSWE

SEQ ID NO: 22649 - protein, 911 aa, Ricinus communis
MALYSHIYLVLYISLVSSIVCQVTEFISIDCGSTSNYTDKRTGLEWISDNGIMNHGKSVEVKNPDGYWAQYGKRRDFPIDSKKYCYNLGTKERRRYLVRATFQYGSLENEDSYPKFDLYLDATKWSTVTVLEASRIYVKEMIIRAPSSSIDVCICCATTGSPFISTLELRPLNLSMYATDYEDRFFLKLAARVNFGAPDEFALRYPDDPYDRIWDSDLAKRQNFLVGVAPGTVRINTSKNIDIQTREYPPVKVMQTAVVGTEGLLSYRLNLEDFPANARAYAYFSEIEDLGSNETRKFKLMKPYISDYSNAVVNIAENANGSYRLYEPSYMNVTLDFVLSFSFVKTRDSTQGPLINAIEISKYLKIESKTDIQDANVLNAFRSISAGSYWTTEGGDPCVPAQWEWVNCSSTSPPRITKIALSGKNLKGEVPPEINNMVELSELHLENNKLSGSLPKYLGSLPNLRELYIQNNSFVGKVPAALLTGKVNLNYEDNPGLHKEVAKKMHFKLTLGISIGVLAILLVLLLGTLIYLRRLQRKTSHQKTDNPGNSMRASTKPSTAYSITRGWHLMDEGGSYYISFAELEEATKNFFKKIGKGSFGSVYYGQMKDGKEVAVKIMADSCSHLTQQFVTEVALLSRIHHRNLVPLIGFCEEEHQRILVYEYMHNGTLRDHIHGIDNRKSLDWLTRLQIAEDAAKGLEYLHTGCSPSIIHRDVKTSNILLDINMRAKVSDFGLSRQAEDDLTHISSVARGTVGYLDPEYYANQQLTEKSDVYSFGVVLLELISGKKPVSTEDFGAEMNIVHWARALIRKGDVVSIVDPVLIGNVKIESIWRVAEVAIQCVQQRAVSRPRMQEVILSIQEAIKIEKGTDGSQKLSNSGSSKAQSSRKTLLTSFLEIESPDLSNGCLVPAAR

SEQ ID NO: 22650 - protein, 584 aa, Ricinus communis
MFELLLTIAFLCRAASDEFMELVWENGQILTRGRSTSPSCISYSSQNPKPKVNTIGEDIYPRKRPRLGAMNSVLGLSSRQEFAKSERLLQDHHSEFSKFTESSKNSASDKKIIEPRILPVCQGDNSTAGNASVGEIPQLRQASNDQLQNQSSLQQCQVSAFFSRSTMDGSQSPSMGEFPYSNSKQFKSSGPVKYLGLRNFSLFLPGVVPPKANDQHQSATCSAGDPSSSRVQELEINKQKSAAALVDPVTGSENAKKSYKCPDQVATELDQARHITVSAKESLPDEQSEAPISRNDSKSKRIPDPTSSLEANTFRRKPNAEKYIDQLAAATSICSRRASNDLTHSSLKRTNAHLKEMASPSENADEEEEIPKSTSTKKKRIPQVHSLSERKRRDKINKKMRALQALIPNSDKVDKASMLDKAIEYLKTLQLQLQMMSMRGSCYMPPMMIPTALQQIQAPYLSHFSPMMGMRMPMSPSLFSNSAILGLAAGQMQPMAPMTSQTPFVPLVGGSSMQSTSTVTPFCGAAAAMPVKPIGLADPFSNLKEAVQNINSDMTGNVVNSQYEESFQVCEVHYLSIFSFLFDT

SEQ ID NO: 22651 - protein, 264 aa, Ricinus communis
MDAQEINYVCQSYPNEEDADIRKGPWTVEEDAILTEYVKVHGEGRWNSAARCSGLKRTGKSCRLRWLNYLRPDVRRGNITLQEQLLILELHSRWGNRWSKIAQYLPGRTDNEIKNYWRTRVQKQAKQLKCDVNSKQFRDAMRYIWMPRLIERIQASSSGSSTGQPTTIVNHNDHIAAAAGETEWRVDPNLIPEPSGTSSDSLDPVSDLTEYQNQSSEEYYKENGSGSWAGEVEMESNGLILDGGESLESIWNEENIWFLQQQLM

SEQ ID NO: 22652 - protein, 396 aa, Ricinus communis
MEKKLSSVARTFTPSPIQELSHLAQRCNAINLAEGFPDFPAPAHLKNAAVSAINSDFNQYRHVQGICDHLAGIMKEMHGLDVDPQTDIAICCGQTEAFAAAIFAVIDPGDEVVLFDPSYETYEACIRMAGGVPVFVALDPPYWTLDASKLMESFTDRTKAIVLNSPQNPTGKVFSKVELETIAGACCRRDFLAITDEVYEHITYDNIRHMPLASLPGMQERTIITSSLSKTFSVTGWRVGWAIAPAFFASAIRNIHVKITDSAPAPFQEAALTALRSPPEYFESLREDYESKRDYVVKLLSGVGFQIQFKPQGSFFLFAELPEISTLSDVEFVKKLIEQAGVVAVPGRGFFHTDLPVKSSSQANFNYQKRYVRFAFCKSRATLAAAAQNLGKLQML

SEQ ID NO: 22653 - protein, 179 aa, Ricinus communis
MSRVYVGNLDPRVTERDLEDEFRRFGVIRSVWVARRPPGYAFIDFDDKRDADDAIHELDGKNGWRVELSHNSRGGGGRGGGRGRSGGSDLKCYECGEPGHFARECRLRVGSGRRRSRSPRYRRSPSYGRRSYSPRGRSPKRRSISPRGRSYSRSPPYRGREELPYANGNGIRDRRRSRS

SEQ ID NO: 22654 - protein, 169 aa, Ricinus communis
MQEQASSSIAANSLPSSSERSSSSALQLEVKEGMESDEEIRRVPEFGGEQAGTSASGRDASSVAGRDRVQAPGEGQTPRKRGRSPADKENKRLKRLLRNRVSAQQARERKKAYLNELETRVKDLEKKNSELEERLSTLQNENQMLRHILKNTTASRRGGSSNTNGDGSL

SEQ ID NO: 22655 - protein, 131 aa, Ricinus communis
MCRGIESRNQGTLCKKEEAAAAASPEETSANMVCCELCGSRASLYCQADDAFLCRKCDKWVHGANFLANRHIRCFLCNTCQNLTQRYLIGASVEMVLPTMVMSSKDQRRICDSNNDDKQCSKSLKMPFLFL

SEQ ID NO: 22656 - protein, 419 aa, Ricinus communis
MDISKVLFFFVSLYENSEESEGNLRVSMEPLCEFCGVVRAVVYCKSDSARLCLHCDGFVHAANSLSRRHPRSLLCDKCNSQPAILRCLDERLSVCQICDWNANANGCSNLGHQHQPLTCYTGRPSLAEFSRIWSSVLEAPSSTNGYDPGGMGPLGCLPGNENSITGCLEQRDNESSFGLVTGNKLSEIESCSKFEPWIGQQQPTIVTPDQNCISFCRDQLPVLPDESNMPKGCSNFKDLGEDLCEGLNIDDVALNFENNDEIFGCSSQSRNRYQQLGPASVMQPINGGSNCSYMNPSCSRSINLGYPVPPVQVHSSISLSLSNITGESSAADYQDCGLSPMFLASETRWDLGMDTSCPQARDKAKMRYNEKKKTRTFSKQIRYASRKARADTRKRVKGRFVKAGENYDYDPLQHEKSTF

SEQ ID NO: 22657 - protein, 576 aa, Ricinus communis
MEIGHVSSFSSFRSYLQALGQTPTRLACRAGSVSTSYEEMSRVKARSGSEMQKSLRWHDLVCFGIGGMVGAGVFVTTGRASRLYAGPAVVVSYAIAGLCALLSAFCYTEFAVDMPVAGGEFAAFLTGANLIMDYVMSNAAVARGFTAYFCAAIGMSTSKWRLVVHALPNGFNEIDMVAVLVVLAITLIICYSTRQSSVVNMVLTVLHIMFILFVIVMGFWKGQWKNFTAPAYSNHPSGFFPFGAPGVFNGAALVYLSYIGYDAVSTLAEEVHNPVNDIPIGVSGSVALVTVLYCLMAASMSMLLPYDLIDAEAPFSAAFKGKSDGWEWVSNVIGVGASFGILTSLLVSMLGQARYMCVIGRSSVVPAWFARVHPRTSTPVNASAFLGIFTAAIALFTDLNVLLNLVSIGTLFVFYMVANAVIYRRYVAIGTTKPWPTLSFLCSFSFTSLLFTLIWHFMPQGKPKAFMLGACTMTAIAIIQVFNCMVPQARKPEFWGVPLMPWIPCVSIFLNIFLLGSLDGPSYLRFAFFSGLAVLVYVLYSVHASFDAQREGCLSLKNGDIILKESGESEDPGSKV

SEQ ID NO: 22658 - protein, 744 aa, Ricinus communis
  misc_feature (349)..(349): Xaa can be any naturally occurring amino acid
  unsure (1)..(744): unsure at all Xaa locations
MASVNSQVAALKMEKVEEEQEEECPIKQVELTVPKTDDPDMPVLTFRMWVLGISACVILSAVNQFFWYRKQPMFLSAISAQIAVVPLGHLLARTLPTRLYFQGTKWEFTMNPGPFNVKEHVLITIFANSGAGTVYATHVLSAVKLFYKRKLTFLPSLIVMITTQVVGFGWAGLFRRYLVEPGEIWWPANMVQVSLFRALHEKDKRAKGGITRTQFFLIVLVSSFCYYVLPGYLVQILTSFSWICWIAPKSVIVQQLGSGLEGLGIGAIGFDWSTVSAYLGSPLASPWFATANIAVGFSLVMYVLIPISYWGNVYNAKTFPIFSSSLFQGNGEEYDIHSIVDSKFHLDKXVSLDKNAYASSGPVHLSTFFAMTYGAGFAALAATFMHVLLFNGSDLWMQSKMALRGKRKMDIHTRLMKKYKSVPLWWFIVIAIINIAAIIITCEYYNESLQLRWWGVLLACGISLFFTLPIGIIFATTNQAPGLNIITEYIIGYINPGLPVANMCFKVYGYISMTQALTFLQDFKLGHYMKIPPRSMFMAQVVGTILSVLVYLLTAWGMMDAIPNLCDKAQLPKGSPWTCPMDKVFFDASVIWGLLGPRRIFGNLGEYGMINWFFLGGAIAPLLVWLAHKAFPSQKWIRLIHMPVLIGSTGLMPPATAVNYTSWLILGFLSGYVFYRYRPGLWKRYNYVLSGGLDAGTAFITLLIFFSLNYWGVIFNWWGTNDEGCPLASCPTAKGVFKDGCPVV

SEQ ID NO: 22659 - protein, 884 aa, Ricinus communis
MTGNKMLWDFLFRFIPVLFLTAVYAQDQSGFISIDCGLPANSSYTDETTSLNYISDASFIDVGIITTITPKVTTNSTDRQQLSVRSFPEGDRNCFNVELAKNTKYLIRAIFAHGDYDGSNELPEFDLHLGPNKWVTVKILNASIPVIKEIIHTPTLNYIHICLVNTDSGMPFISALELRPLKNTTYVAQSGALVKSTRLDLGSLTNKTVRYPDDVFDRIWTPDHFHKWTDLSTPDTVDAQNHIDFQPPSVVMRTANMPTNASENMEFYIDIDDTTSLFYVYMHFAEIVELQANQSRLFNISLNGTIWYGPVIPNHLSSGTVYSQFPIIGGNNMFSLFKIEGSTLPPLLNAIEIYFVVDLSQSETDQDDVDAIMKIKSTYGITKNWQGDPCAPQAYVWHGLNCSYSDDDPPTVKSLNLSSSGLRGEIVSEIANLRSLELLDLSNNSLSGSLPDFLSRMTSLKVLNLTGNKLTGTIPADLFERSQQGSLLLSVSGNPELCPSVSCTKKKKSVVVPVVASVVAFFILAAALVVILRYFFVRSQAKTNEAKISYETNDEPLVESKKRQFSYSEILKITNNFDKILGKGGFGTVYHGTLNDGTQVAVKVLSLSSAQGYKEFQAEVKLLLRVHHRNLTTLVGYCNEGTNLGLIYEYMANGNLEDYLSDSCLNTLSWEIRLRIATEAAQGLEYLHNGCKPQIVHRDVKTTNILLNDKFQAKLADFGLSRIFPVDGSTHISTVVAGTPGYLDPEYYVNNWLTDKSDVFSFGVVLLEIITGRPAIAQTRERTHISQWVSSMLEKGDIHGIVDPRLNGDFEINSVWKAAELAMGCVSASSARRPTMNQAVVELNDCLNIEMGRTREGQSSQSFNSNSIELMTVNVHTEASPLAR

SEQ ID NO: 22660 - protein, 886 aa, Ricinus communis
MEIILFQFFSKFFGVLALIVLVHCQDQSGFISLDCGLPGNTSYSDATTTLNFISDASYIEIGISKSLAPEFSTNSIFRPLWYVRSFPQGSRNCYNVTLTKDTEYLIRATFMYGNYDGINQRPSFDLYLGPNKWVSVQILNGSIPVRKEIIHHPKRKYIHVCLVNTNSGTPFISALELRPLKNGTYVSESGSLALFDRADISSITNQTVRYPDDVYDRRWSPFHFVEWTDISTTETIDLGKSNSYQLPSTVMRSAGTPRNSSSPMEVTIAAEDPTLKFYAYFHFAEIVKLDANQSREFNITLNGDIWYGPITLHYLYSTTVSSGYAISGGTYDFQIFKVGGSTLPPLLNAVEVYYIVELLQLETKQEDVYAMIKIKSTYKITRNWQGDPCAPQDYVWEGLKCNYSNSASPVIISLDLSSSGLTGDVPPVFANLKSLESLDLSNNSLTGPVPDFLSQLKSLKVLDLTGNKLTGIIPDDLFKRSQSGLLLLSFGGNPELCASVSCSNNNKKKKKNNNFVVPVVASIAALLVIVAALTIICCCRRRKQQVARNEEADTKETYEPREMRNRRFTYSEVLKLTKNFESVLGRGGFGTVYYGYLGDIEVAVKVLSTSSVQGYKEFEAEVKLLLRVHHKNLTTLVGYCDEGGNMILIYEYMANGNLRQHLSGEHPDILSWEGRLKIALETAQGLEYLHNGCKPPIVHRDVKTANILLDDKFQAKLADFGLSRMFPAEGGTHVSTIVAGTPGYLDPEYYVRNWLTEKSDVYSFGVVLLEIITSRSVISQTSEKTHVSQWVKPMLERGDIKNIVDSRLCGDFDTNTAWKAAELAMACVSATSTERPSMSQVVMELSECLKTEMARTREGYCSAQSNSSAELMSVNVLSTVLSPRSR

SEQ ID NO: 22661 - protein, 883 aa, Ricinus communis
MVLFCPFFFKFLCILAVRVLVHGQDQSGFISLDCGLQANSSYTDEKTGLKYISDAAFIETGVTKSIAPEFLGSFNQQLRQVRSFPKGDRNCYKVELVKNTRYLIRATFLYANYDGLNKLPAFDLHIGPNKWVNVQITNPLIYPIKEIIHAPTFNNIYVCLVRTGPWTPFISALEIRPLHNSTYVAQSGSLSLFNRVDVGSLTNQTIRYPDDVYDRMWLPFHFDKGTDISTKENITSGIDYFQLPSTVMNSATVPLNASEQIILNIDTQDNTFQAYVYIHFAEIVRLEPNQSRRFNISLNGKILYGPVTPKHLEATTVYSQSAIPGGKFLFSFYGVGGSTLPPLLNALELYSVVDLLHSETNQVDVNAITKIKSTYGITRNWQGDPCSPQDYKWDGLNCTYSNTASPVITSLDFSSSGLTGEIDPDISNLKWLETLDLSNNSLTGPVPDFLSQLPLKSLNLAGNNLTGTIPADLFNRWQSDLLFLSVSGNPQLCASVSCNSDNKKNITVPVIISVTALFVIIAGSAIILWRLKKRKQQGTVPNGFCWVMIWPVVGKMEAEAKREPLELQKRQLRYFEIVQITNNFQRILGKGGFGTVYHGHLDDMEVAVKMLSPSSAQGYKEFQTEVKLLLRVHHRNLTSLVGYCDEGNKMALIYEYMANGNLRDNLSDGNGNFLSWEERLRIALEAAQGLEYLHNGCKPPIIHRDVKPTNILLNNKFQAKLADFGLSRICPVEGGSHVSTIVAGTPGYLDPEYYATNWLTEKSDVFSFGVVLLEIITSGPVISKTRDGDTTHLSQWFSSMVEKGDIQSIVDPRLGDDFDINSLWKVVELAMACVSATSAQRPTMNQVVIELSECLATETVKTEGTSSQSYSTVLHTELTPLAR

SEQ ID NO: 22662 - protein, 884 aa, Ricinus communis
MMANKRLSNFLFRFLPILALAILVHCQDQSGFISIDCGLPANSSYTDATTGLNYVSDAAFIDTGIINNLAPGLNTSSIDRQQLSVRSFPEGDRNCYQVELTRGTKYLIRAIFLYRNYDGLSKLPHFDLHLGPNKWITVKILNATIPVITEIIYTPILNYIHVCLVNTGLGTPFISALELRPLKNTTYEIRSEGALAKFARLDFGSVTNKTVRYPDDVYDRIWTPDHYYKWTDLSTPETIDAQFHNDFQPPSIVMSTANVPTNASEDMQFFIDNEDTSLQFYFYMHFAEIVKLEANQSRQFNISLNGTIFFGPVIPDYLYTSSVYNGLPINAGSNVFSLFKIGGSTLPPLLNAIEIYFFVDLSQSQTDQDDVDAITKIKSTYGITRNWQGDACAPQAYVWQGLNCSYSDNDPPKITSLNLSSSGLTGEIVSDIANLKSLEFLDLSNNSLSGPVPDFLSQMPSLKVLNLTGNKLTGRIPVDLFERTQKGSLLLSVSGNPELCPSVSCKKKEKSIAVPVVASVASVFILAAAVAVILRYRILRSVSETGETKLSHESNEPMELKNKQFTYSEVLKITNNFEKVLGKGGFGTVYYGTLADGTQVAVKILSQSSVQGYKEFLAEVKLLMRVHHRNLTTLVGCCIEGTNMGLIYEYMANGNLEDYLSGSNLNTLSWEARLRIALEAGQGLEYLHGGCKLPIVHRDVKTTNILLNDKFQAKISDFGLSRIFPADGGTHVSTIVAGTPGYLDPEYYVTNWLTDKSDVYSFGVVLLEIITCRPVIAQNRNHENSHISQWVSSMIENGDVNSIADPRLNGEYEVNSVWKIVELAMECLSTTSARRPTMNQVVIELNECLKTEMARTREGQSTQSYYSIELVTVNVDTESSPLAR

SEQ ID NO: 22663 - protein, 915 aa, Ricinus communis
MIMVGKFLLIFLSKLAAAGNQRKLNANSIPGMLKYYPFPLLSIIALLAVVQAQAQSGFISIDCGISENATYTDSTTSIDYVSDAAFIDTGKSKSIAAEYTRYNINQQLQNVRSFAEGVRNCYKIGLKKGAKYLIRAEFLYGNYDGQNKAPIFDLYLGSSKWETVDTINSTMIITKEIIHLINTSYIDVCLVNTGSGTPFMSKLELRPIRISAYSTSLGSLARFSRSDVGSTTNRTLRYADDVYDRIWTPNHFFKWAEISTSETIDALAQNDYRPPSIVMRTAGIPANDNEPMTVSIDFEDTTFRFLVYMHFAEILKLEANESRQFNISLNGEHWFGPLRPDYLYTTTVFSPTVLSGGQYEFSIYKTENSTLPPLLNAIEIYYILDLSQPQSNQEDVDAITNIKSSYGIKRNWQGDPCAPQAYLWEGLNCSYSGNVMPRIISLNLSSSGLTGEIPSSISSLTSLESLDLSNNYLTGSVPDFLSQLPSLNVLILTGNRLSGSVPPSLVEKSEQNLLVLSVGGNANLCLKSSCKNEKKNNVVVPVVASIAGVLIIISALAAILYTRKRRKQQEEDTKTSNIYGPLESKERQFTYSEILNITNNFERVLGKGGFGTVYHGYLDDTQVAVKILSPLSAQGYKEFHAEVKLLLRVHHRNLTSLVGFCNEGTKMGLIYEYMANGDLEHLLSGRNRHVLKWERRLDIAVEAAKGLEYLHNGCKPPIVHRDIKTANILLNDQFQARLADFGLSKSFPVEGGTHVSTVVAGTPGYLDPEYSMTNWLTEKSDVYSFGVVLLKIITGRPVIAVIDERSIHISHWVSSLVANGDIKTVIDPCLGGDFDINSVWKAVEVAMACTSPTSAGRPTMNQVVRELIESLAEETARAEEGHKTKSIVMMTESTPLASSEWYFSEYAHEVEPGTA

SEQ ID NO: 22664 - protein, 892 aa, Ricinus communis
MKFLRQLIALLGILGLICMVHGQDQSGFISLDCGLPANTTYTDETTSLNYNSDASFIDTGISKSLAPGFTTDNLRRQLWYIRSFPEGDRNCYNLTLAKDTEYLIRATFMYGNYDGLNQLPEFDLHIGPNKWVSVKILNASTSVTEEIIIGSPKSKYIHVCLVTKDTGTPFISALETRPLKNGTYVTESGSLGLALFTREDVGSLNNRIVRYPNDVYDRRWFPYHFKRGTDISTTLTVDLDDHNDFQPPSIVMRSAVISINTSSPLEFYINNDTTYKLYAYMHFAEIVKLEANQSRQFNISLNGKIWYGPVTPTYLYTTTVYSTSAITDGMYEFSLSKVEGSALPPLLNAIELYYVVDLLQPETNQRDVIGIMNIKSTYRISRTNWQGDPCAPEDFVWEGLSCKYNVTSSPVIISLNLSSSGLHGEIAPDIANLKSLEILDLSNNNLTALVPDFLSQLQSLKFLNLTGNRLNGTIPDDLLKRADSGLTLSVDGNPELCKSVSCNKKKKKKKNTDFIVPVVASVAALLVIIVVLTTIWYLKRRKQKGTYLHKYILAGRTEAEAKKTHEPLELNKRQFTYSDVLKITNNFGSVLGRGGFGTVYHGYLDDVEVAVKMLSPSSVQGYKEFHAEVRLLLRVHHKNLTTLVGYCDEGNNMGLIYEYMANGNLKHHLSGCDHPSILSWEGRLQIALEAAQGLDYLHNGCKPPIVHRDVKTTNILLNDRFQAKLADFGLSRTFPVEDGSHVSTVVAGTPGYLDPDYYVTNWLTEKSDVYSYGVVLLEIITSRPVIARTRDKTHVSQWVKAMLDKGDIKNIVDPRLRGDFDNNSVWKVTELAMACLSTTSGERPSMSQVVMELNDCLTTEMARAREGRSTQSSSSVEVISLHLHTGVSPLAR

SEQ ID NO: 22665 - protein, 1234 aa, Ricinus communis
MASGSSRFRNSEAKSIVQMHTRRKLDDIAGSINIDCGLSEDSSSTEVKTGMHYISDTLYTNTGVNKKISSNFSSDAQFPVSLMTVRSFSQGIRNCYTLRPPEGKASIYLIRASFMYGNYDNLNQLPQFSLYLGVNLWDTVKFDNASHVVIKEIIHVPALNDIYVCLLNTGSGTPFISALELRHFHNSTYRTESGSLVLFQRLDFGSTTNEIVRYHDDAYDRIWFPYNCPQYAALSTSFAVDSLKTTDFNLPSKVMQTAVEPMNANESLNFEFDIGTPNMNFYIYMHFAEVESIQRNQYRGFNIALNGKLFNEGVVLKYLQSMTISTMQPMRGAKISISLNKLPNSTLPPILNAMEIYLMNEFWQQPTYQEDANSIEDIMSSYNVGKGWQGDPCLPAPAWDGLNCSDNGYDPPRIISLNLSSIGITGQISSSLSNLKFLQHLDLSNNSLTGAVPEFLSQLPDLKILNLGGNRLSGSIPSALMEKSNNQSLLLRLDGNPELCLLSTCEKEKKSVFVPIVATVVPLAAIFLALIILWRYKRRKVPRRSVNSQKEEGSSLKSDKRQFTYAKIVRITNNFSTVIGKGGFGTVYHGHLTDGTQVAVKMLSATSAQGSNQFRTEAHLLMRVHHRNLASFIGYCNEGTNIGIIYEYMACGNLEQYLSDKSIEPLTWKERLQIALDAAQGLEYLHHGCKPPIIHRDVKCANILLNENLQAKVADFGFSKCLPSESRSHMSTAVVGTVGYLDPEYYSSNRLTEKSDVYSFGIVLLELITGQPAIMRNRDENIHIVHWVRPFIERGDIRSAADPRLQGKLDTNSAWKFMEIAMSCVPPIMIHRPTMNHVVAELKECLGTEIAREQNCRMEGQAMRLSNSFEMIAVDLETEMGPEARDLSNNELTGVVPELLADIPRMQKFIWEQSHKFNSPTFAYSEIVIITNNFESIIGEGGFGKVDMGNLQNGTRVAVKMSKSSTQGCKEFQSECITETWWHSLVTVMSKKIWHSFMNTWQMETCDGIYEVITIPYSSTSILSWRNRLRIALDAAQGLEYLHNGCRPPIIHRDLKTANILLDDNLLAKISDFGLSRVFATERDTHVKTCPAGTFGYVDPEFYASGNLNKKSDVYSFGVIPLELLTGKPVVLRDQEYSTHTVQWVGPLIESGDITAIIDPRLQGEFNTNSACKTVEIAMSCVPPTSAQRPDINHVLAELKECWDVEMVSERPERTQNITMALSNSLEMSFPSAR

SEQ ID NO: 22666 - protein, 258 aa, Ricinus communis
MALFQLLFLAIILATSHGSEMGVPHQIHLLRPQSGTAGHHVPGVSCLSWRLGVETNNIIGWTTVPAECEGYVGHYMLGHQYRKDSKIIADEAFLYAKSLELSGDGKDIWVFDIDETTLSNLPYYAEHGFGAEPYNSTLFNKWVVTSKAPALPESLSLYKRLLSLGIKIVFITGRTEDQRTVTTNNLKKAGYHTWMKLVLKTSSYSGKTAVFYKSSERGKLVKSGYRITGNIGDQWSDLLGTYTGNRTFKLPDPMYYIS

SEQ ID NO: 22667 - protein, 521 aa, Ricinus communis
MDAALTLLCLTLPVAFFFLSKLFTSRHYYNRSLNLPPGPKPWPIIGNFNLIGHLPHQSLHKLSQKFGPIMQLKFGSYPVVIVSSAEMAKQILRTNDHIFASRPQTAAGKYTTYNYSNVTWAPYGAYWRQGRKIYLHELFSSKRLDSYHDIRVEEMRAFVSRIHTLSVTGKPILLKDHLSRATLSIISRIVLGKKYFITESESESLSESETSVITTLGEFQKILDELFLLNGVMNIGDWIPWLAFLDLQGYVKRMKALKVKWDRFHDHVLGEHKAKKAEVKNFVPKDMVDLLLQLADDPELEVKLNNDSVKGFIQDLIAGGTDTSATTVEWAMSELLKQPSLIKKATEELDRVIGKERWVEEKDIPQLPYIDAIMKETMRKHPVAVMLAPHYALEDAKVNGHDIAKGTTVFINTWSIGRDPLLWDDPEEFRPERFLGKAIDVKGQSFELLPFGSGRRMCPGYSLGLKMIQSSLANLLHGFNWKLPDDMKPEDLSMDEVYGLATPRKFPLVAVTEPRLPINLY

SEQ ID NO: 22668 - protein, 314 aa, Ricinus communis
MESVGVLMTCPPIYPYLIEQLEKRFTLYQFQNVPDKTQFLNSHKNSIRAVVGNAGFGADAELIDQLPKLEIVSSYSVGLDKVDLAKCKGKGIRVTNTPDVLTDDVADLAIGLMLAVLRRLCESDRYVRSGQWRKGDYKLTTKFTGKSVGIIGLGRIGMAIAKRAEAFSCPISYFARSEKPDMKYKYYPSVVELAANCQILVVACALTEETHHIVNREVINALGPKGVLINIGRGPHVDEPELVSALLEGRLGGAGLDVFEDEPNVPEQLFSLENVVLLPHVGSGTVETRTAMADLVVGNLEAHFLNKPLLTPVV

SEQ ID NO: 22669 - protein, 314 aa, Ricinus communis
MESIGVLMTCPPMNPYLVEELEKRFTLYNLYNIPDKTQFLNSHSNSIRAVVGNSGYGIDADLIDQLPNLEIVSSHSVGLDKVDLAKCKEKRIRVTNTPDVLTDDVADLAIGLMLAVMRRLCESDQYLRSGKWKKGDYKLTTKFTGKSVGIIGLGRIGMAIAKRAEAFSCPISYYARTEKTVVNYKYYQSVVEMAGDCQILVVSCALTEETRHIVNREVIDALGPKGILINIGRGSHVDEPELVSALLEGRLGGAGLDVFEDEPNVPEQLFGLENVVLLPHVGTRTFETRIAMAYLVVGNLEAHFSNKPLLTPVV

SEQ ID NO: 22670 - protein, 313 aa, Ricinus communis
MEKIGVLMTCPIYTYLEKQLESHFNLLKLWQQPSKTEFLKTHENNIKAIVCDTKIGADGELIDALPNLEIVATYSVGLDKIDLKKCAEKGIRVTNTPDVLTDDVADLAIGLMLGVLRKICASDGYVRNGKWRDGDFELTTKFSGKSIGIVGLGRIGTAIAKRAEAFNCSISYYSRTQKPYTNYKYFSNILDLAKTCQILVVACALTEETRHIINREVIDALGPKGILINIGRGAHVDEPELVSALLEGRLAGAGFDVYENEPMVPEQLFSLDNVFLQPHIGSDTVETSNAMADLVIANLEAHLTNKPLLTPVI

SEQ ID NO: 22671 - protein, 158 aa, Ricinus communis
MDLRLMGIDSPLFQTLQQMMDITHGDESDKSFSAPTRTYVRDAKAMASTPADVKEYPNSYVFIIDMPGLKSGDIKVQVEDDNVLLISGERKRQEEKEGAKYVRMERRVGKFMRKFVLPENANTDAISAVCQDGVLTVTVEKLPPPEPKKPKTIEVKIA

SEQ ID NO: 22672 - protein, 159 aa, Ricinus communis
MDVSLRSALLDPGILDVLHEILEVSDETEKSHHAPSRTYVRDTKAMAATPADAKELPNAYMFVIDMPGLKADQIKVHVEDGNMLVVSGERKREKEKDQGVRYIRMERRLGKYLKKFVLPENADSEKISATYQDGVLTVTVEKKPPPEPKKPKTVEVQVV

SEQ ID NO: 22673 - protein, 159 aa, Ricinus communis
MDLRHFGFDSPLFSMLEDMLEIPEEHDKYRNNPSRAYVRDAKAMAATPADVVEYPNSYVFAVDMPGIKGNEIKVQVENDNVLVVSGERNRDKEKDSKDGVKYLRMERRIGKFMRKFALPDNANMDAISAVSQDGVLTVTVEKLPPPEPKKPKTVEVKVA

SEQ ID NO: 22674 - protein, 177 aa, Ricinus communis
MGFFVEDSDVIVTHLLYKAAVILAVARWALSWALRFRSRTYLSPSSSSSSNDSLHQSCALPSSQQIRDGLILTTFGDITDRISGACDTCAVCLGQLSELDEVRELRNCCHVFHKECIDRWVDHDHDHDDNHKTCPLCRAPLLTASQSLAWINNNKCEPSWAVERILYLFGDDLFMQY

SEQ ID NO: 22675 - protein, 589 aa, Ricinus communis
MKEMFSPIANSNNGITIFKNKNKKRLFLGLFASVLLVATVIGIVASVASRKSSVGTINNGHEAAHAIVKSSCSSTLYPDLCFSTISALPADATSTIKTTKDVIILSLNVTESSVYQTYLKIQGLTLARRSYTPREVTALKDCLQTLSETVDEIRKVVQLLKEYPSLKNSISEHADELKILISAAMTNQETCLDGFSHDRADEKVREFFLGDERHVHRLCGNALAMIKTMTDTDMANEQALSSSPSSERRLKEENGIEWPEWLPAGDRRLLQATTLTPNVVVAADGSGNYRTVSEAVAAAPSRSSTRYIIRIKAGVYRENVDIPSSKTNLMFVGDGRTTTIITGSRSVVGGSTTFNSATVAVNADGFLARDVTFQNTAGPSGHQAVALRVSADLSAFYRCDMIAFQDTLYVHRLRQFYVSCIVIGTVDFIFGNAAVVFQNCDIHARRPNPGQRNMVTAQGREDPNQNTGIVIQKCRIGATQDLEAAKNSFQSYLGRPWKLYSRTVIMQSQISDIIHPAGWFMWDGTFALDTLTYREYQNTGPGANTANRVTWMGYKVMTSASEALPYTAGNFISGGNWLSSTGFPFSLGL

SEQ ID NO: 22676 - protein, 541 aa, Ricinus communis
MANSSNDITTTKNKNKIKRRLFLSLFASVLLVAAIVGVVAGLASRRSAANTVNNVHEAAHAVVKSSCSSTLYPDLCFSEISALPVDVTSKIKSTKDVIHLSLNVTESSIGQTYQKIKTLTFSRRGYSKRENTAFKDCLEMLTEAVNEIRNVVQVLKEYPSLKKAISEHADELKILVSAAMTNLESCLDGFSHSKADKEVRQFFLSDERHGHRLCSNALAMIKNMTDTDMAKEQELTSSSAAERKLKEENGIEWPGWLSAGDRRLLQATTVTPNVVVAADGSGNYRTVSEAVAAAPSRSSTRYVIRIKAGVYRENVDIPSSKTNLMFVGDGSTTTIITGSRSVVGGSTTFNSATVGVLGKRHYLSKQCWTINGTSCCIAHFIFGNAAVVLQNCDLHARRPNPSQKNMVTAQGRDDPNQNTGIVIQKCRIGATQDLEAVKDSFQSYLGRPWKLYSRTVVMQTQISDIINPAGWFEWDGNFALDTLTYREYQNTGPGANTANRVTWKGYKVMTSASEALPYTAENFISGANWLPATGFPYSLGL

SEQ ID NO: 22677 - protein, 543 aa, Ricinus communis
MAFSLLNLLLLLFFFSPIFFSSAWAANISSSSSANSLDTHLSSLRNFCSGRPYPDACFDSLKLSISINISPNILNYILQTLQTAISEAGKLTNLFSSAGSSSNIIQKQRGTIQDCKELHEITLSSLKRSVSRIQAGDSQKLADARAYLSAALTNKNTCLEGLDSASGPLKPVLVNSVISTYKHVSNSISMIPSPNSEKGQKNRRLLGFPKWLSKKDRRILQSDDGDEYDPSEVLVVAADGTGSFTTITDAINFAPKNSFDRIIISVKEGVYEENVEIPSYKTNIVLIGDGSDVTFITGNRSVDDGWTTFRSATLAVSGEGFLARDITIENTAGAQKHQAVALRINADLAAMYRCTINGYQDTLYVHSFRQFYRECDIYGTIDYIFGNAAVVFQACNIVSKMPLPGQFTVITAQSREIPEEDTGISIQNCSILATEDLYSNASSVKSYLGRPWRTYSRTVILESYIDDFINPTGWIEWPGNQGLDTLYYGEYDNYGPGSATDNRVTWQGYHVMDYYDAFNFTVSYFITGDEWLDSTSFPYDDSI

SEQ ID NO: 22678 - protein, 593 aa, Ricinus communis
MVFQDFDQISERRRLERQQKFRKRVTIAAVAVFALLVVVAAGVFAIISNNNHKQSQQQHSKSTQSQKPDNSEVSHLGKVIDNVCNATTYKETCHTSLKKAVEKDPSSAHPKDVLKLAIGSTEDEFARILEKVKSFKFESPREKAAFEDCKELIDDAKEELNKSISSAGGDTGKLLKNEADLNNWLSAVMSYQQTCIDGFPEGKLKSDMEKTFKEAKELTSNSLAMVSELTAFLTAFSVPKPSRRLLAKESNTSSFGEDGIPSWISPEDRRILKGSDGDKPTPNVTVAKDGSGQFKTISDALAAMPEKYQGRYVIYVKAGIYDETVTVTKNMVNVTIYGDGSQKSIVTGSKNFADGVQTFRTATFAALGDGFIAKAMGFRNTAGPQKHQAVAVRVQADRSIFLNCRFEGYQDTLYAQTHRQFYRSCVISGTIDFIFGDATAIFQNCLILVRKPMENQQNIVTAQGRIDSHETTGIVIQNCRIQPDKDLIPAKATVKSYLGRPWKDYSRTIVMESTIEDFIHPDGWLAWEGEKGLKTLYYAEFNNKGPGSKTDARVKWPGYHVIDQQEANKYTVKPFLQGDWITAAGAPVHFGLF

SEQ ID NO: 22679 - protein, 599 aa, Ricinus communis
MDTEENTNSMKSYSKIEEAAQSEEAFRRKTRKRLMIIVLSVLVLLIIVTGSSIGILASRNKSKDLSSPTYSANSNIRTLCNVTRYPESCYSSMSSAIKASSNGENPNPQTKELFLLSLKIAFDELMNLSSLPQKIISSQNYRNEINDPLLQSALRDCETLFNDAIDHIKESISSMQVGGGNTSKIIDDIRTWLSTAITDQETCIDGLKEAGKHLTLTNEVRYAMSNSTEFTSNSLAIASIVLTVLDDLQIPIHRRLLRVFSDDHSQDHGDLDAGFPIWVHIRDRRFLLEEKPKPNLTVAWDGSGDFKTIKEAVESIPKRSKSQFIIYVKEGLYLENVTIDKNYWNVMIYGDGMNRTIVSARNNKVDGVSTFFSGTFIAAGRGFIAKDMGFRNTAGPQKEQAVALRSSSDQSIFYRCSFDAYQDTLYTHSNRQFYRDCQITGTVDFIFGNAAVVFQNCTIQPRQPLPGQYNTITAQSKSDPNQNTGMSIQRCQMTPLDNLTATTYLGRPWRDYATTVIMQSYMGEFLDPLGWASWEANISTVYYAEFRNFGPGSMTGRRVRWPGVRPNITYEEAEKFAVESFIHGSQWLPQAQVTYDGTI

SEQ ID NO: 22680 - protein, 252 aa, Ricinus communis
MHIRPSWPLLSGRRVQSLLGLSNLKKDNLIGQDSRVLCLRQSMQELVSLVPAHSNSSTQTEHWGMPPLFSLFILFLSLCSAAAKTHSAGAAPQDLVHSSCLHASYPNLCMRTLSSYSGPANTPHDLALAAVEVSLGRASKVSKYLSSLSSGLKTRKERVALSDCVEQISDSVDELSNTLNELKHLRGETFRWQMNNAQTWVSAALTNEETCLDGFEQVQRKVKCDVKRKITNVARVTSNALYMINRLGESRG

SEQ ID NO: 22681 - protein, 521 aa, Ricinus communis
MMDAPLNQSWILSAMAWLAGAGLLFLAKLFISHHHSSLKLPPGPKPWPIIGNLNLIGPLPHRSLHKLAQQYGHIMQLRFGSFPVVVASSAEMAKQILKTNDEIFASRPKFAAGKYTAYNYSNVLWAPYGEYWRQGRKLYLNELFNSKRLQSYEYIRVEEMHNFLSGVHSLSCSGKAVLLKDHLSHYTLSILSRIVLGKKYSSAESESQTNIVTPEEFQEMLDELFSLNGVFHIGDWIPWLDFLDLQGYVKRMKALKIKFDRFHDHVISEHRIKRKGALLEDSAPKNIVDHMLQLADNPDLDIKLNTDSVKGFSQEIIGGGKDTAAAAVEWAMSELMKHPNLVKKATDELDRVVGKQRWVEEKDIPNLPYIDAIMKETMRKHPVGTMLAPRLATKDCKVGGYDILKGSRVVINTWSMGRDPSIWDEPEEFRPERFLDKTIDVKGQSFELLPFGSGRRMCPGYSLGLKMIRSCLANLLHGFNWKLPDNMKPEDLSMDEVYGLATLRKSPLVAVAEPRLPLHLY

SEQ ID NO: 22682 - protein, 347 aa, Ricinus communis
MADSSDSVSIDMETLSLAGKEFLVKTCHGCVSVSVYGDQDKPALITYPDLALNHMSCFQGLFFCPEACSLLLYNFCIYHISPPGHELGAATVSPDDNVLSVDDLADQIADILNYFGLGAVMCMGVTAGAYILTLFAMKYRQRVLGLILISPLCQEPSWTEWLCNKVISNLLYYYGICGVVKEFLLKRYFSKEARGSAQVPESDIVQACRRLLDERQSLNVWRFLEALNGRPDISEGLRKLHCRSLIFVGENSPFHSEALHMTSKLDRRYSALVEVQACGSMVTEEQPHAMLIPMEYFLMGYGMYRPPKLSVSPRSPLSPLCISPELLSPESMGLKLKPIRTRIPVEV

SEQ ID NO: 22683 - protein, 562 aa, Ricinus communis
MKPLDYGRLGPSDQGGAGPSTGLDDHQSQHAMPPQRPHRKKIILLSFFSLALIIASAVSATLLIGLRTRASGKPSPLVARKPTQAISKTCGKTRFPALCVNSLLDFPGSLTASEQDLVHISFNMTLQHFTKALYLSSTISYLQMDTRVRSAFDDCLELLDDSVDALSRSLSAVAPSSGATNGRPQPIGSNQDVVTWLSAALTNHDTCMEGFEELSGSVKDQMAAKLRDLSELVSNCLAIFSASDSDDFSGVPIQNRRRLMDADTSKQNAEGFPSWLGRRERKLLTMPISAIQADIIVSQDGNGTYKTIAEAIKKAPEKNGKGKTVISGGKSVADNMTTFHTASFAATGAGFIARGITFVNWAGPAKHQAVALRVGADHAVVYNCSVVGYQDTLYVHSNRQFFRECDIYGTVDFIFGNAAVVFQNCSIYARKPMPLQKNTITAQNRKDPNQNTGISIHACRILAQSDLEAAKGSFPTYLGRPWKLYSRVVYMLTYMGDHIHPRGWLEWNTTFALDTLYYVIKGKPNCFIVNLALNPSGYAKPNLQIWPASATDMSGVRLNCII

SEQ ID NO: 22684 - protein, 393 aa, Ricinus communis
MATHTSLIAWGAGEDGQLGIGINEEKEWVCVVNALEPYKVRSVVAGSRNSLAICDDGKLFTWGWNQRGTLGHPAETKTENIPSQVKALNNVNIVQAAIGGWHCLAVDDQGRAYAWGGNEYGQCGEEPERKDDTGKTLRRDIVIPQRCAPKLVVRQVAAGGTHSVVLTREGHVWTWGQPWPPGDIKQISVPVRVQGLEKVKLIAVGAFHNLALQEDGTLWAWGNNEYGQLGTGDTQPRSQPIPVQGLSGLTLVDIAAGGWHSTALTDDGEVYGWGRGEHGRLGFGDNDKSSKMVPQKVNLLAGEDIVQLSCGGTHSVALTQDGRMFSFGRGDHGRLGYGKKVTTGQPVEVPTDIPPPKSLSGTEEAEGHWIAKLVACGGRHTLAIVEWKVDESK

SEQ ID NO: 22685 - protein, 432 aa, Ricinus communis
MAQILAPSPQWQMRLPKNSMPASPLTTKMWSSLLLKQNKKVTAKNSGRLRVFALKSENSTINRLEDLLNLDITPYTDRIIAEYIWIGGSGIDVRSKSRTISKPVEHPSELPKWNYDGSSTGQAPGEDSEVILYPQAIFKDPFRGGNNILVICDSYTPAGEPIPTNKRNRAAEIFSSKKVVDEVPWFGIEQEYTLLQPNVKWPLGWPVGAYPGPQGPYYCGAGADKSFGRDISDAHYKACLYAGINISGTNGEVMPGQWEYQVGPSVGIEAGDHIWCSRYILERITEQAGVILTLDPKPIEGDWNGAGCHTNYSTKSMRDEGGYEVIKKAILNLSLRHKEHISAYGEGNERRLTGKHETASIDTFSWGVANRGCSIRVGRDTEKNGKGYLEDRRPASNMDPYVVTSLLAETTILWEPTLEAEALAAQKLSLKV

SEQ ID NO: 22686 - protein, 102 aa, Ricinus communis
MDRVAKLASQKAVVIFSKSSCCMCHAIKRLFYEQGVSPAIYELDEDSRGTEMEWALMRLGCNPSVPAVFIGGKFVGSANTIMTLHLNGSLKKLLKEAGALWL

SEQ ID NO: 22687 - protein, 637 aa, Ricinus communis
MASISIASFSPQALSRPRTQNPNPNPKKPNRNPSSNFKPQKSKYNKFIAQPLTLSGGEATTYTRLPPREDFTLPSIDFKAAEVKLRNSNVAERRNDNEDHRFGSEEEEDDDDIDGELQVDYGRFEVYEVNSDYEGEEEEEDNDIIENGKTVDYYDDRDFYDGEGEGGEEIDIKEKGVPAVMRCFDTAKIYVKAGDGGNGVVAFRREKFVPLGGPSGGDGGRGGNVYVEVEGSMNSLLPFRNRVHFRAGRGSHGQGSMQNGAKGEDVVVKVPPGTVIREAGKAEVLLELLDAGQKALLLPGGRGGRGNAAFKSGTNKVPRIAENGEEGVEMWLELELKLVADVGIVGAPNAGKSTLLSVISAAQPAIANYPFTTLLPNLGVVSFDYDSTMVVADLPGLLEGAHRGFGLGHEFLRHTERCSVLVHVVDGSSQQPEFEFDAVRLELELFSPEIAEKPFIVAYNKMDLPDAYENWSSFMEQLEARGIKTFCMSAVKKEGTRQVICAAYELLRKSKDANQESEGWIDPANLNHVADMVQKQRRSPINDFEIFHESGSNTWQVIGSGLQRFVQMTNWRYADSERRFQHVLEACGVYKTLKKMGVKEGDTVIVGEMEMVWHDSESPDPSNLKRRFESAKWPDLM

SEQ ID NO: 22688 - protein, 112 aa, Ricinus communis
MSGVWVFKNGVVRLVENPGAESLDGSRQGSTARRKVLVHTPSNEIITSYSVLEHKLYSLGWERYYDDPDLLQFHKRSTVHLISLPKDFSKFKSMHMYDIVVKNRNMFEVRDM

SEQ ID NO: 22689 - protein, 1067 aa, Ricinus communis
  misc_feature (1049)..(1049): Xaa can be any naturally occurring amino acid
  unsure (1)..(1067): unsure at all Xaa locations
MNVDDKNIEPSTNLSLALGYSNQCIQRNLSNDPGAGANAASTADITFVATDPLSELVWSPHKGLSLRCADGSFIDKKPSLLPGVGPTYMASGSSSDKPISNTGKLFDNEICIASLPACKLASEISGDNSTTFLTSNVGIMPLSGTGLDKTATGDQVVEMKNAVNYFLQKEDLRNDKAEDETKLDVAQNYRTFEEPIVRATDVNDDHELGMEIVLVSDFHTVKGREDYGIKIQNAACSGKENEEPPSVREKERKNKMVIGRPGIFSLDKLESTAENDLETPFGENSCSMRNKNLASESADRVENNTQHELIPIEYALGYNQSPTSSRLQNIQRQGQSKALSDGDAKERMLNEEDGSHESVESCNSTELFSTGKQRWNFDQQLIVGSKRVKRQIQDSPGSSSLGKQDSSFVNWISNMMKGFLKSSEGEAPFLSSALSNPNYGHENPSQDVFTCNRKEDPACDTRGFQSVFQSLYCRKTKGQETVTLNVNHQTEGSKECDQDNKICDLNAAPIACRMVTGNVYKRFLPSNEKHNEPTSGYHAGMTVHSRDISMSFPVIPESNGSVSTENKNSCNLAIGKEKDGTDSNFSHGKHKTSSAGKIDPELPSEDKTAHGFGYKGDPLGSLWIARFSPKTSGAPFNHYPSNKSTGEAFNCSADSMGLIPQVQNPLGSSSEHEIVEVRNKNFQEPLPIQNYSTANRAPFDFYNVKGNIDNDSGNKLNPILSSARVKTSEAMASVSPRRLDAPKYITPSDDADNSDRASMTCFFCGIKGHDLRECSEVTDTELEDLLRNINIYGGIKELPCVCIRCFQLNHWAVACPSTCPRVRSKAECHASSVSHAGPSKSQLHVINEDDTKAKNVTGSGHAICYGNDYGMDKDMNSWKSNEAATSGKMKLNIRLFEKNISSTSREKELKENQIIPLYGFVNGLISDVPNGIFDAVRSLRLTRTNILKWMNSSASLSIDGYFVRLRLGKWEEGLGGTGYYVARITGMKSKKSIAVNVGGIQCVIESQFVSNHDFLEDELKAWWSATSKVGGKLPSEKELRLKVEEKNTXGGGGGNKIVIENHIVQYQ

SEQ ID NO: 22690 - protein, 386 aa, Ricinus communis
MKSYSKRIALWLQRIEDGASDVTEELGVSINSASAGSKKIVGVFYKANEYASMNPNFSGCAEGALGIRDWLESQGHQYIVTDDKEGPHCELEKHIPDLHVLITTPFHPAYVTAERIKKAKNLQLLLTAGIGSDHIDLKAAAEAGLTVAEVTGSNVVSVAEDELMRILILVRNFLPGYHQVISGDWNVAGIAYRAYDLEGKTVGTVGAGRIGRLLLQRLKPFNCNLLYHDRIKMDPELENQTGAKYEEDLDAMLPKCDIVVINTPLTEKTRGLFNKDRIAKLKKGVLIVNNARGAIMDTQAVADACSSGHIGGYSGDVWYPQPASKDHPWRYMPNQAMTPHISGTTIDAQLRYAAGVKDMLDRYFKGEEFPLQNYIVKEGKLASQYQ

SEQ ID NO: 22691 - protein, 212 aa, Ricinus communis
MDQSGRLLFNPSASSCHGGNMLFLGNCDSVFRGPRSMFKMEDTSKKRPFFSSPEDFFDDEYYDEQLPEKKRRLTSEQVNLLEKSFEEENKLEPERKTQLAKKLGMQPRQVAVWFQNRRARWKTKQLERDYDVLKASYDSLLSDFDNTVKENQKLKSEVVSLTEKLQTKELTGATIPGQEPESLPAVTANASAFELNVKLRTGSALEALEVQW

SEQ ID NO: 22692 - protein, 376 aa, Ricinus communis
MSWIQYQIKQKDGYLAYPPPLSPSPNLLSPPYTTTFHKESTPSSSSSPSSSGTRISPAVLFIIVILAVLFFISGLLHLLVRFLIKHPSSSASSQSNNRYPEISGPDALQRQLQQLFHLHDSGLDQAFIDALPVFQYREIVGLKEPFDCAVCLCEFTEKDKLRLLPVCSHAFHINCIDTWLLSNSTCPLCRGTLFTPGFSIENPMFDFDDLRENDGYPGSGENGFPASQKIMEIEEPAVIEKGVLPVRLGKFRRLTDGTGEAGGETSSSNLDARRCFSMGSYQYVLGDSDLRVALCTDRHARSVKPEKGNDQNGSVLVDGDLEGKKISRVTKRESFSVSKIWLWSKKGKFSSSTDAQMGMPSSLSLDLPWMDRTQEK

SEQ ID NO: 22693 - protein, 560 aa, Ricinus communis
MPNSGATVDLISHEGGFSLQVKNDNKVEIGGHIQDHSVKPSSSSNEGSSNSKEVDVLESAKAEMGEVREENERLKKMLKQVEKDYQSLMLRFFNIFQQETCKKSSDSTPSNHNETEEHELVSLCLGRTPPPCEPKKDEKQSGSNSSKSCREDEELKAKLSLGLDATELVSNPSSGNSLEEVKEDEAGETWPPSKVNPKRSIDDEVAQQSNVKRARVCVRARCDTPTMNDGCQWRKYGQKISKGNPCPRAYYRCTVAPACPVRKQVQRCAEDMSILITTYEGTHNHPLPVTATAMASTTSAAASMLLSGSSSSQPGVTSHATFATPATHDHLNGLNFSLHDNSRTKQFYLANPSSPLFPTITLDLTTSPSSTSSTTPFNRLFSSTSSSRFPSTSLNFSSAESSILPTVWGNGYQSYNSIGSLVSSLGKQNHQMYQPATASQQALTETLTKAITSDPSFRTVIAAAISSVMGSSTGASASPSKGVVAESFGQSLKLGEPNNQANSTINSLTQNGKGSCASSYFNGLSSSTSQMGSLLQSAALPFSIFNSAPTSTNNDKDHKS

SEQ ID NO: 22694 - protein, 169 aa, Ricinus communis
MAKTLSNIVLKSIAGLSAARSSRLVSGSYCHNGMRYSTTVPKDPDTHEDFQPNNKLENSGLSLKDVVEQDVKDNPVMIYMKGVPDLPQCGFSALAVRVLKQYNTPLSARNILENPELKSAVKSFSNWPTFPQIFIKGEFIGGSDIIMDLHQSGELKQKLQDIATNEKSN

SEQ ID NO: 22695 - protein, 331 aa, Ricinus communis
MEAKEEVVSVELPAPSSWKKMYFPKRAGTPRKSEIMFISPTGEEINSRKQLEQYLKSHPGNPPIAEFDWGTGETPRRSARISEKVKATPTPEKEPAKKRGRKSSSGSKKDNKETESAHEKGEYEKEIQMQDADGAGKENEEAGKENDVAKEGLIEKGDKKEEAGQTENADIEETAQKQVNKDTGVQEDAGEDKAGPENLQQAMEVQEQENPEEALKKKSAEEAGSGEGIAENVLQTEVGKENDQGDKMDIPESVPKEANGGAAKENANGAVPVSEEEIKEKPDLQEKDNTPVDGISKTMDGEVTENGKVNQTDRADAPPNPTPPELMIVDF

SEQ ID NO: 22696 - protein, 264 aa, Ricinus communis
MGASLLRMHFHDCFVNGCDASVLLDDISPSFTGEKTAGPNANSLRGFDVIDTIKSQVESICPGVVSCADILAVAARDSVVALGGPSWQVELGRRDSTTASYDAANTDLPSPLMDLSDLISALSRKGFTAKEMVALAGSHTIGQARCLMFRGRLYNETNIDSALATSLKSDCPTTGSDDNLSPLDATSPVIFDNSYFKNLVNNKGLLHSDQQLFSGGSTNSQVKTYSTDPFTFYADFANAMIKMGKLSPLTGTDGQIRTDCRKVN

SEQ ID NO: 22697 - protein, 336 aa, Ricinus communis
MPAKLETRDQRLDQGVFQSSIYSQPWWRGVGNSSTFEESTSKSSSSDHLNGSLSNGPIRSQANLTLDNGANSNKDTQVAVSSQSDGINGQGHHLKQVPSSAPVTMVGHVEPNSQMELVGHSIVLTSYPYSDAQYGGMLPSYAPQAMVTPQLYGMHHARMALPLEMEEEPVYVNAKQFNGILRRRQARAKAEIEKKAIKARKPYLHESRHQHAMRRARGCGGRFLSSKKPESNTKNPASDNDVNSCINASTRSAILTGSEWLQKNGTRNLDSANGEGKGSTDHDMQSHSSSHGNGNGHGLSSIYHPSSGDGLDRGFLVQQRASTHWNGVTNGALPIN

SEQ ID NO: 22698 - protein, 236 aa, Ricinus communis
MSTVCAEQHKLYPSHPLFSPNKSFKDLDIPPRKLLSKKTFQESSPDMLSSPFESHLHKFLPCNDLISSDNNHDQRGSDDQDLDPYSSDHFRMYEFKVRRCTRSRSHDWTDCPFAHPGEKALRRDPRKYHYSGAICPEFRRGGCSRGDSCEFAHGVFECWLHPSRYRTEACKDGKNCKRKVCFFAHSPRQLRILPEVSCGAINKYVPCVTTIVSFLITAFITGETAILKWVFTYLSV

SEQ ID NO: 22699 - protein, 292 aa, Ricinus communis
MAGKQLSRWDSDQFFGFSDQAGSFADIVFGFLEEQEESPKSSCDSNDYLEDDEDDSSSSVEENRKFWETQEELLQATLYRTSSLEMKIRQATKDAVREIKQLGLRCPCHEPATGQCRNFLQREISLRLQAEGYNCAICKSKWKSSHDIPSGEHTFLEVVEKLNSKKGEVRVVIELNFRGEFEMARASQEYNQLINRLPEMFVGKAERLKALLKVLCSAAKKCMKEKKMHLGPWRKHKYMQSKWLGTCERTTSAMDPLPVGFSDRPTKPRASMLTYDMLQNLPVLHCTAVKVL

SEQ ID NO: 22700 - protein, 300 aa, Ricinus communis
MLLCCKLFISESRNRTALDSIERAARLNPETVIVNKFEDRAYNRIRYTLVSYVVLDSIGTAIYSPLQQTVLVMVEAAYGAINLESHCGAHPRLGVVDDIVFHPLSWASLDEASWLAKAVAAEIGSRFQVPVFLYAAAHSTGKALDTIRRELGYYRPNFMGNQWAGWTMPDILLEKPDEGPQQVSRARGITMIGARPWVALYNVPIMSTDVSATRQIARMVSARGGGLPTVQTLGLVHGEDSTEIACMLLEPNQIGADRVQTRVEMLAAQEGLDAEKGYFTDFSPEMIVEKYMNLISASRD

SEQ ID NO: 22701 - protein, 299 aa, Ricinus communis
MLKWTLACCKVYISETRNKAALASIEKAAKLFPQAPIINRFEDATYNRVGYTLVSSLAPKPSSGSCSLRSAVLAMVKAAFEAIDFEQHSGSHPRLGVVDHICFHPLARASLDQVAEIAKSLAVDVGSGLQVPTFLYGAAHQQGRKLDSIRRELGYFKPNSGNQWTGGPKAESLPMKPDEGPTQTNQEKGVVVIGATQWVDNYNIPIFSTDIAAVRRIAKQVSGRGGGLASVQTMALAHGDDIIEVACNLLEPSKVGGERVQQEVERLAEEEGMAVGKGYFTDLSQEKIIESYLKSSPLI

SEQ ID NO: 22702 - protein, 344 aa, Ricinus communis
MGRAPCCDKTGLKKGPWTPDEDHKLISYIHLHGPGNWRTLPKNAGLQRCGKSCRLRWTNYLRPDIRRGRFSFEEEETIIQLHSFLGNKWSAIAARLPGRTDNEIKNYWNTHIRKRFLRNGIDPVTHAPRLDLLDLSSILSSALCNPSFLNLSTLLGTQPFLNPEVLRLASTLQSLKQENPELFLQYLQDDQLLSNLPLQNQVPLSHQFQNQVQESSAPVLSQTQIMQSNAEGFSCQNSQENLLVPSTMTDSFITQPNYIYCNTETAVPDTLPENSIFQSGINGYQNYSTESVMPTPLSSPAPLNSSSTLLNSSSSSTEDERESYCSSLLKFEIPESLDLDEYLL

SEQ ID NO: 22703 - protein, 386 aa, Ricinus communis
MENEGGVSFLSQKKENLAYFFNDGIEMKSFRLCLKWVCLDQSNIWKTGLSWSFFFLLAIGIPIVSHFFLLCSDCDSKHQRPYDAVVQLSLSIFAIVSFLSLSSWSHKYGLSKFLFLDKLDDEAERIRRGYKEQLQKSMKLLCIFVLPCLTAEAAYRIWWYTTGATQIPYFENKYVSDTIACILQLCSWAYRISIYILVCIIYRLICYLQILRLEDFAQVFQMESDVGSILKEHLRIRRNLRVISHRFRRFILLSLVLVTASQLISLLVTTRSTANNNIFEAGELLLCSINLVTGLFICLRSATKITHKAQSITSLAAKWHVCATINSYDDMEGETPTNQSASIRQVFPIDIDWVLDDDDDDGDDDPDSSTKLAFSARVSIPAYINY

SEQ ID NO: 22704 - protein, 596 aa, Ricinus communis
MAISTTNLRTTVNRNLSSFSVASKTHKLSTFSVPLRNSRRNSRFIVLTASLDAKPTVLVTEKLGEAGLNLLKEFANVDCSYNLSPEELCTKISLCDALIVRSGTKVNREVFESSGGRLKVVGRAGVGIDNVDLSAATEHGCLVVNAPTANTVAAAEHGIALLAAMARNVAQADASVKAGKWQRNKYVGVSLVGKTLAVMGFGKVGSEVARRAKGLGMHVIAHDPYAPADRARAIGVELVSFDEAIGTADFISLHMPLTPATSKILNDENFAKMKKGVRIVNVARGGVIDEDALVRAIDAGIVAQAALDVFTEEPPAKDSKLVQHEKVTVTPHLGASTVEAQEGVAIEIAEAVVGALKGELAATAVNAPMVPAEVLTELKPFVMLAEKLGRLAVQLVAGGSGVKTVKVTYGSTRAPDDLDTRLLRAMITKGLIEPISSVFVNLVNADFTAKQRGLRIAEERVTLDGSPESPLEFIQVQIANVESKFASAISESGEIKVEGKVKDGIPHLTKVGSFEVDVSLEGSIILCRQVDQPGMIGKVGSILGEENVNVSFMSVGRIAPRKQAVMAIGVDDQPKKESLKKIGDIPAIEEFVFLKL

SEQ ID NO: 22705 - protein, 278 aa, Ricinus communis
MKVSFGKTRHGFYPILTILQLRGSEQKNKMAAGGSRSTNSQTEVGKEISLPNNNNKRRKNGNKGSDSSDAKEEKAGGAGGGGGGGGESDHEIHIWTERERRKKMRNMFANLHALLPQLPPKADKSTIVDEAVNYIKTLQQTLQKLQKQKLERLQGGAATFCYEPSLVTPQKIADSREAFMADQGSSNNNLSNVTTRSSNNVPSIPRYPVLFQTWTSSNVVLNICGDEAQISICSSKKPGLFTTICYVLEKHNIEMLSAHVSSDSNRNTYMIQAHFKKF

SEQ ID NO: 22706 - protein, 587 aa, Ricinus communis
MSSLPSVRLLSPPLSSHSTRPTRSTRIFAAGPTVVQPVEVQVDAERLEPRVEEKDGYFVLKEKFRQGINPQEKVKIEKEPMKLFMENGIEELAKLSMEEIDQNKLTKDDIDVRLKWLGLFHRRKQQYGRFMMRLKLPNGVTTSEQTRYLASVIRKYGKDGCADVTTRQNWQIRGVVLSDVPDILKGLAEVGLTSLQSGMDNVRNPVGNPLAGIDPEEIVDTRPYTNLLTQFLTSNSQGNPAVSNLPRKWNVCVIGSHDLYEHPHINDLAYMPATKDGRFGFNLLVGGFFSAKRCAEAIPLDAWVSADDVIPVCKAVLEAYRDLGFRGNRQKTRMMWLIDEIGLEGFRSEVERRMPQQKLERASSEDLVQKQWERRDYFGVHPQSQEGFSYVGIHIPVGRVQADDMDELARLADTYGSGELRLTVEQNIIIPNIENSKIEALLQEPLLKHKFSPEPPILMKGLVACTGNEFCGQAIIETKARAMKVTEEVQRLVSVTQPVRMHWTGCPNTCGQVQVADIGFMGCMTRDENGKVCEGVDVFLGGRIGSDSHLGDVYKKSVPCKNLVPLVVDILVNNFGAVPREREELED

SEQ ID NO: 22707 - protein, 664 aa, Ricinus communis
MAGSWRARGAVVSAIVLFGCLFAISIAKEEATKLGTVIGIDLGTTYSCVGVYKNGHVEIIANDQGNRITPSWVAFTDSERLIGEAAKNQAAVNPERTIFDVKRLIGRKFEDKEVQRDMKLVPYKIVNKDGKPYIQVKIKDGETKVFSPEEISAMILTKMKETAEAYLGKKIKDAVVTVPAYFNDAQRQATKDAGVIAGLNVARIINEPTAAAIAYGLDKRGGEKNILVFDLGGGTFDVSILTIDNGVFEVLSTNGDTHLGGEDFDQRIMEYFIKLIKKKHGKDISKDNRALGKLRREAERAKRALSSQHQVRVEIESLFDGVDFSEPLTRARFEELNNDLFRKTMGPVKKAMEDAGLQKNQIDEIVLVGGSTRIPKVQQLLKDYFDGKEPNKGVNPDEAVAYGAAVQGGILSGEGGDETKDILLLDVAPLTLGIETVGGVMTKLIPRNTVIPTKKSQVFTTYQDQQTTVSIQVFEGERSLTKDCRLLGKFDLTSIPPAPRGTPQIEVTFEVDANGILNVKAEDKGTGKSEKITITNDKGRLSQEEIERMVREAEEFAEEDKKVKERIDARNSLETYIYNMKNQISDKDKLADKLESDEKEKIETAVKEALEWLDDNQSAEKEDYEEKLKEVEAVCNPIITAVYQRSGGAPGGGSTEEDDSHDEL

SEQ ID NO: 22708 - protein, 760 aa, Ricinus communis
MEEETLEIRAPLITKDEKIEDYNDTPPSSSANSKQEIYQQLQETEENSPVKQVALTVSTTDDTSLPVLTFRMWFLGAISCILLSFLNQFFWYRTEPLSITAISAQIAVVPLGQLMAAKITDRVFFKGTRCEFTLNPGPFNVKEHVLITIFANSGAGSVYAIHVVTVVKVFYKKHITFFVSFIVIITTQVLGFGWAGIFRRYLVEPAAMWWPANLVQVSLFRALHEKEERPKGGVTRIQFFLIAFICSFAYYFFPGYLFQMLTSLSWICWIFPQSVLAQQLGSGLYGLGIGALGIDWSTISSYLGSPLASPWFATANVAAGFIVVMYFLTPLSYWLNVYKAKTFPIFSDDLFTSTGQEYDISSIIDSNFHLDIAAYEKEGPLYLSTFFAMTYGVGFAALTATIVHVALFHGREVWEQSKASFKETKMDIHTKLMRKYKQVPEWWFLCILLANIAATIFACEYYNEQLQLPWWGVLLACGIAIVFTLPIGIITAITNQTPGLNIITEYVIGYIYPGYPVANMCFKVYGYISMTQAITFLQDFKLGHYMKIPPRTMFMAQIVGTIIACLTYLGTAWWLMETIPDICETTASNSVWTCPSDTVFYDASVIWGLIGPRRIFGDLGTYEAINWFFLGGAIAPILVWLAAKAFPHQEWIRLINMPVLIGATGMMPPATAVNYTSWIIMGFLSGFVVYRYRPDLWQRYNYVLSGSLDAGLAFMGVLIYLCLGIEDISVDWWGNDLDGCPLATCPTAQGVVVDGCPVFS

SEQ ID NO: 22709 - protein, 205 aa, Ricinus communis
MAAASANLIHLSPPPPHAATSCNPHAHGCRWWPYSKSNDFGANTAMILIILLCALICALVLNTAIRCFLRSAAHPPDRLPQTQRELDDHRKPNTEASASPLVVAPTVVYSAGMKLGGAEADCAICLSEFVEGEGIRVLGSCKHGFHVHCIEQWLSCHPSCPTCRRSCLAPGTSVCWPENDLNNASQPPPNQIAQDHNTNTSTRTV

SEQ ID NO: 22710 - protein, 492 aa, Ricinus communis
MGGSVKEVHSKTELDDVRSSGVPVIVHFWASWCDASKHMDQVFSHLSTDFPNAHFLRVEAEEQPEISEEFSVSAVPFFVFFKDGKKVDSLEGADPSSLANKVAKAAGSVKSGEPAAPASLGMAAGPSILETVKELAKDNGPSQVSNKVQPGLNDALEKRLQQLINSHPVMLFMKGSPEAPRCGFSQKIVDILKDEAVKFGSFDILSDNEIREGLKKFSNWPTFPQLYCKGELLGGCDIAIAMHESGELKDVFRDHGVDTNSSEEVKVSEGGNGKGGISESTGLSSTLTSRLESLINSSPVMLFMKGKPDEPKCGFSRKVVDILREEKVNFDSFDILSDDEVRQGLKVYSNWSSYPQLYIKGELIGGSDIVLEMQKSGELKRVLVEKGISPKGTLEDRLRSLVASSHVMLFMKGSPDAPRCGFSSKVVNALREEGVSFGSFDILSDEEVRQGLKVFSNWPTFPQLYYKGELIGGCDIIMELKNNGELKSTLSE

SEQ ID NO: 22711 - protein, 268 aa, Ricinus communis
MAQRRRLHSLTRQVIAIISSNPTQLHHTVKLPSFPSSLSIKTLRSSLIFTNTNATCHSLWSHHHHRNHRYFSSDYGDKSENDETEDDGSDSDGEEVTESDLKREYTLQEKEEEAAAIGYKVIGPLGDSERVIKAYEPVFAVIQIGSHQFKVSNGDCIFTERLKFCDVNDKLILNKVLLVGSQTQTIVGRPMVPDAVVHAIVEEHALDAKVIIFKKKRRKNYRRTKGHRQELTKLRITDIQGIEKAEMKVKTKPRKVAVKKQEEVPTAA

SEQ ID NO: 22712 - protein, 243 aa, Ricinus communis
MLLRSVQIGDLGLRLLWHFVHLLVSLWYLGAGIAQVTESYLISNGLLNRYKTLDVGKLRYLAIVVESEDAYQISEVLQLLQWLEAIGVKHLCLYDSEGVLKKSKKFIIERLPNAIQLEEAVEKDLPLDHKHMTLEFASVSDGKEAIAKAANLLFMNYMKSAKTNIGQEEVITEAHMDEALRTLGYKGTDPDLLLVYGPVRCHLGFPAWRIRYTEIVHMGPLKSMRYGSLIKAIYKFTTVNESG

SEQ ID NO: 22713 - protein, 537 aa, Ricinus communis
MEEGGVEVVLARAIELRLKISNCIHKASTDNVNINGNSVSIEEKQEKERLEESIITVKGDKEKNPNFQSHDVGTLNDGAEEEDDGEAERLLHIRDALESLEHQLSNLQALQQQQRYEREVALSEIEHSRKMLLDKLKEYKGEDLEVILEASAFAGETVEHNNDLLLPPYPSRPPQSLVVDNRHLPYPSTRKSVRNGVITGEAKKNLNHSDSNQADTKSKSLGKGLGHVIGTAAKTVITVLGVISVLSLSGFGPKFGKRNIPFKITGLFQQPENKEKRNRDCPPGRILVLEDGEARCVVKERVAIPFESVVSKPDVNYGSATGIKKYSARDVSNNYIIQRNGPGLLPKRSLQLSWVRRDGSAIELVCRNPKVFTSVERSRGLKVSAFTEEQEALVVKSWNSMKKNAGELGVKFFLKIFEIAPSAKKLFTFLRDSDVPVEQNPKLKPHAMTVFVMTCESAVQLRKAGKVTVKESNLKDLGATHFRYGVVDEHFEVTKFALLETIKEAVPEMWSPDMKNAWAEAYDQLVTAIKNEMKSPS

SEQ ID NO: 22714 - protein, 229 aa, Ricinus communis
MKTGEHKVWVPLVTAAIVSMTKIATRLAFQTPEELTSSTYINSIILPRNTPLPLSYKPLYLITFFPKQVMNTLECKAFTEEQEALVVKSWHVMKKNSAELGLKFFLKIFEIAPSAKKLFSFLRDSNIPVEQNPKLKPHAMSVFIMTCESAVQLRKAGKVTVRESSLKKLGAVHFKYGVVDEHFEVTKFALLETIKEAVPEIWSPEMKNAWAEAYDQLVAAIKTEMKPSS

SEQ ID NO: 22715 - protein, 854 aa, Ricinus communis
MNRNVHIFFSLFLFLLTLNTIPVLSKEPDSYVLACGASNAGTDGDGRKWEPDTKYVKSSGNSIMATADNQDPSLPSTVPYMTGRLFTSAFTYTFPVPAKGRLWVRLHFYPSTYSSLDPNNAYFSVTANKLQLLKNFSASITAKALTMAYIIREYSLSPIESGTLNLTFTPSQDHDDAYAFVNGIEVIPMPEIYQSAGMVGFSDQMIDVTTSSMQTMFRLNVGGQFIPSTNDSGLTRIWYDDTPYLFGAGAGITNQANIKIQYPTQELPKAIAPYDVYSSARSMGPDSKVNMNFNLTWLFDVDANFTYLVRFHFCEYEMTRSNQRAFNIYINNQTAQEGADVIGWAGSKGVPIYKDYAIHVGDQSGDDELWVALHPSVELKPEYYDAILNGLEIFKLNEPDGNMAGPNPVPSAMMQKAEEKKSFKSSGSNGPVIGGIAGGAAGLAIAAIISIFVLRKKRGLTGSQSGSHNWLPLYGHSHTSGSKSTISGKSTASSHLSTLAQGLCRHFSLPEIKQATKNFDESNVIGVGGFGKVYKGIIDQGTKVAVKRSNPSSEQGVNEFQTEIEMLSKLRHKHLVSLIGFCEEDGEMALVYDYMANGTLREHIYKGNKPTSSLSWKQRLEICIGAARGLHYLHTGARYTIIHRDVKTTNILLDEKWVAKVSDFGLSKTGPNLNNQSHVSTVVKGSFGYLDPEYFKRQQLTEKSDVYSFGVVLFEVLCARPALNPNLAKEQVSLADWALHCQKKGIIEDLIDPHIKADIQPECLRKFAETAEKCLSDHGIHRPSMGDVLWNLEFALQLQDNPAGAKLVSENKGLDTYGMNRQMHSIEEESSISEDTDDLNNTEIFSQIVNPRGR

SEQ ID NO: 22716 - protein, 1141 aa, Ricinus communis
MASGGRNSQQQQQQQQQQRYVHQPTTAQSSGTSNLRAHNTESMSKAIAQYTVDAQLHAVFEQSGGSGKSFDYSQSVRTTNQSIAEQQITAYLSKIQRGGHIQPFGCMIAVDEASFRVIAYSENARELLGLMPQSVPSLEKPEILSIGTDVRTLFTQSSALLLEKAFGAREITLLNPLWIHSKNSGKPFYAILHRIDVGIVIDLEPARTEDPALSIAGAVQSQKLAVRAISQLQSLPSGDVRLLCDTVVECVRELTGYDRVMVYKFHEDEHGEVVAENKQPDLEPYIGLHYPATDIPQASRFLFKQSRVRMIVDCHATPVSIIQDEALMQPLCLVGSTLRAPHGCHAQYMANMGSIASLAMAVIINGNDDEAIGGRSSMRLWGLVVCHHTSARSIPFPLRYACEFLMQAFGLQLNMELQLASQLLEKHVLRTQTLLCDMLLRDSPTGIVTQSPSIMDLVKCDGAALYYQGKYYPLGVTPAEAQIKDIVEWLLAFHGDSTGLSTDSLADAGYPGAALLGDAVCGMAVAYITNKDFLFWFRSHTAKEIKWGGAKHHPEDKDDSQRMHPRSSFKAFLEVVKSRSLPWDNAEMDAIHSLQLILRDSFRDAEATNSKAVANAQLRGLELQGMDELSSVAREMVRLIETATAPIFAVDIDGCINGWNAKVAELTGLSVEEAMGKSLVHDLIYKESKETVDQLLRRALRGEEDKNIEIKMRTFGFGHEKKAVFVVVNACSSKDYMNNIVGVCFVGQDITGQKVVMDKFIHIQGDYRAIVHSPNPLIPPIFASDENTCCLEWNTAMEKLTGWAQGEIIGKMLVGEVFGSCCRLKSPDVLTRFMIVLHNAIGGQDTDKFPFSFFDKNGKVVQALLTASKRVNMDGQIIGAFCFLQIASPELQQALKAQRQQEKKGFTRMKELAYICQEIKNPLSGIRFTNSLLEATDLTEDQKQFLETSAACEKQILKIIRDVDLESIEDGSLELEKGEFLLGSVINAVVSQVMLLLRERNLQLIRDIPDEIKTLAVYGDQVRIQQVLADFLLNMVRCAPSSDGWVEIHVHPTLKQITEGLTVMHTEFRMVCPGEGLPPELVQDMFHSSRWTSQEGLGLSMCRKILKLMQGEVQYIRESERCYFLVVLDLPIPRRGSKSAD

SEQ ID NO: 22717 - protein, 471 aa, Ricinus communis
MPAHLGAFEKCRDPALEILEERTILDAVFPNLPIFHKGTQGIYTTYDQQDTIFQDYTSKWSINSCQVLAGKGIASDWETLGLGVEEIERCGMLQALMNLLSLCFRPFGHQQDNCNSNSASSKFESVSREGKDGLLWYRDIGRYGSGEFSMAVVQANQVLEDQTQIESGSFGTFVGVYDGHGGPEASRYVCDHLFRHFQALSAERQGVVSAETIQRAFRATEEGFTSLVSESWTTYPQIATAGTCCLVGVIYQQTLFVANLGDSRVVLGKKVGNTGAIAAIQLSTEHNANLEAIRQELKELHPHDPQIVVLKHGVWRVKGIIQVSRSIGDVYMKHARFNREPINGKFRLPEPMNMPILSANPTIISHPLQPNDSFLIFASDGLWDHLSNEKAVDIVHSHPHAGSAKRLVKAALQEAARKREMRYSDLKKIDRKVRRHFHDDITVIVLFLNHDLISRGTLQIPPVSIRSALEH

SEQ ID NO: 22718 - protein, 406 aa, Ricinus communis
MEWFKTHIRQNLRISLNCHNRTHNNRRRVSVYNIKSKRERDYGKCTRKHMALAEAINNITTCTKTLQCKMAKCLLGFCLMILVLANAFAKTPTTLNETCVDDIGFDLQFNIYQESCPEAEAIIFSWVETAISEDPRMAASLLRLHFHDCFVNGCDASVLLDDSDNFVGEKTAPPNLNSLRGFEVIDDIKSELESVCPETVSCADILATIARDTVVLSGGPSWEVQMGRKDSLSASKAAASNNIPAPNSTMATLIANFQNVGLTLDDMVALSGGHTIGKARCSTFSSRLQQGTRSSNGPDVDLDFIQSLQRLCSESESTTTLAHLDLATPATFDNQYYINLLSGEGLLPSDQALVTDDERSRGLVESYAEDPLLFFDDFKNSMLRMGSLGPLTGNSGEIRRNCRVVN

SEQ ID NO: 22719 - protein, 172 aa, Ricinus communis
MSLPRPTIFEAAAASANATSSSSWNNNNKDTLLSHHKSKLEESDEDLFTVPDVETRPPASSVVNPTTATINKSPQVLPEKRRRGRNPVDKEYRRLKRLLRNRVSAQQARERKKVYVNDLESRAKELQDNNSKLEEKISTLINENAMLRKVLMNTRPKVDQSIDAKHDQLGNS

SEQ ID NO: 22720 - protein, 127 aa, Ricinus communis
MASSVALSNEPPTTKTINQLDNPYQIVRHLASSNAVVLFSMSGCCMCTVAKRLLFGLGVGPTIFELDHHSAGHDIQAVLFQLASEGQQPVPAIFVGGKFLGGIETLMACHINGTLVPLLKDAGALWL

SEQ ID NO: 22721 - protein, 1131 aa, Ricinus communis
MGFQNARERGTTTLSSSAASSMKPFATNSENTATIAQYNADAGLLAEFEQSGVSGKSFNYSRSVLSAPHNVPEEQITAYLSRIQRGGLIQPFGCMVAIEEPTFRIISYSENCFHLLGLSASSVLESNQVKGLIGIDVRALFTPQSGASLSKAAASREISMLNPIWVYSRTSQKPFYAILHRIDVGIVIDLEPARSGDPVLSLAGAVQSQKLAVRAISRLQSLPGGDIGMLCDTVVEDVQKLTGYDRVMVYKFHDDDHGEVLSEIRRSDLEPYLGLHYPATDIPQAARFLFKQNRVRMICDCHANPVRVIQSEELKHPLCLVNSTLRSPHGCHTQYMANMGSIASLVMAVVINGNDSTKLWGLVVCHHTSPRYVPFPLRYACEFLMQAFGLQLYMELQLAAKLVEKKILQTQTLLCDMLLRDAPFGIVTQSPSIMDLVKCDGAALYYRGKCWLLGITPTESQVKDIADWLLNNHGDSTGLTTDSLADAGYPGALLLGDAVCGMATARITSRDFLFWFRSHTAKEIKWGGAKHHPEDKDDGQRMHPRSSFNAFLEVVKSRSMPWEVSEINAIHSLQLIMRDSFQDMEDSASKAMVNAQQTDTDVQGIDELSSVACEMVRLIETATAPIFGVDSAGSVNGWNAKIAELTGLQASEAMGKSLVREVVHKDSYEFVESLLCRALQGEEDKNVELKLRKFGLHQQNSAVFVVANACTSRDYANNVIGVCFVGQDVTSEKIVMDKFLRLQGDYKVIIESLNPLIPPIFASDENACCCEWNAAMERLTGRTRQEVIGKMLPGEIFGGLCRLKDQDTLTKFMILLYRGLSDQDTDKFPFGFFNRQGKFVEVFLTANKRTDADGKTIGCFCFLQVIGPDLQQTLDEHKQEDQESLLKLKQLAYIREEMKSPLSGIRFTHKLLEDTATSEHQKQFLETSDACEKQIMTIIEDIDLAKLEEGKIELKVEEFFLVNVLDAIVSQIMLLLRERSIQLFHEIPEEIKTVSVYGDQIRLQLVLSDFLLSVVRHAPSPDGWVEIKVSSGLKLMQDSHEFLRVQIRMTHPGQGLPSALTEDMFEEGNCWTTQEGLALKLSRKLLHQMNGHVHYTREHNKCFFLIDLELKLKNRQKGGQADTSRMTYLSA

SEQ ID NO: 22722 - protein, 380 aa, Ricinus communis
MELALVSRTPNQSAASFSGGIASFSRISNFAAARKRSDGYNNNNNNNNRRVVQVRCAKASSESSSSEGMKEREGTRRGGFTGSAMEVTTFDRSFTETEFPVWEKIGAVVRLSYGIGIYGGMALAGRFICSITGIDSMGGFNPTLDAVLEGLGYASPPIMALLFILDDEVVKVSPHARAIRDVEDEELRSFFYGMSPWQFMLIVVASSVGEELFYRAAVQGALADIFLRGTDLMADARGMASLTGVLPPFVPFAQAFAAALTAALTGSLYYVAASPKDPTYVIAPVLQSQSGCDDLRKLFAAWYERRQMKKIYSPLLEGLLALYLGFEWIQTNNILAPMITHGIYSAVVLGHGLWKIHDHRRRLRQRIQQLKFDRINSTRK

SEQ ID NO: 22723 - protein, 598 aa, Ricinus communis
MACLEMYKEDKLKPDQDECTLDGTVDWHGQPAMRKKSGKWVAGIIILLNQGLATLAFFGVGVNLVLFLTRVLQQNNADAANNVSKWTGTVYIFSLVGAFLSDSYWGRYKTCAIFQVIFVIGLVFLSLSSYLFLIRPKGCGDELTPCGSHSSMEVGFFYLSIYLVALGNGGYQPNIATFGADQFDEEDPKEGHSKVAFFSYFYLALNLGSLFSNTILGYFEDEGMWALGFWASAGSALAALALFLGGTARYRHFKPTGNPLSRFCQVIIAATKKWSVNMPSDAEDLYDVNGEDCSANGNRRILYTHGFKFLDRAAFISSRDMDEQKQGSQNPWRLCPITQVEEVKCILRLLPIWLCTILYSVVFTQMASLFVEQGAAMKTTVSNFRIPPASMSSFDILSVALFIFLYRRVLDPLISRIRNSKSKGLTELQRMGIGLVIAIMAMVSAGIVECYRLKYANKDCTRCEGSSSLSIFWQVPQYALIGASEVFMYVGQLEFFNAQTPDGLKSFGSALCMTSISLGNYVSSLLVTMVMKISTEDHMPGWIPGNLNKGHLDRFYFLLAGLTTIDLVVYMACARWYKCIKLEGKFDRNNNVEDNSEV

SEQ ID NO: 22724 - protein, 541 aa, Ricinus communis
MNPTDALTRGSGSNNNNNNNNNNNPFDPWWWWNENNKNNCDYFVWLLCCFVALWLQSASSAFARTTLKEKEEEGAEDSVWVVKGSKRIRLIPDFIKDEFLVNPSLPSSYDDIISSSWLHFGRTLWLQCRALFVRLMLPEGYPHSVTSDYLDYSLWRGVQGVASQISGVLATQALLYAIGLGKGAIPTAAAINWVLKDGIGYLSKIVLSKYGRHFDVNPKGWRLFADLLENAAFGLEILTPAFPHLFVFIGAAAGAGRSAAALIQAATRSCFYAGFAAQRNFAEVIAKGEAQGMVSKFIGIMLGIGLANCIGSSIPLALASFSVVTWIHMFCNLKSYQSIQLRTLNPYRASLVFSEYLLSGQAPPIKDVNDEEPLFPAVFPHFKSADKPSLVVLSLEARDAATEIERRLQLGSKLSDVVNSKEDVLALFNLYKDEGYILTEYKGRFCVVLKESCSAQDMLKALFQVNYLYWLERNAGLDARGTSADCRSGGRLQVSLEYMQREFSHVRNDSISVGWVADGLIARPLPNRIYPGDLVASSIVS

SEQ ID NO: 22725 - protein, 562 aa, Ricinus communis
METDKSGSLEKPDHCANTAAVQEEKKMKSSGDDEEVVVAEINKEEGDVNHVINIKQEENIRKRPSSTMNKDLTSINHEDQLRSTKAKIGEVKEENERLKQLLSKILNDYQSLQKHFCKVVQEEEEKKPAKLTTAHQKNQEPELVSLSLGRSSSSEPKKEEKKSSNLSDGNEDDELNNKGLSLGLDCKFEPDSSVTVKNNASSENSFDEDPKEEEPTETWSPNKIRKTTITPDDEAMQQNQIKKTRVSVRARCDTPTMNDGCQWRKYGQKIAKGNPCPRAYYRCTASPTCPVRKQVQRCAKDMSVLITTYEGTHNHPLPLSATAMASTTSAAASMIQSRSSTSAQPGSSISAPSSISTSNGLNFSLSQNSRPQQIYFPNSSISTSNSHPTVTLDLTTAPSTTTAQYFNRFSSAPRCLNFSSSPSSTSLDQSNINTLQSLWNPSSYSTYGTVPLNRNYVEKQPTPGNHHVYQPYMHIINSETTPPPNQQSLTESIAAATKMITSNPNFSNSNGIGCASSYLNKSATSLSSQQGSLVLFPGSLPFSSATRSASESPANSRDHNKG

SEQ ID NO: 22726 - protein, 305 aa, Ricinus communis
MAGDKVSDVSNVMTTVLLQNDTLPCEPVWVPASSATIHGAKSMVNFEDVGGEDTMDAPFFQPLVKEENGDEDYDVFLNPPAKKRRLTATQVQFLERNFEVENKLEPERKIQLAKELGLQPRQVAIWFQNRRARFKNKQLEKDYDSLKASYDKLKADYDNLLKENENLKNEFVSLKDKLLAREKGRENFEPFHAINSVNEEPQNSIPMTVSGKDSNAPIVTPKQEDASSAKSDIFDSDSPHSFLEPADSSNVFEPDQSDFSQDEEDDFGRSFLPLPCFSKLYHDPPANSCNFEFCVDDQPFWSWSY

SEQ ID NO: 22727 - protein, 571 aa, Ricinus communis
MEEEDIYTKDGTVDYRGNPASKKKTGTWRACPFIIGNECCERLAYYGMSSNLVLYFKNILNQSSATATKNNSDWSGTCYTTPLIGAFLADAYFGRYWTIAIFSIIYVIGMTLLALSASIPGIKPKCYAKDDCDPTDAQSAVFFLALYLVALGTGGIKPCVSSYGADQFDDTDENEKKHKGSFFNWFYFSINVGGLIASSVLVYVQMNWSWGWGFGIPAIAMAIAVVSFFSGTKLYRNQKPGGSPFTRLFQVIVASIKKYKIKVPADKALLYEISNDAESNIKGSRRIDHTKDFSFFDKAAVETETDNVKDSVDPWKLCTVTQVEELKSIIRLLPVWATGIIFAAVYSQMSNLFVLQGDQMNKYVGNSSFKIPSASLSVFDTLSVIFWVPIYDRILAPFVRKFTGHKNGFTQLQRMGIGLVISVFAMVSAAVLELTRLQMVRRHNYYELKEVPISVFWQVPQYFLIGCAEVFTFIGQLEFFYQEAPDAMRSLCSALSLTTVALGNYLSSLLVTITMSITARNGKPGWIPDNLNYGHIDYFFWVLAVLSVLNLGAFLFISKWYTYKTPLGTLR

SEQ ID NO: 22728 - protein, 758 aa, Ricinus communis
MKFQIEDVTVYFPYDNIYPEQYSYMIELKRALDAKGHCLLEMPTGTGKTIALLSLITSYSLSKPQSPVKLIYCTRTVHEMEKTLAELKLLHNYQIKHLGPAARILAIGLSSRKNLCVNPRVLAAENRDSVDAGCRKLTASWMRAMAAENPNIPTCEFFENYERAASAAVLPPGVYTLQDLRTYGKEKGWCPYFLARHMVQFANVVVYSYQYLLDPKVAGIISKEMQKESVVVFDEAHNIDNVCIEALSVSVRKQTLEGASRNLSRINQEIERFKATDAGRLRAEYNRLVEGLAQRGNLAVTDTWLSNPALPDDILKEAVPGNIRRAEHFLHVLRRLVQYLKGRLDTENVEKESPVSFVASLNSQAGIDQKTLKFCYDRLHSLMLTLEITDTDEFLHVQTICDFATLVGTYSRGFSIIIEPFDERMPHIPDPVLQLSCHDASLAIKPVFDRFQSVVITSGTLSPIDLYPRLLNFHPVVSRSFTMSLTRDCICPMVLTRGSDQLPVSTKFDMRSDPGVARNYGKLLVEMVSVVPDGIVCFFVSYSYMDGIINSWNETGILKEIMQHKLVFIETQDVVETTLALDNYRRACDCGRGAVFFSVARGKVAEGIDFDRHYGRLVIMFGIPFQYTLSKILLARLEYLRDTFQIKEGDFLTFDALRQAAQCVGRVIRSKADYGMMIFADKRYSRHDKRSKLPGWILSHLRDANLNLSTDMALHIAREFLRKMAQPYDKTGASGRKTLLSQEDLEKMAESGMQDMLY

SEQ ID NO: 22729 - protein, 318 aa, Ricinus communis
MAFSSFFRTIVTLSLLLVVSISNAQLSTNFYSKSCPNLFSTVKPVVQSAINQEKRMGASLVRLFFHDCFVNGCDGSILLDDTSSFTGEQTAVPNRNSVRGFEVIDSIKSAVEKACPGVVSCADILAIAARDSTAILGGPSWNVKLGRRDARTASLSAANNGIPAPTSNLNQLISRFSALGLSTRDLVALSGAHTIGQARCTNFRTRIYNDTNIDSSFAQTRRSNCPSTGGDNNLAPLDLQTPTSFDNNYFKNLLVQKGLLHSDQELFNNGSTDSIVRTYSNGQSTFFSDFVAGMIKMGDISPLTGSQGEIRKNCGKVN

SEQ ID NO: 22730 - protein, 286 aa, Ricinus communis
MAAATNCISLSSLLFTYPHGKEVFLIRKKSTCKFMVSKNCYKMGRINCKLTDSGVEENPTRKHFSLSSNNRMDDYNIAMKRMMRNPYEYHHDLGMNYTLITNNLIVGSQPQKSEDIDHLKHEENVAYILNLQQDSDIEYWGIDLQSIRERCQELGIRHMRRPAKDFDPDSLRSILPKAVSSLEWAISEGKGRVYVHCTAGLGRAPAVTIAYMFWFCDMNLNAAYDELTSQRPCGPNKRSIRGATYDLAKNDPWKEPFENLPEHAFEDIADWERSLIQDRVRALRGT

SEQ ID NO: 22731 - protein, 861 aa, Ricinus communis
MVSRSYVNFLDLASGNLLDIPPTPRSIPRVMTVPGIISDLDGYCSNDGDSEVSSSIYREREIIVANMLPLHAKKDTETNKWCFSRDEDSLLLQLKDGFSPETEVIYVGSLKADIDVNEQEEISQKLLEDFNCVPTFLPQDLQKKFYLGFCKQQLWPIFHYMLPMCPDHGDRFDRIIWQAYVSANKIFADKVMEIISPEEDYVWVHDYHLMLLPTFLRKSYNRVKLGFFLHSPFPSSEIYRTLPVRDEILRGLLNCDLIGFQTFDYARHFLSCCSRMLGLDYESKRGHIGLDYFGRTVYIKILPVGIHMGRLESVMNLPSASAKVKEIQEKFSGRKVILGIDDMDIFKGISLKLLAMEQLLEQNPNLRGQVVLVQIVNPARGSGKDVEEAKRETYLTAKRINEVYGSPEYEPVILIDRPVPRYEKTAYYALAECCIVNAVRDGMNLVPYKYIVCRQGTPYMDKAMGIKSDSPRTSMIVVSEFVGCSPSLSGAIRVNPWDIDAVADALSLAITMRESEKQLRHEKHYRYVSTHDVAYWARSFMQDLERACRDHYNKRCWGIGFGLGFRVVSLSPSFRRLGIDHIVSAYKRTSRRAIFLDYDGTVIPQTSIVKSPSPEVISVLKTLSDDPNNTVFIVSGRGRDSLSEWLDPCERLGIAAEHGYFIRWNKISEWETTPVSDDLDWKNIVEPVMRLYTEATDGSSIEVKDSALVWHHQDADPDFGSCQAKELLDHLENVLANEPAVVKRGQHIVEVKPQGISKGLVAEKVLLNMVNSGNSPDFVLCIGDDKSDEDMFQSILSTVSDPTLPAAPEIFACTVGRKPSKAKYYLDDAADVVKLLQGLATSSCPKPKHIEGGLVAFESVI

SEQ ID NO: 22732 - protein, 374 aa, Ricinus communis
MSRVQSQIMYKGGHLSHYPHSLLSTSSSSSPSLPYNSDYQKQSSSGNKISPAILFIIVILAVIFFISGLLHLLVRFLIKHRSSSSSSVSESNRYPEMSGSDAFQRQLQQLFHLHDSGLDQAFIDALPVFLYKEIMGLKEPFDCAVCLCEYSEKDKLRLLPACSHAFHIDCIDTWLLSNSTCPLCRGTLYTPGLSFENPVFDFEESREEEGLSSNVGNGISVGQKPAENERINSKRVFSVRLGKFKSSNVEVDRVVEGETSSSNLDARRCFSMGSYQYVVADLNLQVALCPGRNVGTGSFKLVKSKNGQNGNTSSNDIGDAEGKKINIRSKGESFSVSKIWQWSRKGKLPSSSDTYMGSSPLAVGLPWSDRTHCT

SEQ ID NO: 22733 - protein, 108 aa, Ricinus communis
MSATPGSGGAGAGGQEEDKKPMDQTAHINLKVKGQDGNEMFFRIKRSTQLRKLITAYCDRQSVEFNSIAFLFDGRRLRGEQTPDELEMEDGDEIDAMLHQTGGGDAHL

SEQ ID NO: 22734 - protein, 903 aa, Ricinus communis
MALNRIWVGFIFLSCLWILGFCKDKDGFLSLSCGGTTNFTDSSNISWVSDSAYISIGNTTTINYIEGTSSFTVPVRFFQDLKGRKCYKLPLTNVSSVVLVRAQFVYKNYDRLGKPPAFSVSLGTAVTSTVNLTINDPWTEEFVWPVNKDTVSFCLHAIPDGGSPVISSLEIRPLPQGAYQSGIGDFPNKPLRKSFRINSGYTNGSLRYPLDPYDRIWDADENYTPFHVSSGFNKLLRFNLSSLSENPPVYVLQTARVLARRDALTYNLDLDTTGDYCIVLYFAGILPVSPSFDVLINGDIVQSNYTVKMSEASALYLTRKEIKSLNITLKSISFYPQINAIEVYEIVEIPLEASSTTVSALQVIQQSTGLDLEWEDDPCSPTPWDHIGCEGSLVTSLELSDVNLRSINPTFGDLLDLKTLDLHNTSLAGEIQNLGSLQHLEKLNLSFNQLTSFGTELDNLVSLQSLDLHNNSLQGTVPDGLGELEDLHLLNLENNKLQGSLPESLNRESLEVRTSGNPCLSFSTMSCNDVSSNPSIETPQVTILAKNKPNKINHMAIIFGAAGGTILALLVISLTVFLYIKKPSTEVTYTDRTAADMRNWNAARIFSYKEIKAATNNFKQVIGRGSFGSVYLGKLSDGKLVAVKVRFDKSQLGADSFINEVHLLSQIRHQNLVGLEGFCYESKQQILVYEYLPGGSLADHLYGPNSQKVCLSWVRRLKISVDAAKGLDYLHNGSEPRIIHRDVKCSNILMDKDMNAKVCDFGLSKQVMQADASHVTTVVKGTAGYLDPEYYSTQQLTEKSDVYSFGVVLLELICGREPLRHSGTPDSFNLVLWAKPYLQAGAFEIVDDNIKGTFDVESMRKAAAVAARSVERDASQRPNIAEVLAELKEAYNIQLSYLAACDM

SEQ ID NO: 22735 - protein, 572 aa, Ricinus communis
MSHYVPDFEMDDDCAIPTSSTLVRPKKSITSTEDEFMELLWHNGQVVVQTQSLKKPQQQHHKYDDAVIPVDQSNPRDVIRTAQEHHNHNNNSNNNNNNNNNTHNSNLFMQEDEMASWLHYPINDTNFDQDFCADLLYPTSAAAACVTSTTTNTTTTTTTNNSFAPVRSLHNPEIRSQQPPVSATATASRPPIPPTRRAQVVQNFAYFSRHRARDGANVAESGPSKVKPVARESTVVDSSETPEGIALDSRISEAAFGRSTSGGDNGGVGGAAAACGASSRGNNNNNNREMTTTCEMTVTSSPGGSSASAEPPQPQRPPADDRKRKGREEETEYYHSEDVEFESADAKKQARGSTSTKRSRAAEVHNLSERRRRDRINEKMRALQELIPRCNKSDKASMLDEAIEYLKSLQLQVQMMSMGCSMVPMMFPGIQQYMPPMGMGMGIGMGMEMGMSRPMMPFPNVLSGAPLPTQAAAAAHLGPRFHMPAFHMPPVPAPDPSRIQAASQSDPMVSAISTQNPNQPRLPNFVDPYQQYLGLQQLQIPVPENQAMAQPSTSKPGANQGAENLDNHQSGT

SEQ ID NO: 22736 - protein, 492 aa, Ricinus communis
MAVSSSSSSLNLAFHGSKGDVFLQSHKLSSIKKSPALFQKLGAKRSELQGDAFLGSKRIILRTCRNKAVQAVLSSDREVEFSEATKNEGLRGKLNKVVLAYSGGLDTSVIVPWLRENYGCEVVCFTADVGQGLKELEGLEEKAKASGACQLVVKDLQEEFVRDYIFPCLRAGAIYERKYLLGTSMARPVIAKAMVDVAKEVGADAVAHGCTGKGNDQVRFELTFFALNPELNVVAPWREWDIKGREDAIEYAKKHNVPVPVTKKSIYSRDRNLWHLSHEGDILEDPANEPKKDMYMMSVDPENAPNQPEYVEIGIVSGLPVSVNGKQLSPASLLSHLNEIGGRHGIGRIDMVENRLVGMKSRGVYETPGGTILFTAARELESLTLDRETMQVKDSLALKYAELVYAGRWFDPLRESMDAFMEKISEKTTGSVTLKLYKGSVSVTSRTSPYSLYRQDISSFESGKIYDQADAAGFIRLYGLPMKVRAMLENGI

SEQ ID NO: 22737 - protein, 397 aa, Ricinus communis
MLSGLMNFLRACFRPRSDRYVHTNSDSSGRQDGLLWYKDHGQHFNGEFSMAVVQANNLLEDQSQLESGSLSLHDSGPFGTFVGVYDGHGGPETSRYINDHLFQHLKRFTTEQQSMSVDVIRKAFQATEEGFLSLVTKQWPMKPQIAAVGSCCLVGVICAGTLYIANLGDSRAVLGRAVKATGEVLSIQLSAEHNVCIESVRQEMQSLHPDDSQIVVLKHNVWRVKGLIQISRSIGDVYLKKAEFNREPLYAKFRLRESFKKPILSADPSISVHQLQPHDQFIIFASDGLWEHLSNQDAVDIVQNHPRNGSAKRLVKAALQEAAKKREMRYSDLKKIDRGVRRHFHDDITVIVVFLDSNLVSRASSVKCANISVRGGGISLPSNTLAPCTTPTEAGST

SEQ ID NO: 22738 - protein, 511 aa, Ricinus communis
METPTWVAYASVWLATVALILLSRRLRRRKLNLPPGPKPWPIIGNLNLIGALPHRSLHSLSQTYGPIMQLKFGSFPVVVGSSVEMAKAILKTHDVAFAGRPKIAAGKYTTYNYSDITWSPYGAYWRQARKMCVMELFSAKRLESYEYIRIEELRLLLKSMFLSSGNPINLKDHLTDLSLNVISRMVLGKKYTVKSENVDEIVTPEEFKEMLDELFLLNGVLDIGDSISWLAFLDLQGYIKRMKTVSKKFDRFLEHVLDEHDARRKRVDNHVAKDMVDVLLQLADDPNLEIKLERNGVKGFTQDLIAGGTESSAVTVEWAISELLRKPEIFGKATEELDRVIGRERWVEEKDIVNLPFIYAIIKETMRLHPVAPMLVPRQCREDTKVAGYDIPEGTRVLVNVWTIGRDPSIWDNPDEFCPERFIGKTIDVKGCDFELLPFGAGRRMCPGYPLGIKVIQASLANLLHGFKWKLPGDMKIEDLNMEEIFGLSTPKKFPLVVVAEPRLPSHVYSL

SEQ ID NO: 22739 - protein, 348 aa, Ricinus communis
MTLLVKINNSHSLLSTMCSSFCPQLPSHLRAIPISSFLTRQSFKAFSVSASVKADGSSTRVGFLGMGIMGTPMTQNLIKAGCDVTVWNRTKSKCDPLISLGAKYRPSPEEVAAASDVTFAMLADPESAVEVACGKNGAAGGMGPGKGYVDVSTVDGGTSKLIGGHIKATGASFLEAPVSGSKKPAEDGQLIFLTAGDKPLYEIVAPFLDIMGKSRFYLGDVGNGAAMKLVVNMIMGSMMATFSEGILLGEKVGLDPNVIVEVVSQGAISAPMYSMKGPSMIKSIYPTAFPLKHQQKDLRLALGLAESVSQPTPIAAAANELYKVAKSHGLSDSDFSAVIEALKVKLQS

SEQ ID NO: 22740 - protein, 331 aa, Ricinus communis
MAQCMSLFLVLTLLGSAPLCLCWKSNGGYLYPQFYDHSCPNAQQIVKSVVAKAVAKEARMAASLLRLHFHDCFVKGCDASILLDSSGSIISEKGSNPNRNSARGFEVIDEIKAAIEKECPETVSCADILALAARDSTVLAGGPSWEVPLGRRDSRGASLSGSNNNIPAPNNTFQTILTKYKLQGLNVVDLVALSGSHTIGNARCTSFRQRLYNQSGNGQPDYTLDQSYAAQLRTNCPRSGGDQNLFFLDFASPTKFDNSYFKNLLASKGLLNSDQVLLTKNEASMELVKNYAENNELFFEQFAKSMIKMGNISPFTGSRGEVRKNCRKINA

SEQ ID NO: 22741 - protein, 443 aa, Ricinus communis
MELSARTLKKQAPIMELALRLSPILPPNKLKISTSSYLSRSCSTTNLFRRRIRTSRRRRSEFGFQVKNNTNTVFFLSNDQQLQKKQQHILVSEGEFDDDDEEEEEEEEEETNTLSLSVKPERNMALLDDYELEELDYASDPNHRSGYVAVVGKPNVGKSTLSNQMIGQKLSIVTDKPQTTRHRILGICSGPDYQMVLYDTPGVIQKQMHKLDSMMMKNVRNAAINADCVLVIVDACKVPEKIDEVLEEGVGSLKDKPPILLVLNKKDLIKPGEIAKKLEWYEKFTDVDEVIPVSAKYGHGVEDIKDWILSKLPFGPAYYPKDIVSEHPERFFVAEIVREKIFMQFRNEVPYACQVNVVSYKSRPTAKDFIQMEIVVEKNSQKIIIIGKEGRALKLLATASRLDIEDFLQKKVYLEIEVKVKDNWRQDEGLLNYYGYGGKIRAL

SEQ ID NO: 22742 - protein, 426 aa, Ricinus communis
MGFDKEASSSSHVLKVPSLPREDTPLLGKKPPRSSQFKTFANVFIAIVGAGVLGLPYTFKKTGWIMGSLMLFSVAFLTYYCMMLLVYTRRKLESYEGFSKIASFGDLGFAVCGPIGRFSVDAMIVLAQAGFCVSYLIFIAHTLAYVFNHQSNEKIMGFLSPKAMYIWGCFPFQLGLNSIPTLTHLAPLSIFADVVDLGAMGVVMVEDVVAYLKYKPALQAFGGFSVFFYGLGVAVYAFEGIGMVLPLESEAKDKDKFGKVLGGCMAFIALLYGGFGILGYFAFGEETKDIITTNLGRGLLSSLVQFGLCVNLFFTFPLMMNPVYEVAERRFCGSSYCLWLRWVVVLLVSLVALLVPNFADFLSLVGSSVCCALGFVLPSLFHLMVFKDELSWKGLAIDTTILVFGVVVALTGTWSSLLEIFVSKSS

SEQ ID NO: 22743 - protein, 325 aa, Ricinus communis
METSTSKFFLSPAKAAAIMLILLLLNTACNAQLNSKFYDKTCAKALSTIRTSIRTAIARERRMAASLIRLHFHDCFVQGCDASILLDETSSMQSEKSALPNKDSARGYEVIDKAKSAVEKICPGVVSCADILAVAARDASAYVGGPSWTVRLGRRDSKTASRTLANRDLPSFRDGLDRLISRFRSKGLSARDMVALSGSHTLGQAQCFTFRERIYSNGTKIEGGFASTRRRRCPAVGGDANLAALDLVTPNSFDNNYFKNLIQKKGLLQSDQVLFSGGSTDSIVLEYSKNRETFNSDFATAMVKMGNLINPSRGEIRRICSAVNK

SEQ ID NO: 22744 - protein, 325 aa, Ricinus communis
MATPVPDVLVSPAKAVGVMFMLLLLMSSACQAQLTSRFYDNSCPNALSTIRTSIRNSIAAERRMAASLIRLHFHDCFVQGCDASILLDETPTIESEKTALPNKDSARGYGVIDKAKSAVEKICPGIVSCADILAVAARDASAYVGGPSWTVMLGRKDSTTASRTLANSELPSFKDGLDRLIYRFQSKGLSARDMVALSGSHTLGQAQCFTFRDRIYTNSTSIDAGFASTRRRGCPAVGGDAKLAALDLVTPNSFDNNYFKNLIQKKGLLESDQVLFSGGSTDSIVSEYSRSPAAFSSDFASAMIKMGNIINGNAGQIRKICSAVN

SEQ ID NO: 22745 - protein, 325 aa, Ricinus communis
MVTSASKFFLSPAKAAAIMFMLLLLNPACQAQLSSKFYDKTCPKALTTIRTSIKTAIARERRMAASLIRLHFHDCFVQGCDASILLDETSSIQSEKSALPNKDSARGYEVIDTAKSAVEKICPGVVSCADILAVAARDASAYVGGPSWTVRLGRRDSKTASRTLANRDLPSFRDGLDRLISRFRSKGLSARDMVALSGSHTLGQAQCFTFRERIYSNGTKIEAGFASTRRRRCPAIGGDANLAALDLVTPNSFDNNYFKNLIQKKGLLQSDQVLFSGGSTDSIVLEYSKNRETFNSDFATAMVKMGNLINPSRGEIRRICSAVNK

SEQ ID NO: 22746 - protein, 326 aa, Ricinus communis
MATSVSKILLSPAKAATFLFTLLILGTACHAQLTSTFYDSLCPNALSTIRTSIRNSIAAERRMAASLIRLHFHDCFIQGCDASVLLDETSTIESEKTALPNKDSARGYEVIDKAKTEVEKICPGVVSCADILSVAARDSSAYVGGPSWTVMLGRRDSTTASRTLANSELPSFKDGLDRLISRFQSKGLSARDMVALSGAHTLGQAQCFTFRDRIYSNGTEIDAGFASTRKRSCPAVGGDANLAPLDLVTPNSFDNNYFKNLMQRKGLLESDQILLSGGSTDSIVSGYSRSPSTFSSDFASAMIKMGNIDPLTGTAGQIRRICSAIN

SEQ ID NO: 22747 - protein, 323 aa, Ricinus communis
MELPVPSNTLASKAAAFLFMFLLVNIACQAQLTSTFYANSCPNALSTIRTSIRNSIAADRRMAASLIRLHFHDCFVQGCDASILLDETPTIDSEKNALPNKDSARGYGVIGKAKSEVEKICPGVVSCADILAVAARDASAYVGGPSWTVMLGRKDSTTASRTLANTELPSFKDGLDRLISSFQIKGLSARDMVALSGAHTLGQAQCFTFRDRIYSNGPDIDAGFASTRRRGCPAIGDDANLAALDLVTPNSFDNNYFKNLIQKKGLLESDQILFSGGSTDSIVLEYSRSPATFNSDFASAMIKMGNILNANAGQIRKICSAVN

SEQ ID NO: 22748 - protein, 182 aa, Ricinus communis
MASKSILVSCVVIRLLTLGALAAAIVVLVTNQFRSNIDNSKTIFTDVIAYRFVFAASALGCLYTLIQLPFALYYAYKEKRLIQNDFLPNLDFYGDKMVAIVLACGAGAGLAVTLELKGILKEYYNDFSDIPGIDEQRSKSIRFLNRGYIASGLLLLGCACMVILSVFSSINRTSTKKSGFFG

SEQ ID NO: 22749 - protein, 224 aa, Ricinus communis
MDSSFFHYQNSQYSPDQSSSNSLNSSDSFYCQQPLPFNENDSEEMLLLGVINEAPISSFDTISSSNAINNYEEVTSTGGYYQEEPTHQEIAYRGVRKRPWGKYAAEIRDSTRNGVRVWLGTFDTAEAAALAYDQAAFAMRGSMAILNFPMEKVYESLQEMNYEFKEGCSPVLAMKKKHSMKRKAESKKTKGNKELRMENVVVLEDLGADYLEELLTISETVSPW

SEQ ID NO: 22750 - protein, 198 aa, Ricinus communis
MDLASSSANPTFSSPIMGGGTITTNTATNAITSPTTTTSPASTPSRYENQKRRDWNTFCQYLRNHRPPLSLPMCSGAHVLEFLRYLDQFGKTKVHNQTCPFFGIPNPPAPCPCPLRQAWGSLDALIGRLRAAYEEHGGRPEGNPFGARAVRIYLREVRDFQAKARGVSYEKKRKRPKPKTTSTPVPPAAPPPPDSVAG

SEQ ID NO: 22751 - protein, 173 aa, Ricinus communis
MVFTSQNELPFNENDSQDMVIYQMINEGATAPNNSNMPPRSQINSSHMFPPAKVIAKKHYRGVRRRPWGKYAAEIRDSARHGARVWLGTFETAEEAALAYDRAAFRMRGAKALLNFPAEVVAATSAGFKPNLNLSTTLSRNNFESSGSSSSSVSVSTSQSETESSTTGIGLLG

SEQ ID NO: 22752 - protein, 589 aa, Ricinus communis
MDAANQVGSISHPSSISPPVRGNACSGTLGGHLARRLVEIGVKDVFSVPGDFNLTLLDHLIAEPELNLIGCCNELNAGYAADGYARSRGVGACVVTFTVGGLSVINAIAGAYSENLPVICIVGGPNSNDYGTNRILHHTIGLPDFSQELRCFQPVTCIQAVVNNLNDAHEQIDTAISTALKENKPAYISISCNLPGIPHPTFGREPVPFFLAPSVSNQLGLEAAVEATAEFLNKAVKPVIVGGPKLRAVKAQKAFLELADASGYPVAVMPSGKGLVPEHHPHFIGTYWGAVSTSFCGEIVESADAYIFVGPIFNDYSSVGYSLLIKKEKLITVQPNRVTIGNGPSFGWVFMADFLSALSKKLKRNSTAMENYRRIFVPSGVPLKSEKDEPLRVNVLFKHIQAILSGETAVIAETGDSWFNCQKLHLPENCGYEFQMQYGSIGWSVGATLGYAQAARNKRVIACIGDGSFQVTAQDISTMIRSGQRSIIFLINNGGYTIEVEIHDGPYNVIKNWNYTGLVNAIHNGEGKCWTAKVHTEEELTEAIATAMGEQKDSLCFIEVLVHKDDTSKELLEWGSRVSSANGRPPNPQ

SEQ ID NO: 22753 - protein, 191 aa, Ricinus communis
MKKCELCKYPAKTYCEFDEASLCWGCDAKVHGANFLVARHTRTLLCRSCQSLTPWKASGSRLGCIVSVCDVCANDANRKEDEKEEESEAALDSVGDGDNQVVPWPSSTALPPPASSSSRTSSQQFCASDTIKSLKRTREGPTDLRYPLQEDGMTGAGGGGSGGDEEVNSVVDYSLKERRIEANNGKIIKRF

SEQ ID NO: 22754 - protein, 402 aa, Ricinus communis
MAPTDSLKPRDVCIVGVARTPMGGFLGSLSSLSATKLGSIAIHCALERARVDPSLVEEVFFGNVLSANLGQAPARQAALGAGIPNSVICTTINKVCASGMKATMLAAQTIQAGINDIVVAGGMESMSNAPKYLAEARNGSRLGHDTIIDGMLKDGLWDVYNDFGMGVCAELCADRHTITREEQDSYAIRSFERGISAQNDGLFSWEIVPVEVSGGRGRLSTIIDKDEGLGKFDAAKLRKLRPSFKEKDGSVTAGNASSISDGAAALVLVSGEMAIKLGLQVIARIKGYGDAAQAPELFTTAPALAIPKAISNAGLDKSQIDYYEINEAFSVVALANQKLLGLNPEKVNAHGGAVSLGHPLGCSGARILVTLLGVLRHKNGKYGVAGICNGGGGASALVLELM

SEQ ID NO: 22755 - protein, 489 aa, Ricinus communis
MASPAPPNPVPIGYQGGSAAVPVWLNKGDNSWQMISATLVGLQSVPGLVILYGSIVKKKWAVNSAFMALYAFAAVVICWVTWAYKMSFGDKLLPFWGKAGPALGQKFLIEQAALPATTHYYNNGEVETAMATPFYPMASMVWFQCVFAAITLILLGGSVLGRMNIKAWMAFVPLWLTFSYTVGAFSLWGGGFLFHWGVIDYSGGYVIHLSSGIAGLTTAFWVGPRSTKDRERFPPNNVILMLAGAGLLWMGWAGFNGGDPYSANVDSSMAVLNTNICAATSLLVWTWLDVIFFNKPSVIGAVQGMITGLVCITPGAGLVQGWAAIIMGILSGSVPWFTMMIVHKRWTLLQKIDDTLGVFHTHAVAGLLGGVLTGLFAEPQLCLLFLPVTNSRGGVYGGSGGVQILKQLVGGAFIIGWNIIITSVICVAINLVIPLRMSEEQLLIGDDAVHGEEAYALWGDGEKYDSTKHGMYSDDTLHHKTPTGATQVV

SEQ ID NO: 22756 - protein, 197 aa, Ricinus communis
MRPAYVFFVLLFLSWAANAISWGSKTNGDTYVRDACSVTRYQDLCLHSLSSFSQVAKRSPSIWARAGVSVTIGEAKNITQYLNILKRNKIMKGRNRIALSDCIESFSDTIDNLHKSLGILRKLDAASFDVQMGDVITWMSAALTDEETCLDGFQEQKTISRQARVLLNRVSRITYLTSNALALVNKLASTGLGSLTN

SEQ ID NO: 22757 - protein, 557 aa, Ricinus communis
MYIPRGRSKFLLTLLPISALYLIILLATPHFKNSEEIPHLHIQKHNQIAHSACEGTLYPELCVSTLSSLPDLTYRSLQQLISSTISRTMYEVRVSYSNCSGIKNKLRKLNKIERVALNDCLELFTETMDELNVAISDLTSRKSVSQHHHDLQTLLSGAMTNQYTCLDGFAYSRGRVRKTIKNSLYNISRHVSNSLAMLKKIPGVNASKESEAFPEYGEVKHGFPSWLSSKDLELLQAPLNATKFDLVVAKDGTGNFSTISQAVAAAPNSSLTRFVIYIKEGAYFENVDVDKKKTNLMFIGDGIGKTVVKANRSVVGGWTTFRSATVAVVGNGFVAKGITFENSAGPDMHQAVALRSGSDLSAFYQCSFVGYQDTLYVHSLRQFYRECDIYGTVDFIFGNAAVVFQNCSIYARKPNSNQQNIFTAQGREDPNQNTGISIMNSKVTAAADLIPVKKSFKTYLGRPWKEYSRTVFLRSYIDDVVDPVGWLEWNGAFALSTLYYGEYMNRGPGSNTSARVTWPGYRVINSTTEASQFTVRPFIQGSEWLNATGIPFFLGLS

SEQ ID NO: 22758 - protein, 535 aa, Ricinus communis
MRACSENEMRKTLNWWDIFCFGIGSILGAGVFVLTGEAARNDAGPAVIISYLVSGISAMLSVLCYSEFATELPVAGGSFSYLRVELGDFVAYIAAGNILFEYIVSGAAVSRSWTSYFATLCNHDPNSFRIHAASLAENFNYLDPIAVVVSFLVCVGACWSIKGSSRFNSITTVIHIFVLAFILIAGLTKANPANYAPFAPFGVRGILKASSMLFFAYVGFDGVATLGEEIKNPGRDIPIGLIGSMSVIVLVYGLLAATLSLMQPYTQIDADAPFTMAFQAAGMNWAKYIVALGSLKGMTTVLLANVIGQSRYFTHIGRTHMAPPILAAVSGKTGTPVNATVVMTIANSCVAFFTSLDVLSNLLSISTLFIFTLVALALLVRRYYVANETSDSNRKKLIGLLVLIIGSSVGSSAYWALTDGWIGYVITVPVWFFSTLGLQLTLKQARKPKLWGTPLVPWLPSASIAVNVFIMGSIDGASFIRFSIWTVLLLFYYLFVALHASYDAAKEMERRVDAAKEMERRVDAATKIEAGISTG

SEQ ID NO: 22759 - protein, 1057 aa, Ricinus communis
MIVKKTMKVEMPNLKRCKVKKPSISEYEEEDYECLLIPKKRKTNGFDSYSIGMYTEIDDYSSGSGSWIGEGSYWAGEVQSNSKRLKRPPVSRSSRGRLQMLPSRFSDSVVDMWKNEECRAGDTDFSLEDDADGFVEDKEDFINVKRCRYTEKEFVKNKFGFGSCNSNSYSFYEEEGNGGIGGVGFNNFQYKNYNVNNLRSHDYVPGFRYSGAQKLRSEGAGNKKKKDVYKPEDFALGDLVWAKCGKRYPWWPGIVIDPILEAPEAVLSCCLPGALCVMFYGYSKNGTRRDYAWVKQGMLFPFAEFMDRFQGQTQLYNCKMSDFQMALEEAILAENGFLETRVSAAHMALSEANLNGFQEASGSSQDQEFYGQYQASIPRNYFSRILLFLNASYKDMRCCDSCNLILPCKTIKRKASVFQTELICKHCAKLRKSKQYCGICKKIWHHSDGGNWVCCDGCNVWVHAECDNISRKLFKDLENFDYYCPDCRVKFKFDSNYFERIKLHVKSIVNNGQATPPDEITVVCNGMEGTYIPKLHLIVCKCGSCGSRKQTPSEWERHTGCRAKKWKHSVKVKDTMLPLEKWLLQIAEYNTHGVDTLILDKQKLLAFLQEKYDPVYAKWTTERCAVCRWVEDWDVNKIIICNRCQIAVHQECYGVKNIQDLTSWVCRACETPDVMRECCLCPVKGGALKPSDIEMLWVHVTCAWFRPEVAFLNHEKMEPATGIFRIPSTTFLKSCVICSQTHGSCIQCCKCATYFHAMCASRAGYFMELHCIEKNGIQVTKKLAYCAVHRTPSVDSVVVVRSPTGVFAARSLLQKQNGCFGGSRLISYQGMEGLPEPSTSETNEFEPLSSARCRAYKRTNKKRAEGEPIFHRLMGLRHHSLDAISSLSTHKEMDDSLVFSSFKERLCHLQKTECHRVCFGKSGIHGWGLFARRNIQEGEMVIEYRGEQVRRSIADLRESRYRLEGKDCYLFKISEEVVIDATNKGNIARLINHSCMPNCYARIMSVGDVENRIVLIAKTNVSAADELTYDYLFDPDEHDDLKVPCLCRAPNCRKFMN

SEQ ID NO: 22760 - protein, 2158 aa, Ricinus communis
MEGDEHEIVLACAISGTLFTVLGLASFWILWAVNWRPWRIYSWIFARKWPYIFQGPQLGIVCRFLSLLAWMIVISPIVVLVMWGSWLIVILDRHIIGLAVIMAGTALLLAFYSIMLWWRTQWQSSRAVAILLFLAVALLCAYELCAVYVTAGKDASERYSPSGFFFGVSAIALAINMLFICRMVFNGNSLDVDEYVRRAYKFAYSDCIEMGPMPCLPEPPDPNELYPRQSSRASHLGLLYLGSLMVLLVYSILYGLTAKEVRWLGAVTSTAVIILDWNMGACLYGFELLQSRVVALFVAGASRVFLICFGVHYWYLGHCISYAVVASVLLGAAVSRHLSVTNPLAARRDALQSTVIRLREGFRRKEQNTSSSSSEGCGSSVKRSSSVEAGNLGNIVESGSQCTAQCTLDANNWTNAVLCRTVSCHEGINSDNSIDSGRPSLALRSSSCRSVVQEPEAGTSGDKHFDHNNSLVVCSSSGLDSQGCESSTSVSANQQLLDLNIALALQDRLNDPRITSLLKKRARQGDKELTSLLQDKGLDPNFAMMLKEKNLDPTILALLQRSSLDADRDHRENTDITIVDSNSFDNALPNQISLSEELRLHGLEKWLQLSRFVLHHIAGTPERAWVLFSFIFILETIAVAIFRPKTIKIINATHQQFEFGFAVLLLSPVVCSIMAFLRSLQAEDMAMTSKPRKYGFIAWLLSTCVGLLLSFLSKSSVLLGLSLTVPLMVACLSVTFPIWARNGYQFWVSRVQSTAHAGNHRPSGTKEGIVLIICVVVFTGSVLALGAIVSVKPLDDLEYKGWASDPRGLSSPYASSVYLGWAMASAIALVVTGVLPIISWFATYRFSLSSAVCVGIFTVVLVAFCGVSYVEVVKSRDDQVPTKGDFLAALLPLVCIPALLSLCSGLLKWKDDGWKLSRGVYVFVIIGLLLLLGAISAVIVVVNPWTIGVAFLLVLLLIVLAIGVIHHWASNNFYLTRTQMFFVCFLAFLLGLAAFLVGWFQGKPFVGASVGYFTFLFLLAGRALTVLLSPPIVVYSPRVLPVYVYDAHADCGKNVSVAFLVLYGIALATEGWGVVASLKIYPPFAGAAVSAITLVVAFGFAVSRPCLTLEAMEDAVHFLSKDTIVQAIARSATKTRNALSGTYSAPQRSASSTALLVGDPTATRDKAGNLVLPRDDVVKLRDRLRNEELVVGSFFSRMRYRTFCHESASDFDNRREMCAHARILALEEAIDTEWVYMWDRFGGYLLLLLGLTAKAERVQDEVRLRLFLDSIGFSDLSAKKIKKWMPEDRRQFEIIQESYLREKEMEEEILMQRREEEGRGKERRKALLEKEERKWKEIEASLISSIPNAGSREAAAMAAAVRAVGSDSVLSDSFARERVSSIARRIRTAQLARRALQTGIAGAICILDDEPTTSGRNCGEIDPSICQTQKVSFSIAVMIQPESGPVCLLGTEFQKKVCWEILVAGAEQGIEAGQVGLRLITKGDRQTTVAKEWSISATSIADGRWHIVTMTIDADLGEATCYLDGGFDGFQTGLPLSVGNSIWELGTEVWVGFRPPTDVDAFGRSDSEGAESKMHIMDVFLWGRCLTEDEIASLHTAIGSTELGMVDFPEDNWQWADSPPRVDEWDSDPADVDLYDRDDVDWDGQYSSGRKRRSDREVVVDVDSFARRFRKPRVETQEEINQRMLSVELAVKEALFARGETHFTDQEFPPNDQSLYLDPENPPLKLQVVSEWMRPGEIVMENRPDSCPCLFSGSANPSDVCQGRLGDCWFLSAVAVLTEVSQISEVIITPEYNEEGIYTVRFCIQGEWVPVVVDDWIPCESPGKPAFATSRKGNELWVSILEKAYAKLHGSYEALEGGLVQDALVDLTGGAGEEIDMRSAQAQIDLASGRLWSQLLRFKQEGFLLGAGSPSGSDVHISSSGIVQGHAYSLLQVREVDGHKLVQIRNPWANEVEWNGPWSDSSSEWTDRMKYKLKHVPQSKDGIFWMSWQDFQIHFRSIYVCRVYPPEMRYSVHGQWRGYSAGGCQDYASWNQNPQFRLRATGPDASLPIHVFITLTQGVSFSRTAAGFRNYQSSHDSMMFYIGMRILKTRGRRASYNIYLHESVGGTDYVNSREISCEMVLDPDPKGYTIVPTTIHPGEEAPFVLSVFTKASITLEAL

SEQ ID NO: 22761 - protein, 665 aa, Ricinus communis
MASSAFFCNSINPSTSVFSRTHFSFPIFSTSTVEFSSFAQYNFHFKTKKSDHQNKRFTQVKAVVTESPTVAESNGKLSEQKKLRILVAGGGIGGLVFALAAKRKGFEVLVFEKDLSAIRGEGQYRGPIQVQSNALAALEAIDLEVAEEVMRAGCITGDRINGLVDGVSGTWYCKFDTFTPAAERGLPVTRVISRMTLQQILACAVGEDVIMNASNVINFQDNEDKVTVTLENGQQFEGDLLVGADGIWSKVRKNLFGPKEATYSGYTCYTGIADFVPVDIESVGYRVFLGHKQYFVSSDVGAGKMQWYAFHNEPPGGVDSPNGKKERLLKIFEGWCDNVIDLLHATDEDAILRRDIYDREPVFTWGKGRVTLLGDSIHAMQPNMGQGGCMAIEDSYQLALELDKAWKQSIESGTPVDVVSSLKSYERTRRLRVAIIHGMARMAAIMASTYKAYLGVGLGPLSFLTKYRIPHPGRVGGRFFIDIAMPVMLNWVLGGNSSKLEGRPLSCRLSDKASDQLQTWFEDDNALERALNGEWFLLPFGDDAVQEPICLSRDENIPCMVGSESQEDFPGKSIVISSPQVSKMHARISYKDGGFYVIDLQSEHGTFITDNDGRRSRVPPNFPTLFHPSEAIEFGSAGKAKFRVKVMKSPAKIKEKGGNEILQSV

SEQ ID NO: 22762 - protein, 326 aa, Ricinus communis
MAALHLSFLSQSPPSLQFKSSSLDLQLSTYPAAPTLRFPSIHNRRRRCCWRSLHLVNATLSAAVETIDGTASREKTPLLEVKDLTAVIAESKQEILKGVNLVVHEGEVHAVMGKNGSGKSTFSKVLVGHPDYEVTGGSVVFKGENLLDMEPEERSLAGLFMSFQSPVEIPGVNNIDFLNMAYNARRKKLGLPELGPIEFYAYLFPKLELVNMKSDFLNRNVNEGFSGGEKKRNEILQLAVLGADLAILDEIDSGLDIDALKDVAKAVNGILTPKNSVLMITHYLRLLEFIHPTYIHIMEDGRIVKTGDISIAKVLEKEGYKAITPS

SEQ ID NO: 22763 - protein, 431 aa, Ricinus communis
MYSNFKEQAIEYVRQAVQEDNAGNYAKAFPLYMNALEYFKTHLKYEKNPKIREAITQKFTEYLRRAEEIRAVLDEGGPGPASNGDAAVATRPKTKPKDGEDGEDPEQTKLRAGLNSAIIREKPNVNWNDVAGLESAKQALQEAVILPVKFPQFFTGKRRPWRAFLLYGPPGTGKSYLAKAVATEADSTFFSISSSDLVSKWMGESEKLVSNLFQMARESQPSIIFIDEIDSLCGQRGEGNESEASRRIKTELLVQMQGVGNNDQKVLVLAATNTPYALDQAIRRRFDKRIYIPLPDLKARQHMFKVHLGDTPHNLTESDFESLARRTEGFSGSDISVCVKDVLFEPVRKTQDAMFFIKTPNDMWVPCGPKQPGAVQISMQELAAQGLAAKILPPPITKTDFDKVLARQRPTVSKSDLEVHERFTKEFGEEG

SEQ ID NO: 22764 - protein, 679 aa, Ricinus communis
  misc_feature (246)..(247): Xaa can be any naturally occurring amino acid
  unsure (1)..(679): unsure at all Xaa locations
MATYFHGNPEIQAAAAEGLQTLVLMNPTYVQYSDTPPPQPSSNLVFLNSAASNLTPPPHFSHAPPSTQQFVGIPLDPNSHDTSTLHGLVPRIHYNLYNPIDPASAAREIPRAQQGLSLSLSSQQQPGYGSQAQAVSGEDMRVSGGSVSSGSGVTNGVSGIQGVLLSSKYLKAAQELLDEVVNVNNNGLKSELSKKGNNGIISNNSNKALGESSAGEGSAGGGGDSGAGGKRGAELSTAERQEIQMXXKAKLISMLDEVEQRYRQYHHQMQIVISSFEQAAGIGSAKTYTALALQTISKQFRCLKDAITGQIKAANKSLGEEDCLGGKLEGSRLKFVDHHLRQQRALQQLGMIQHNAWRPQRGLPERSVSVLRAWLFEHFLHPYPKDSDKHMLAKQTGLTRSQVSNWFINARVRLWKPMVEEMYLEEIKEQERNGSDDKTSKSEQNENAAPKSVLQEKGSAVENQTKSFKSLDGSPNHNAPSAVSVSTASTSPIGGNVRNQSGFSLIGSSELEGITQGSPKRHRSTEMIQSPTSVPSINMDIKPGEMNNDQISMKFGSERQNRDGYSFIGGQTNFIGGFGQYPIGDLGRFDTEQFTPRFSGNGVSLTLGLPHCENLSMSGTHESFLPSQNIQLGRRVEISEPNEFGGINTSTPHSSTAYESINIQNRKRFAAQLLPDFVA

SEQ ID NO: 22765 - protein, 403 aa, Ricinus communis
MDDIEIPQYFICPISLQIMKDPVTIITGITYDRDSIEQWLFTTKNTICPVTKQSLPKDFDLTPNHTLRRLIQAWCIDNASSGIDRIPTPKPCLDKFHLLKLIKDLHLPRLQMKTLVQLELLAAENDRNRKYMAETGVPKALLLFIVTCFKKGRFDGIQEAVSILRLIRIPPQESRALLSENDQIIESLTWVLRWCSSDNHITIKSHAVSVLKMVSEDASSSVLERLKPEFFETIVGVIREKITQQGINAALKVLSHACPWGRNRIMMVDAGAVFELIELEWRYPEKKTTELILGILFHLCSCADGRAKFLSHRGGIAVVAKRILKVSPAADDRAVLILSLICKFSGTSMVLQEMLNVKAVSKLCMMLQADCAVYLKDKAREILRLHSDEWKNSPCIDASFLTG

SEQ ID NO: 22766 - protein, 413 aa, Ricinus communis
MEDIDVPSFFLCPISLQLMTDPVTVPTGITYDRQSIEKWLFAGKNHTCPVTKQLISDCDLTPNLTLMRLIQSWCTLNASHGVERIPTPKPPISKQQIAKLLKDAKSPQQQLKCLRKLRSIANVNDTNKRCMEAAGAVEFLASIVNNFTSLSFEESSLDGAGIEIARLSDEALSILYSLQLSESGLRNLIGKNGEVIQSLTRVMQNGNYESRAYAVLLLKSALEVADPMQLVSLRPELFVEIVQVLSDQISHQASKAALQLLINLCPWGRSRLKATEAKAVSTLIDLLLDSSEKRTCEMALAVLDLLCQCAEGRAELLKHGAGLAVVSKKILRVSQVASEKAVRILLSISKFSATSTVLHEMLQIGVVAKLCLVLQVDCGSKGKDKAREVLKLHARAWKNSPCIPANLLSSYPA

SEQ ID NO: 22767 - protein, 449 aa, Ricinus communis
MVGMKSVSRKVGKYEVGRTIGEGTFAKVKFAQNLETGESVAMKVMAKSTILKHRMVDQIKREISIMKIVRHNNIVRLHEVLASRTKIYIILEFVTGGELFDKIVHQGRLSENEARRYFQQLIDAVAHCHSKGVYHRDLKPENLLLDSFGNLKVSDFGLSALPQQGVGLLHTTCGTPNYVAPEVIGHQGYDGAAADVWSCGVILYVLMAGYLPFDEVDLPTLYRKINAAEYSSPFWFSPGAKSLIDKILDPNPKTRIKIEGIKKHLWFRKNYMPVKQSEEEEVNLDDVHAVFGDIEDQYVAEQTENSEGGPLIMNAFEMITLSQGLNLSALFDRQQDYIKRQTRFVSRRPAKDIISTIEAVAESMSLKVHTRNYKTRLEGISANKAGHFAVVLEVFEVAPSLFMVDVRKASGDTLEYHKFYKDFCSKLEDIIWRPADGVNACNLLRSMTC

SEQ ID NO: 22768 - protein, 289 aa, Ricinus communis
MEVGFLGLGIMGKAMATNLIKSGFKVTVWNRTLSKCSELVNLGASIGESPAAVVKKCKTTIAMISDPAAALSVAFDKDGVLEEICSGKGYIDMSTVSPETSIKISSAITAKGGSFLEAPVSGSKQPAEAGQLVILAAGDKALYDAAIPAFDVMGKKSFFLGEVGNGAKMKLVVNMIMGSMMNAFSEGLVLAEKSGLDPYDLLGVVDLGGIANPMFRGKGPAMLKGNHSTSFPLKHQQKDMRLALALGDENAVSMPVAAAANEAFKKARSMGLGDLDFSAVYEIVKMRKD

SEQ ID NO: 22769 - protein, 414 aa, Ricinus communis
MGYICDFCGDQRSMVYCRSDAACLCLSCDRNVHSANALSRRHSRTLLCERCNSQPALIRCADERLSLCQKCDWMVHGNSNSSSTHKRQTINCYTGCPSASELSSLWSFVLDFPSVDGESTCEQELGLMSIAEDSSTNTWGPPDKTISQNVSGAAAVNNACEIPKSSGCVGNSSAPQLMPNNLDHPAGSANAPLPKLCCPGTKGPALCEDDLYEDFNMDEVDLNLENYEELFGIALNDSEELFENGGIDSLFGMKDMSAADSNCQGAVAAEGSSAGLVNAVQPACSNAASADSMMSAKTEPILCFTARPGHSNLSFSGLTGESSAGDYQDCGASSMFLMGEPPWCPPCPESSFSSANRNDAVMRYKEKKKIRKFEKKVRYASRKARADVRRRVKGRFVKAGDAYDYDPLNQTRSC

SEQ ID NO: 22770 - protein, 102 aa, Ricinus communis
MAMTKTKELVSSNAVVVFSKTYCPYCTSVKKLLDQLGAKYKVVELDTESDGSEIQTALAEWTGQRTVPNVFIGGKHIGGCDSTTAKHSQGQLVPLLTEAGAV

SEQ ID NO: 22771 - protein, 342 aa, Ricinus communis
MGRTPCCDKNGLKKGPWTPEEDQKLIDYIQKHGYGNWRTLPKNAGLQRCGKSCRLRWTNYLRPDIKRGRFSFEEEETIIQLHSILGNKKRLLRMGIDPVTHSPRLDLLDLSSILGSSLYNSSQMNMSRLLGVQPLVNPELLRLATSLISSHHQRENDQSFVSHQNGQENHLCHLQVQNQYNHPLVQAQPFQEMPTTTTSTPFVSFSDETQLMNPNVEQYPARFADQNSQLNQEWPNDNGFATSSLTEDYIALQNCNNYFGSHDQTAIIDPSSDTTTSTFISNNSNQNFSFASVLSTPSSSPTPLNSNSTYINGGSSTEDERESYSSILKYEIPEILDVSNFM

SEQ ID NO: 22772 - protein, 582 aa, Ricinus communis
MTTITSSELNYLVFRYLQESGFTHSAFALGYEAGINKCTIDGNMVPPGALITFVQKGIQYLEMEANLSNSDADVDEDFSFLQPLDLITKDVYELRQMIKDKKKNLHKDREKEKEKDKNKDKEFEREHERERTRIREKERQEREKESEKDRERVEKDKEREKQHEDNTDRETVADQADKNNVKHENIKHENVKHENVKHEENGTGGPEPMDVSVTSTSQACEIPSSDVMILEGHTSEVCACAWSPTGSLLASGSGDSTARIWAIAEGTSRSGVQNGPLNVLVLKHVKGRTNEKSKDVTTLDWNGEGTLLATGSYDGQARIWNTSGELKTTLSKHKGPIFSLKWNKKGDFLLTGSCDKTAIVWDVKTEEWKQQFEFHSGPILDVDWRNNTSFATSSTDNMIYVCRVGDNRPVKTFAGHQGEVNCVKWDPTGSLLASCSDDISAKIWSMKQDKYVHDLREHSKEIYTIRWSPTGPGTNNPNQQLVLASASFDSTVKLWDVELGKLLCTLSGHRDPVYSVAFSPNGEYLASGSLDRSINIWSLKEVKIVKTYTGQGGIFEVCWNKEGDKIAACFANNTVCVLDLRM

SEQ ID NO: 22773 - protein, 598 aa, Ricinus communis
MAVDSGLSSPLGPPACEKDAKALQFIEEMTRNIDSVQEKVLAEILSRNAETEYLERFQLNGATDRDAFKSKVPVVTYEDLQPEIQRIANGDRSNIFSSHPISEFLTSSGTSAGERKLMPTIHEELDRRTLLYSLLMPVMNLYVPGLDKGKGLYFLFVKAETKTPGGLVARPVLTSYYKSEHFKNRPFDPYNVYTSPNETILCPDSFQSMYSQMLCGLIMREEVLRVGAVFASGLLRAIRFLQINCKHLAEDISTGTLNPKISDPSIRECMAKILKPNPELAEFITKECSEENWEGIITRIWPNTKYLDVIVTGAMAQYIPTLEYYSNGLPMACTMYASSECYFGVNLNPMVKPSDVSYTIMPNMAYFEFLPHESSSSALSRDSPPRLVDLADVEVGKEYELVITTYAGLNRYRVGDILRVTGFHNAAPQFRFIRRKNVLLSIDSDKTDESELQKAIENASLLLREFNTSVVEYTSYGDTKTIPGHYVIYWELLIKDPSNSPTEQVLNQCCLAMEESLNSVYRQGRVADSSIGPLEIRVVKNGTFEELMDYAISRGASINQYKVPRCVSFTPIMELLDSRVVSKHFSPSLPQWTPERRR

SEQ ID NO: 22774 - protein, 428 aa, Ricinus communis
MYCNFLEHGAEYARQAVKEDDAGNYVKAFQLYMNALEYFHTHLKYEKNPQVKKTIRQKSLGYLTRAEEIRAILDNGGSVPTSNGGPALAAEAKTKPKPKPKGGEGKDKEDSEQAKLMAGLDSVIIREKPNVKWNDVAGLESAKQALQEAVILPVKFPQFFTGKRKPWRAFLLYGPPGTGKSYLAKAVATEADSTFFSVSSSDLVSKWMGESEKLVSNLFRLARDSAPSIIFIDEIDSLCGQRGEGNESEASRRIKTELLVQMQAIRRRFDKRIYIPLPDLKARQHMFKVHLGDTPHNLTESDFEHLARRTEGFSGSDISVCVKDVLFEPVRKTRDAKYFMKISDGTWFPCDRTQKGAVKITLEGLDGKGLASKILPPPITRADFDKVLARQKPTVSKDDLELLDKQDLHLRPFDLQQHVHAFHDMPEM

SEQ ID NO: 22775 - protein, 633 aa, Ricinus communis
MASSSANSILTPSLITPSSQASSSSQSRSFLVPFSHNNFTSSTPISLKVSLGRNSSLSSVKNAISTAVESATPVSSSEKIKKEDFRETKPTPTILVSEKLGDAGLKLLREYGNLECCYDLSKEDLCKKIASCDALIVRSGTKVSREVFEAAKGRLKVVGRAGVGIDNVDLGAATEFGCLVVNAPTANTVAAAEHGIALLAAMSRNVAQADASMKAGEWQRNKYVGVSIVGKTLAVMGFGKVGTEVARRAKGLGMNVIAHDPYAPADRARAIGVELVSFDQAIASADFVSLHMPLTPATQNIFNDDTFSKMKNGVRIINVARGGVIDEDALVRALDSGKVAQAALDVFSEEPPSRDGKLVQHKNVTATPHLGASTKEAQEGVAIEIAEAVIGALEGELSATAVNAPMVPAEVLSELAPYVILAEKLGRLAVQLVAGGSGIKSVKVLYKSARDPDDLDTRLLRAMITKGIIEPISTSIINLVNADFIAKEKGLRIREEREMVDTSPESPVHSLQVQISNVDSKFASAVSDTGDISIEGRVKYGIPHLTRVGSFAVDVSLEGNLILCRQVDQPGMIGRVGNILGEHNVNVSFMSVGRTVRRNQAIMAIGVDEEPQGQALVKIGEVSAIEEFVFLKL

SEQ ID NO: 22776 - protein, 900 aa, Ricinus communis
METRFLLFFLLLLMLFHPSSAQMPGFVSLNCGGKENFTDELGLVWTSDDSLIYGEPATISVANETRKQYKTLRHFPADSRKYCYTLDVISRTRYLLRATFLYGNFDNNNVYPKFDISVGATHWSTIVISDANTIESIELIFLASSPTISVCLSNATTGQPFISTLELRQFNGSVYYTSFENQFYLSISARINFGADSEAPVRYPDDPFDRIWESDSVKKANYLVDVAAGTEKISTNMSIDVSNDERPPEKVMQTAVVGTNGSLTYRLNLDGFPGFGWAVTYFAEIEDLAPDESRKFRLILPGFPDMSKPIVNIQENAQGKYRLYQPGYPNISLPFVLSFRFGKTSDSSRGPLLNAMEINKYLEKNDGSLDGEVIASVISLYTSTDWAQEGGDPCLPVPWSWLQCNSDARPRIIKISLSSKNLTGNIPSDLPKLKGLAEFHLENNQLTGGLPSSLMNLPHLRELYVQNNLLSGTVPSGLLDKNLFLNYSGNLHVHEGGRREKHTGIIIGSSVGAAVLLIATIASCFFIRRGKKSNHDYEHHRVPPPVQRLVSTLNDNPAEGAYCFTFSEIEDATRKLEKKIGSGGFGIVYYGKLKNGKEIAVKVLTNNSFQGKREFSNEVTLLSRIHHRNLVQFLGFCQEDGRSMLVYEYMHNGTLKEHLYGSRGRSINWIKRLEIAEDAAKGIEYLHTGCVPAIIHRDLKTSNILLDKHMRAKVSDFGLSKLALDGASHVSSVVRGTVGYLDPEYYISQQLTDKSDVYSFGVILLELMSGKEAISNEFGTNCRNIVQWAKLHIESGDIQGVIDSSFDDDEYDIQSMWKIAEKALMCVQPHGHMRPSISEVLKEIQDAIAIERESVAVREGNSDDMSRNSVHSSLNLGSLELGGTENYLSLDESVARPTAR

SEQ ID NO: 22777 - protein, 372 aa, Ricinus communis
MVKPCWRPRVDGDTNGKVDGLLWYKDLGQHLHGEFSMAVIQANSLLEDQSQLESGPLSSTSSDPQGTFIGVYDGHAGTEASKFISRNLFPNFKAIVSEHEDVSENVIKKAYSATEEDFLCLVKTQWLNKPQMASVGSCCLVGVICNGLLYVANAGDSRAVLGRAERGSRGVTAIQLSNEHNANIEFVRNELRALHPEDSQIVVLKHKVWRVKGIIQVSRSIGDAYLKKTQFNTEPLQSKYRLPEPFHKPILSSEPSVLVHKLQPEDQFLIFASDGLWEHLSNQEAVEIVQNCPRNGIARRLVKAALMEAARKREMRYTDLQKIDPGVRRHFHDDITVVVVFIDSHLIRRRPLNSFPFSIRGGGGMVLSPANS

SEQ ID NO: 22778 - protein, 297 aa, Ricinus communis
MALVSIFFLCIGALSSIGFISASGSICPNESSLLLYDLQSQCPLEIFPNPPLQVDGNFLDRALASNQRNSYTSVLFYASWCPFSRIICPKFDMLGSMFPQIEHFAIEQSSAVPSIFSRYGIRSLPTILMINQTSKVQYHGPNDIQSLVQFYEKTTGIKPVQYLAEYEPSGLDGCGKSIMQPWYGSSLEEVMKREAYLVLAAMFLCLRVLLYISPKVLSHLRAFYVLYLPHFNLEKFGETSQLFGRILHMIDVRRIWTRIRLCKTRNFHQGAKNCRVWASSLASVSLGESSSSARSPP

SEQ ID NO: 22779 - protein, 268 aa, Ricinus communis
MKGCELCGGAARMYCESDQASLCWSCDEKVHSANFLVAKHCRNLLCQVCQSPTPWKASGPKLGPTVSICDSCFSLHNSSNNHRDIIDDDGNVEESLEGNDHDDEFDSDDDLYDDDVDEEEEEEEEDGDNQVVPWSVTPPSPPSASSSDSEEEISSRLLGGAKRVRESIAYLDSDDEIGCSSSQMDSGRISGNDEGNSLESFRKLKQRRRIRTEEEEEEDDHHDGQAESRSTAVIDSLKRLQNEMVTNRDNASATILGICRLSRDHHNR

SEQ ID NO: 22780 - protein, 180 aa, Ricinus communis
MLKTLERYQKCSYGAVEVNKPAKELESSYREYLKLKTRFESLQKTQRNLLGEDLGPLSTKELEQLERQLESSLKLVRSTRTQFMLDQLSDLQNKEQLLLEANRALTLKLDEISARNIRSSWEGGEQSMSYGQQHPQPQELFQPMDCNPTLQIGYNPVGSDQMTATTHAQTVSGFIPGWML

SEQ ID NO: 22781 - protein, 237 aa, Ricinus communis
MAISPSSSSSLELTISMPGFASSPSVPSYGEGVKDLDINQLPAGVAEEEWITAGIEDEEESNINGGPPRKKLRLSKEQSRLLEESFRQHHTLNPRQKEALAMQLKLRPRQVEVWFQNRRARSKLKQTEMECEYLKRWFGSLTEQNRRLQREVEELRAMKVGPPTVLSPHSCEPLPASTLTMCPRCERVTTSTNTAAAFDKGPTRTATPATTPTTAVATLSSKVGTPTLQSRQSSAAC

SEQ ID NO: 22782 - protein, 542 aa, Ricinus communis
  misc_feature (525)..(525): Xaa can be any naturally occurring amino acid
  unsure (1)..(542): unsure at all Xaa locations
MKNKLGLLWLKERSTLETGKKQQRSSNLREAGLDTREESFISRSHATQLDKPPPLVSALKASAAQNAASFHFPGHNRGYAAPTSLTQLIGLKPFIHDLPELPELDNLFSPEGSILEAQMLASKLFGSQETWFLVGGTTCGIQAAIMTTCSPGEHIILPRNSHLSAISALVLSGAIPKYIIPEYDYNWDIAGAVTPSQVNKAMKELEMEGQKPAAVFVTSPTYHGICSNLSEISQVCHSRGVPLIVDEAHGAHLGFHPQMPRSALKQEADLVVQSTHKVLCSLTQSSMLHMSGKIVNRDRICRCLQTLQSTSPSYLLLASLDAARAQIDENPETIFNKAMELAIEAKDLIKRIPGITLLERPSLAEFSAIDPLRLTIGFWQLGLSGYEADDYLYRNHQVVAELVGTQSITFAFNLGTCKEHVQRLVSGLKELAACSLQSGTTEERLKEGGYLSFADVSMRLNPRDAFFANKRRVDIRESLGEVCGELICPYPPGIPVMIPGEIITEGALDYLLDVKRKGAVVSGAXVSGASDPLLSSIVICDM

SEQ ID NO: 22783 - protein, 465 aa, Ricinus communis
MSHSERRRMNGEGEEEDGDEDDIDGDGLDAWERTYTDERSWEALQEDESGLLRPIDNKAIYHAQYRRRIRSLSTSARIQKGLIRFLYIVVDLSRAAGEMDIKPSRMVVIARHVEAFIREFFDQNPLSQIGLVTIKDGVAHPLTELGGSPESHIKALTGKLECAGDSSLQNALDLVRGYLDQIPAYGHREVLILYSALSTCDPGDIMETIQNCKKSKIRCSVIGLSAEMFICKHLCQETGGLYSVAMDETHLKELLLEHAPPPPAIAEFAIANLIKMGFPQRSAEGSISICSCHKEAKVGEGYICPRCKARVCDLPTECRICGLTLVSSPHLARSYHHLFPIAPFDEVSQRQSELQHRPQKTCFGCQQSLLNPVVMDMTTAINLPFLLLALNASSTSVLTATFIFMRACITAQAVRVSGTHRQTPVMKRDDYCNRLYYSPCCYVAAVGSRYCNSKHKSDQVHGTAT

SEQ ID NO: 22784 - protein, 374 aa, Ricinus communis
MASPLHLSTASPSSLPFSHGSSSFIVKEPRFPLRHAVRCNLVEPLKFENGKPMPCVPLLSPIEQSFPNFIASKTHLEPKTTPRASKHDTRLRIFSGTANPALSQEIACYMGLELGKIKIKRFADGEIYVQLQEVSEDAMASAKNITAVIPYFGYARADRKTQGRESIAAKLVANLITEAGANRVLACDLHSGQSMGYFDIPVDHVYGQPVILDYLASKTICSDDLVVVSPDVGGVARARAFAKKLSDAPLAIVDKRRHGHNVAEVMNLIGDVKGKVAVMVDDMIDTAGTISKGAALLHQEGAREVYACSTHAVFSPPAIERLSSGLFQEVIITNTIPVAEQNYFPQLTILSVANLLGETIWRVHDDCSVSSIFL

SEQ ID NO: 22785 - protein, 601 aa, Ricinus communis
MACLNLCTELGEVDGKIIKKDIGVYTQDGTVDRHGHPAIRQRTGTWIAGILILVNQGLATLAFFGVGVNLVLFLTRVLGQNNADAANNVSKWTGTVYIFSLLGAFLSDSYWGRYKTCAIFQAIFVVGLVSLSLSSYIFLLKPHGCGSEKLPCGSHSNFEIALFYLSVYLVALGNGGYQPNIATLGADQFDEEDPKEGHSKIAFFSYFYLALNLGSLFSNTILGYFEDQGMWALGFWTSAGSALLALLLFLCGTPRYRHFKSKGNPLSRFCQVLVAAFRNWKHNKRDLNEEDLFESNFCSQDGDHRKILHTDGFRFLDRAALITSEDNVNADIRNPWRLCTVTQVEEVKCILRLLPIWLCTILYSVVFTQMASLFVEQGAAMKTTISSFHIPPASMSSFDIVSVAVFIFMYRRILDPLVARIRKDPRGLTELQRMGIGLVIAILAMVSAGVVELFRLKYKNTQKAVCADCESESSLSIFWQIPQYVLIGASEVFMYVGQLEFFNAQTPDGLKSFGSALCMTSISLGNYVSSLLVTVVMKISTRDEMPGWIPGNLNKGHLDRFYFLLAALTTADLIIYILTAKWYKYIKFQGKISANIINQQV

SEQ ID NO: 22786 - protein, 587 aa, Ricinus communis
MGVVGDGDEGVRRRGCSCTKSDFIPEESFQSMGSYLKALSETPMRFKDRLLARSMDSTEINEIKARSEHQMKKNLTWWDLIWFGIGAVIGAGIFVLTGLEAQSVAGPAVVLSYVVSGISAMLSVFCYTEFAVEIPVAGGSFAYLRVELGDFMAFIAAGNILLEYVIGGAAVARAWTSYFATLLNHKPENFRIIAHSLPEDYGHLDPIAVVVIAVICVLAVLSTKGSSRFNYIASIIHIVVILFIIIAGLVNADTKNYRDFAPYGARGVFNASAVLFFAYVGFDAVSTMAEETKDPARDIPIGLVGSMALTTLLYCLMAITLCLMVPYKQIDPDAPFSVAFQSVGWGWAKYIVSLGALKGMTTVLLVSAVGQARYLTHIARTHMMPPWLAHVNAKTGTPVNATIVMLTATAVIAFFTKLEVLSNLLSISTLFIFMLVALALLVRRYYVSGETTSANRLKLTVCLVVILVTSIANAAIWGAQVDGWIGYAITVPIWFFATLGISVFVPQARAPKLWGVPLVPWLPSASVFINIFLLGSIDRDSFVRFAIWTGILLIYYFLFGLHASYDTAKESEANRGLEGLQKMEEGA

SEQ ID NO: 22787 - protein, 462 aa, Ricinus communis
MAFIAAGNILLEYVIGGAAVARSWTSYFATLCNHDPDDFRITAHSLPDDYGHLDPIAVAVASVICILAVLSTKGSSRFNYVASIVHVITILFIIIAGFTKADTKNYSPFAPYNSRGIFVASAVVFFAYVGFDAISTMAEETKNPARDIPIGLVGSMTVVALAYCLLAAVLCLMVPYRQIDPDAAFSVAFEYVGMSWAKYIVALGALQGMTTAMLVGAVGQARYLTHIARTHMMPPWFAHVNEKTGTPVNATVVMIIATAIVAFFTKMDILANLLSISTLFIFMLVAVALLVRRYYVTGVTTPANHAKLAVCLALILGSSVATAVIWAAGGDGWIGYVITVPIWFLATAALKLLVPQARDPKLWGVPLVPWLPSVSILINIFLLGSIDGASFGRFGVWTGILLIYYLLFGLHASYDTAKESGENRAKEGWKKMEEGGVATVSSQSAAIGDLKGTNDSTNNPTG

SEQ ID NO: 22788 - protein, 202 aa, Ricinus communis
MSMSEDTEAPKKVLESPPPPTAPPAAADGEGGPGSGSAFGIGAIRRRWRREAILQRGSLALRGLGFLFSLLAFIIMASNKHGDWKNFDRYEEYRYLLAISILSTLYSGGQVLRNVHELSTGKLIFQRQTSAMLDFFGDQLLSYLLISSASTAVPMTNRMREGADNIFTDSSAASISMAFFAFFVSAVSALISGYKLSTQSYV

SEQ ID NO: 22789 - protein, 558 aa, Ricinus communis
MASFTTSSSSSSSCSLNTSINSQSSFFSTQFLMTNPSSSSLSSFTDLLSSGNINSKDNNMDNINVGWGLFDHGNGIDIPKFKSFPPPSLPLSPPPVSPSSYFAIPPAGLSPTDFLDSPVLFSTSNVVPSPTTGTFAGQTFNWRSNISNDNQRGFKGDEKTYSDFSFQTQTRPLLASSSSPSEKGVVKQEFTPVQSFSSEMAPLQSSMQTNAVAPQPQPSYNHYSQPASYMREQRRSDDGYNWRKYGQKQVKGSENPRSYYKCTYPNCPTKKKVERSLDGQITEIVYKGSHNHPKPQARSSSQLIQLAAGGTQEISDQSFAPVESVTMQEDSSLSIGDDEFDQSSPISNSGGNEDENEPEAKRFKGQNENESILAAGSRTVREPRIVVQTTSDIDILDDGYRWRKYGQKVVKGNPNPRSYYKCTSIGCPVRKHVERASHDTRAVITTYEGKHNHDVPAARGSGYASNRLPVNANSSMPIPIRPSVTANTNYSNSLNSTRSSGNQAPFTLQMLQGTGNIGFSNFGKPSASYMNQTQYTENVFSGAKEEPKDDSFLDSFLC

SEQ ID NO: 22790 - protein, 591 aa, Ricinus communis
MCGILAVLGCSDDSQAKRVRVLELSRRLKHRGPDWSGLYQHGDSYLAHQRLAIIDPASGDQPLYNEDKAIVVTVNGEIYNHEELRKKLSHHKFRTGSDCDVIAHLYEEYGEDFVDMLDGMFSFVLLDTRDNSFIVARDAIGITSLYIGWGLDGSIWISSELKGLNDDCEHFECFPPGHLYSSKSGGLRRWYNPPWFSEAIPSTPYDPLALRRAFENAVIKRLMTDVPFGVLLSGGLDSSLVASITARHLADTKAAKQWGAQLHSFCVGLEGSPDLKAAKEVADYLGTVHHEFHFTVQDGIDAIEDVIYHIETYDVTTIRASTPMFLMARKIKALGVKMVISGEGSDEIFGGYLYFHKAPNKEEFHRETCHKIKALHQYDCLRANKATSAWGLEARIPFLDKEFINVAMAIGPESKMIKPEEGRIEKWVLRRAFDDEEHPYLPKHILYRQKEQFSDGVGYSWIDGLKAHAAEHVTDKMIQNAEHIFTHNTPTTKEAYYYRMIFERFFPQNSARLTVPGGASIACSTAKAVEWDAAWSDNLDPSGRAALGVHLSAYGKQAAAAVASAGMVPPKIIDSMPRMMEVSPPGLTISS

SEQ ID NO: 22791 - protein, 1632 aa, Ricinus communis
MALQTTASSSASSSQLLLNSASSSSIAKAPCSVLAYTNKFNSNNHFFVDFVGLYCQSKRRSRRIGVSSSSCDSNSSIQRNSFSRFVNSTVRSQSLPLPDLKPKVANLDDIISERGACGVGFIANLENKASHEVVKDALTALGCMEHRGGCGADNDSGDGSGLMTSIPWDLFNNWADKQGIASFDKLHTGVGMVFLPKDDNLMKEAKQVVENVFKQEGLEVLGWRPVPVNKSIVGFYAKETMPNIQQVFVRIVKDESVDDIEREFYICRKLIERAATSERWGNELYICSLSNQTIVYKGMLRSEVLGLFYSDLQSDLYKSPFAIYHRRYSTNTSPRWPLAQPMRLLGHNGEINTIQGNLNWMQSRESSLKSPVWRGRENEIRPFGNPKASDSANLDSAAELLIRSGRNPEEALMILVPEAYKNHPTLTIKYPEVVDFYDYYKGQMETWDGPALLLFSDGKTVGACLDRNGLRPARYWRTVDNFVYVASEVGVLPMDESKVTMKGRLGPGMMIAVDLLGGQVYENTEVKKRVALSNPYGKWVSENLRSLKPANFLSTTDLDNEAILRRQQSFGYSSEDVQMVIESMAAQGKEPTFCMGDDIPLAILSQRPHMLYDYFKQRFAQVTNPAIDPLREGLVMSLEVNIGKRGNILEVGPENAMQVNLSSPVLNEGELESLLKDPHLKPQVLPTFFDIRKGVEGTLEKTLLRLCEKADEAVRNGSQLLVLSDRSDDLEPTRPAIPILLAVGAVHQHLIQNGLRMSTSIIADTAQCFSTHHFACLIGYGASAVCPYLALETCRQWRLSNKTVNLMRNGKMPTVTIEQAQKNFCKAVKAGLLKILSKMGISLLSSYCGAQIFEIYGLGKEVVDLAFCGSKSTIGGATLDELARETLSFWVKAFSEDTAKRLENFGFIQFRPGGEYHGNNPEMSKLLHKAVRQKNESAFSIYQQHLANRPVNVLRDLVEFKSDRAPISVGKVEPASSIVERFCTGGMSLGAISRETHEAIAIAMNRLGGKSNSGEGGEDPIRWSPLSDVTDGYSPTLPHLKGLQNGDTATSAIKQVASGRFGVTPTFLVNADQLEIKIAQGAKPGEGGQLPGKKVSAYIARLRNSKPGVPLISPPPHHDIYSIEDLAQLIYDLHQVNPKAKVSVKLVAEAGIGTVASGVAKGNADIIQISGHDGGTGASPISSIKHAGGPWELGLTESHQTLIENGLRERVILRVDGGFKSGVDVMMAAAMGADEYGFGSVAMIATGCVMARICHTNNCPVGVASQREELRARFPGVPGDLVNYFLYVAEEVRGMLAQLGYQKLDDIIGRTDLLRARDISLMKTQHLDLSYILSNVGLPKWSSTEIRNQDVHSNGPVLDDVILADPQILDAIENEKIVNKTIKIYNVDRAVCGRIAGVVAKKYGYTGFAGQLNITFTGSAGQSFACFLTPGMNIRLVGEANDYVGKGMAGGEVVVMPVENPGFCPEDATIVGNTCLYGATGGQVFVRGKAGERFAVRNSLAEAVVEGTGDHCCEYMTGGCVVVLGKVGRNVAAGMTGGLAYILDEDDTLMPKVNKEIVRAQRVTAPVGQMQLKSLIQAHVEKTGSGKGAAILKEWDNYLPRFWQLVPPSEEDTPEACADYQATVAGEVLQSA

SEQ ID NO: 22792 - protein, 304 aa, Ricinus communis
MKSGSPRVTKRMCNSSEEESELRRGPWTLEEDTLLTHYISRHGEGRWNMLAKYAGLKRTGKSCRLRWLNYLKPDIKRGNLTPQEQLLILELHSKWGNRVQRQARQMNIESNSKRFLDAVRCFWMPRLLQKVEQTSFSTASLTNPDYLQTISATSSLSVPNFTTNPSSSESFDPQIHKLVQYCSNLGSEHSISSVTTSPSTTVLSTDSIAIQHQPEILENPKTPPVLDDTGVYNYNNLILSEGYHVESNGYDMDHGLNPAAASMPEIGTFDDSLSECQMAESNWVFEDEMANALWNMDDIWQFRL

SEQ ID NO: 22793 - protein, 793 aa, Ricinus communis
MVVKEESSAATPPLELFLKIGLDERTAKNTIANNKVTNNLTTVIHEAGVNEGCSRTVGNLLYTVATKYPTNALVHRPALLEYIVSSKIKTSAQLEAAFSFLSNTASESFKLNDFEEACGVGVEVSADDIEKAANEVFEQNKVSILELRYRTNVGDLFGHVRNRLPWADPKIVKQLIDAKLFELLGERTAADNEKPSKQKKEKPAKVQEKKVADCPVQPSEEDLNPFLIFPNPDENFKVHTEILFSDKSILRCCNTKEMLDKHLKETGGKVYTRFPPEPNGYLHIGHAKAMFVSFGLAKERGGCCYLRYDDTNPEAEKREYIDHIEEIVEWMGWKPFKITYTSDYFQDLYDLAVELIRRGHAYVDHQTPDEIKEYREKKMNSPWRDRPIAESLKLFDEMRQGMIEEGKATLRMKQDMQSDNFNMYDLIAYRIKFTPHPHSGDKWCIYPSYDYAHCIVDSLENITHSLCTLEFETRRASYYWLLHALGVYQPYVWEYSRLNVANTVMSKRKLNFLVTKNYVDGWDDPRLMTLAGLRRRGVTATAINAFVRGIGITRSDSTLIRLDRLEHHIREELNRTAPRTMVVLHPLKVVITNLEPGSIMDLEAKKWPDAQTDDASAFYKVPFSNVVYIENSDFRMKDSKDYYGLAPGKSVLLRYAFPIKCTEVVLADDNETIIEIRAEYDPSKKTKPKGVLHWVAESSPGVDPLKVEVRLFEKLFNSENPAELDDWLADLNPQSKVVMSSAYAVPLLKNATIGESFQFERLGYFTVDKDSTPEKLVFNRTVTLRDSYGKGGK

SEQ ID NO: 22794 - protein, 356 aa, Ricinus communis
MSLLADLININLSDSTDKIIAEYIWIGGSGLDLRSKSRTLPGPVSDPSKLPKWNYDGSSTDQATGDNSEVILYPQAIFKDPFRRGNNILVMCDSYTPAGDPLPTNKRFNAAKIFSHPDIAAEEPWYGIEQEYTLLQKDVKWPIGWPVGGFPSPQGPYYCGVGADKAFGRNIVDSHFKACLFAGISISGINGEVMPGQWEFQVGPAVGISASDELWMARYILERITEIAGVILTFDPKPIQGDWNGAGAHTNFSTKSMRSDGGIDVIKKAIEKLGQRHKEHIAAYGKGNERRLTGRHETADINTFSWGVANRGASVRVGRDTEKNGKGYFEDRRPSSNMDPYIVTSMIAETTILWKP

SEQ ID NO: 22795 - protein, 433 aa, Ricinus communis
MGFGNKEASKTRKPPILPPAKEDTPLITKPNNNNNINDNGNPLSSQSKTFANVFIAIVGAGVLGLPYAFKRTGWIMSLLMLFSVAALTHYCMMLLVHTRRKLQSLPGDFSKINSFGDLGFAVCGSVGRFVADVMIVLSQAGFCVGYLIFIANTLANLFDMSSQIIGLSAKSFYIWGCFPFQLGLNSIATLTHLAPLSIFADLVDLGAMGVVIVEDILIMMKNRPQVNAFGGLSVFFYGMGVAVYAFEGIGMVLPLESEMKDKDKFGGILGLSMALISLLYGAFGVLGYFAFGNETKDIITANLGAGLISSLVQLGLCINLFFTFPLMMHPVYEIVERRFWGGRYCLWLRWVLVLAVSLVALLVPNFADFMSLVGSSICCGLGFVLPALFHLLVFKEEMDWKGWSVDIAIVTIGVVLAVSGTWYALMEIFSVKV

SEQ ID NO: 22796 - protein, 951 aa, Ricinus communis
MDDDGASKPDSTSGSFSGAAMDLDFMDELLYDGCWLETTDGFSYPQTGSSTSTMTDSRSFPLIESSSSLASTNPHQQIHQEATEDNVPENPSTPLCNLNVKELTETQSQHCSVKNTTSLVQSEGFLNEGSELSKSLWIGPKADPGPSSSVKQRLMDAIKHLKQYTKDSEVLVQIWVPTKKEGKRVLTTFDQPCFLSLNSESLANYRYVSETYHFSVEGDSKDFLGLPGRVFLRKLPESTPDVRFFRREEYPRKSYAKQYNISGSLAVPVFERGTGTCLGVVEVVTTSRNINYRSELETICKALEAFDLRSSHDFCPPSVKACKEFCQSAVPEISEILGSVCKKHKLPLALTWARCFQQGKGGCRHFDEKFANCISTVDSACCVADRELYAFHIACSELYLSLGQGIVGKAFTTNKQCFATDITSFSQTDYPLSHHAKVLDLHAAVAIPLRSAYTGSADFVLELFLPKDCRDIEEQKAMWDLVPTAIQQACQNLHVVMEKELEEDISWQIPVALDGRHNKQVTHNIASSLKEPFAEGSSWIAQMVEAQRKGKNVCVSWDSPKEPKEEFKVATHWGDALEELYHKQVLTGTGLLQQDAATKDSITDGCSNPFAGQHSSGNRKAGEKRRTKTEKTISLEVLRQYFAGSLKDAAKSIGVCPTTLKRICRQHGITRWPSRKLKKVGHSLKKLQLVIDSVQGAEGAIQIGSFYTTFPELTSPNYGGNGPFTSLKMNDDSKPVNFQPENGFINAGTTASKSPSSSCSQSSGSSICCSTGEKHKITNNALNTGDGLTVENPSGVLKRTRSDAELHALYRPESKPLARSQSHKLLADHPSIDTLPPFPKGSSQSLRDSGTFRVKANFGEDKVRFSLQPNWDFKDLQQELAKRFGIHEGCRTDLKYLDDDHEWVLLTCDADLEECKDIYRVSQNHTIKISLHQASQPLRQLGGDKEGASHE

SEQ ID NO: 22797 - protein, 993 aa, Ricinus communis
MMGGKHNWSIRGAECLFLCMFILIQSTLAQEEFQISFNHVESCFPVNLESRSTFCELPGGVSFCRTDCKIPTINPIKTFTDLTICSTCSTGFKSIKCCAESFSIDNNNISWTSDDKLLPDNGHCQRITRAAANYTGYDKVRLFNIKSGKRCYNLQTTKDQDYLIRGTFLYGDLLGSLGSSFDVLIGVTKISKVTSFEDLEVEGVFRATNEYIDFCLAHNKGHPHISKLELRPLADSKYLQGSASSVFRLISRNDVGNAGDAIRYPHDKFDRIWEILDPSIVSISPDPVPARSNTGIYNASTTVPTEVLQTALTHRDRLEFLHKNLDSENYNYTLFLYFLELNSTVKTTQRLFSIFINNEIKQEGIDILSSGSNYKEVVLTVTAKGSLNLTLVKVTNKYDFGPILNAYEILQVQPWVQGTNQKDVDVIKQMRDKLLQHNKDNDMLKDWSGDPCLPLPWKGLTCQPMSGSQVITILDISSSQFHGPLPDIAGLTNLRQLNVSYNQFTGSIPPFQSSSMLTSVDLSHNDLNGSLPNWLTLLPNLTTLIFGCNPQFSNELPSSFNSSRIATDYGECKQRTTRKIQGIVIGTITGGSFVLAIGLGLVCIYRHKFVALGKFNGKRQPMTKNAIFSMPSSDDVALKSINIQMFTLEYIENATQKYKTLIGEGGFGSVYRGTLLDGQEVAVKVRSTTSSQGTREFENELNLLSAIRHENLVPLLGFCCENDQQILVYPFMSNGSLQDRLYGEAAKRKTLDWPTRLSIALGAARGLTHLHTFAGRSVIHRDVKSSNILLDQSMNAKVADFGFSKYAPQEGDSGASLEVRGTAGYLDPEYYSTQHLSAKSDVFSFGVVLLEIVSGREPLNIKRPRNEWSLVEWAKPYIRESKIDEIVDPSIKGAYHAEAMWRVVEAALACIEPFSAYRPCMADIVRELEDALIIENNASEYMRSIDSIGGYSFGGSNRFSIVTDKKNVLPPPTPTPTTPSPINTQTLAPPEPR

SEQ ID NO: 22798 - protein, 498 aa, Ricinus communis
MDKPKTTSLILCCIACFLFSFVLITHSAPQDALVIEIPGFSGALPSKHYSGYVTIDESHGKKLFYYFVESEGNPSQDPVVLWLNGGPGCSSFDGFVYEHGPFNFEAANASADLPKLHLNPYSWSKVSNILYLDSPAGVGLSYSKNTTDYITGDIKTALDSHTFLLKWFELYPEFLSNPFFIAGESYAGVYVPTLAYEVMKGIDASVKPILNLKGYLVGNGVTDELFDGNALVPFAHGMGLISDDLYEEVKDACSDNFYNPLSDTCETKLDKVDEDIEGLNIYDILEPCYHGTDPSEVKDIKIRLPSSFRQLGKTDRPLPVRKRMFGRAWPLRAPVRDGIVPTWPQLLNSESVPCTDDEVATLWLNNAAVRKAIHADEESIAGTWELCTDRIFFSHDAGSMIKYHRNLTMRGFRALIFSGDHDMCVPYTGSQAWTRSMGYKIVDEWRPWISKGQVAGYTQGYENNLTFLTIKGAGHTVPEYKPQEAFDFYSRFLAGKRI

SEQ ID NO: 22799 - protein, 597 aa, Ricinus communis
MAVGNTLSSPLGPPACEKDAKALLLIEEMTRNADLVQEKVLAEILNRNKDVEYLKKFNLDGATDRETFKSKLPMVTYEDLQPEIQRIANGDRSAILSAHPISEFLTSSGTSAGERKLMPTIKEELDRRQLLYSLLMPVMNLYVPGLDKGKGLYFLFVKSETRTPGGLLARPVLTSYYKSDHFKTRPYDPYNVYTSPNESILCPDSFQSMYSQMLCGLLERHQVLRVGAVFASGLLRAISFLQLNWQELARDIMSGTLNKRVTDPSIRDCIAKVLKPSPELAEFIRVECSKENWEGIITRIWPNTKYLDVIVTGAMSQYIPTLDYYSGGLPLACTMYASSECYFGLNLNPMCKPSEVSYTIMPNMAYFEFLPHEPSCSGLTRDSPPKLVDLVDVVVGKEYEIVITTYAGLYRYRVGDILRVTGFHNSAPQFHFVRRKNVLLSIDSDKTDEAELQKAVENASQLLREFNTSVVEYTSYADTKTIPGHYVIYWELLIKDSANSPSEKVLSQCCHAMEESLNSVYRQGRVECNSIGPLEIRVVKNGTFEELMDYAISRGASINQYKVPRCVNFTPIMELLDSRVVSTHFSPALPHWTPKRR

SEQ ID NO: 22800 - protein, 395 aa, Ricinus communis
MGLSSMPFASPAKPSFLSSSSRSSHSRLTCRVSIACNSSRSRLLSLRSVRCDMAHSPIIDKRMTLPKFLESAHMENSVDRSVSGMKLFSGSANPSLSQEIASSLGLELGMINTKRFADGEIYLQLKESVRGCDVYLLQPTCPPANENLMELLIMIDACRRASAKTITAVIPYFGYARADRKTSCRESIAAKLVANLITEAGANRVLVCDIHSGQSLGYFDIPVDQAICEHVILEYITSKGIRSNELVVVSPDVGGVARARSFAKKLSDAPLAIVDKRRQEHNIAEVMNLIGDVKGKVAVMLDDMIDTAGTITKGADLLHQEGARAVYACCTHAVFSPPAIERLSSGRFQEVIVTNTIPVVEKNYFPQLTVLSVARLLGETIWRIHVGSSVSSISQ

SEQ ID NO: 22801 - protein, 351 aa, Ricinus communis
MAEAVNVNGKPSSPTINERTLPKFLESALTEKSVKRSSTKIKLFSGSANPALSQEIASNMGLELGKVNIKRFADGEIYVQLQESVRGCDVYLLQPTCPPANENLMELLIMIDACRRASAKTITAVIPYFGYARADRKTQGRESIAAKLVANLITEAGANRVLACDIHSGQSMGYFDIPVDHVHCQPVILEYLASKAVRSNELVVVSPDVGGVARARAFAKKLSDAPLAIVDKRRHGHNVAEVMNLIGDVKGKVAVMVDDMIDTAGTIAKGAELLQQEGAREVYACCTHAVFSPPAIERLSSGLFQEVIITNSIPVAEKNYFPQLTVLSIANLLGETIWRVHDDCSVSSIFQ

SEQ ID NO: 22802 - protein, 197 aa, Ricinus communis
MGEEDGATGLALALSIGDHCIPKVQQNHKNKSAVTLDLSFTLCPKQEEEEEETFKLVHEAEHASNKRIDFFSCNGTKNICRKKLRLTKDQSALLEDSFKLHNTLNPVQKHALAHQLSLTPRQVEVWFQNRRARTKLKQTEEDCELLKKWCESLSDENKRLKKELQELKTLKPFCLHLPLCSTSKKAAPSERVPPLHQ

SEQ ID NO: 22803 - protein, 140 aa, Ricinus communis
MYSMAMGRIRASSILVAAATITVIATSLSWASAATGSDSAFVKKTISSHKIVIFSKSYCPYCKRAKAVFKQLNQIPHVVELDERDDGQNIQDALSKIVGRRTVPQVFIDGKHIGGSDDTVEAYESGELADLLGIAGKDDL

SEQ ID NO: 22804 - protein, 191 aa, Ricinus communis
MYPPNPEKSNTNASAPFYQPAAPATGVPLKQANQYYSENPQYPLSHQHGHGGAWSSGLCGCCSDVKNCCITCWCPCITFGQIAEIADKGTTSCATSGAIYGILAWFTGCGCIYSCLYRSKLRQQYMLPESPCNDCLVHCCCEACALCQEYRELQSRGFDMSIGWHGNMERQNGGGAMAAPTAPVFQGTMTR

SEQ ID NO: 22805 - protein, 147 aa, Ricinus communis
MSSLPNNSKAQVPWSTGLCDCFSDRRTCCITFWCPCITFGQIAEIVEKGTTSCATTGAIYAILACFTGCGCIYSCMYRSKLRHQYMLPESPCNDCLVHCCCEACALCQEYRELKSRGFDMSIGWQGNVERQKGGVAMAPVFQAGMTR

SEQ ID NO: 22806 - protein, 208 aa, Ricinus communis
MKTQRQPPIFLLSLLLFTTVHFHVRAADSSSDSQSNSTDYIRTNCVATLYPDICYTSLSRYASAIQKNPERLARVAIGVSLSRARHMAAYVSNLSRQADYGSDPRAAAALHDCFSNFGDAVDEIRGSLKQMRQLGTAGSSEEAFRFQMSNVQTWMSAALTDEDTCTDGFEDVADGPMKSEVCQRAADAKKFVSNALALVNNYAAKGMA

SEQ ID NO: 22807 - protein, 620 aa, Ricinus communis
MAHTATSSISLQNNVPNTSFKSPPSLPTKPFQNNIKFSFPPLTLTKVTRIKSSRTTKYNEVIVDEEMDKVRRLQNGSDVRGVALEGEKGRTVDLTPPAVEAIAESFGEWVINGLEKEKGRVVEDVRVSLGKDPRVTGASLSVAVFAGLSRAGCMVFDMGLATTPACFMSTLLHPFAYDASIMMTASHLPYTRNGLKFFTKKGGLTSPEVEEICEKAARKYANRLMKVSTLLNTPPTRVDFMSTYAKHLRDIIKERVSHPLHYDTPLKGFQIIVNAGNGSGGFFKWDVLDKLGADTFGSLHLNPDGMFPNHIPNPEDKTAMALTRAAVLDNSADLGIVFDTDVDRSGVVDNKGNPINGDKLIALMSAIVLREHPGTTIVTDARTSMALSRFITDRGGQHCLYRVGYRNVIDKGVHLNEDGIEAHLMMETSGHGALKENYFLDDGAYMVVKIIIEMVRMKLAGSDEGIGSLIKDLEEPREVIELRMNVISEPRHAKAKAVEVIEKFRNFIEEGKLEGWELDYCGDCWVSDGCLVDSNDTPAAVDAYMYRTKVSDEEHGQHGWVHLRQSIHNPNIAVNMQSMVPGACQSMTEVLRDKFLVASGIDKFLDITQIDKYANTGIAK

SEQ ID NO: 22808 - protein, 452 aa, Ricinus communis
  misc_feature (394)..(395): Xaa can be any naturally occurring amino acid
  unsure (1)..(452): unsure at all Xaa locations
MAPKALDYESLNENVKKVQYAVRGELYLRASELQKEGKKIIFTNVGNPHALGQKPLSFPRQVVALCQAPFLLDDPNVGLLFPADAIARAKHYLSLTSGGLGAYSDSRGLPGIRKEVAEFIERRDGYPSDPELIFLTDGASKGVMQILNSIIRGEGDGVLVPVPQYPLYSAAISLFGGSLVPYFLEETANWGLDVNDLRQAVSQARAKGITVRAMVIINPGNPTGQCLSEDNLREILRFCYHEDLVLLGDEVYQQNIYQDERPFISSRKVLLDMGPPISKEVQLVSFHTVSKGYWGECGQRGGYFEMTNIPAKTVDEIYKVASVSLSPNVPAQIFMGLMVNPLKPGDISYEQYVRESKGILESLRRRARIMTDGFNSCRNVVCNFTEGAMYSFLXXSWFRIWTERRALPCRVFHLRTTILPAEEDMPAIMASFKKFNDEFMEEYEDHRGYSRM

SEQ ID NO: 22809 - protein, 713 aa, Ricinus communis
MEYGSLGGGGGSSGAGGSGSGGDHDPSDLQRRKKRYHRHTANQVQKLESMFKECPHPDEKQRLQLSRELGLTQRQIKFWFQNRRTQMKAQHERADNCALRAENDKIRCENIAIREALKNVICPSCGGPPVTEDSYFDEHKLRMENSQLKEELDRVSSIAAKYIGRPISHLPPVQPIHISSLDLSMGSFGGQGIGGPSLDLDLDLIPSTSTLPFHPLGISDMDKSLMSDIAANAMDELLRLLQTNEPLWMKSSTDYRDVLHLDTYQSIFPRPISRLKNPNVRIEASRDSGVVIMNSLALVDMFMDANKWVELFPTIVSISKPLEVISSGMMGSHSGSLHLMYEELQVLSPLVPTREFYILRYCQQIEQGLWAIVNVSYDIQQFSSQCRSHRLPSGCLIQDMPNGYSKVTWVEHVEVEDKNPTHRLYRDLIHSGMAFGAERWLATLQRMCERFACLMVSGNLTRDLGGVIPSPDGKRSMMKLAQRMANSFCSSISTSNSHRWTAISGSNEVGVRVHKSTDPGQPNGVVLNAATTFWLPVSPQNVFNFFKDERTRAQWDVLSSGNAVQEVAHIANGSHPGNCISVLRAFNSGQNNMLILQESCIDSSGSLVVYCPVDLPAINIAMSGEDPSYIPLLPSGFTICPDGRPDHGDGASTSSNAHGSMCRSSGSLITVSFQILVSSLPSAKLNMESVTTVNNLINTTVQQIKAAMNCPNS

SEQ ID NO: 22810 - protein, 112 aa, Ricinus communis
MSGVWVFKHNGVFILENPGAEASEGRQGGSSRRKVLVHLPSGQVVTSYSSLEQILRNLGWERYYGGDPDLFQFHKHSSIDLISLPRDFSKFTSVYMYDIVVKNPNIFHVRDM

SEQ ID NO: 22811 - protein, 379 aa, Ricinus communis
MNTINPAGAGDLVIGWCHCHRENLLGSFLDVSVVLTPSSTKNTGEKSQKKKAMEEDAKDGSLPPGFRFHPTDEELITYYLINKISDANFTGRAIADVDLNKSEPWDLPGKAKMGEKEWYFFSLRDRKYPTGVRTNRATNTGYWKTTGKDKEIFNSVTSELVGMKKTLVFYRGRAPRGEKTNWVMHEYRIHSKSAFRTSKDEWVVCRVFQKSAGAKKYPPNQSRAVNPYSLDMGPSSIPAQMMQAAENYQFPVGRNYMSQAELAELTRAFRAGGSSTSVNLPLQSQMNYPVGAGAGCFTISGLNLNLGGAATQPIFRPMQPNPPPAMNQQDVASSMMTSNTSFAAEAAGYGAEMNNANAPSSRFMGVEHCMDLDNYWPSY

SEQ ID NO: 22812 - protein, 173 aa, Ricinus communis
MPRVRDPLVVGGVIGDILDPFTKSISLSITYSNKDVNNGYELKPSQVVNQPRVDIGGDDLRTFYTLVMVDPDAPSPSDPNLREYLHWLVIDIPGTTGATFGQEIVCYESPNPLLGIHRFAFILFRQLGRQTVYAPGWRQNFNTRDFAELYNLLPVAALYFNCQRENRCGGRRS

SEQ ID NO: 22813 - protein, 568 aa, Ricinus communis
MVGKAVISVFSLILVVGVVIGVVAIVQRSNNSGGNSGSGQQVSTSTKSVAQICQPTDYKEACEKSLNSVKDTKDPKEYVKAAILATVEAATKSFNLSSNLIVDAKNADNDTRMSLEDCKDLLQDAVQELQASFSTVGESTVNTMDQRIAELQNWLSAVVSYQDTCLEQFGDPNSNYKSQMQDGMVDATQLTSNALAIINALSQMLSTFDLKFDLTSESGDNSRKLLSVDETGVPIWFDGAKRRLMAADTSAIKPNITVAQDGSGDVKTVTEAIAKIPLKSENPFIIYVKAGTYKEYPIVEKKMLNVFMYGDGPKKTIITGSHSNHTGWKTMRSATFAALGPGFMAKSMGFENTAGPEGHQAVALRVQADRAAFFDCNIDGYQDTLYTQAHRQFYYGCSISGTIDFIFGDASVVIQNSKIVVRKPMKNQGNTVTAHGRTMKHETTGLILQNCQIIAEDLLFPERTVVKSYLGRPWKAYSRTIVMESEITDVIQPEGWLPWNGDLYLDTLDYAEYANTGAASATDKRVKWKGFHVITSKKEAEQFTVGPFIQGGEWLNGTGIPFKLGFTK

SEQ ID NO: 22814 - protein, 403 aa, Ricinus communis
MVVTESEVISQNEVDSPLQPDQQPRNLPFSSLGRQSSIYSLTLDEFQHTLCESGKNFGSMNMDEFLTSIWNAEENQATATSSSDRINNTNNNRGNRLSSFNDHLSANDHRAISRQPSLPRQGSLTLPAPLCRKTVDEVWSEIHREQQRGQGHSSTSSSGDNNMQNPESAARQPTFGEMTLEDFLVKAGIVREHGSPAAPSILPSHQQQQYVLYNQSVTNNNHAIGTGFVSRPVLGVSGGGTGGGNSVGYQTMAPQSGAAGETPGRNAGFIPQGAVAPSGSVYGGRVGNGGGYAPTEGMGVVGQVSPVSSDAMVNTSVDNTANQFGIDMGGLRGRKRIIDGPVEKVVERRQRRMIKNRESAARSRARKQAYTVELEAELNQLKEENKQLRHVLTELERKRKQQL

SEQ ID NO: 22815 - protein, 490 aa, Ricinus communis
MAISSSSFNFAVHDSNRDEFLQNHNIPSIKKSPTIFKKLGAKRGELQGIAFAGTKRVILRTHQNKAIQAVLSSDREVEVSEASKSKGLRGQLNKVVLAYSGGLDTSVIVPWLRENYGCEVVCFTADVGQGLKELEGLEEKAKASGACQLVVKDLQEEFVRDYIFPCLRAGAIYERKYLLGTSMARPVIAKAMVDVAKEVGADAVAHGCTGKGNDQVRFELTFFALNPELNVVAPWREWDIKGREDAIEYAKKHNVPVPVTKKSIYSRDRNLWHLSHEGDILEDPANEPNKDMYMMSVDPEDAPNQPEYIEIGIVSGLPVSVNGKQLSSASLLSQLNEIGGRHGIGRIDMVENRLVGMKSRGVYETPGGTILFTAARELESLTLDRETMQVKDSLALKYAELVYAGRWFDPLRESMDAFMEKISEKTTGSVTLKLYKGSVLVTSRTSPYSLYRQDISSFESGKIYDQADAAGFIRLYGLPMKVRAMLENGI

SEQ ID NO: 22816 - protein, 145 aa, Ricinus communis
MDPTLFRTMARTLGCTFPHYSPPHVDASRPSLGFPLGTALLLIIIFTLSGIFSCCYHWDKLRSLRRSFSDDPDPEADIEASPSKPKPHNMDLKQNQSQSFPVLMPGDQIPKFIALPCPCEPPRAEKVVLKVPKPPKPPRFPVPLY

SEQ ID NO: 22817 - protein, 590 aa, Ricinus communis
MAASLAIETNTASQEMLDLEQNGQAERAHWVLNPPEPPSLWRELMGSIRDTLLPNGRNFQSFKNQQYGFKTVVSVLQAIFPILSWSRDYKATKFKNDLLAGLTLASLCIPQGIGYATLAKLDPQYGLYTSVIPPLIYALMGTSREIAIGPVAVVSLLLSSMIQNVEDPTANPVAYRNLVLTTTFFAGIFQAAFGLFRLGFLVDFLSHAAIVGFMAGAAIVIGLQQLKGLLGISHFTNKTDVISVLKATWISVHHSWNPHNFILGCSFLSFILTTRFLGKKNKQLFWLPAIAPLLSVVLSTLIVYLTRADQHGVKIIKHIKGGLNPSSLHQLQFNDPHIGEVAKIGLIVAIIALTEAIAVGRSFASVKGYHLDGNKEMVAMGVMNIFGSFSSCYVATGSFSRSAVNFSAGCETAVSNIVMATTVIICLELLTRLLYFTPIAILASIILSALPGLIDLNEIYKIWKVDKLDFLACIGAFFGVLFASVEIGLLAAVTISFMKIIIISIGPGTEILGRLPGTQVFGDVDQYPMAIKTPPVLIIRVKSGFLCFANANFVKEKIMKWATEKEEEENRKTTIQVVIFDMSSKCLETK

SEQ ID NO: 22818 - protein, 484 aa, Ricinus communis
MAAASLRTLTSSISHLGGSAHQSVALDLGSQPSRSLFFPSRPYNLFLKPLEATRQVGSSRISAVVKPESDSDQEMELDISLSPRVNSLKPSKTVAIMDHATSLLEAGIPVIRLAAGEPDFDTPTPIAEAGINAIREGYTRYTPNAGTLEVRTAICHKLKEENGLSYAPNEILVSNGAKQSIVQAVLAVCSPGDEVLIPAPFWVSYPEIARLADATPVIVPTSISENFLMDPRLLESKISEKSRLLILCSPSNPTGSVYPKELLEEIARIVAKYPRLLVLSDEIYEHIIYAPATHTSFASLPGMWERTLTVNGFSKAFAMTGWRLGYLAAPRHFLAACNKIQSQFTSGASSIAQKAAVAALGLGFAGGEAVSTMVKAFKERRDFLIKSFGEMEGVRMSEPQGAFYLFIDVSSYYGVEVEGFGKIDDSDSLCRYLLDNAQVAVVPGGAFGDDSCIRISYAASLTTLQAAVERIKKALIPLKPAVPV

SEQ ID NO: 22819 - protein, 768 aa, Ricinus communis
MSGRRDSPAAMWSRRSVSCVVAAFVLLNSLASLVSAQGSGTSWKTLSGNPPLVIARGGFSGIFPDSSSAAYQLALITGVPDLILWCDVQLTKDGVGICAPDLRLDNSTDISLVFKNKDKNYLVNGAPTQGWFSVDFTFNDLSSVVLTQGVYSRSNKFDGNLFPIQTVENVTGLKPPSIWLNIQHDAFFTQHNLSMRSYVLSLSKKVVINYISSPEMAFLRGIASRFNPKVTKLVFRFLGPNEIEPSTNQTYSALSKNLTFIKTFASGILIPKGYIWPVDASLYLQPHTSVVSDAHKAGLEVFASEFYNDVPFSFNYSYDPISEYLSFVDNGDFSIDGVLSDFPITPSGAFDCFSQIGQNATKQSNVLVISKNGASGDYPGCTDMAYQKAISDGADVIDCPVQMSKDGIPFCLSTINLIDSTKVAQTNYGSLAANIPELEKGSGIYTFNLTWSQIQTLTPAIANPYAIYKLFRNPKFRNAGKFLTLSDFLALAKNTSSLSGVLISIEHAAYLIEKQQLPVTDAVLGALSKAGYENQTAIDVMIQSTNSAVLMKFKDKKNYKLVYKVDENIRDALDATIEDIRTFANSVVVNKNSVFPDNSLFLTGATDVVPKLQSAGLPVYVELFSNEFVSQAWDFFSDANVEINSYVIGANVSGVITDFPKTAARYKRNKCLNMGNSTPAYMAPVQPGSLLQLITQDYLPPAEAPNPVLTEADVAEAPLPPVKARGPSSSTGDETRAAAPVPPNGQHKIAACFFLSNLAVLFSVLVLL

SEQ ID NO: 22820 - protein, 606 aa, Ricinus communis
MEKQVSFKGRAMEKQVSFKQKVMEKLPSFHGITENPPTSHGLMEKHPSFRGALEKQKSFRGFVEKQKSFRVIMERQLSFIGGGERKKNKESPGKRGDSQIHLAARAGNLSRVREILQNCDGNEAKDLLAIKNQEGETPLYAAAENGHVGIVAEMLEYMNLETASIPARNGYDPFHIAAKQGHLEVLNALLHVFPNLAMTTDLSCTTALHTAATQGHIDVVNLLLETDSNLAKIARNNGKTALHSAARMGHVEVVRSLLSKDPSTGLRTDKKGQTALHMAVKGQNEEIVLELLKPDPAFMSLEDNKGNTALHIATKKGRTQNVRCLLSVEGINVNAINKAGETSLDIAEKLGSPELVSILKEARALNSKDLGKPQNPAKQLKQTVSDIKHDVQSQLQQTRQTGFKVQKIAKRLQKLHISGLNNAINSATVVAVLIATVAFAAIFTVPGQYIEDKEKGTSLGQAHIADNPAFLIFFVFDSLALFISLAVVVVQTSVVVIEQKAKKQLVFFINKLMWLACLFISIAFISLTYVVVGEKYRWLAIYATVIGGSIMLTTIGSMCYCVILHRMEESRLRSIRRESRSRSYSMSMVSEQEIFDSEYNKRMYAL

SEQ ID NO: 22821 - protein, 199 aa, Ricinus communis
MEPSSSSSYSTPSAPPYPALLTPTPLSAKIEEPMTATGIPVSLPTQITRPPSTLDASNNLHSPVAWSTGLCGCFEDVRSCCLTCWCPCITFGRIAEMADRGSTACGVSGALYTLILCLTGCSCLYSCFYRSKLRGQFFLEESPCTDCCVHCFCEECALCQEYRELNNRGFDMSIGWHGNMERQKRLAAMAPAIEGGMIR

SEQ ID NO: 22822 - protein, 155 aa, Ricinus communis
MSKVGDSNVFDAVSHLFSIPESIEKFMIHSRVNDTNENKGVGSIPVDILDTSKEYIFHMDVPGLSKSDIQVTVEDESTLVIKSGGKRKREDGEEEGCRYIRLERRAPQKLMRKFRLPENANASAVTAKCENGVLTVVVEKHPPPPKPKKIEVTVS

SEQ ID NO: 22823 - protein, 325 aa, Ricinus communis
MGLSDPKKGSRRTSFMNKILNGDRPTQAASFLKRNPTLKKKAFELQTLCDVSVSIVSFGPDGGLETWPDNEAQIRAAIMSYKELKPKDKRESNLFKFLETKKAKLVKKKKQVMKRKLDVAIQGLSKHVDGLSGQSLMDFVNLFEGKLKGFQEKLKSLESAAATQDDTLQATICPDAINPLLSSADCPVNSLVKFDIHQNNNQGPKDGTSASLPRNCHNYPTTLGSFETGSFNQPRNDSYKNLENCSGGNNFLYNSSTFGRAEVNYGNNAALFDQFNSNNFFVGSSSSNSSFGIIEANDGEANAQENLGMVGENDIFWWDGNMVQY

SEQ ID NO: 22824 - protein, 157 aa, Ricinus communis
MAFASFVGRVLFASVFILSAWQEFNDFGVDGGPAAKSFAPKFNVFSRHVSSNTGFQVPPVEIKHLVAAAIAVKGLGGLLFIFGSSFGAYLLLLHQAVVTPILYDFYNYDADKKEFHQLFTKFTQNLALFGALLFFIGMKNSIPRRQLKKKTPKSKTM

SEQ ID NO: 22825 - protein, 160 aa, Ricinus communis
MSDEEHHFESKADAGASKTYPQQAGTIRKNGYIVIKNRPTKVVDVSTSKTGKHGHAKCHFVGIDIFNGKKLEDIVPSSHNCDVPHVTRTDYQLIDISEDGFVSLLTENGSTKDDLRLPTDENLLSQIKDGFAEGKDLVVSVMSSMGEEQICALKDIGPKN

SEQ ID NO: 22826 - protein, 99 aa, Ricinus communis
MSGVTNQEEDKKPTDQSAAHINLKVKGQDGNEVFFRIKRSTQLKKLMNAYCDRQSVEFNSIAFLFDGRRLRGEQTPDELEMEDGDEIDAMLHQTGGAAA

SEQ ID NO: 22827 - protein, 260 aa, Ricinus communis
MPLEQEKFSLAKARSDEELIESTVLNDCQDNNTSLPLDKDNLRGTVMDTSAIGDQENTSLDKSNKEKGLRGKRVIKKKEIKHRFRRILTEKLMVQPNAEEGSTSKKQQHNAKEKVRRMKLNASYLALGSLLSNSRRSKKRWTAPVIVDKVLEYIPELQSEIEELILKKNSMVSKIKNEQAIQHNASVELQAPTVSVHEVKHGELIIQICMQTDQDKGLSILMQNLEAESMVISSASSIGVCDDRICYHVHIQEIAKDTRH

SEQ ID NO: 22828 - protein, 395 aa, Ricinus communis
MSSPPFENPVHLVDHNFFSPLETSDTLWQCQQESNMLSLPIEDHNSIGSFNCQWPFVQESSISSHAAEFTKNVSEWDPDLLLAEEFSASAMSSINEGIPENILHYHKDRTFLKNVQVSNDPWPSYGEGNTGDLDPNMPLEQESFSLAKTRSDEELFGSTVLNACHDNSTSLPSDKNNLRASGINTNATVEQENTSLDKSNKEKGLRGKRVIKKKEIKHRFRRILTEKLKVQTNAEEGSTSKKQEHNAKEKVRRMKLNASYLALGSLLPNSRRSKKRWTAPVIIDKVLEYIPEVQSEIEELILKKNSIVSKIKNGQAIQHNASVELQAPTVSVHEIKHGELIIQVCMQTNQDKGLSILMQNLEAEGMVISSASSIGVCYTDLLLQCFIIPAFSVYL

SEQ ID NO: 22829 - protein, 205 aa, Ricinus communis
MEPTITSYLLKFALTFLLFISNMEKSSSSATAATTKSSSSAYKEYLKTACSSTTYPKLCYSSLSPYCYTIKTDDLTLCSTALNVSLQVAYNTSSLVTVLSKQKGLSKTEAQVIEDCIDEMGDSIDELSQSLDAFGSLKLNSTDLRFQISNIQTWVSAALTNEDTCSDEIDDTRVSSSAKKKIKKSISNVARITCNALALINKLPY

SEQ ID NO: 22830 - protein, 763 aa, Ricinus communis
MSKQRRRRARNTKERMIGSHSTREITAPLNSPSVSATSALDDVNSEENSPIEQVALTVPITDDPMLPAVTFRTWTLGTLACILLSFLNQFFWYRREPLAITSIFAQIAVLPLGHLMASAITDKVFFRGTKLEFTLNPGPFNVKEHVLITIFANSGAGNVYAIHIVSAVKIFYKKELSFLVALLVVITTQVLGFGWAGVFRRYLVEPAAMWWPQNLVQVSLFRALHEKEERHKGRLTRNQFFIAAFICSFAYYVFPGYIIPKLTSVSWICLIFPASILAHQLGSGLHGLGIGAIGFDWATTSSYLGSPLASPWFATANVAAGFALIMYVITPIAYCLNIYKANTFPIFSDGLFTSSGRRYNVSAIIDPKFHIDMDAYNRQGPLYLSTNFAMIYGLNFACMTATIVHVFLFHGRDIWQLSKSAFQEKKMDVHTKLMRKYKPVPEWWFLCILLLNISATIFTCQYYNAQLQLPWWGVLLACSLALLFTLPVGVITATTNQTPGLNVITEYIIGYLYPGFPVANICFKVYGYISMKQGITFLHDFKLGHYMKIPPRAMFMAQVVGTVIAALVHLATAWWLMETVPNICERELLPKGSPWTCPGDHVFYDASVIWGLIGPRRIFGDRGHYSAINWFFLAGAIAPVLVWLAHKTFPDKHWIRLISMPVLLGATLNMLPATAVNYTTWVLVGFASGFIAYRYYRDWWSRHNYVLSGALDGGLAFMAVLLYLSLGMQHVSLDWWGNDSDGCPLASCPTAPGVVVNGCPPVI

SEQ ID NO: 22831 - protein, 602 aa, Ricinus communis
MGQCYGKTNPTNENDTTTTIVTTADPNQTPLRPSTPRNGVPSVKNTPARSFNHPSPWPSPYPHGVSASPLPGGVSPSPARASTPRRFFRRPFPPPSPAKHIAASLAKRLGGGAKPKEGPIPEHGGAEPDQQQQQSLDKSFGYSKNFGAKYELGKEVGRGHFGHTCSARVKKGELKDQPVAVKIISKAKMTTAISIEDVRREVKILKALSGHKHLVKFYDACEDANNVYIVMELCEGGELLDRILARGGRYTEEDAKAIVVQILSVVSFCHLQGVVHRDLKPENFLFTSGGEDADMRLIDFGLSDFIRPDERLNDIVGSAYYVAPEVLHRSYSLEADIWSIGVISYILLCGSRPFWARTESGIFRSVLRSDPNFDDLPWPSVTPEGKDFVKRLLNKDYRKRMTAVQALTHPWLRDDSRSIPLDVLIYKLVKIYLHATPFKRAALKALSKALTEDELVYLRAQFRLLEPNRDGSVSLDNFKMALVRHATDAMRESRVPEILNAMEALAYRKMYFEEFCAAAISTYQLEALEGWEQIASTAFEHFEREGNRVISVEELARELNVGPSAYSFIKDWIRNSDGKLSLLGYTKFLHGVTLRSSNTRHQ

SEQ ID NO: 22832 - protein, 234 aa, Ricinus communis
MANLFSKLSLLLFSFMSSANFGIWNEPNNNGDNVKSIGTYPPTCNRIECPLYDVIEVGNGYEIRSYNSTAWMSTSSIQDISLVDATGTGFLQLFDYIQGKNSYGQQIEMTAPVITEVLPSDGPFCESSFTVSFYIPKENQANPPPAKGLHVQRWKQTYAAVRQFSGFVTDSNVGEEAAALQASIADTKWAAAIEKSHDAADRTTSVYTVAQYNSPFEFDSRVNEIWMLFDVDEQ

SEQ ID NO: 22833 - protein, 524 aa, Ricinus communis
MANSKYEYVKSYEVEDEVMLPNIIVVRIDGHDFRRFSKVHEFELPNDENCLKLMNECATCVLREYPDIVFSYGSSDEYSFVFKKKTKFYQRRASKILSLVVSFFSSIYVTKWKKHFPQREMRYPPSFHGQVIPCASIEVLQEYLAWRQRDCHVSNLYNTCLWKLVESGKTEREAQEILKGTQKQEKHDLLYLQFGVNYNNCNVMFRQGSCIFMTQEEDIVKYRENGTPVRRLRRKAITVHSENIAGRCFWNGHQNLLIELGGFAEDIGKVNPDYIRSFLFKSKLLQSTWVVIRIDGCHFHRFSDGHEFEKPNDEQALNLMNSCAVAVLKEFQDVVFAYGVSDEYSFVLKKDSKFYSRQASDIVSVIVSFFSSMYVMNWKSFFPQKDLKYPPSFDGRAICYPSSEILQDYLAWRQVDCHINNQYNTCFWALVKSGKSKTDAQSTLKGTQVREKNEILAQFGIDYNNLPLIFRQGSSVFRVKEDIVIHENGASAKNLRTKFLEGAPRHPWLEAPATRTNNHPTHLS

SEQ ID NO: 22834 - protein, 276 aa, Ricinus communis
MNSILLPLSLVFQFPSFHFSPRHRLQAQYTSTSCVGHRVHFISSFSHLFPSNSRYSLHTHQSSIGATVPSNDEGPVSVIHFEDFIEKDWSFLDFEDLNSKEHKQKVGQIISAGEIEETSRILVSIGSEEFVDQLVDTSPKSHLFVVHDSLFLLAMIKEKYDKVKCWQGELIHVPEKWAPLDVVFLYFLPVLPFKLDQVFGTLAQRCSQGARVIVSHLQGREVLEKQRKQYQDVIVSELPDKMTLQNVAANNSFQVTEYVDEPGLYLAVLRFSGARN

SEQ ID NO: 22835 - protein, 607 aa, Ricinus communis
MDTNIGSIDTLKPTTTDVCCPANGAVCTLQSSTVSPSSIVSSPDSTLGRHLARRLVQVGVTDVFSVPGDFNLTLLDHLIAEPGLNVIGCCNELNAGYAADGYARSRGVGACVVTFTVGGLSVLNAIAGAYSENLPVVCIVGGPNSNDYGTNRILHHTIGLPDFSQELRCFQPVTCFQAIVNNLEDAHELIDTAISTALKESKPVYLSISCNLSAIPHPTFSREPVPFSLSPRLSNKIGLEAAVEAAAEFLNKAVKPVLVGGPKLRVAKACEAFVELADACGYALAVMPSAKGLVPEHHSHFIGTYWGAVSTAFCAEIVESADAYLFAGPIFNDYSSVGYSLLLKKEKSIIVQPDRVVIGNGPAFGCVLMKDFLKALAKRLKNNTTAHENYRRIFVPEGQPLKSQPKEPLRVNVLFQHIQKMLSSETAVIAETGDSWFNCQKLKLPKGCGYEFQMQYGSIGWSVGATLGYAQAVPEKRVIACIGDGSFQVTAQDVSTMLRCGQKTIIFLINNGGYTIEVEIHDGPYNVIKNWNYTGLVDAIHNGEGKCWTAKVQCEEELIEAIETATESKKDCLCFIEVIAHKDDTSKELLEWGSRVSAANSRPPNPQ

SEQ ID NO: 22836 - protein, 289 aa, Ricinus communis
MGCLDDGCNTGLVLGLGFTTATISNPDSTINNQNNQKLKTKPCLKFDQMVGTASFEPSLSLGLSAHHIGSSNNKMKIDVIKKATCHEDSVDLFRQASPHSCSAVSSFSSGRVKRERDFSSEEIDVERVSSRISDEDEDGTNTRKKLRLTKEQSALLEESFKQHSTLNPKQKQALARQLNLRPRQVEVWFQNRRARTKLKQTEVDCEFLKKCCETLTDENRRLQKELQELKALKLAQPFYMHMPAATLTMCPSCERIGGVGDAASKNNPFSMAPKPHHFYNPFTNPSAAC

SEQ ID NO: 22837 - protein, 395 aa, Ricinus communis
MLSRLINFLRACWLPSSERYVHMGSDAAGRQDGLLWYKDTGQHVNGEFSMAVVQANNLLEDQSQLESGSLSTLDSGPYGTFVGIYDGHGGPETSRYINDHLFQHLKRFTSEHQSMSVDVIKKAFQATEEGFLSLVTKQWPMKPQIAAVGSCCLVGIICGGILYIANLGDSRAVLGRLVKATGEVLAIQLSAEHNVSIESVRQEMHSMHPDDSQIVVLKHNVWRVKGLIQVSRSIGDVYLKKAEFNREPLYAKFRLREPFKKPILSSEPSISVHELQPHDQFLIYASDGLWEHLTNQEAVDIVQNHPRNGIARRLVKAALQEAAKKREMRYSDLKKIERGVRRHFHDDITVIVVFLDSNLVSRASTAKGPSTSVRGGGVHLPAKTLAPCGAPMETS

SEQ ID NO: 22838 - protein, 427 aa, Ricinus communis
MGEETSDTMNLDLNLGPGPEVGSGSISSEAVNFDGWVDDPLERIREAVRISNRARQRWRWRQYQFPPESHTLSVELNQLIGNSDSVSTLQAGEGSVAAEERTNEVPKMCENNNGFLEDDVSEKTGDVEKGSGGDGSFFDCNICLDLATDPVVTCCGHLFCWPCLYRWLHVHSDAKECPVCKGEVTIKNVTPIYGRGSNTREPEEDLGLEIPHRPHARRVESWRQTIQRSSFSLPMEEMIRRLGSRFDLTRDLNPMQDSNGVREMGDRTNALLSRIMTLRGQRAEQNPMAPLDDIVDLTHSGTSSPEAARQARRIHSLLLRRSQSNSQRSSTHNSHTSALNSAERLIEAYFRNHPTGRNQDPPLPVDDRDSFSSIAAVINSESQVDTAVEIDSMGSLSTSSSRRRNDTSRVSDMDTVDSRAPRRRRFN

SEQ ID NO: 22839 - protein, 168 aa, Ricinus communis
MAPPPPSLASRMAALILRILTFIFLIASLVILTTNTATLELDLVEVKVHFKDVYAYRYMLATIVIGLAYTVLQIAFTLYYVATGNRMMSGDGNLAFDFFGDKVISYILVTGAAAGFASTKDIKPVFSGSGDFDAFINKGYASASLLLIGFVCTAVLSVFSSYALPKQV

SEQ ID NO: 22840 - protein, 181 aa, Ricinus communis
MPLKSSVLSNASRKAPLVLRVLTFIFLLASLIILISDTASLVVKLDEVNFHFKDVISYRFMLATIVIGMAYTIMQVVFRIYHATTGKSVLSGDGNLLFEMYGDKVISYILATGVAAGFGVSVDLKPIFEDLGAGEVVAFFDKGYASAGLLLIGFLCMAISSVCVSYTLPNYVDVAQSSVNV

SEQ ID NO: 22841 - protein, 244 aa, Ricinus communis
MKMMQDEIRKGPWTEQEDILLINFVHLFGDRRWDFIAKVSGLNRTGKSCRLRWVNYLHPGLKRGKMTPQEEKLVLELHAKWGNRWSRIARKLPGRTDNEIKNYWRTHMRKKAQERKRAMSPSSSSSNSSSGSNITTVNSSSPFPETGEASFYDTGGPDSSALGGKSREEVQGGEKGYSMDEIWKDIENTIGPVCDGFSKEGCNFSCPSIVSPPWDYCPEPLWRMDDEESKMLLSYEYGTMFLTG

SEQ ID NO: 22842 - protein, 228 aa, Ricinus communis
MRRGRGAAVAAKQEAAQPNGSAPAPQNTPNGKEPRYRGVRKRPWGRFAAEIRDPWKKTRVWLGTFDSAEDAARAYDTAARTLRGPKAKTNFPINASQLSPFAYQNPPDPFVDYHHRVFTTNNGYESHPVNPQRPTSSSLSSTVESFSGPRPPPTTVGSQKRHHPRTPPVVPEDCHSDCDSSSSVVDDGDIASSSSLCYRKPLPFDLNFPPLDQVDFAGDDLQCTALCL

SEQ ID NO: 22843 - protein, 391 aa, Ricinus communis
MSENNANTTDPLLGRKSSKFTRIVVPAISHFVLACSTCDSKHKRPYDSVVQLSLSSVATLSFVCLSKFIRKYGLRRFLFLDKLCDESETVRKGYTDQLNWSLKLLSIFVLPCFVAESAYKIWWYASGASQIPFLGNVILSDTVACIMELCSWLYRTTIIFLVCVLFHLICHLQILRLQDFAQVFQVDSDVESVLSEHLRIKRHLRIISHRYRAFVLWALILATGSQFASLLITTKSGAVVDVYRAGELALCSITLVTGLLIILRSATKITHKAQSVTSLAAKWHICATLDTFDSTEGETPRTPTANGITDDEEGDDAGDEEDELDNSKLIPAYAYSTISFQKRQALVNYFENNRAGITVYGFTLDRSTLHSIFGVELALVLWLLGKTVGIS

SEQ ID NO: 22844 - protein, 584 aa, Ricinus communis
MASPSSPSLSLTNTNTSASSFFSDYLHSLSQTPYRLKKRMLATWTPAQELNQVRLRSGADMKRKLKWHDLIALGIGGMLGVGVFVTTGSVALEDTGPAVFISYIIAGISALLSSLCYTEFSVQIPVAGGAFSYLRVTFGEFIGYFAGANILMEYVLSNAAVARTFTDYLCRTVGENNSNSWRVEVNGLVEGYNKLDFTAVALVLLLTLCLCHSTKESSTLNLVMTVFHVIFFAFIIIAGIYKGSVKNLVEPGGIAPYGVKGIINGAAIVYFSYIGYDSVSTMAEEIQNPSKSLPIGILGSVLIVCLLYCLMALSLCVMMPYNMIPKEAAFSMVFQKIGWNWASNVVGAGASLGIVASLLVAMLGQARYLCVIGRARLVPSWLAKVNPSTGTPLNATLFLGLCTASIALFTELPIVLEMISISTLLVFYLVANALIYRRYVIISKNPPSHTLLFLFLLSFTAIGFSISWKLEEQKWGLPLFGLITVAITAFFQYMVPSISQPNEEWSVPLMPWPAALSIFLNVFLTTTLKLLAFQRFAVWACLITIFYVLYGVHSTYQAEDMELGVDQMQQHPSIQQSKLDIQVI

SEQ ID NO: 22845 - protein, 575 aa, Ricinus communis
MCGILAVFGCIDTSQAKRSRIIELSRRLRHRGPDWSGLHCHEGCYLAHQRLAIVDPTSGDQPLYNEDKTVVVTVNGEIYNHKQLREKLKPHKFRTGSDCEVIGHLYEEYGENFVDMLDGMFSFVLLDTRDKSFIAARDAIGITPLYLGWGLDGSVWFASEMKALSDDCERFMSFPPGHLYSSKEGGLRRWYNPSWYSEQIPSTPYDPLILREAFEKAVVKRLMTDVPFGVLLSGGLDSSLVAAVTCRHLAESEAARQWGSQLHTFCIGLKGSPDLKAAREVADYLQTRHHEFHFTVQEGIDALEEVIYHIETYDVTTIRASTPMFLMSRKIKSLGVKMVISGEGSDEIFGGYLYFHKAPNKEEFHQETCRKIKALHLYDCLRANKSTSAWGVEARVPFLDKEFINVAMSIDPEWKMIRRDLGRIEKWVLRNAFDDEKNPYLPKHILYRQKEQFSDGVGYSWIDGLKDHANKQVTDAMLMNASFVYPENTPTTKEAYYYRTIFEKFFPKNAARSTVPGGPSVACSTAKAVEWDAAWSKNLDPSGRAALGVHEAAYEETVDTTKTASLMNNGSPQTL

SEQ ID NO: 22846 - protein, 323 aa, Ricinus communis
MGSRSKCCFRAFLVLVVASLASASPLLSPYYYDKVCPEALPTIKRIIEAAVYEEPRMGASLLRLHFHDCFVNGCDASVLLDSSPTIDSEKNAVANLNSARGFEVIDQIKLAVDEVCGHPVVSCADILTVAARDSVVALGGPTWTVQLGRRDSTTASRTQANRDIPSPFMDLPALINNFKNQGLNEKDLVALSGGHTLGFAKCFVFKDRIYNDTKTIDPKFAKARRSTCPRTGGDTNLAPLDPTPANFDIAYFTNLINKRGLLHSDQQLFVGGSTDALVTKYSLNAKAFSADFVKSMVKMGNIKPLTGKQGEIRLNCRKVNDYY

SEQ ID NO: 22847 - protein, 319 aa, Ricinus communis
MASSSGCYLCGLLLLLAIAATASSTLSPSYYDQVCPNALTTIKRVVEAAVSRERRMGASLLRLHFHDCFVNGCDASLLLDSSPSIDSEKNAAPNVNSARGFEVIDQIKSEVDEVCGRPAVSCADILAVAARDSVVALGGPTWEVQLGRRDSTSASRTMADTDIPSPFMDLPALIEKFKNQGLDEEDLVALSGAHTLGFAQCRVFRNRIYNESNDIDPEFAEQRRSSCPGTGGDANLSPLDPTPAYFDISYFTNLKNNKGLLHSDQQLFSGGSTDEIVLSYNSDAEEFWEDFAESMVKMGNIKPLTGNQGQVRLNCRNVN

SEQ ID NO: 22848 - protein, 449 aa, Ricinus communis
MAKTLISSPSFIGAPLPSSSSRHGLQHSLLPSRRFISTTKVKFSLHEIPPITHLDSVDFNSIVSRAESLLYTLADAAVAVDSSAATDTAVQKNNGWFGFISEGMEFVLKVLKDGLSSVHVPYSYGFAIILLTVIVKIATLPLTKQQVESTLAMQNLQPKIKAIQQRYAGNQERIQLETSRLYRQAGVNPLAGCFPTLATIPVWIGLYQALSNVANEGLLTEGFFWIPSLGGPTTIAARQSGSGISWLFPFVDGHPPLGWYDTAAYLVLPVLLVVSQYVSMEIMKPPQTDDPAQKNTLLVFKFLPLMIGYFSLSVPSGLSIYWFVNNVLSTAQQVWLRKLGGAKPVVDQNASGIITAGRAKRSASQPQRGGDRFRQLKEEEKRKKLGKALPDDEAQALDSASDSDEESDEETKAKGEEVLEEAYASSSSKQVPDISRPKRSKRSKRKRAV

SEQ ID NO: 22849 - protein, 330 aa, Ricinus communis
MAACQGNSPQETKKRGRAVLDGDKEARKQNFIRKILDDDKATKTASFYKRKPTLKKKAQELHTLCDVPVCVVCFGPNGSVDVWPEEEQCAKELMMSYKRSDKKERKESNVLELMQCKKKKLEKKKQEVKINALVSTLSKCLDGLSGIPLIDRVNELQDKLKIFKERIELLSMEKKRKRIETPDEEISPIVSILSSPKNQEFDNILLWPTSTSCSNLARPEGFDMAGTNNHSVVEDEVNSNVLLNNSNVLYGFQQIDPTVLDMSPGNLDMLENSDNYFVPFDHQHQISYIHDAMPISVWEPPQPLVHTVRSSGSSNVDSRNYFPAAGSTVR

SEQ ID NO: 22850 - protein, 128 aa, Ricinus communis
MSGVWIFDKKGVARLITNPTRESFEQKEPPSPGTATAPGARPRVLVYLPTNQVIRSYSELEQRLIELGWTRYSGCSQHNNLIQFHKSDNSAHLISLPNRFANFKSFHMYDIVVKNHSFFEVREPVAKD

SEQ ID NO: 22851 - protein, 157 aa, Ricinus communis
MRSFYPSTDPCRAETRSFLRGIDVNRLPATADCEEEAGVSSPNSTISSVSGKRSEREGINGEEHEHDMERASSRGISDEEDGDTSRKKLRLSKDQSAILEESFKEHNTLNPKQKLALAKQLGLRPRQVEVWFQNRRARTKLKQTEKKTDGCKKKFRS

SEQ ID NO: 22852 - protein, 603 aa, Ricinus communis
MLRFLSLRRSLHHHHASKPLNSSSTLKHPFNPARTLSTSSTSSTSSTSSSSSLSDAELRKYLGYTALLLFSGAATYYSFPFSDTAKHKKAQIFRYAPLPEDLHTVSNWSGTHEVQTRDFHQPEDLHQLEELVKDSNEKRAKIRPVGSGLSPNGIGLARGGMVNLGLMDKVLEVDQEKKRVRVEAGIRVQELVDGIKDFGITLQNFASIREQQIGGIIQVGAHGTGARLPPIDEQVISMKLVTPAKGTIEISKEKDPELFYLARCGLGGLGVVAEVTLQCVERQELVEHTYISNMKDIKKNHKKLLSENKHVKYLYIPYTDSVVVVTCNPVSKWKGPPKFKPKYSQDEAIQHVRDLYKESLEKYRTGVVAGKSVDNDEMDINELSFTELRDKLLALAPLNKDHVIKVNLAEAEFWRKSEGYRVGWSDEILGFDCGGQQWVSETCFPAGTLSKPSMKDLEYIEELKQLIEKEEIPAPAPIEQRWTARSQSSMSPASSSAEDDIFSWVGIIMYLPTMDARQRKDITEEFFHYRHLTQAQLWDKYSCFEHWAKIEVPKDKEEIAALQARLRKRFPVDAYNKARKELDPNRILSNNILEKLFPLSDTI

SEQ ID NO: 22853 - protein, 224 aa, Ricinus communis
MDPFNFHSPNSDFSSESSFGSPESFYGFSQNSLPFNENDSEEMLLYGLISEATQETSKIDYSNRNLKEEEVSSIVKESPKKEKSYRGVRRRPWGKFAAEIRDSTRHGIRVWLGTFDSAEAAALAYDQAAFSMRGPNAILNFPAERVKESLEEMKYSDEDGCSPVVALKRKHSMRRKMMSRTSKKERDVRRIDNVVVLEDLGADYLEQLLISSDHNQNANSNRPW

SEQ ID NO: 22854 - protein, 311 aa, Ricinus communis
MKPLYRKRKICYSRGAYQHDFFYKRRKLSDHSLVVTSDGGFSSESVCNSPEKGVHMNKNGLAAMFHGENGMSSSTIGHQASFNSVDSHVKFSIKSFRIPELFIEVPETTTVGSLKRTVMETMTAILGGGLRVGVVFHGKKVRDDNRTLLQTGITSKENLDSLGFTLEPSPGQALLAVCTEDPPVPLSCDISQLVSRSPAAPVLDSDNSDALPDPPPLTNSRDNIDNNHELASSYTDKLTDQTLSDSRALVAVPPVSVDALAMVPINQKTKRSELVQRRTRRPFSVSEVEALVQAVEELGTGRYSFIYGPTF

SEQ ID NO: 22855 - protein, 386 aa, Ricinus communis
MAKPVQIEVWNPNGKYRVVSTKSMPGTRWINLLIEQDCRVEICTQKKTILSVEDIIALIGDKCDGVIGQLTEDWGETLFAALSRAGGKAFSNMAVGYNNVDVNAANKYGVAVGNTPGVLTETTAELAASLSLAAARRIVEADEFMRAGLYDGWLPHLFVGNLLKGQTVGVIGAGRIGSAYARMMVEGFKMNLIYFDLYQATRLEKFVTAYGAFLQANGEQPVTWKRASSMDEVLRVADVISLHPVLDKTTYHLINKESLATMKKEAILVNCSRGPVIDEVALVEHLKQNPMFRVGLDVFEDEPYMKPGLAEMKNAIVVPHIASASKWTREGMATLAALNVLGKIKGYPVWGNPNQVEPFLNENAPPPAASPSIVNAKALGLPVSKL

SEQ ID NO: 22856 - protein, 240 aa, Ricinus communis
MEVHYINTGFPYTVTESFLDFFEGLSHVPVHYAHTGQVLDQVQENAYWSMNMNAYKYGFSGPGSTYYDPYEVNDNLPRMDVSRSTWEYPSVVNMEEATTTDTQSEGDAVVGVHASPEECIPNHTSGDSPQGVWQDDVDPDNMTYEELLDLGETVGTQSRGLSQELISLLPTSKCKFRSFFLRKKAGERCVICQMRYKRGDKQMKLPCKHVYHSECISKWLGINKVCPVCNNEVFGEDSRH

SEQ ID NO: 22857 - protein, 385 aa, Ricinus communis
MADQVQYPSVMQKVAGQYLHSSLSQDFQGFDGSLQRPALYQRRAYGNYTNAAFQYPMGCADLSVVPTTASSVCVQAPSEKGFAGFAIDFLMGGVSAAVSKTAAAPIERVKLLIQNQDEMIKSGRLSEPYKGIGDCFKRTIKDEGFGSLWRGNTANVIRYFPTQALNFAFKDYFKRLFNFKKDKDGYWKWFAGNLASGGAAGASSLLFVYSLDYARTRLANDAKAAKKGGERQFNGLVDVYRKTLASDGIAGLYRGFNISCVGIIVYRGLYFGMYDSLKPVVLTGNLQDSFFASFALGWLITNGAGLASYPIDTVRRRMMMTSGEAVKYRGSLDAFSQILKNEGAKSLFKGAGANILRAVAGAGVLAGYDKLQLIVFGKKYGSGGA

SEQ ID NO: 22858 - protein, 453 aa, Ricinus communis
MASKLLASTVRRAISKTTSSRHLSTSAAAAATVTSPYDNEEIVTVKGLKISARPLYLDMQATSPVDPRVLDAMLPYYLARYGNPHSRTHLYGWESDSAVETARSQVADLIGASPKEIVFTSGATESNNISIKGVMKFYKEKKRHVITTQTEHKCVLDSCRYLQQEGFEVTYLPVKNDGIVDLEKLRNAIRADTGLVSVMAVNNEIGVIQPMEEIGKICKEFKVPFHTDAAQALGKIPIDVDKWNVSLMSLSGHKIYGPKGIGALYMRRRPRIRVEPQMNGGGQERGIRSGTVPTPLVVGMGAACELAKKEMGYDDKRIRDLQERLLNGIKEKLDGVVVNGSVERRYAGNLNISFAYVEGESLLMGLKDVAVSSGSACTSASLEPSYVLRALGVDEDMAHTSIRFGIGRFTTEAEIDRAIELTVQQVEKLREMSPLYEMVKEGIDIKQIQWAQH

SEQ ID NO: 22859 - protein, 340 aa, Ricinus communis
MGSLDLPSPIPDPKSQSQIDQNTLLNLFKSQQNHLNYFFQNLDISQTLSFTQTLLNSRGTILFTGVGKSGFVANKISQTLVSLGIRAGFLSPVDALHGDIGILTPRDILVMFSKSGNTDELLRLVPCAKAKGAFLVSVTSVEGNALAMVSDMNVYLPLERELCPFDLAPVTSTAIQMVFGDTIAIALMGARNLSKDEYAANHPAGRIGKSLIFKVKDVMKKQDELPVCKEGDLIMDQLVELTSRGCGCLLVIDEEYHLIGTFTDGDLRRTLKASGEAIFKLTVGEMCNRNPRTIGPDAMAVEAMKKMESPPSPVQFLPVIDQKNIVIGIVTLHGLVSAGL

SEQ ID NO: 22860 - protein, 349 aa, Ricinus communis
MFKPRKRPMKKLESQKQRSVSFTKRRNGLFNKAAELFMLCDAQLAVLVASPCSKPKRKVYSFGHPSADVVLDAFLNNCAPVPVDNGARQSALSLLGEIKGLESEINSLSQRNARLTNVGDGFSSAFQYFENSKSIEELQAVVDVLEKLIVEAKSRVSNSISWVPSNENGNGFCTLNQPDNGFCFTNNNIPSTSKSFGDDLSMFQDSASGYNYDSNSVLPVDNKEKNLLVVPGSSHSCFNYNDKGKEKLADCNMIRDPVTSYFGCLNDYGIVGETSNSRLDENWSLTNCSTSHNSSCSLSDMTANYVYNQAPLDFSGAVGTLDTTLQDLAAAADDVYGDSAFLDDLWSYQ

SEQ ID NO: 22861 - protein, 232 aa, Ricinus communis
MAPEIKPRDVCIVGVARTPMGGFLGSLSSLSATKLGSLAIEAALKRANLDPSLVQEVFFGNVLSANLGQAPARQAALGAGIPNSVVCTTVNKVCASGMKATMLAAQSIQLGINDVVVAGGMESMSNVPKYLAEARKGSRLGHDSLVDGMLKDGLWDVYNDVGMGSCAEICADNHSITREDQDNYAVQSFERGIAAQDSGAFAWEIVPVEVSGGRGRPSIIIDKDEGLGKKIN

SEQ ID NO: 22862 - protein, 241 aa, Ricinus communis
MAPRDRSNNSNTSNNISDHNSNYNAKEIRYRGVRKRPWGRYAAEIRDPGKKTRVWLGTFDTAEEAARAYDAAAREFRGAKAKTNFPSLSEFNTGAPAASVTAAVSRSPSQSSTVESSSPPPPLPPAGSPAPLPLDLTLNIPSHHFHNGVNLSAGAWISLAAVGRPVFFFDAFAPQGRGENHKTQIFDQTAVMVSGGGGGAGTQSDSDSSSVVDYEQDHYPSPCKKGLSLDLDLNMPPAEVV

SEQ ID NO: 22863 - protein, 284 aa, Ricinus communis
MMCEQATGDSNYAAIESVRRHLLEGGESIMSSFSSNISNTTPAVATTGPKPVYCRSSSFSSLYPCLSENWGDLPLKADDYEDMLLYGVLRDALTVGWVPQDNFPLVKSEPLDNFPLSSLPLPPPMPEEIFTPPPVVTAQPSPPVASPAVAKGKHYRGVRQRPWGKFAAEIRDPAKNGARVWLGTFETAEDAALAYDRAAYRMRGSRALLNFPLRVNNGEPDPVRVTSKRSSPEPSSSSSESGSPKRRKKAAVSVKAQAGVQLGNVARCQQVANGTHGEQQLVSQ

SEQ ID NO: 22864 - protein, 225 aa, Ricinus communis
MEPSLFHQYLKPEIISFDSLQPFSWELEDDGFLFHPPSSLPFDCNDSEQMILFDVLSKATNRDQSSESNSTSSRVKEEEVSSSKEEEVSTGKKEKSYRGVRKRPWGKYAAEIRDSTRNGIRVWLGTFDSAEAAALAYDQAAFSMRGSMAILNFPVEMVRESMQEIKYRCEDGCSPVVALKRRHSMRRNSSSTESKGKEVNNNRTQHVVVLEDLGAEYLEELLSSS

SEQ ID NO: 22865 - protein, 315 aa, Ricinus communis
MSKGDKSGRVQNLIERCLQLYMNQKEVVETLLAQAKIEPGFTELVWQKLEEENREFFKAYYLRLTVKHQIIEFNKLLEQQVRLMRQINPAASMPTSNGTHIPPMHQNSACYASDHSGSALKPENMHHLFGSSMTNAFTNVGSSLHSSMHTAVEMSAHVNRIDAPPNMLSTQSSNIGLMQGLNGGMIKSEAGYSGTNPYMFGADGNVLEARPSLGDASVASFSSVESNSQALNEPLLDADTSSYGFLNHIPQTFSLSDLTADFAQSSDILENYPRSPFLASDNDNFLDSREQEHQGDNKRLDTISEGVSYDDFGSE

SEQ ID NO: 22866 - protein, 234 aa, Ricinus communis
MSNSTHTGQATNPICRADPHSSDQPDLAEDPLLRNGSFIDATTIKPNIDNNVSNNNNNNNYQQQEANVGVEQSEATPLKSRRKVPVTMAPAPSADSANWLPPGWLVEDRVRASGATAGTVDKYYIEPVTGRRFRSKKEVQYFLETGTKKKTKRGMENSEGDVNFTESPGSQKSKKASKNAKVQKRNFDYLNVPDRIEWALIDANQDAWTPFLGGQKVAEYDRQNWDFEMLHLHH

SEQ ID NO: 22867 - protein, 577 aa, Ricinus communis
  misc_feature (559)..(559): Xaa can be any naturally occurring amino acid
  unsure (1)..(577): unsure at all Xaa locations
MTQDKESLTGIQDSSKQHSIFKKHKKLFLALFASVLIIATVTAIVTGVNSNKKDTTASPSHSILKSSCSTTRYPDLCFSAVASAPGATSKLVSLKDVIEVSLNLTTTAVEHNFFTVEKLAKRKGLTKREKTALHDCLETIDETLDELHKAMDDLKEYPNKKSLSQHADDLKTLLSSAITNQETCLDGFSHDGADKHIREALLAGQVHVEKMCSNALAMIKNMTDTDIANELKLSGSKNRKLKEEKDQESVWPEWLSAGDRRLLQSSSVTPNVVVAADGSGDYKTVSAAVAAAPSKSSKRYIIRIKAGVYKENVEVPKGKTNLMFLGDGRKTTIITGSRNVVDGSTTFNSATVAAVGQGFLARGVTFENKAGPSKHQAVALRVGADLAAFYECDMIAYQDTLYVHSNRQFFINCYIAGTVDFIFGNSAAVFQDCDIHARKPNSGQKNMVTAQGRSDPNQNTGIVIQKCRIGATSDLRPVQSSFPTYLGRPWKEYSRTVVMQTAISDVIHPAGWHEWSGSFALSTLFYGEYQNSGAGAGTSKRVSWKGFKVITSATEAQGXVAAGEFHYFPILSWSVNS

SEQ ID NO: 22868 - protein, 589 aa, Ricinus communis
MDSINSFKGYGKVDELEQQAYRRKTRKRLIILIVSFIVLVAIIIGAVVGTVIHKRNNDSSPNSAVPTELTPAASLKAVCSVTQFPSSCFSSISSLETANTSDPEVLFKLSLHVVINELSKIKDYPSKLIQNSNLDATVKAALNVCESVFDDAFDMLNDSISSMTVGEGETILSPSKINDMKTWLSTTITDQETCLDALQELNGTKHFDSKVLEDIRTAMENSTEFASNSLAIVAKIIGLLTDFNIPIHRKLLGFERTSSGFPSWVSIGDRRLLQEAKPAANVTVAKDGSGDYTTIGEAVDAIPKKSPSRFIIHVKEGTYVENILMDKHKWNVMIYGDGKDKTIISGSTNFVDGTPTFSTATFAVAGKGFMARDIKFINTAGAAKHQAVAFRSGSDMSVYFQCSFDAYQDTLYAHSNRQFYRDCDITGTIDFIFGNAAVVFQNCNIMPRQPLPNQFNTITAQGKKDPNQNTGISIQKCKFYAFGPNLTASTYLGRPWKNFSTTVIMQSNIDSFLNPLGWMSWVSGIDPPSSIFYGEYQNTGPGSAIEKRIQWVGYKPSLTEVEAGKFSVGSFIQGTDWLPATSVTFDSSL

SEQ ID NO: 22869 - protein, 176 aa, Ricinus communis
MGLRNILVSTARKCIPQHHMMLEKFFPAMQYYYEPSIGRQFRSLSSIQKYLSEKIDVAPKRLKPGNETNCYIEPGTGKQFRSLISVERYLTEGKIYEATPKALTNGKEYLTTHKALKLGEHTVKTSLVDLHNPPVRIKWVLGPRGNAWSPLIDDTRILESVKHKWFETFVWTLNYG

SEQ ID NO: 22870 - protein, 483 aa, Ricinus communis
MSTSGQPQFRYTQTPSKVLHLRNLPWECTEEELIELCKPFGKIVNTKCNVGANRNQAFVEFADLNQAIQMVSYYASSSEPAQVRGKTVYIQYSNRHEIVNNKSPGDVPGNVLLVTIEGVEAGDVSIDVIHLVFSAFGFVHKIATFEKAAGFQALIQFTDAETASSARNALDGRSIPKYSFFSLNLHLSLNSALLYSRFTQSKSLDDLQFLICLLNFRDYTNPYLPVNPTAIEGPVQPAVGPDGKKKEPESNVLLASIENMQYAVTVDVIHTVFSAFGTVQKIAIFEKNGGTQALVQYPDVATAAVAKETLEGHCIYDGGYCKLHLSYSRHTDLNVKAYSDKSRDYTIPDASLLAAGQVPGVPTAPTMWQNPQASPMYPVNSYASAAAVTAQVPAGQVPAWNPSMEAGGPAYPSVPPGTFPGQSYPAPPPTYVSAAMPVGSSPLTQGSPMSPGVGTMPMTHPGVQSNLRPGGASPPGQPPFYGR

SEQ ID NO: 22871 - protein, 248 aa, Ricinus communis
DRKALTHPEITDKQLKNNDHFVWQVEVPLTGKFIIDVEFLDLKTASPDGGEPCSIWAGGVTKKQSNATALACLGRMLKESIHTDITIYASDGSIGAHRAVLAARSPVFRSMFAHDLKEKELSTINISDMSLEACQAFLNYIYGSIQHEEFLIHRLALLRAADKYDIDDLKEACHESLLEDIDTKNVLDRLQSASLYQLPKLKMSCMMYLVKFSRIFDIRDDFNDFMQCADRDLIAEIFNEVLNAWKGF

SEQ ID NO: 22872 - protein, 383 aa, Ricinus communis
MCGGAIISDYIPPTISGRSSSRRLTADFLWPDLKKPVGKQYSKPVVVVDLDDDFEADFQEFKDESDVEEDEDVVLDVKPFGVSASALSPPHRKSAVSRGPTPVKTVEFNGQAEKSAKRKRKNQYRGIRQRPWGKWAAEIRDPRKGVRVWLGTFNTAEEAARAYDAEARRIRGKKAKVNFPDEAPRASTKPSVKASPQKSLSKTKMNETFSYLNNTEQDYFNSLGFVDEKPPVSQFGLMDSFPTNGDSGVKSNFPMYFNSDQGSNSFDCSDFGWGEHASKTPEISSMLSATPEIDESLFVEDANPKKRMKSDSGDVMPVEDNGKSLSEELLAFDNQENFQVPYLEGNWETSLESFLNGDTTQDGGNPVDLWSFDDLPSLVGGVY

SEQ ID NO: 22873 - protein, 233 aa, Ricinus communis
MASGIGESTSLPPESSSFSGNNNNNANDAGDFECNICFELAQDPIVTLCGHLFCWPCLYRWLHHHSHSHECPVCKALIQEEKLVPLYGRGKTQTDPRSKSYPGVDIPRRPSGQRPETAPPRPPPEANNFANYGFGLMGGFVPMATARIGNFTLSTAFGGLSLFPSLFNIQFHGFPDATVYGTTSGLPHGFHAFHGGHAHGFPQPMSRGQHADNVLKNLLLLIGVLVVLALLWW

SEQ ID NO: 22874 - protein, 525 aa, Ricinus communis
MGWLTKIFKGSSYKGQYHGRFGEDRYWEEPHRSADDLSDFDREELDCAIALSLSEEDQKGKKVIEEDNDSQQSEEDERRARAEEEEKRTTAEEEEKRARAEEDEKRAKAQLEEDEQLAKALQETLTVNSPPRYDFENAFSPYPVLFPSGYRICAGCNTVIGHGRFLSCMGAVWHPVCFRCNACNQPISDYEFSMSGNRPFHKSCYKERHHPKCDVCNNFIPTNSSGLIEYRAHPFWLQKYCPSHERDGTPRCCSCERMESTDTRYLSLDDGRKLCLECLDSAIMDTHECQPLYFEIREFYEGLNMKVEQEVPLLLVERQALNEAMEGEKNGHHHLPETRGLCLSEEHTITTVSRRPRIGAGYRFIDLITEPYRLSRRCEVTAILILYGLPRLLTGSILAHEMMHAWLRLKGYPNLRPEVEEGICQVLAHMWLDSEIYSSPGDGPSSSSSSAASSSSSSPSSSSTSSKKGKRSDFEKKLGEFFKHQIESDASSAYGDGFRDGNKAVGKYGLRSTLDHIRLTGSFPL

SEQ ID NO: 22875 - protein, 575 aa, Ricinus communis
MASSSGSLDTSANSYPSSFSFSSHSNFMTTTRFTDLLASTDDETIKRSGGLGERIAERTGSGVPKFKSIPPPSLPLSPPSVSPSSYFAIPPGLSPAELLDSPVLLNTSCILPSPTTGSFANWKMNSSHNNQQNVKQEDNNYSDFSFQPPTRPCTTSSAMFQSSNSSIQTAQQQRWSLQESVKQDDFGALQTNTQSSKNNNNNNNNNNNNGFQSDYGDQPQQYQSVREQRRSEDGYNWRKYGQKQVKGSENPRSYYKCTYPNCPTKKKIERSLDGQITEIVYKGSHNHPKPQSTRRSSANSSSSATNHATVENHYSNNIQDQSFGTHGSGGQMDSVVTTPENSSISVGDDDFDSSQKSKSRSDEYDEDEPEAKRWKTEGENVGISAPGSRTVREPRVVVQTTSEIDILDDGYRWRKYGQKVVKGNPNPRSYYKCTHPACPVRKHVERASHDLRAVITTYEGKHNHDVPAARGSHSAVNRPLPDNNNNNNNSNSNSYNSNSSAAMAIRPSATNYHSTNPIRDSRQPVTSEGEAPFSLEMFPSPGSFGFSGFGNAMGSYMNQTKEEPRDDLFLESLLC

SEQ ID NO: 22876 - protein, 430 aa, Ricinus communis
MNKNDETIVPILNLEDDCLTVVSALGRGAKGVVFLVKEKTNGELWALKVILRDVVEKKNRELSCTGNEYKRVWFEKQVLSHFNHPLLPKLRGVLVTDKIIGYAIDFCPGRDLNHLRKQQSERMFSVDIIRFYAAELVLALEYLHNQGIAYRDLKPENILIQENGHIMLVDFDLSTKISPPKWSPNSNSPVSTQRKYSSRRKRFSRFHRCCNSGISPDDSSENGITAVHQKEPDATEKSNSFVGTEEYVAPEIIQGYGHEFAVDWWSLGVVLYEMLYGRTPFKGSNRKETFFRILTRSPDLVGETTPLRDLIGKLLVKDPRERIKVEGIKGHEFFKGIDWKLILEMSRPPYIPLANYDCRGNEGTEGKMKIDVESFVQRIFGGEIEKQKVGDRNNNGDGNHDQEVKKIGDKGEWGKGLNNHFQETHNFLVF

SEQ ID NO: 22877 - protein, 644 aa, Ricinus communis
MGKKQNLDWTSRSISSSGSERVSLLSKEARRKANEDQSPDGSPNDLELGDGVEAANVGFGRVFSLAKPDAGKLAVGTIALLIASTSSLLIPKYGGMIIDIVSRDIKSPEEQSEALDAVKNTILDIVLIVVIGSVCTALRAWLFASASERVVARLRKNLFSHLINQEIAFFDVTRTGELLSRLSEDTQVIKNAATTNLSEALRNVTTALIGVAFMFTSSWKLTLLALAVVPLISIAVRKFGRYVRDLSHATQAAAAVAASIAEESFGAIRTVRSFAQESYTISRYSEKVDETLKLGLRQARVVGLFFGGLNAASTLSVIIVVVYGAYLTIIGSMTAGSLTSFILYSLTVGSSVSSLSGLYTTAMKAAGASRRVFQLLDRISSMPKSGDKCPIIDPDGDVELDDVWFAYPSRPSHMVLKGITLKLNPGSKVALVGPSGGGKTTIANLIERFYDPLKGKILLNGVPLVEISHEYLHSKVSIVSQEPVLFNCSIEENIAYGFNGKASSSDVEAVAKMANAHEFIDKFPEKYQTVVGERGLRLSGGQKQRVAIARALLMNPKLLLLDEATSALDAESEYLVQDAMDSLMKGRTVLVIAHRLSTVKSADIVAVISDGQITESGTHEELLRKDGIYTALVRRQLQEPNSAL

SEQ ID NO: 22878 - protein, 889 aa, Ricinus communis
MKDLSESAWQKSNNSGALNTSRASDWNPGPLSRDSVFRKKTDRVVLAHHNLKNQVGLSGGYKDEVAVDPFARAIEWGDVSLRQWLDKPERSVDEFECLHIFRQIVGIVNLAHSQGIVVHNVRPSCFVMTSFNHVSFIESASCSDSGSDSLEDGLNSRTLEVKNPSSLLPNDIFQLRTRLRSEDFQPASTPINALSEASCIQSSSVHATHVPVGENTEEDKANDRTIIEQEEEERKQPFPMKQILLMETSWYTSPEEATGSPSSCASDIYRLGVLLFELFCPFSSREDKSRTMSSLRHRVLPPQLLLKWPKEASFCLWLLHPEPSSRPKMCELLQSEFLNEPRENLEEREAAIQLSERIEEQDLLLDFLLLIQQRKQEAADKLQDTVSLLCSDIEEVLKHRTFLKKKGGSCLERMKDDNLVSNLPPFSIVDNDDSSSLGSRKRFRPGIQIFNMEEFDDNRDDAQHSDMVTESQDSLLLKSSRLMKNFKKLESAYFLTRCRPIRSSGKPFIRYSPISSDGRGSTVVSERSSINNLAPKEQHVESRQSGWISPFLEGLCKYLSFNKLKIKADLKQGDLLNSSNLVCSLSFDRDGEFFATAGVNKKIKIFECDAIINENRDIHYPVVEIATRSKLSSVCWNSYIKSQIASSNFEGVVQVWDITRSQVLTEMREHERRVWSIDFSSADPTTLASGSDDCSVKLWNINQGVSIGTIRTKANVCSVQFPLDSSRSLAFGSADHKVYYYDLRNAKVPLCTLVGHNKTVSYVRFIDSTNLVSASTDNTLKLWDLSMCASRIIDTPLQSFTGHMNVKNFVGLSVSDGYIATGSETNEVFIYHKAFPMPALSFKFNNTDPLSGHEMDDPAQFISSVCWRSQSSTLVAANSTGNIKILEMV

SEQ ID NO: 22879 - protein, 135 aa, Ricinus communis
MKTTTKVESRMVVNGRGVGMLVIVIISLVNAVNASNSASAFVQNLINSQTIVIFSKSYCPYCLRAKRIFNELHEQPYVVELDLRDDGAQIQYVLLDLFGRRTVPQVFVNGKHIGGSDDLKAAVQSGKLQKLLAID

SEQ ID NO: 22880 - protein, 346 aa, Ricinus communis
MAAAVTAAVSFPSTKSTSLPSRTSIIAPERTTLKKVPVYYRDVVSAGKRVVSIRAQVTTEAEAPVKVKKESKKNEEGIVVNKFKPKNPYTGRCLLNTKITGDDAPGETWHMVFSTEGEVPYREGQSIGVIPDGIDKNGKPHKLRLYSIASSALGDFGDSKTVSLCVKRLVYTNDKGELVKGVCSNFLCDLKPGAEVQITGPVGKEMLMPKDPNATIVMLGTGTGIAPFRSFLWKMFFEKHEDYKFNGLAWLFLGVPTSSSLLYKEEFEKMKEIAPDNFRLDFAVSREQTNEKGEKMYIQTRMAQYAEELWELLKKDNTFVYMCGLKGMEKGIDDIMASLAAKEGKK

SEQ ID NO: 22881 - protein, 150 aa, Ricinus communis
MDNRSNRKEEEEEEENENKNKNKNKRVAEGGGLKGKSCKGYLYYSSNLKSNGSNPRCIGIPRSLNQVPNYTVAQSEVEASKEKRSLVDFYYACAGYSVYISKDHSTENQVTKTQLPVCVGLELLVDRRVGSANTASAPAPVHGREDCEIF

SEQ ID NO: 22882 - protein, 1121 aa, Ricinus communis
MEQEDIYTKDGTIDFSGNPAIKKKTGTWKACPYILGNECCERLAYYGINTNLVNYLKFQLNQGSVQAVNNVTNWSGTCYVMPLLGAFLADAYLGRYWTIASFSIIYVLGMTLLTLSASLHGLMPSCDNHTNVCNPTGKQTAVFFLGLYLIALGTGGIKPCVSSFGADQFDDSDEAEKKKKSSFFNWFYFSINIGALVASSVLVWIQTNVGWGWGFGIPAVAMAIAVMTFFSGIKLYRNQRPGGSPLTRICQVIVASLRKFRVQVPKDESLLFETSDEESAVKGSRKLDHTEQLSFFDKAAVETPSDCVKGSVNKWSLCTVTQVEELKSVIRLLPIWATGIIFSAVYSQMGTLFVLQGNTMDLQMSRSFEIPSASLSLFDTISVIFWVPIYDRVIVPIARRFTGHKNGFTQLQRIAIGLVISIVAMMVAGTLEMVRLRQVRKHNYYKLKHIPISIFWQVPQYFIIGCAEVFTFIGQLEFFYEQAPDAMRSLCSALSLTTAALGNYLSTLLVNVVTDLSTRHGSPGWIPDNLNYGHLHYFFWLLAVLSLQIPEETMAEDDIYTKDGTLNIKGEPANKKKTGNWKACRFILGNECCERLAYYGMSTNLVNYLQDRLNQGNVAASNNVTNWSGTCYITPLIGAFLADAYFGRYWTIASFVMIYIFGMALLTISASAPGLKPFCDKHSCHPTKTQTAVTFAALYLIALGTGGIKPCVSSFGADQFDETDDDEKKKKSSFFNWFYFSINIGALIASSVLVWIQMNVGWGWGFGVPAVAMAIAVVFFFAGSKLYRLQRPGGSPITRLLQVIVASFRKLNVQVPDDKSLLYETTDEESQIQGSRKLEHTDKLKFFDKAAVETQTDSVKDSTNPWRLCTVTQVEELKAIIRLLPVWASGIVFATVYGQMSTMFVLQGNTMNQHMGPHFKIPSASLSLFDTLSVIFWTPVYDRLIVPYARKYTGNERGFTQLQRMGIGLVISIFSMITAGVLEVVRLNYVQRNNYYDLEYIPMSIFWQVPQYFLIGCAEVFTFIGQLEFFYDQAPDAMRSLCSALSLTTVALGNYLSTVLVTVVTKVTTRHGKLGWIPDNLNRGHLDYFYWLLAILSLLNFFVYLWIAKWYTYKKATGRAH

SEQ ID NO: 22883 - protein, 360 aa, Ricinus communis
MTMVTPSEAHPETMDYLSRTWCNFAVKTLQPELPADKSIILLDNQLKNFDCEMKGPFPKMEKSVKMEDDFKALPPWKSNDVKSWIWMQQAMHPELNYNSCFRKKWVCNLVMFTSTISVAGVAAALAAIAAENTKRDDSSTTKEEAVASAAALVAAQCAQVAEAMGAKREQLSSMIGSAMSGTSASDILTLTAAAATSLRGAATLKARTGCNNRFNGSAPVLPIEDNSDIDFDFEKCRFVLANGIELHVETPDGNFGVRSVSIVLNSQAKVILKIRKLNLLKSKKESIVLDLHTELYKDSEGDQETDTTCYLIVLTTNEGIIKLDMGDDCHRYKTWATAIHHMLMLSTSSFAKYELQFYKN

SEQ ID NO: 22884 - protein, 241 aa, Ricinus communis
METSFGVRKGAWTSEEDDLLRKCVEQYGEGKWHQVPLRTGLNRCRKSCRLRWLNYLKPNIKRGHFTADEVDLIIRLHKLLGNRWSLIAGRLPGRTANDVKNYWNTHRSKKPNTCKKDAMTINKPVKITKANIFRPRPRTISNKFFWSFEEIPLVTVSNTGHIGDQDNNNNNNNNNLRTSQAALPQIEKESGCEWWEILLPDEEEEKERNDIASDNNSGSSKDIKNNHITCLFEEGNEDHNN

SEQ ID NO: 22885 - protein, 67 aa, Ricinus communis
MATGTVKWFNDAKGFGFITPDEGGEDLFAHFSEIKTEGFKSLQENQKVSFEVKMGPKGKQAANIKPV

SEQ ID NO: 22886 - protein, 184 aa, Ricinus communis
MARVYVGNLDPRVSERDLEDEFRMYGVLRSVWVARRPPGYAFVEFDDRRDAVDAIRALDGKNGWRVELSHNSKGGGGRGGGSGGGGRGRGGEDMKCYECGEPGHFARECRLRIGSRGLGSGRRRSPSPKRRRSPSYGYGRRSYSPRGGRRSPRRRSVSPRRGRSYSRSPPYRHARRDSPYANGD

SEQ ID NO: 22887 - protein, 368 aa, Ricinus communis
MELALSLGDASKPFKFLDNTTPKNNKMIPNKDLGFCMGLATSGFAPRSQDKTHDHSHEGDDDDGDRRRVLSSDRPVQLDLLPFSPVHPARRQIPFPWLSDNMVSEPGSTDGSGGDRGFDVNRLSVEEAEEGATLSSPNSAASSFQMDFGIRSSGIGRGNKRDMECFEAERGSSRASDDDENGLTRKKLRLSKEQSAFLEESFKEHNTLNPKQKLALAKQLNLRPRQVEVWFQNRRARTKLKQTEVDCEYLKRCCEMLTEENRRLQKELQELRALKTSQPFYMQLPATTLTMCPSCERVATTTTSSSGTTTTTTNNNNGSSKNNNPVATTAATTPSSTALSLANKPKLYPFSSHSQTQLPQAQSHKAAS

SEQ ID NO: 22888 - protein, 688 aa, Ricinus communis
MVLQKRLDYGFNGYQVPPTPRATRSVRRRGSFKKKVEESQTCAFDLLAIVAGNLLHDKESTPGSSNTSADKNQCVAVNDTVKNKWQNDEKNMKVETQDQGSPARKFFISELVAQDNEQNHCSDDLNLGVASALATSDCAERFDAEKLVNGKGKNDMGSFASKVEVGSSRHREFDGCKLEGETKKIIKDEPQKFGKVINGTVADMCSFDDPLVWDGKPHAHVSSDSSAKTSLCGNHVSHGSYPANWDDLIVDRDDDENSSGCTHPSTTKKFLRPAPRIGDRRIRKVLASKYWKVAPRMKDGTLSNTGGDSKPFYHKRKNYYKYQRSERLYPFKKRKHFGYGSQSNFEGAISREFISDSPKKGSIGDAAVSSPKMHGATAASSSIAGQRNSFQSRDSHVKLRIKSFRVPELFIEIPESATVGLLKRTVMDAVIAILGGGLRVGVLLQGKKVRDDNKTLMQTGIAHNNQLDALGFSLEPNPSQTPHSLSPGSSSFLPSCDTPQPLSRYPPDPSLVHQATCGGSPEPHSANLGNFIESDHDSAPFPKDMLVDKSTSDSKALVPLSEMNMEALAVVPAHRKSKRSEIVQRRIRRPFSVTEVEALVQAVEKLGTGRWRDVKLRAFDNAKHRTYVDLKDKWKTLVHTARISPQQRRGEPVPQELLDRVLTAHAYWSQQQAKQQLKQQQPETCLLL

SEQ ID NO: 22889 - protein, 260 aa, Ricinus communis
MSSLSKSRVSNNSSDEADAPDDHHELRRGPWTLEEDTLLVHCIASHGEGRWNLLAKRAGLRRTGKSCRLRWLNYLKPDVKRGNLTPQEQLLILDLHSKLGNRWSKIAQHLPGRTDNEIKNYWRTRVQKQARHLKIDANSTAFQEIVRCFWIPRLLQKIEGSTSSPSCSCSSSFSSSSSSAVLSQNSAVSQPVDCSHVHNLPLTPPSLPPLPRQEISGQGKLIEIHNLEGRPEHNSDSEQGSTSCISSSTESMNISQISQL

SEQ ID NO: 22890 - protein, 386 aa, Ricinus communis
MTMSLIALAQEMKSSGRSVVPMVAGEPDFPTPSNICLAGIGAIVTGDTKYGSAVGTPALRKEIARKFLEDNQLEFSPSQVIVATGTKPLFFSAFMTICDHGTEVIVPSPYWVSYPSIVHLAGANVIDLPCFEENGFKIDPSALRAAITPNTRALLLNSPGNPTGAVYTKEEMIGILDVLRENPSVFLVTDEIYEHLIYDNQQHWSAGSLAPDLIDRIIVINGFSKGYGMIGWRLGFAAGPQQVITAMGDFLSHILGAPSTITQAAALAALRDPKPYLKINREDYSMRRECTVNLINSIPGLSCGKPAGAFFIFVNCQALFGKTTAKGSVIKDDGDLCKVAIEEAGVALVPGSAFGAPGYFRLSYSTSMEDIKAGLGRLRNLCETLS

SEQ ID NO: 22891 - protein, 416 aa, Ricinus communis
MNIVNIYDMTLPARKTALDTNSFQRSSALKLASRVDQIKPFQAMEILKATGQLASAGEDIVAMNIGEPDFTAPERVKRAAIGAIERGATQYSDARGLPSLREAISQHYRDKFDITVSPNRVVVTAGASAALLLACAALVSDGDEVLMPDPCYPCNRQFVSVFGGEPRLLPTQASNNFALDPTTVDDAWNRRTAGIILSTPSNPTGCSMDGPQLATLLSAVAKRGGFAIVDEIYQSLTYDHAPTTALAFDDNAIVVNSFSKYFGMTGWRLGWLVVPEFLVPSIEKLAQNLYICPPTISQHAALACFDAETLEVLEQRRLEFQRRRDYIVPALRSIGFDVPVIPDGAFYIYAKCTAVNHPSAANSMDFAHALLHQARVAVVPGTDFGTEQANSYLRFAYSTSIENIAIAIERIRSICT

SEQ ID NO: 22892 - protein, 173 aa, Ricinus communis
MEARLLLATPLALEGLPLNLSIHKHLNPLMVDGAAALVLVSGETALKLGLQVIAKITGYADAAQAPELFTTAPALAVPKAISNAGLDASQVDYYEINEAFAVVALANQKLLGINPEKINVHGGAVSLGHPLGCSGARILVTLLGALRQKNGKYGVGGVCNGGGGASALVIELL

SEQ ID NO: 22893 - protein, 146 aa, Ricinus communis
IDAHIDWRDTLHGERYGYSSPMRRASEMSHVAGMVQVGLRGVGSARPSDIETAQRYGSRFVTAREIHAHGVEAALRHIPEGARVVVTLDCDSIDPGIMPGVAARSPGGLTYTQIIDLIAGLGRRADIAGFDLVELYPPADIDGFRP

SEQ ID NO: 22894 - protein, 213 aa, Ricinus communis
MLLLLSVARRGGEGEREVRAGAWTGWRPTHLVGTKVTGKTVGIIGFGRIGRAFAQRCHFGFGMDVVFYNRSAIDPMEAARYGAVQLQTVEDVLEIADFVSLHCPGGAENRHLMNADRFAAMKPGAFLINTARGDVVDETALISALEQGTIRGAGLDVYEAEPHLPERLRAMDNVVLLPHLGSATEETRTAMGMKVVDNVTAFFAGQEPPDRVA

SEQ ID NO: 22895 - protein, 260 aa, Ricinus communis
STNKEAILSQAAANVLSARVLSIKESPTLAITAKAAKYKSEGRPIIALAAGEPDFDTPQHIKDAAKAAIDAGYTKYTPVSGIPALKKAIVNKFKNENGFDYALNEVIVGVGGKQTIFNLCLAVLNAGDEVIVPAPYWVSYADIAMVAEAKPVILECGIEQGFKLLPAQLEAAINAKTKLVMFNSPSNPTGAVYTLDELKALGEVLLKHPHVLVATDDMYEHVNLTGDKFHNILNAAPGLKDRCIVLNGVSKAYSMTGWRI

SEQ ID NO: 22896 - protein, 158 aa, Glycine max
MAIRLMDLDSPFFNTLHRIMDLTEDAEKNLNAPTRTYVRDAKALAATPADVKEYPNSYVFVIDMPGLKSGDIKVQVEDDNVLLISGERKREEEKEKEGGKYLRMERRLGKLMRKFTLPENANTDAISAVCLDGVLTVTVNKLPPPQPKKPKTIEVNIA

SEQ ID NO: 22897 - protein, 193 aa, Glycine max
MNSISLGSFILTPCKFRPFLQTKHQPIFRTLSPIPLTQKPTFLRATDSNIDAPISLPEGASFVSIPEIIEKDWSVLDCAEHRTTDRIIASGNIEQSSRVLVSTGSEDFVDSLAGLTPSVFVVHDSLLTLACIKEKYDRVKCWQGEIIYVPEKWAPFDAVFLYFLPALPFKLHQILESLAGKCAPGWKGDYQSS

SEQ ID NO: 22898 - protein, 160 aa, Glycine max
MSDEEHHFDSQADAGASKTYPQQAGTIRKNGYIVIKSRPCKVVEVSTSKTGKHGHAKCHFAAIDIFNGKKLEDIVPSSHNCDVPHVNRTDYQLIDISEDGFVSLLTDNGNTKDDLKLPTDEALLAQIKDGFSEGKDLVVSVMSAMGEEQICSLKDIGPKN

SEQ ID NO: 22899 - protein, 178 aa, Glycine max
MSRVYVGNLDSRVTERDLEDEFRVFGVIRSVWVARRPPGYAFIDFDDRRDAQDAIRELDGKNGWRVELSHNSRGGGGGRGGRSGGSDLKCYECGEPGHFARECRMRGGSGRRRSRSPPRFRRSPSYGRRSYSPRGRSPRRRSLSPRGRSYSRSPPYRGREEVPYANGNGLRERRRSRS

SEQ ID NO: 22900 - protein, 156 aa, Glycine max
MAFASFLGRVLFASVFILSAYQEFNEFGVDGGPAAKALRPKFDAFTHRVHSQVGFQLPEIDLKFLIAGAITLKGLGGVLFIFGSSFGALLLLLHQLIATPIHYDFYNYDSEDKEFTQLFIKFTQNMALFGALLFFIGMKNSIPRRVPKKAPKTKTY

SEQ ID NO: 22901 - protein, 190 aa, Glycine max
MDFNKEQKKTIDQSILLCCKFFVSESRNNATLNAIERVARSNPETVIVNMFHDRSYNRARYDLVSYVLHDCTGNPIYSPLHQTVIAMAEATFNAINLEFHEGAHPRLGALDDIIFHPLGHASLDEAAWLAKAVAADIGNRFSVPVFLYAAAHPTGKEVDAIRRELGYYRPNSRGSQWGRVGNARNATAEP

SEQ ID NO: 22902 - protein, 202 aa, Glycine max
MEAISPKHLMTSLVIIIASSLTAHCGCAKRGGERPYKEANTLFIRTSCSSTTYPRLCYSSLVRHADLIQTNRVVLTGAALNVTLASVKSTSAMMSTLAKKQGLKLREVAAMQDCVEQLSDTVDELRRSIAEMSDLRASNFEMIMSDVQTWVSAALTDETTCNDGFQEITAATDIKSTVRRLVIQVAQLTSNALALINKLANS

SEQ ID NO: 22903 - protein, 177 aa, Glycine max
MSWCYCAKPMTLQLPLQPRASSSFHSHVGGVTVTSSTLSLRLSSTLVFTHNLHFQPKLKRASTTVRCSSALTPQLKSTLDQVIASNKVVVFMKGTKDFPQCGFSNTVVQILKSLNVPFETINVLENDLLRQGLKEYSSWPTFPQVYIEGEFFGGCDITVDAYQKGELQELLEKAMLS

SEQ ID NO: 22904 - protein, 166 aa, Glycine max
MALALGNIVALPLSNLKPSLKLSSSSSSCCITKLFPISRINVSPTSVLVRASSSSSFGSRLEDTIKKTVAENPVVVYSKTWCTYSSEVKILFKKLGVDPLVFELDEMGPQGPQLQKVLERITGQHTVPNVFIGGKHIGGCTDTLKLYRKGELEPLLSEANAKKTES

SEQ ID NO: 22905 - protein, 134 aa, Glycine max
MASRLTVTALVLIALATVSLQTSASSVGKFIDETITSHKIVIFSKTYCPYCRRAKAVFKELNQVPHVVELDEREDGSKIQDIMINIVGRRTVPQVFINGKHLGGSDDTVEAYESGHLHKLLGIETKDHDDHDDF

SEQ ID NO: 22906 - protein, 160 aa, Glycine max
MSDEEHHFESKADAGASKTYPQQAGTTRKNGYIVIKGRPCKVVEVSTSKTGKHGRAKCHFVGIDIFTAKKLEDIVPSSHNCDVPHVNRTDYQLIDIAEDGFLSLLTENGNTKDDLKLPTDESLLTQIKDGFAEGKDLVVSVMSAMGEEQICALKDIGPKN

SEQ ID NO: 22907 - protein, 234 aa, Glycine max
MAATIITTCKLSLLLSLLSVSLLLGVRSDTLQNVGAIPPTCKRIECPSYDVIHVGNGYEIRRYNSPVWISNSPIQDISLVEATRTGFRRLFDYIQGKNNYKQKIEMTAPVISEVLPSDGPFCESSFVVSFDVPKENQANPPPAKGLQVQRWKTVFVAVRQFGGFVKDSSVGEEAAALKASIAGTKWADAVEKSQKRAGHASVYTVAQYNAPFEYVNRVNEIWFLFDIENELQTV

SEQ ID NO: 22908 - protein, 159 aa, Glycine max
MSGEEHHFESKADAGASKTFPQQAGTIRKNGYIVIKNRPCKVVEVSTSKTGKHGHAKCHFVAIDIFTGKKLEDIVPSSHNCDVPHVNRIDYQLIDISEDGFVSLLTETGGTKDDLRLPTDENLLSQIKDGFAEGKDLVVSVMSSMGEEQICALKDIGPK

SEQ ID NO: 22909 - protein, 172 aa, Glycine max
MGFYAEDPLSGLTIGQAIYEVALMIAVLRWVLCLIFRVINDRKTTQSDETPTPEPCSQMTRDKDSILLLTTFGEIKERLPETEETCAVCLSQLSVEDEVRELMNCYHVFHRECIDRWLEHEHENHSATCPICRAPLLSSSCHHSSATCLPPPQPSWAVERLLYLFGDDLLPC

SEQ ID NO: 22910 - protein, 196 aa, Glycine max
MAFAGTTQKCMACDKTVYLVDKLTADNRVFHKACFRCHHCKGTLKLSNYNSFEGVLYCKPHFDQLFKRTGSLDKSFEGTPKIAKPEKNLEERPAAAKVSSMFGGTRDKCAGCQKTVYPTEKVTVNGTPYHKSCFKCCHGGCVISPSNYIAHEGKLYCKHHHVQLIKEKGNLSQLEGDNEKSATNGKINGEEVATET

SEQ ID NO: 22911 - protein, 196 aa, Glycine max
MDGSACVRKGLWSEVEDTLLRTCVRQYGEGQWHLVPTRAGLNRCRKSCRLRWLNYLKPNIKRGEFTEDEVDLMQRLHNLLGNRWSLIAGRLPGRTPNDVKNYWNTYIRRKVSSSHKVVINEKQKKTTVKPHVVIKPKARTFSRPSPSGLRGSSVLREEGGESGAKHCSTHHQACAASSEYINNWSTDQWWKTMMHD

SEQ ID NO: 22912 - protein, 186 aa, Glycine max
MYQQQGSDPTKQSPATGFPVSYSNSTTYSTNEASYAPVPPPQPKPLVNWSTGLCDCFSECGNCCMTCWCPCVTFGRVAEIVDKGSTSCGASGALYTLICCVIGCGCLYSCFYRPKMRRQYGLKGNGCSDCLIHCFCEPCALCQEYRELQHRGFDMIIGWHGNVEQRSRGVAMTATTAPSVENGMSR

SEQ ID NO: 22913 - protein, 204 aa, Glycine max
MDKKLGNTSHDPEVRKGPWTMEEDLILITYIANHGEGVWNSLAKAAGLKRTGKSCRLRWLNYLRPDVRRGNITPEEQLLIMELHAKWGNRWSKIAKHLPGRTDNEIKNYWRTRIQKHLKQASSSFQQQSSNSEIIYHPQACTSQVSTMAQPIETYSPPSYQGMLDPYSIQFPTNPHHSSCCTNDDDNNNYWSMEDIWSMQLANY

SEQ ID NO: 22914 - protein, 161 aa, Glycine max
MATSLSNVFLKGIAARSLSRPLNGLFYCTRYSNTVSNDSDTHDDFKPGNKLEGSGICLSNVIEQDVKDNPVMVYMKGVPDFPQCGFSSLAVRVLKHYDVPISARNILEDLELKNAVKAFSSWPTFPQIFIKGEFIGGSDIILNMQQTGELKEKLKDITSKQ

SEQ ID NO: 22915 - protein, 198 aa, Glycine max
MATTTLMKLAFMLLMNLAICSAESSIGRKSNPNPEEFVKSSCRATRYPVLCVKSLLAYASVIRRSDRQLATTALSVSISRSRSSAWLVKKMLKARGMKPREYRAVQDCVENIGDSVDRLRQSVTELGRTGEDFVWHMSNVQTWVSAALTDDSTCLDGFAGSAMNGNVKALIKDRIVHVAQVTSNALALVNRFASRHPP

SEQ ID NO: 22916 - protein, 158 aa, Glycine max
MDMRLMDLDSPFFNTLHRIMDLTEDAEKNLNAPTRTYVRDAKAMAATPADVKEYPNSYVFVIDMPGLKSGDIKVQVGDDNVLLISGERKREEEKEKEGGKYLRMERRLGKLMRKFTLPENANTDAISAVCQDGVLTVTVNKLPPPQPKKPRTIEVKIA

SEQ ID NO: 22917 - protein, 156 aa, Glycine max
MAFASFLGRVLFASVFILSTYQQFNEYGVDGGPATKALRPKFDAFTHRVHSQVGFQIPEINLKFLIAGAIALKGLGGVLFIFGSSFGALLLLLHQLIATPIHYDFYNYDSEDKEFTQLFIKFTQNMALFGAVLFFIGMKNSIPKRVPKKAPKTKTY

SEQ ID NO: 22918 - protein, 99 aa, Glycine max
MSGVTNNNEEDKKPTEQGAHINLKVKGQDGNEVFFRIKRSTQLKKLMNAYCDRQSVDFNSIAFLFDGRRLRAEQTPDELEMEDGDEIDAMLHQTGGSVV

SEQ ID NO: 22919 - protein, 129 aa, Glycine max
MMRLRWSLVVTVTFAVLLFWIGSLQVQASNSVSAFVQNAIYSNRIAVFSKSYCPYCLRAKRLLAELNEKPFVVELDLRDDGYQIQSVLLDLIGRRTVPQVFVNGKHIGGSDDLSAAVQSGELQKLLSAS

SEQ ID NO: 22920 - protein, 187 aa, Glycine max
MVSATVDSDFAFLESVQQYLLGHDSINLMSETHQAASHDPFSDPNKCDGDSGNIAFRSEDATAVVARDHAPPTWKHYRGVRRRPWGKFAAEIRDPKKNGARVWLGTYDTEEKAALAYDKAAFKMRGQKAKLNFPHLIDSDNSDELSEPVMMTTSKRSLLEISSPSSSCSDDSSESQGTKRRKSLADY

SEQ ID NO: 22921 - protein, 101 aa, Glycine max
MEKVMRLATEKGVVVFTKSSCCLCYAVNILFQELGVIPVVHEIDKDPEGKEMEKAITRLGSPTPVPAVFIGGKLVGSTNEVMSLHLSGSLTQLLKPYRALS

SEQ ID NO: 22922 - protein, 159 aa, Glycine max
MDFRVMGLDSPLFHTLQHMMDMSEDAAGDNKTYSAPTRSYVRDAKAMAATPADVKEYPNSYVFEIDTPGLKSGDIKVQVEDDNVLLISGERKRDEEIEGVKYLRMERRIGKFMRKFVLPENANTDAISAVCQDGVLSVIVQKSPPPEPKKPKTIEVKVA

SEQ ID NO: 22923 - protein, 196 aa, Glycine max
MSTSAKSRDVCIVGVARTPIGGLLGTLSSLSATELGSIAIKSALERANVDPSLVQEVFFGNVLSANLGQAPARQAALGAGIPTSVICTTINKVCASGMKATMLAALTIQFGLNDVVVAGGMESMSNAPKYLAEARKGSRYGHDTIIDGMVKDGLWDVYNNFGMGACAELCADQHVITRDEQDSYAIRSFERGYLLK

SEQ ID NO: 22924 - protein, 214 aa, Glycine max
MITSNIGGLPFAAGMAVFCFEGFGMTLALENSMQDKRKFPILLAQTFGGITLVYILFGFCGYMAFGEETRDIVTLNLPRNWSSLAVQVGLCVGLAFTLPVMFHPINEIVEGKLKIILRNNNDSMGLENMCIYVSRAIVVVGLAVIASFVPEFSVFASFVGSTLCAMLSFVMPATFHLKLFGSSLPIWQKALDSIVLLSGLFFAFYGTYNTIVGV

SEQ ID NO: 22925 - protein, 234 aa, Glycine max
MSLLSDLINLNLSDTIEKVIAEYIWIGGSGMDLRSKARTLPGPVSDPSELPKWNYDGSSTGQAPGEDSEVILYPQAIFRDPFRRGNNILVICDAYTPAGEPIPTNKRHAAAKVFSHPDVVAEVPWYGIEQEYTLLQKDIQWPLGWPVGGFPGPQGPYYCGVGADKAFGRDIVDAHYKACIYAGINISGINGEVMPGQWEFQVGPSVGISAGDEIWAARYILERITEIAGCGGFL

SEQ ID NO: 22926 - protein, 213 aa, Glycine max
MPTNSPLFHQNPDWNMLQEPSEILFDSFSSNPVRDTVHDLLSFDMVDFSTPPTEGNHNKTKQLVVKSEVQNKERPYIGVRKRPWGKFAAEIRDTTRNGTRVWLGTFESAEAAALAYDQAAFSMRGHDAVLNFPVKRVKESLLEIQYGCSKGCSPALAIKERHYIRRKLSSKARKCRENKQESEAPTPSVVVLEDLGVEYLEQLLSISDQSVSL

SEQ ID NO: 22927 - protein, 175 aa, Glycine max
MLEQQGSDPTKPAAAATGFPATTEASSYAPVAPPQSKPTVDWSTGLCDCFSDCGNCCITWWCPCVTFGRVAEIVDRGSTSCGASGALYTLVCCGWPYSCIYRSKMRRQYGLKGNCCTDCLLHCCCESCALCQEYRELKQRGFDMIIGWHGNVEQRIQEVAMTAATPPSVEKGMSR

SEQ ID NO: 22928 - protein, 214 aa, Glycine max
MALQHGVIGSSRSSQNLFRIVVSLLLILTFLQLAASASASTSTTDSPKAYKKFIKDKCNSTTFPKVCYKSLSPYASKIKRNRVTLTKVSIYVALKAAKIAYSTLTKLSKSKGKLTHGEASVIADCRENIDETLDLLSQSSDELANLNGTSSAHDQFQWDNIKTWMSAAITDEGTCTDEFDEIQVRPSLQKKIKTTVYNLSWFTINALALVNRLY

SEQ ID NO: 22929 - protein, 228 aa, Glycine max
MEANTLKLASYKVFTIVAFILLAKFNIISACENSPIPTNSTLTKIDYTATNYGNTTIPSESNYTQTFKSYIKASCNSTTYPSICYKTLFPYATKIEADPLKLCNVSLSLALKAAKSASSTISKILKKNNLTKIAEQVVQDCFGNVKDSIGELKDSLDAMGHLDGVDRKFQISNIKTWVSASITNDQTCSDGFDEMNVDSTLTDKIRKIVLDVARKTSNALYFINNNVY

SEQ ID NO: 22930 - protein, 231 aa, Glycine max
MASGFGESTGRSPPSPSYFNNNNNSDAANFECNICFELAQGPIITLCGHLFCWPCLYKWLHFHSQSRECPVCKALVEEEKLVPLYGRGKSSTDPRSKSIPGVNIPHRPAGQRPETAPPPETNHFHQHGFGFMGGLGGFVPPPMATTRFGNFALSAAFGGFIPSLFNFQMHGFHDAAMYGGGAGFPHGFANTFHGVHAHGFPLRTHQGQQDYYLKKLLLFVVFCVVLAFIWQ

SEQ ID NO: 22931 - protein, 196 aa, Glycine max
MAFAGTTQKCMACDKTVYLVDKLTADNRVFHKACFRCHHCKGTLKLSNYNSFEGVLYCKPHFDQLFKRTGSLDKSFEGTSKIAKPEKNLEEKPAAAKVSSMFGGTREKCAGCQKTVYPTEKVTVNGTPYHKSCFKCCHGGCVISPSNYIAHEGKLYCKHHHVQLIKEKGNLTQLEGDNEKSATNGKINGEEVSAET

SEQ ID NO: 22932 - protein, 165 aa, Glycine max
MVNTPPSSSTVSRTVLLLLRVLIFVFLLIALILIAIVKQTDDETGAEIKFNDIYAYRYMISTIIIGFAYNLLQMAFSMFTVVSGNRVLSGDGGYLFDFFGDKIISYLLISGSAAGFGVTVELGRGVPSNSFIEKANASASLLLIGFLLTAIASTFTSFALPKKAN

SEQ ID NO: 22933 - protein, 161 aa, Glycine max
MATSLSNMFLKGIAARSLSRPLNGLFYCTRYSTTVSNDSDTHDDFKPANKLENSGISLSNVIEQDVKDNPVMVYMKGVPDFPQCGFSSLAVRVLKHYDVPISARNILDDPDLKNAVKAFSNWPTFPQIFIKGEFIGGSDIVLNMHQTGELKEKLKDITSEQ

SEQ ID NO: 22934 - protein, 170 aa, Glycine max
MENTTTTHSKISTFSFTVLLLRVLTFIFLVTALIFISIDTLPIETSDYAVYEEINFNYVYAYRYMLSTIVIGFAYNLLQMGFSIFTVVSGKRVLSSYGGYLFDFFGDQIISYLLISGSAAEFGYDVQRRRVTNSFTEKANVSASLLLVGFLFTATASIFTSFALPKKAIN

SEQ ID NO: 22935 - protein, 209 aa, Glycine max
MDQLFSHLSTDFPNARFLRVEAEEQPEISEAYSVSAVPFFAFCKDGKTFDTLEGADPSSLANKVAKVAGSINPGESASPASLGMAAGASVLETVKELAKDNDSTKEKNQVQPGLSGPLKKRIQQLVDSNPVMLFMKGTPEEPKCGFSRKVVVVLNEERVKFGSFDVLSDSEVRGGLKKFSNWPTFPQLYCKGELLGGCDIAIAMHESGE

SEQ ID NO: 22936 - protein, 192 aa, Glycine max
MLFMKGKPDEPKCGFSRKVVEILQQENVPFESFDILTDEEVRQGLKVYSNWSSYPQLYIKGELIGGSDIVLEMQKSGELRKNLHEKGILPAETVQDRLKNLIASSPVMLFMKGTPDAPRCGFSSRVADALRQEGLNFGSFDILTDEEVRQGLKVYSNWPTYPQLYYKSELIGGHDIVMELRNNGELKSTLSE

SEQ ID NO: 22937 - protein, 320 aa, Glycine max
MASFCSRLTICLALFVLIWGSANAQLSTNFYYHSCPNLFSSVKSAVQSAISKETRMGASLLRLFFHDCFVNGCDGSILLDDTSSFTGEKNANPNRNSARGFEVIDNIKSAVEKVCPGVVSCADILAIAARDSVQILGGPTWNVKLGRRDARTASQSAANNGIPAPTSNLNQLISRFSALGLSTKDLVALSGGHTIGQARCTNFRARIYNETNIGTAFARTRQQSCPRTSGSGDNNLAPLDLQTPTSFDNYYFKNLVQKKGFLHSDQQLFNGGSTDSIVRGYSTNPGTFPSDFAAAMIKMGDISPLTGSNGEVRKNCRRIN

SEQ ID NO: 22938 - protein, 261 aa, Glycine max
MMPTPLQVRRRPVFEFDDEHLQNQKPTIPMELQIVSSQQHFRLPDGWVVEKKPRPSHESRFDKYYYEPGTGRKFRSLLSVQRHLAGETRDYVVANTMMPKNENTNFIESGSGQKFGSLRALDNFLSEENACTTTPKSAVKSGTGEQRACGVRSGQKAVHKGSSVGEEVQITPKSLKHTIQSALSEKSDSRKKTKSEKDNRASMHNLTVPPPAKVSWVLSGSGGFWSPFLDDSIVPEPEKMKWSKAFVLSIHDDGDINGLNS

SEQ ID NO: 22939 - protein, 214 aa, Glycine max
MNNVAERPLNGDVEDDDEDDGGGLEAWERTYAEDRSWEALQEDESGLLRPIDTTAIYHAQYRRRLRTLAATAATARIQKGLIRYLYIVVDLSKAASERDFRPSRMAVMGKQVEAFIREFFDQNPLSHVGLVTIKDGIAHCITELGGSPESHIKALMGKLECSGDASLQNALELVLGYLNQIPSYGHREVLILYSALSTCDPGDLMETIPEMQKE

SEQ ID NO: 22940 - protein, 192 aa, Glycine max
MNMSTSFFLVHHMLRRVHTPSNSSFYKFGISEPVNTSYYRYGHGYESAAVSTEWVEGGNTGTRDNSIECPRRHHSNSNDYQVIWQDNIDPDNMTYEELLELGEAVGTQSRGLTQEQISSLPVSKYKCGFFLRKKSRDERCVICQMEYKRGDERITLPCKHVYHASCGNKWLSINKACPICYTEVFADKSKHK

SEQ ID NO: 22941 - protein, 320 aa, Glycine max
MASFCSRLTICLALFVLILGSANAQLSTNFYYHSCPNLFSTVKSTVQSAISKETRMGASLLRPFFHDCFVNGCDGSILLDDTSSFTGEKNANPNRNSARGYEVIDNIKSAVEKACPGVVSCADILAIAARDSVQILGGPSWNVKVGRRDARTASQSAANNGIPPPTSNLNQLISRFSALGLSTKDLVALSGGHTIGQARCTNFRARIYNESNIDTAFARARQQSCPRTSGSGDNNLATLDLQTPTEFDNYYFKNLVQKKGLLHSDQQLFNGGSTDSIVRGYSTNPSSFSSDFAAAMIKMGDISPLTGSNGEIRKNCRRIN

SEQ ID NO: 22942 - protein, 248 aa, Glycine max
MSWNPHMEVHYNTISYPYNTAGSFIEYFEGLTYEHVNFIFSGASHAQESSYPSNSSFYKFGLSEPENNSYYRYSHGYEVNHHEPLVDEYRRPSENSLTINEQSPAVSTEWVESGNTDTQDNSIECPRRHHSNSNDYQVIWQDNIDPDNMTYEELLELGEAVGTQSRGLTQEQISSLPVSKYKCGFFLRKKSRDERCVICQMEYRRGDKRITLPCKHVYHASCGNKWLSINKACPICYTEVFADKSKHK

SEQ ID NO: 22943 - protein, 313 aa, Glycine max
MRSIGVLLVAQVIPYLEQELDKRYKLFRAYDQPQTAQVLSQHASSIRAVVGNSNAGADAELIEALPKLEIVSSFSVGVDRIDLDRCKEKGIRVTNTPDVLTDEVADLAIGLMLALLRRICECDRYVRSGKWKKGDYKLTTKFSGKTVGIIGLGRIGQAIAKRAEGFNCPICYYSRTQKRDSNYKYYPSVVELASNCDILVVACPLTEETHHIINREVINALGPKGYLINIGRGKHVDEAELVPALLEGRLGGAGLDVFENEPTVPEELFGLENVVLLPHVGSGTIETRTAMADLVLGNLDAHFLGNPLLTPLV

SEQ ID NO: 22944 - protein, 385 aa, Glycine max
MRDPVTVCTGITYDRENIERWLFSCKNNTCPVTKQCLLNHDLTPNHTLRRLIQSWCTLNASLGVERIPTPKSPIDRTQIVKLLTEAKRFPEKQLKCLTRLRSIAFEGQRNKTCLESAGVIEFLVSTMKSNNTQEDSTVLSEAAIEVLFHLNLSEARVKALINNEEFHFIESLFHVLRLGNYQSRAFATMLLRSAFEVADPIQLISVKTALFVEIMRVLRDQISQQASKAALKLIVELFPWGRNRIKGVEGGAVLVLVELLLGASERRTCELILIALDQLCGCAEGRAELLNHGAEVAIVSKKILRVSHVASDRGVRILASICRYSANARVLHEMLQVGAVSKLCLVLQVNCSLKTKERAKAILQLHSVVWKNSPCIPVPLLSSYP

SEQ ID NO: 22945 - protein, 244 aa, Glycine max
MALSLPTHPSPTVNPLRRSPKPTLRRVNHRVCVASAATPLLQVDDLRAKIVESNVDILHGVNLTINQGEVHAIMGKNGSGKSTFAKVLVGHPDYEVTGGSVVFKGENLLEMEPEERSLAGLFMSFQSPVEIPGVSIDLFLAMAYNARMKKLGRDEVGPIEFLPYLMEKLQLVNMKPDFLNRNVNQGFSGGERKRNEILQLAVLGADLAILDEIDSGLDVDALRMLRMQLIDSHPRKVLVDDNSL

SEQ ID NO: 22946 - protein, 204 aa, Glycine max
MSTCVKSRDVCIVGVARTPIGGLLGTLSSLSATELGSIAIKTALKRANVDPSLVQEVFFGNVLSANLGQAPARQAALGAGIPTSVICTTINKVCASGMKATMLAALTIQFGLNDVVVAGGMESMSNAPKYIAEARKGSRYGHDTIIDGMVKDGLWDVYNNFGMGVCAELCADQHVITRDGQTLMPFEALREISAKCWSFAWEIV

SEQ ID NO: 22947 - protein, 304 aa, Glycine max
MSTSSQHQFRYTQTPSKVLHLRNLPWECSEEELRELCRPFGKIVNTKCNVGANRNQAFVEFVDLNQAISMVSYYASSSEPAMVRGKTVYIQYSNRHEIVNNKSPGDIPGNVLLVTIEGVEAGDVSIDVIHLVFSAFGFVHKIATFEKTAGFQALIQFTDAETASSARDALDGRSIPRYLLPAHVGSCNLRISYSAHKDLNIKFQSNRSGDYTNPMLPVNYTAIEGAVQTAVGPDGKRKEPDSNVLLASIENMQYAVTVDVLHTVFSAFGTVQKIAIFEKNGQTQALIQYPGINHIQLYHNGISC

SEQ ID NO: 22948 - protein, 389 aa, Glycine max
MVDQVQHPTIMDKVAGQLHLRSGLSSGIRSYDGAYRHPAMYQRPSFGNYSNAALQFPVMPTCKATMDLSATATSASPVFVAAPAEKGHFLLDFLMGGVSAAVSKTAAAPIERVKLLIQNQDEMIKTGRLSEPYKGIGDCFKRTMADEGAISLWRGNTANVIRYFPTQALNFAFKDYFKRLFNFKKDRDGYWKWFAGNLASGGAAGASSLLFVYSLDYARTRLANDAKAAKKGGERQFNGLVDVYRKTLASDGVAGLYRGFNISCVGIIVYRGLYFGLYDSVKPVVLTGSLQDSFFASFALGWLITNGAGLASYPIDTVRRRMMMASGEAVKYKSSLDAFIQILKNEGAKSLFKGAGANILRAVAGAGVLAGYDKLQVLVFGKKYGSGGA

SEQ ID NO: 22949 - protein, 312 aa, Glycine max
MSTSKSVSSSSEDDNELRRGPWTLEEDNLLSQYIFNHGEGRWNLPAKRSGLKRTGKSCRLRWLNYLKPDVKRGNLTPQEQLIILELHSKWGNRWSKIAQHLPGRTDNEIKNYWRTRIQKQARHLKIYTDSREFQEPVRRFWMPRLLQKAKESSSSNMSIQNQAIPMPFDYVSQHLTVGTIPPWQGPCMNEAGPTYMDQHEQNSDSEHNNGSCISLSESANIPKVPQHFGHTTITQFHALNTNDFGTFTYEGYNVNNNVYEMDNFKTTTTWVAEDAQYPIGDCQMVGSNWVNNDFACNMWNMDELWQFSKLQK

SEQ ID NO: 22950 - protein, 476 aa, Glycine max
MAQLKASPACSTRATAPSFHTTGHLYHHFWKAKPSSFKELGLRTSVGANKLQVIKAAARSDTEVVSETTKAGGLRGKLNKVVLAYSGGLDTSVIVPWLRENYGCEVVCFTADVGQGIKELEGLEQKAKASGACQLVVKDLKEEFVKDYIFPCLRAGAVYERKYLLGTSMARPVIAKAMVDVAKEVGADAVSHGCTGKGNDQVRFELTFFALNPKLNVVAPWREWDITGREDAIEYAKKHSIPVPVTKKSIYSRDRNLWHLSHEGDILEDPSNEPKKDMYMMSVDPEDAPDQAEYVEIGLESGLPVSVNGKSLSPASLLAELNEIGGRHGIGRIDMVENRLVGMKSRGVYETPGGTILFAAARELESLTLDRETIQVKDSLALKYAELVYAGRWFDPLRESMDAFMQKITETTTGSVTLKLYKSSVTVTSRTSPFSLYREDISSFESGQIYDQADAAGFIRLYGLPVRVRAMLEQGI

SEQ ID NO: 22951 - protein, 180 aa, Glycine max
MGYFDIPVDHVHCQPVILDYLASKMISSSDLVVVSPDVGGVARARAFAKKLFDAPLAIVDKRRHGHNVAEVMNLIGDVKGKVAVMVDDMIDTAGTIAEGAALLHEEGAREVYACCTHAVFSPPAIERLSSGLFHEVIITNTIPVAEKNYFPQLTIITVANLLGETIWRVHDDSSVSSIFQ

SEQ ID NO: 22952 - protein, 420 aa, Glycine max
MAQILAPSTQWQMRISKSSPNATPITSNMWSSLLWKQNKKVSPTSSAKFRVLAIKSDNSTINRLEGLLNLDITPFTDKIIAEYIWIGGTGIDVRSKSRTISKPVEDPSELPKWNYDGSSTGQAPGDDSEVILYPQAIFKDPFRGGNNILVICDSYTPQGEPIPTNKRHRAAEIFSNPKVQAEVPWYGIEQEYTLLQTNVKWPLGWPVGGYPGPQGPYYCSAGADKSFGRDISDAHYKACLYAGINISGTNGEVMPGQWEYQVGPSVGIEAGDHIWASRYILERITEQAGVVLSLDPKPIEGDWNGAGCHTNYSTKSMREDGGFEVIKKAILNLSPRHKDHISAYGEGNERRLTGKHETASINTFSWGVANRGCSIRVGRNTKKNGKGYLEDRRPASNMNPYVVTSLLAETTLLWEPTLEL

SEQ ID NO: 22953 - protein, 355 aa, Glycine max
MANHANHSSSFSKELSLSLATSTTTGQCSEVSCSNVTPCMNGTMSGLEQAFCGSSRELSMNLGGDKYVQFSPKVLESRYLIGIREILAQIARYSFENLEQLNYSASGNRSGGNKSSSAFPPKRRILIDNNANSTYEAHAEPPLQRHAAESKKAQLLALLQLADNRYNQCLDEIHTVVSAFHAATELDPQIHAHFALQTISILYKDLRERISNYILAMGSNFNNSCSEENEWSAETSFLQKQWALQQLNRKDQLWRPQRGLPERSVWVLRAWMFQNFLHPYPKDAEKHLLAVKSGLTRSQVSNWFINARVRLWKPMIEEMYAEMNKRKACRNEEGMQSNHGNRISMSNQRFNQCQL

SEQ ID NO: 22954 - protein, 334 aa, Glycine max
MANKQHNHNDSNKELQPLLVLGPPFMFPTFEAQNLHNYRFLNAFSSQIPLHQFLAEQSVDPSSIQAILCSPRQKISADAIRLLPSLSLIVTTSNGTRHIDLAECSYRGIQVASIPGDRLAVDVADMTVGLLIDVMWNISAADRHLRKRGPSKPCNLSSGSKLEGKRVGIVGLGKIGREVAKRLEAFGCRIMYNSRNQKPFVSYPFYSNVVELAGNSDVLVLSCSLNEQTRHIVKREVMLALGKEGVIVNIGRGDLIDEKELVRCLMEGEIKGAGLDVFENEPNVPKELFPLDNVVLSPHAASLTSHRIYDVCERVAECLEAFFSSKLPEYPGLG

SEQ ID NO: 22955 - protein, 209 aa, Glycine max
MANAAEVSALNRIKLHLLGELSPLATPLNYFDESNPSPSESSNSQSSSVSLNHYFTDLFEFDSKPQIIDLQAPKTLTSAQKKPQLNRKLSLLIAVPKKTEWIQFGSPDPNPVMAAPENLPQKNHYRGVRQRPWGKFAAEIRDPNKRGSRVWLGTFDTAVEAAKAYDRAAFRLRGSKAILNFPLEVSAVAETVSVAAAEGSVERKRRREE

SEQ ID NO: 22956 - protein, 231 aa, Glycine max
MASGFGESTGRSPPSPSYFNNNNNNDAANFERNICFELAQDPIITLCGHLFCWPCLYKWLHFHSQSRECPVCKALVEEEKLVPLYGRGKSSTDPRSKSIPGDNIPHRPAGQRPETAPPPETNHFHQHGFGFMGGLGGFAPPPMATTRFGNFALSAAFGGFIPSLFNFQLHGFHDAAMYGGGAGFPHGFANTFHGVHAHGFPLRTHQGQQDYYLKKLLLFVVLCVVLAFIWQ

SEQ ID NO: 22957 - protein, 356 aa, Glycine max
MSLLSDLINLNLSDITDKVIAEYIWVGGSGMDMRSKARTLSGLVNDPSKLPKWNYDGSSTGQAPGQDSEVILYPQAIFRDPFRRGNNILVMCDAYTPAGEPIPTNKRNKAAKIFSNPDVAAEEPWYGLEQEYTLLQKDVQWPLGWPLGGFPGPQGPYYCGTGANKAFGRDIVDSHYKACIYAGINISGINGEVMPGQWEFQVGPSVGISAADELWVARYILERITEIAGVVLSFDPKPIQGDWNGAGAHTNYSTKLMRNDGGYEIIKKAIAKLEKRHKEHIAAYGEGNERRLTGRHEMADMNTFLWGVANRGAFIRVGRDTEKAGKGYFEDRRPAFNMDPYVVTSMIAETTILWKP

SEQ ID NO: 22958 - protein, 404 aa, Glycine max
MLHVPITSVAISEQRQILNLFFCFSFVLLVLNMELLSLRLTPSPSASTSSLPAALAHCSKLCEFQPRKKKKVCFDAPRLAVRCVKASAQRTGDTIDDGETRTGFTTPAMEVTTFNRTTFTDAADFPVWEKIGAVVRLSYGLGIYGAMAVAGSFICSITGIDSLGGFHLSLDAILEGLGYAAPPIMALLFILDDEVVKLSPHARAIRDVEDEELWSFFYGMSPWQFILMVAASSVGEELFYRAAVQGALADIFLRGSNLITDVQGMASLTGVLPPFVPFAQAFAAVLTAVLTGSLYYMAASPKDPTYVVAPVLQSRSGRQDLKKLFEAWYEKRQMKKIYSPLLEGLLALYLGCEWIQTDNILAPIITHGIYSTVILGHGLWKINDHRRRLRQRIQQLKSEEKNSN

SEQ ID NO: 22959 - protein, 407 aa, Glycine max
MAPVAAASSDSIKPRDVCIVGVARTPMGGFLGTLSSLSATKLGSIAIEAALTRANVDPSLVEEVFFGNVLSANLGQAPARQAALGAGISNSVICTTVNKVCASGMKAAMLAAQSIQLGTNDVVVAGGMESMSNVPKYLAEARKGSRLGHDSLVDGMLKDGLWDVYKDVGMGVCVELCADNHALTRDDQDNYAIQSFERGIAAQESGAFSWEIAPVEVSGGRGRPSTVVDKDEGLGKFDAAKLRKLRPSFKETGGSVTAGNASSISDGATALVLVSGEKALKLGLQVIAKITGYADAAQEPELFTTAPSLAIPKAIAKAGLETSQIDFYEINEAFAVVALANQKLLGLNSEKVNVHGGAVALGHPFGCSGARILVTLLGVLKQKNGKYGVGGICNGGGGAFALVVELQ

SEQ ID NO: 22960 - protein, 133 aa, Glycine max
MVARLAVTALVLIALATISLQSSASASSVGKFVDETITSHKIVIFSKTYCPYCRRAKAVFKELNQVPHVVELDEREDGSKIQDIMVNIVGRRTVPQVFINGKHLGGSDDTVEAYESGHLHKLLGIEKKDHDDL

SEQ ID NO: 22961 - protein, 259 aa, Glycine max; identical to SEQ ID NO: 376

SEQ ID NO: 22962 - protein, 231 aa, Glycine max
MDFNSSLFSCQSLESHLNSWEELFSFNNLPLNATNESSLDSKSSSSNEGIMESQEITSNITCDGHVEEKYSPPPSLLDGSKREKRTYRGVRSRPWGKFAAEIRDPTRNGVRVWIGTFVSAEEAALAYDQAAFLTRGVLATLNFSVQVVMESLQDMGFKALKNDLSPVLALKRMHVTRTKSRASRSGNKKVKRACGSNGKWDTSTQNLLVLEDLGPEYLDQLLSFTCPGSWC

SEQ ID NO: 22963 - protein, 323 aa, Glycine max
MEFLLQLTEDWGEELFSALSKAGGKAFSNMAVGYNNVDVDAANKYGVAVGNTPGVLTETTAELAASLTLAAARRIVEADEFMRAGLYDGWLPHLFVGNLLKGQTVGVIGAGRIGSAYARMMVEGFKMNLIYYDLYQSTRLEKFVTAYAAFLKANGETPVTWKRAATMDEVLQEADIISLHPVLDKTTYHLVNKERLAKMKKEAILINCSRGPVIDEAALVEHLKHNPMFRVGLDVFEEEPYMKPGLAELKNAIVVPHIASASKWTREGMATLAALNVLGKVKGYPVWFDANKVEPFLNENARPPAACPSIVNAKALGLPTSKL

SEQ ID NO: 22964 - protein, 302 aa, Glycine max
MGPTSMAAGRVTRFLARHYPLEHHRDNADVEFDFLDDIGEALLAQSASSDECGHPNEMEEQFDQDEDHRDTVEENRTFWDKQHQLLQASICRTSSSESRIRHATKEALQEIQSAETVCGCGRQVAVITTCRNCLMREVSRRLQKAGYDSAICKTKWRSSPDIPSGEHNFLDVIDSTKKGEVRVIVELNFRGEFEMARGSEDYNRLVRRLPEVFVGKVERLSNLIKILCMVAKRCMKEKKMHMGPWRKHRYMQAKWLGPCERNTSTTSLSVRYNFERILPRPKASMLTVDLLEKPSQYALHCC

SEQ ID NO: 22965 - protein, 178 aa, Glycine max
MRKGRGGGASAAAAAAVNGSVLKEPRYRGVRKRPWGRFAAEIRDPLKKARVWLGTFDSAEDAARAYDTAARNLRGSKAKTNFPLSPFCYQHPTTDPFFYAGFHDHQNNSNNNNDNLNNPQRPTSSGMSSTVESFSGPRPPTTTTTTTTPFLTTTRRYPRTPPLVPEDCHSDCDSSSPS

SEQ ID NO: 22966 - protein, 438 aa, Glycine max
MASVLLTATISTITFGDQCSISRCAFPSLSTLHLRATQKGIHVEMNKRVVVVKAMTTKSDFDDTDVDISLSHRVNAVKPSKTVAISDHATALLQSGVPVIRLAAGDPDFDTPAVIAEAGMNAIREGYTRYTPNAGTLELRQAICHKLKEENEITYTPDEIVVSNGAKQSVVQAVLAVCSPGDEVIIPAPFYTSYPEMARLADATPVILPSHISNNFLLDPKLLEANLTERSRLLILCSPCNPAGSVYSKKLLEEIAQIVAKHPRLLVLSDEIYEHIIYAPATHTSFASLPGMWDRTLTVNGFSKTFAMTGWRLGYIAGTKHFVAACGKIQSQFTSGASSIFQKAGVAALGLGYAGGEAVSTMVKAFRERRDFLVESFREMDGVKISEPQGAFYLFIDFSSYYGREVEGFGIIENSDSLCRYLLDKGLVALVPGECIWR

SEQ ID NO: 22967 - protein, 379 aa, Glycine max
MKIVRKDLVPNGPGSVKMVAVDSDDLWFAYNLIAPGDSVMVVTVRKVLREAASGGREAERVKLKLEIKVQELADYDKEGSILRVRGKNILENEYVKIGAFHTLELELQRPFVLRKDVWDSLALEVLQQASDPGASADLAVVLMQEGLAHILLVGRSMTVTRSRIETSIPRKHGPAIAGYEKALDKFFQNVLQAFLKHIDFNVVRCAVIASPGFTKDQFHRHLFLEAERRQLRPIIENKSRIILVHTSSGYKHSLKEVLDAPNVMSLIKDTKAAQEVRVMKDFYDMLSNDPSRACYGMKHVEVANERLAVQTLLITDELFRNSDIATRKKYVNLVNSVKDSGGSVHVFSSMHVSGEQLAQISGIAAILRFPLPDLEDIEM

SEQ ID NO: 22968 - protein, 317 aa, Glycine max
MSTSKSVSSSSEDDNELRRGPWTLEEDNLLSQYISSHGEGRWNLLAKRSGLKRTGKSCRLRWLNCLKPDVKRGNLTPQEQLIILELHSKWGNRWSKIAQNLPGRTDNEIKNYWRTRIQKQAGHLKIDTDSREFQELVRRFWMPRLLQKAKESSSSAMSIQNQATPMPFDGVSQHSTVGTIPLHSHTPWQGPCMNEAGPTYMDQHEQNSDSEHDNGSCISLSESANFPKVPQHFGRTTITQYHALNNNDFGTFTYDGYNVSNNVYEMDNFKTPTTRVAEDAQYPTGDCQMVGSNWVNSDFACNMWNMDELWQFSKLQK

SEQ ID NO: 22969 - protein, 235 aa, Glycine max
MNWVHSQICHSTDAINNPTSICSSSSESLPYSSAYKKQLAPPPPLDSSSGTRISPAVVFIFVILAIVFFISGLLHLLVRFLIRHRPSSSSSISQSNRYPNDMSESNDPYQRQLQQLFNLHDSGLDQAFMDALPVFLYKDIIGLKEPFDCAVCLCQFSEQDMLRLLPLCNHAFHIDCIDTWLLSNSTCPLCRGSLYDPGFAFENPVYDLEGVREEDGVSEVLLVRVVVLINMQKTT

SEQ ID NO: 22970 - protein, 170 aa, Glycine max
MAESRRSTGMVKWFNSQKGFGFITPQDGTDDLFVHFTSIRSDGYRSLSEGQSVEFLLDYGDDGRTMAVDVTSAVRSRRPGGFRGGGGRGIGGGRGGGFGRRGGGPECYNCGRIGHLARDCYHGQGGGGGVDGDGRNRRRGGGGGGGGRGCFNCGEEGYFVRECPDVGERK

SEQ ID NO: 22971 - protein, 177 aa, Glycine max
MSRVYVGNLHPRVNERDLEDEFRIYGVLMSVWVARRPPGYAFIEFDDRRDALDAIQALDGKNGWRVELSHNSKGGGRGGRGRGGEDTKCYECGEPGHFARECRLRIGSRGLGSGRRRSPSPYRRRRSPSYGYDRRSYSPRGRRSPRRRSISLPRGRSYSTSPPYRPSCHDSPYANAM

SEQ ID NO: 22972 - protein, 234 aa, Glycine max
MAATIITCKLSLLLSLLSVSLLLGVSSSDTLQNVGAIPPTCKRIECPSYDVIHFGNGYEIRRYNSPVWISNSPILDISLVEATRTGFRRLFDYIQGKNNYKQKIEMTAPVISEVLPSDGPFCESSFVVSFYVPKENQANPPPAKGLHVQRWKTVFAAVRQFGGFVKDSSVGEEAAALKASIAGTKWADAVEKSQKRAGHASVYTVAQYNAPFEYDNRVNEIWFLFDIENEPQTV

SEQ ID NO: 22973 - protein, 422 aa, Glycine max
MLYESDIMTEIETPQFFLCPISLQIMKDPVTTVTGITYDREGIEQWLLKAKDCTCPITKQRLPRSTEFLTPNHTLRRLIQAWCSANEANGVDQIPTPKSPLSIANVEKLVKDLEVSSRFQRALEKLHDLAIENGRNRRCMASAGVAEAMVHVITKSFIQGNKTTSCVEEALRILGLLWSSANNMVDNDNMKRMVGENFDFLNSLTWVLQLQTKNNVKVINEAMPILKLTIEAKDSTPLGNLKLEFFKVVVSVMKNRELTQQAVKSALHVLIETCPLGRNRMKIVEAGAVVELIELALEKPEKNMTELIFILLAHLCSCADGREQFLQHAAGIAVVSKRILRVSPTTDDRALHIFSLVSKFSASNEVVQEMLRVGAVSKLCMVLQADCASYLKEKARGVLRLHSKTWNNSPCIQVYLLTRFHR

SEQ ID NO: 22974 - protein, 265 aa, Glycine max
MYWGEVMAGHVGRGVLEEEVWRKGPWTAEEDRLLVEYVRLHCEGRWNSVARLAGLKRNGKSCRLRWVNYLRPDLKRGQITPQEESIILELHARWGNRWSTIARSLPGRTDNEIKNYWRTHFKKKAKSPSDAAEKARNRLMRKQQFHQQQQQQQQLQQQHRAQQQQMQFNFDMKGIMAMLEDDIHRTPYKSQSRQEMINMHQNTTEEQGYLYSMLNDNSSASSAPETSAEEVLWDGLWNIDDVHGNFSVASAASRFGLYNLVAPFC

SEQ ID NO: 22975 - protein, 324 aa, Glycine max
MASNIQTLLVLALATLAIFMIPSNAQLTPNFYKKVCPQALPIIRSVVHREIIRERRIGASLLRLHFHDCFVNGCDGSVLLDDTRNFTGEKTALPNLNSIRGLEVVDEIKEAVDKACKRPVVSCADILATAARDSVAILGGPHLRYSVLLGRRDARTASKDAANANLPPPFFSFSQLLSNFKFHGLDLKDLVALSGGHTLGFARCTTFRDRIYNDTNINPTFAASLRKTCPRVGAGNNLAPLDPTPATVDTSYFKELLCKKGLLHSDQELYKGNGSESDKLVELYSRNPFAFARDFKASMIKMGNMKPLTGNKGEIRRNCRRVNN

SEQ ID NO: 22976 - protein, 225 aa, Glycine max
MYWEVMAGNMGWSVIIEEEGWRKGPWTSEEDRLLIQYVKFHGEGRWNSVARLAGLKRNGKSCRLRWVNYLRPDLKKGHITPQEESIIQELHARWGNRWSTIARSLPGRTDNEIKNYWRTHFKKKTKTPSDAAEKARIRSSRRQQFQQQQQQLKQQQVQQQQQQQQQFQFNLDMKGIINLLEENNHRVPSISQEAQEMASMYPNTSEQQTTSTLCSMSMTIMSLHL

SEQ ID NO: 22977 - protein, 387 aa, Glycine max
MVSDYNLSPSDAHPETMDFLSLAWCNFAVQALQPEPQHGSVVLLDNNSMKQLEPGSPNPLPSMEKSARMDGAHFGSFPAWKSNNVKSWIWMQQAMHPELNYNSYFRKKWMPWKQIIPLKNVSIKKWFKEIKMKRKEDRRLQRAEVHAAISVAGVAAALAAIAAENSKNESNQDRDAAVASAAALVAAQCAKVAEAMGAKKEQLSGVIGSAMSGTSASDILTLTAAAATSSKGAATLKVRSGCKNRLNGGVPILPLEDNNDLDFDFEKGRSILAQGAELYVETPEGKYMPRSVSVILNSEAKVVLMMRKHNLFKSKREGIVMTLHAELYQGSEAEDADTCYLIVLTTRGGVFKLDMADDFRRYKTWATTINHMLKISASFAKYELQFY

SEQ ID NO: 22978 - protein, 276 aa, Glycine max
MENAEEQQQQNEEVLSVELPAPSGWNKLFFPKKVGTPRKSEIVFIAPTGEEINTKKQLEQYLKAHPGNPVISEFDWGTGETPRRSARISEKVKSTPPADSDTPKKRARKSSGSKKDNKETESASEEGKAKSETEDPKAAEEEEDNEGNNDSGGKQLENGDKTEQIDEKAKKSDVDMKETDLNDTNNKLENDSAEIKNSHVKGENVITEKPEGEEAQKLEIEPAEKVAEEAADTEKSQGPLLTTELEKEENEEKTDTVILDANGGVEKENPNAAAEM

SEQ ID NO: 22979 - protein, 350 aa, Glycine max
MSFLRSFARNKDISKVGRRGIHCMQKLCAEKISPDSLEKAQNRVIDAALTLVRENTRLKKELVHSLGGAVATSTLLGVPLGHNSSFLEGPAFAPPFIREGIWCGSANSTTEEGKDLKDLRIMVDVGDIPIQEMRDCGIGDERLMKVVSDSVKLVMEEDPLRPLILGGNHSISYPVVRAISEKLGGPVDVLHFDAHPDLYDEFEGNYYSHASSFARIMEGGYARRLLQVGIRSINKEGREQAKKFGVEQFEMRHFSKDRPFLENLNLGEGAKGVYISIDVDCLDPGYAVGVSHYESGGLSFRDVMSMLQNLKGDIVGGDVVEYNPQRDTPDRMTAMVAAKFVRELAAKMSK

SEQ ID NO: 22980 - protein, 237 aa, Glycine max
MERSSEEEMLITKGPWTEQEDSLLFNYITVHGEGHWNSVARYTGLKRTGKSCRLRWLNYLRPNVRRGNITLQEQLLILDLHSRWGNRWSKIAEHLPGRTDNEIKNYWRTRVVKQAKQLKCDVNSKQFRDTLRFVWMPRMLERIRAQASSSAQAHQSSLISNSNTQAHSGLLSSALHAHAPSLSDSSASYNLMGADAGSCSSHSYYSDIARNGFGGADLWTDQNICFLQHQLAHHDLF

SEQ ID NO: 22981 - protein, 300 aa, Glycine max
MGGTSVAAGRRVTRFLASHHRDVTCVVVDVEFDFLDDIGETLLAQSASSDEMDRFDEDEDHRDTVEENRTFWDNQHQLLQTSICRTSSLESRIRHATKEALQEIQSAETVCGCGRQMAVTSCRNCLMREVSWRLQKAGYNSAICKTKWRSSPDIPSGEHNFLDVIDSTKKGKVRVIVELNFRGEFEMARGSEDYNRLVRRLPEVFVGKVERLSNLIKILCMGAKRCMKEKKMHMGPWRKHRYMQAKWLGPCERNTSTASLSVGYSERILPMAKPRPKASMLTVDLLEKLPNMHCNAVEVV

SEQ ID NO: 22982 - protein, 1141 aa, Medicago sativa
MASTSRGGAEKTTSSSISQRHQLQITTTKETEQQNNNVNNKSMKKAIAQYIEDARLHAVFEQSGDSFDYSQSIRLTTASVPEQQITAYLAKIQRGGFIQPFGSMIAVDEPSFRVLAYSENARDMLGITPQSVPSLEDDDESSSSGFNIGTDVRSLFTHSSGVLLEKAFSAREISLMNPIWIHSRSTGKPFYGILHRIDVGVVIDLEPARSEDPALSIAGAVQSQKLAVRAISQLQSLPGGDVKVLCDAVVESVRELTGYDRVMVYKFHEDEHGEVVAESKRIDLEPYMGLHYPATDIPQASRFLFKQNRVRMIVDCNASPVRVFQDEALVQPVCLVGSTLRAPHGCHAQYMANMGSIASLAMAVIINGNDEDGVGIGGTGRNSMRLWGLVVCHHTSARCIPFPLRYACEFLMQAFGLQLNMELQLAAQSLEKRVLRTQTLLCDMLLRDSPTGIVTQSPSIMDLVKCDGAALFYQGNYYPLGVTPTESQIRDIIEWLLAFHGDSTGLSTDSLADAGYPGAASLGDAVCGMAVAYITEKDFLFWFRSHTAKEIKWGGAKHHPEDKDDGQRMHPRSSFKAFLEVVKSRSMQWDNAEMDAIHSLQLILRDSFKEAENNDSKAVVHTHMAELELQGVDELSSVAREMVRLIETATAPIFAVDVNGRINGWNAKVSELTGLLVEDAMGKSLLHDLVYKESQETVDKLLSHALKGEEDKNVEIKMRTFGPGNQNKAVFIVVNACSSKDYTNNIVGVCFVGQDVTGQKVVMDKFINIQGDYKAIVHSPNALIPPIFASDDNTCCLEWNNAMEKLSGWSRTDVIGKLLVGEVFGSFCQLKGSDAMTKFMIVLHNALGGQDTDKFPFSFVDGHGKYVQTFLTANKRVNIDGQIIGAFCFLQIVSPELQQALTVQRQQDSSCFARMKELAYICQEVKNPLSGIRFTNSLLESTCLTDEQKQLLETSAACEKQMLKIIRDIDLDSIDDGSLALEKQEFLLENVINAVVSQVMLLLRERNLQLIRDIPEEIKTLAVYGDQLRFQQVLADFLMNVVRYAPSPDGWVEIHVFPRIKQISDGLTLLHAEFRMVCPGEGLPPELIQDMFHNSKWVTQEGLGLSMSRKIIKLMNGEVQYVREAERCYFLVVLELPVTRR

SEQ ID NO: 22983 - protein, 1061 aa, Medicago sativa
PEQQITAYLAKIQRGGFIQPFGSMIAVDEPSFRVLAYNENARDMLGITPQSVPSLEDDDESSSSGFNIGTDVRSLFTHSSGVLLEKAFSAREISLMNPIWIHSRSTGKPFYGILHRIDVGVVIDLEPARSEDPALSIAGAVQSQKLAVRAISQLQSLPGGDVKVLCDAVVESVRELTGYDRVMVYKFHEDEHGEVVAESKRIDLEPYMGLHYPATDIPQASRFLFKQNRVRMIVDCNASPVRVFQDEALVQPVCLVGSTLRAPHGCHAQYMANMGSIASLAMAVIINGNDEDGVGIGGTGRNSMRLWGLVVCHHTSARCIPFPLRYACEFLMQAFGLQLNMELQLAAQSSEKRVLRTQTLLCDMLLRDSPTGIVTQSPSIMDLVKCDGAALFYQGNYYPLGVTPTESQIRDIIEWLLAFHGDSTGLSTDSLADAGYPGAASLGDAVCGMAVAYITEKDFLFWFRSHTAKEIKWGGAKHHPEDKDDGQRMHPRSSFKAFLEVVKSRSMQWDNAEMDAIHSLQLILRDSFKEAENNDSKAVVHTHMAELELQGVDELSSVAREMVRLIETATAPIFAVDVNGRINGWNAKVSELTGLLVEDAMGKSLLHDLVYKESQETVDKLLSHALKGEEDKNVEIKMRTFGPGNQNKAVFIVVNACSSKDYTNNIVGVCFVGQDVTGQKVVMDKFINIQGDYKAIVHSPNALIPPIFASDDNTCCLEWNNAMEKLSGWSRTDVIGKLLVGEVFGSFCQLKGSDAMTKFMIVLHNALGGQDTDEFPFSFVDRHGKYVQTFLTANKRVNIDGQIIGAFCFLQIVSPELQQALTVQRQQDSSCFARMKELAYICQEVKNPLSGIRFTNSLLESTCLTDEQKQLLETSAACEKQMLKIIRDIDLDSIDDGSLALEKQEFLLENVINAVVSQVMLLLRERNLQLIRDIPEEIKTLAVYGDQLRFQQALADFLMNVVRYAPSPDGWVEIHVFPRIKQISDGLTLLHAEFRMVCPGEGLPPELIQDMFHNSKWVTQEGLGLSMSRKIIKLMNGEVQYVREAERCYFLVVLELPVTRR

SEQ ID NO: 22984 - protein, 1001 aa, Medicago sativa
GIGTDIRTIFTAPSASALQKALGFAEVSLLNPILVHCKTSGKPFYAIIHRVTGSLIIDFEPVKPYEVPMTAAGALQSYKLAAKAITRLQSLPSGSMERLCDTMVQEVFELTGYDRVMAYKFHEDDHGEVIAEVTKTGLEPYLGLHYPATDIPQAARFLVMKNKVRMIVDCHAKHVKVLQDEKLPFDLTLCGSTLRAPHSCHLQYMANMDSIASLVMAVVVNDSDEDGDSADAVLPQKKKRLWGLVVCHNTTPRFVPFPLRYACEFLAQVFAIHVNKEIELEYQILEKNILRTQTLLCDMLMRDAPLGIVSQSPNIMDLVKCDGAALLYRNKLWILGSTPSEPQIREIALWMSEYHTDSTGLSTDSLSDAGFPGALKLNDTVCGMAAVRITSKDIVFWFRSHTAAEIRWGGAKHEPGEQDDGRKMHPRSSFKAFLEVVKARSIPWKDFEMDAIHSLQLILRNASKDTDMIDLNSKAINTRLNDLKIEGMQELEAVTSEMVRLIETATVPILAVDVDGMVNGWNIKISELTGLPVGEAIGKHLLTLVEDSSTDIVKKMLNLALQGQEEKNVQFEIKTHGSKTDSGPISLIVNACASRDLHENVVGVCFVAQDITAQKTVMDKFTRIEGDYKAIVQNPNQLIPPIFGTDEFGWCCEWNAAMIKITGWKREEVMDKMLLGEVFGTHMSCCRLKNQEAFVNFGIVLNKAMTGLETEKVPFGFLSRKGKYVECLLSVSKKIDAEGLVTGVFCFLQLASPELQQALHIQRLSEQTALKRLKVLTYMRRQIRNPLSGIVFSSKMLENTELGTEQKRIVNTSSQCQRQLSKILDDSDLDSIIDGYLDLEMAEFTLHEVLVTSLSQVMNRSNTRSIRIVNDVAEHIAMETLYGDSLRLQQVLADFLLISINSTPNGGQVVIAATLTKEQLGKSVHLVNLELSITHGGNGVAEAVLNQMFGNNGLESEEGISLHISRKLLKLMNGDVRYLKEAGKSSFILSVELAAAQKLRG

SEQ ID NO: 22985 - protein, 880 aa, Aeromonas hydrophila
MIRIELPVLVERLNPICRHMLEEAAALCVNHQGAEIRIEHLLLKMLETPLSDVRQILKMAEVEVEELRTLLQPSAADTGYGQAYPSFSPLLVEWLQDSWLLASAELQHAQLRSGVMLLVLLMTPQRYLPGSVTRLLANVNRELLRQQFDEWVKESAETQVTVSASGTATQAALPADASLLARFTVNVTEQARQGSLDPVLCRDHEIDLMIDILSRRRKNNPIVVGEAGVGKSALIEGLALRIVAGQVPEKLRDVELMTLDLGAMQAGASVKGEFEKRFKGVMQEVKDSVRPVILFIDEAHTLIGAGNQAGGLDVSNLIKPALARGELRTIAATTWGEYKKYVEKDAALSRRFQLVKVGEPNADEATVILRGLRSIYEKAHGVLIDEEALQAAAQLSARYISGRQLPDKAIDVLDTACARVAINLTTPPRAVSHLQNALRQRELEIRQLERQSLIGLGDNDERLAELHAAQQACRYTLREQEAQWQQQQGLVHQIVELRAALLADQQDEILTREALDLADAPLDPQAAAETLAGLERELADLQQGEVLVSAHVDKTQVAAVIAEWTGVPLNRISQGELDVVTRLPEYLGELIKGQDVAVAHLHKHLLTARADLRRPGRPLGAFLLVGPSGVGKTETVLQIAELMFGGRQYLTTINMSEYQEKHTVSRLIGSPPGYVGFGEGGVLTEAIRQKPYSVVLLDEVEKAHPDVLNLFYQAFDKGELADGEGRIIDCKNVVFFLTSNLGFQTIVDHAEQPDVLLDALYPELAAFFKPALLARMEVIPYLPLGHDTLVQIVGGKLNRLVKLLKDRFGAEVVLEEEVAEEILRRANRSENGARMLESVIDGALLPPVSLQLLQRLSAGEPIKRVRFSVSERQFVAEVEG

SEQ ID NO: 22986 - protein, 290 aa, Glycine max
MEFGFLGLGIMGKAMAINLLRHGFKVTIWNRTLSKCDELVQHGASVGETPATVVKKCKYTIAMLSDPSAALSVVFDKDGVLEHINGKCYIDMSTVDADTSSKISETIKAKGGYFLEAPVSGSKKPAEDGQLIILAAGDKALYDEVLPAFDVLGKKSFFLGEVGNGAKMKLVVNVIMGSMMNAFSEGLTLAERSGLNPGTLLDVLDLGAISNGMFKLKGPTMLQNSYSPAFPLKRQQKDMRLALALGDENAVSMPVAAAANEAFKKARSMGLGDLDFSAVHETLKAPDHSS

SEQ ID NO: 22987 - protein, 205 aa, Glycine max
MTSGFGESTRASAPSPSCSGNSSNDAGDFECNICFDLAQDPVITLCGHLFCWPCLYRWLHHHSHSQECPVCKALVQEEKLVPLYGRGKTQTDPRTKSYPGMEIPHRPSGQGPQTAPPPPPPEANPFGSYGFGLMGGFIPMATARFGNFTLSTAFGGFIPSLLNIHFHGFQDATVYGTTSGYPFGFNGFHGGNTRGFTQQLVKCSG

SEQ ID NO: 22988 - protein, 304 aa, Glycine max
MPGKADTDDWRVERGEQIQFQSSIYSHHQPWRGGVGENASKSSSADQLNGSIVNGITRSETNDKSGEGVAKEYQNIKHAVLSTPFTMDKHLAPNPQMELVGHSVVLTSPYSNAQHGQILTTYGQQVMINPQLYGMYHARMPLPPEMEEEPVYVNAKQYHGILRRRQSRAKAELEKKVIKNRKPYLHESRHLHAMRRARGNGGRFLNKKKLENYNSDATSDIGQNTGANPSTNSPNTQHLFTNNENLGSSNASQATVQDMHRVESFNIGYHNGNGLAELYHSQANGKKEGNCFGKERDPNNGAFK

SEQ ID NO: 22989 - protein, 322 aa, Glycine max
MASSCFSMTTPIFKIRFFLFLCFIGISSSQLSSDFYSTTCPNALSTIKSAVDSAVSNEARMGASLLRLHFHDCFVQGCDASVLLNDTSSFTGEQTAAGNVNSIRGFGVIDNIKSQVESLCPGVVSCADILTVAARDSVVALGGPSWTVQLGRRDSTTASLSSANSDLPRFDLSLQQLSDNFQNKGLTTAEMVALSGGHTIGQAKCSTFRTRIYNETNIDSSFATSLQANCPSVGGDSNLAPLDSNQNTFDNAYFKDLQSQKGLLHTDQVLFNGGSTDSQVNGYASDPSSFNTDFANAMVKMGNISPLTGSSGEIRTNCWKTN

SEQ ID NO: 22990 - protein, 435 aa, Glycine max
MEDARGSSLLLPKNMEEHNPTHDHGTTELRNFRSYLRWVYVDHSNVCKAGLSWSVFFTLAFVVPTLSHFLLDCPTCDRDHSRPYHIPVQISLSVFAALSFISISSWDRRYGFRKFLFLDKLGDESLKIQRGYSEQMQGTMKLILRWGLPCFIAECGYKIWWYVSGASQIPHYGNIYVSSIILCTLDLCSWLYRTSIFFLVCVLFRLICYLQILRLDEFARVFQRETEVGSILLEYLRMRRNLRIISHRFRGFILASLLLVTASQLIFLLMVTKPYADVDILKAGELALVSITLVSGLLILLRGATKITHKAHSITGLAAKWHICATINSFDNIEGETPTTANAISAQAIAANISWGSDDDEVGDEEDELDNTKLLLPIYTQTISFHKRQALVTYLENNRAGITVFGFMLDRTWLHSIFGIQLALCLWLLNKTVGV

SEQ ID NO: 22991 - protein, 254 aa, Glycine max
MDFRDLAHKFSRCIVTIGNLGLQLLWYFLRIILSAWYFISVVGNLFESYFISCGVLKKYKSLHSGKVRYLAIVIESEEAYQISRVVKLLQWLDIIGVKNVCLYDMNGVLKKSKETIFKELKNAKSIEEVNEVVALHDPDHMTLEFLSYADGKEAVAKAANLIFVEHLKRHELGGELDLILLEPQLNEALQIVGSKGPEPDLLLVYGPVRSHLGFPAWRLRYTEIIHMGSLNFLRYGSLMKAIYNFTKVHQNYGT

SEQ ID NO: 22992 - protein, 218 aa, Glycine max
MAQLNLTLLAIFLSLLFLILATPVEPSKHKNSQTMIYIESSCNGTLYPNLCIRCLARYAKSTINGPQHLAQYALSVSLSRALHTRGYLLKVAKEIKSNKGAKNYKREYLTVQDCVNQITDSVEQLSQAIEELRRLNKSGSTINDDMLWHISNVETWVSTALTDARSCVYSFPGHRMSKRAASIKVKAMNVAEVTSNALALFHRYASRYRQAEARTTKP

SEQ ID NO: 22993 - protein, 428 aa, Glycine max
MASVSSQQQFRYTQPPSKVLHLRNLPWECTEEELIELGKPFGKVVNTKCNVGANRNQAFIEFADLNQAIAMISYYASSSEPAQVRGKTVYLQYSDRQEIVNNKTAADVAGNVLLVTIEGEDARLVSIDVLHLVFSAFGFVHKITTFEKTAGFQALVQFSDAETATSAKDALDGRSIPRYLLPEHMGPCSLKITYSGHSDLSVKFQSHRSRDYTNPYLPVAQSAMEGSGQPMVGLDGKRLEAESNVLLASIENMQYAVTLDVLHMVFSAFGPVQKIAMFDKNGGLQALIQYPDIQTAVVAKEALEGHCIYDGGFCKLHISYSRHSDLSIKVNNDRSRDYTIPNVPPPVVNAQPSILGQHPVPMTGPPPQQYNGAQYASVTEQTLMPQSQAGWGTAPSQSMLQMHNNPYTPSAMVPPQTAPGMQFPSHIQ

SEQ ID NO: 22994 - protein, 356 aa, Glycine max
MSLLSDLINLNLSDTTEKVIAEYIWIGGSGMDLRSKARTLPGPVSDPSKLPKWNYDGSSTGQAPGEDSEVIIYPQAIFRDPFRRGNNILVICDTYTPAGEPIPTNKRHDAAKVFSHPDVVAEETWYGIEQEYTLLQKDIQWPLGWPVGGFPGPQGPYYCGVGADKAFGRDIVDAHYKACLYAGINISGINGEVMPGQWEFQVGPSVGISAGDEVWAARYILERIIEIAGVVVSFDPKPIQGDWNGAGAHTNYSTKSMRNDGGYEVIKTAIEKLGKRHKEHIAAYGEGNERRLTGRHETADINTFLWGVANRGASVRVGRDTEKAGKGYFEDRRPASNMDPYVVTSMIADTTILWKP

SEQ ID NO: 22995 - protein, 285 aa, Glycine max
MSLFLLRFLHFSNYIKGSTTAKSVAFQVRAEKFANRKRKNQYRGIRQRPWGKWAAEIRDPRKGVRVWLGTFNTAEEAARAYDAEARRIRGKKAKVNFPEEAPGTSVKRSKVNPQENLSHKFGAGNNHMDLVEQKPLVNQYANMASFPGSGNGLTSLPSSDDVTLYFSSDQGSNSFGWSEQGPKTPETSSMLSAPLDCESHFVQNANQQPNSQNVVSMEDDSAKRLSEERVDIESELKFFQMAYLEGSWGDTSLESLLSGDTTQDGGNLMNLWSFDDIPSMSSGVF

SEQ ID NO: 22996 - protein, 247 aa, Glycine max
MNDGRQMGVHYVDAGFPYAVNDNFVDFFQGFTHVPVNYAFAGSIPDQESVYWSMNMNPYKFGLSGPGSTSYYSSYGVNGHLPRMEIDRAEWEYPSTITTVEEPATTDSPPRRDGVTSMQTIPEECSPDHHESNSSSQVIWQDNIYPDDMTYEELLDLGEAVGTQSRGLSQELIDMLPTSKYKFGSLFKRKNFGKRCVICQMTYRRGDQQMKLPCSHVYHGECITKWLSINKKCPVCNTEVFGEESTH

SEQ ID NO: 22997 - protein, 328 aa, Glycine max
MALSPIRSSSFSSSAIVALAVLLLLTGTSSANLSKNFYSKTCPNVFNTVKSVVKSAVVREPRIGASIVRLFFHDCFVQGCDGSILLDDTPTFQGEKTAAANNNSVRGFEVIDAIKSEVEKICPGVVSCADILDIASRDSVVLLGGPFWKVRLGRRDSRTANFTAANTGVIPPPTSNLTNLITRFRDQGLSARDMVALSGAHTFGKARCTSFRDRIYNQTNIDRTFALARQRRCPRTNGTGDNNLANLDFRTPNHFDNNYFKNLLIKRGLLNSDQVLFNGGSTDSLVRTYSQNNKAFDTDFVKAMIRMGDIKPLTGSQGEIRKNCRRVN

SEQ ID NO: 22998 - protein, 190 aa, Glycine max
MGYICDFCGDQRSMVYCRSDAACLCLSCDRNVHSANALSKRHSRTLLCERCNSQPAFVRCVEEKISLCQNCDWLGHGTSTSSSTHKRQAINCYSGCPSAAELSSIWSFVLEIAAISESTCEQELGLMSINENKCVGVPPEDQNVSGSDEVTDLPALNKSLVGASLMPESSSEPCILDQPAGPTNECLPKV

SEQ ID NO: 22999 - protein, 326 aa, Glycine max
MASSCSSSMITLALLVLVLGTNTSSANANPTLHTNFYYSSCPKLFDTVKRTVESAISKETRMGASLLRLFFHDCFVNGCDGSILLDDTSSFTGEKNAGPNRNSARGFEVIDQIKSAVEKVCPGVVSCADILAIAARDSVEILRGPTWDVKLGRRDSRTASQSAANNGIPRPTSNLNQLISRFNTLGLSTKDLVALSGGHTIGQARCTTFRARIYNESNIDSSFARMRQSRCPRTSGSGDNNLAPIDFATPTFFDNHYFKNLIQKKGFIHSDQELFNGGSTDSLVGTYSTNPASFFADFSAAMIRMGDISPLTGSRGEIRENCRRVN

SEQ ID NO: 23000 - protein, 327 aa, Glycine max
MASFHIQYSFLVLVLAMVITLMNPTNATLSPHFYDKVCPQALPVIKSVVQRAIIRERRIGASLLRLHFHDCFVNGCDGSILLDDTRNFTGEKTALPNLNSVRGFSVVDEIKAAVDKACKRHVVSCADILAIAARDSIAIYGGPHYWYQVLLGRRDARTASKAAANSNLPPPTFSFSQLVSNFKSHGLNVRDLVALSGGHTIGFARCTTFRNRIYNVSNNIIDPTFAASVRKTCPKSGGDNNLHPLDATPTRVDTTYYTDLLHKKGLLHSDQELFKGKGTESDKLVQLYSRIPLAFARDFKASMIKMGNMKPLTGRQGEIRCNCRRVN

SEQ ID NO: 23001 - protein, 275 aa, Glycine max
MENAEEMMQQNDEVLSVELPAPSGWNKLFFPKKLGTPRKSEIVFIAPTGEEISTKKQLEQYLKAHPGNPVISEFDWGTGETPRRSARISEKVKSTPPADSDTPKKRARKSSGSKKDNKETESASEEGKAKSDTEDPKAAEEEKNEGNDNSNSGGKQLENGDKTEQIDEQAKKPDVDMEENDLNDTNNKLENDSDEIKNSHVNGENVIAERPEGEEAQKQEVEPAEKVAEEAANTAETEKSLLTELEKEKNEEKTDTATLEANGGGEKENPNAAQM

SEQ ID NO: 23002 - protein, 312 aa, Glycine max
MMGLDQDASSNSGLHLILGLALTATTTTTPSLPSISNKLDHVDHHHHLITLRPTTKSPYNSSEAEPSLTLGLSRESYLKVPKNIIGQNSNNKVSSCDDPLDHLSTQTNSPHHSAVSSFSSGRVKRERDLSCEEVVDATEIDQRDHSCEGIVRATDEDEDGTAARKKLRLSKEQSALLEESFKQHSTLNPKQKQALAKQLNLRPRQVEVWFQNRRARTKLKQTEVDCEFLKKCCETLTDENRRLQKELQELKALKLAQPLYMPMPAATLTMCPSCERLGGGINGGGGGSPKTPFSMAPKPHFFNPFANPFAAC

SEQ ID NO: 23003 - protein, 359 aa, Glycine max
MSENMYPRLLFFDHTHSKMVWVKHQIQQKDGYLSYSPPLLSSSSSSSSSSSSSSSPPYPLGATFHKESSLPSSTPPPPPSGTRISPAVLFIIVVLAVLFFISGLLHLLIRFLIKHPSSASAQSNRHQELSTSDALQRQLQQLFHLHDSGLDQAFIDALPVFQYKEIVGLKEPFDCAVCLCEFSEKDKLRLLPMCSHAFHISCIDTWLLSNSTCPLCRGTLLTQGFSIENPIFDFDDLREDEGCPCNGENGFNTRQKTVVVEESVEKEKGVFPVRLGKFKKLSVKGGGESEVGETSSSNLDARRCYSMGSYQYVVGNSDLRVTLNHDEIGKGQVTRLTKGMELDDGKVSVEEGGCGSKED

SEQ ID NO: 23004 - protein, 101 aa, Glycine max
MQYRNEIPYACQVNVVNYKARPNAKEYIQVEILVEKNTQKIILIGREGKALKLLATAARLDVEDFLQKKVYLEIEVKVRANWRQDEGLFNHYGYGGQIRVI

SEQ ID NO: 23005 - protein, 355 aa, Glycine max
MMLGETHRANPAVHVPPWTPEIFSPYTGNADYSPYSLQEALSALQHYESTNAESDSEFPSREPEVPVDAYSCDHFRMFEFKVRRCARGRSHDWTECPYAHPGEKARRRDPRKYHYSGTACPDFRKGSCKKGDACEYAHGVFECWLHPARYRTQPCKDGTSCRRRVCFFAHTPEQLRVLPQQSPRSADSYDGSPLRHAIESSCAKTLAPAPFVSSPGSVSPPLESPPMSPMTVSVNEMVASLRNLQLGKVKSLPSSWNVMGPSGFGSPRGPMIRPGFFSLPTTPTQAPTRGGVNYFDKWDQSCEEEPVMERVESGRNIRARMFAKLSKENHLDGSDFGSGQIGDPDVGWVSELVSR

SEQ ID NO: 23006 - protein, 157 aa, Glycine max
MEGKGFTEEQEALVVKSWNEMKRNSQELGLKFFKKILEIAPAAQQLFSFLKDSTVPLGENPKLKPHAMAVFVMTCESAVQLRKAGKVTVRESNLKRLGATHFKAGVTAEHFEVTKLALLETIKEAVPEMWSPAMKNAWEEAHDQLAEAIKSEMKPSD

SEQ ID NO: 23007 - protein, 292 aa, Glycine max
MASSVEKESGASEETFSLELPAPPGWKKQFIPKKAGTPKKNEIVFTAPTGEEINNRKQLEKYLKAHPGGPAVSEFDWGTGETPRRSTRISEKAKATPPTESEPPKERTKRSSASQKETSQEEKEEETKEAEMQEVDDTTKDNNDIEKEKDVVMENQDGKSVEDTDVNKSTHSGEAKAGEYVEVPIEEEKSNAADGELPALKDKVDDKVFLRKDEEKIEQPQEETKEYRRTGVPEKSETCTTADKTVEVEGVNKEVRSTRQFEVGIIEGTKVNSDQINKKAEAELTVNGNLGS

SEQ ID NO: 23008 - protein, 298 aa, Glycine max
MLKSIVGCCKVYISESRNRTALESIERASKLFPLAPIINKFEDVAYNRVGYTLVSELGHSGPCHLSNAVLAMVKAAFDSIDFEVHTGTHPRLGVVDHICFHPLLDASLDHAANAARCLATDMGSTLQVPTYLYGAAHEEGRTLDSIRRIFGYFKPNSIENQWIGGMKSDSLPLNPDSGPSQVTPAKGVVVIGATNWVDNYNVSLLSSDICAVRRIAKQVSGRGGGLPSVQAMALAHGEGVIEVACNLLDPNKVGGERVQQEVENLAREEGISVERGYYTDFSQDQIISSYLEFFEEKI

SEQ ID NO: 23009 - protein, 329 aa, Glycine max
MALSPIRSSTFSSSSAIVTLAVLLLLTRTSSATLSKNFYSKTCPNVFNTVKSVVKSAVAKEPRIGASIVRLFFHDCFVQGCDGSILLDDTPTFQGEKTAAANNNSVRGYELIDDIKSKVEKICPGVVSCADILDIASRDSVVLLGGPFWNVRLGRRDSRSANFTAANTGVIPPPTSNLTNLITRFQDQGLSARDMVALSGAHTFGKARCTSFRDRIYNQTNIDRTFALARQRRCPRTNGTGDNNLANLDFRTPNHFDNNYFKNLFIKRGLLNFDQVLFNGGSTDSLVRTYSQNNKAFDFDFVKAMIRMGDIKPLTGSQGEIRKNCRRVN

SEQ ID NO: 23010 - protein, 162 aa, Glycine max
MRRVGGDVLNVDLAAAVNNLFNLPETMEKFMFPSSRAHDHHHETRGVSSIIPVDILDTPKEYTFFMDVPGLSKSEIQVTVEDENTLVIRSNGKRKRQDGEDEGCKYLRLEWRGPQNLQRKFRLPENANVSAITAKCENGVLTVVVEKHPPPQKSKTVEVAIA

SEQ ID NO: 23011 - protein, 224 aa, Glycine max
MVRGKTQMKRIENETSRQVTFSKRRNGLLKKAFELSVLCDAEVALIIFSTRGRLYEFSSSSINKTVERYQRKIEDLGVSNKGIHENTQHLKEVDMSMAKKIEHLEDSRRKLLGDELDKCSIDELQQLENQLERSLDKIRATKNQLFRKRIEKLKEEEKCLLEVNKRLREQYRIERQRCLSDQDVEFATKKEGEEVETELFIGRPERRMPLKLKPTTYSAHAYIA

SEQ ID NO: 23012 - protein, 283 aa, Glycine max
MGLDQDANSSGLHLVLGLSLTATVKETTQSTKPDDDHHLCVIKPTPTKPYPPNEPSLTLGLSGESYHVTKQVLRNNVYCEDPLELSRQTSPHSVVSSFSTGRVVKRERDLSCEDIEVEAEERVSSRVSDEDEDGTNARKKLRLTKEQSALLEESFKQHSTLNPKQKQALARRLNLRPRQVEVWFQNRRARTKLKQTEVDCEFLKKCCETLKDENRRLKKELQELKALKLAQPLYMPMPTATLTMCPSCDRLGGVNDNGSNKSPFSMAPKPHFYNPFANPSAAC

SEQ ID NO: 23013 - protein, 432 aa, Glycine max
MAQILAPSTQWQMRISKSSPNASPITSNMWSSLLWKQNKKVSPTSSAKFRVMAIKSDNSIINRLEGLLNLDITPFTDKIIAEYIWIGGTGIDVRSKSRTISKPVEHPSELPKWNYDGSSTGQAPGDDSEVILYPQAIFKDPFRGGNNILVICDSYTPQGEPIPTNKRHRAAEIFSNPKVQAEVPWYGIEQEYTLLQTNVKWPLGWPVGGYPGPQGPYYCSAGADKSFGRDISDAHYKACLYAGINISGTNGEVMPGQWEYQVGPSVGIEAGDHIWASRYILERITEQAGVVLSLDPKPIEGDWNGAGCHTNYSTKSMREDGGFEVIKKAILNLSLRHKDHISAYGEGNERRLTGKHETASINTFSWGVANRGCSIRVGRDTEKNGKGYLEDRRPASSMDPYVVTSLLAETTLLWEPTLEAEALAAQKLALKV

SEQ ID NO: 23014 - protein, 228 aa, Glycine max
MKPFLFLNLPNTEFNSSQVDCNHSMAHSSYPYGDPIFAYGPQAISHPQMIPPMLGLASTRVALPLDLAEDGPIYVNAKQYHGILRRRQSRAKLEAQNKLIKNRKPYLHESRHRHALNRVRGSGGRFLSTKQLAQSNAEFVTGVHSGSDPTNRYQKEHLSEVESHSSKDGDNSSFITTCSDRPCLSGNNVNFRQQECMFLGNSANMGGSPQFSGGLTFGGAKQRTSVVR

SEQ ID NO: 23015 - protein, 305 aa, Glycine max
MSFHDTSNTGLGLGLGLGLVSFHDQSENCMKSTNDPLREIHKIKKVENPSKCNSTCPSLTLGPPDDDDDDDDEVNNQPPSSKTESYEYFRPHVSSPSAVSSFSNYSSIKRERDQVLWEKEFEVEVEKVPTRVGDVDEDGNPRKKLRLTKEQAAVLEENFREHSTLNPKQKQELAMKLNLRARQVEVWFQNRRARTKLKQTESDCELLKKCCDTLTEENKKLQKELQELKSIQATPMPLYMQIPAATLCICPSCERICGGNNNSDGGNNNNGSSHTTSLLIGSKTHHHSFYKSNKYPFPHSSSAAC

SEQ ID NO: 23016 - protein, 283 aa, Glycine max
MGLDQDANSSGLHLVLGLSLTASVKETAPSTKPDDHHLCVIKPTPTKPYPSKEPSLTLGLSGKGYHVPRNNVAINKVYCEDPLEFSRQTSPHSVVSSFPTGRVIKRERDLSCEDMEVDAEERVSSRVSDEDEDGTNARKKLRLTKEQSALLEESFKQHSTLNPKQKQALARQLNLRPRQVEVWFQNRRARTKLKQTEVDCEFLKKCCETLTDENRRLKKELQELKALKLAQPLYMPMPAATLTMCPSCERLGGVSDNGSNKSPFSMAPKPHFYNPFANPFAAC

SEQ ID NO: 23017 - protein, 756 aa, Burkholderia thailandensis E264
MDEQLKQSALAYHQNPKPGKISVTPTKPLSNQLDLSLAYSPGVAAACEAIHADPLDAQKYTSRGNLVGVVTNGTAVLGLGNIGPLAAKPVMEGKGCLFKKFAGIDVFDIELAESDPDKLVEAIAMLEPTLGGINLEDIKAPECFYIEQKLRERMKIPVFHDDQHGTAIIASAAILNGLKVVGKDLSSVKLVCSGAGAAAIACLDLLVKLGLSKSNVLVADSKGVIYEGRGNLDPSKQRYAAVTDARTLADAIRDADVFLGCSSAGVLKQDMVKTMADKPLILALANPEPEIRPEDAKAVRPDAIVATGRSDYPNQVNNVLCSQFIFRGALDVGATKKTEEMKLACVRAIAELAQETDQSEEVAKAYEGHSLEFGPDYLIPKPFDPRLIIKIAPAVAQAAMDSGVATRPIADMDAYREQLGTTVYRTGMVMRPVFATAKTKAARIVFAEGEDERVLRAAQFVLQERIAKPIIVGRPSVVEMRLQKIGSKLKCGVDFEIVNPEDDPRYQQCWQAYHEMGARDGVTPEVAKAALRKFNTLIGAMLVHLGDADGMICGMIDTYHSHLKFIEQVLGRAKGAEHFAAMNLLMLPGRNLFMCDTYVNEQPSAEQLADMTIQAAAEIERFGITPKAALLSNSNFGSAPSASSRRMAEARKLIVERAPELEVDGEMHGDAALSEVVRKAAFPGTTLTGEANLLIMPNVEAANIAYNLLKMVGGEGVTVGPFLLGAAKPVHILTPAATVRRIINMTAVAAANVQVK

SEQ ID NO: 23018 - protein, 405 aa, Burkholderia thailandensis E264
MPELDMTKAFLCDAIRTPIGRYGGALAPVRADDLGAVPLKALAERNRDVDWAAVDDVIYGCANQAGEDNRNVARMSLLLAGLPHAVPGATINRLCGSGMDAIGIAARAIKAGEANLMIAGGVESMSRAPFVTGKATSAFSRQAEIFDTTIGWRFVNPLMKQQYGVDSMPETAEHVATDYRVSRADQDAFALRSQQKAARAQADGTLAQEIVPVTIAQKKGEPLVVARDEHPRETTLDALAKLKGVVRPDGTVTAGNASGVNDGACALLVASEAAARRHGLVPRARVLGIATAGVEPRVMGIGPAPATQKLLARLGMTLDQFDVIELNEAFASQGLAVLRLLGVADDDARVNPNGGAIALGHPLGASGARLVTSATYQLHRTGGRFALCTMCIGVGQGIAIAIERV

SEQ ID NO: 23019 - protein, 287 aa, Burkholderia thailandensis E264
MIAIVGRPNVGKSTLMNALVGQKISITSRKAQTTRHRITGIRTLDDAQYVFVDTPGFQTRHSTALNRSLNRAVTSTLTSVDAILFVIEAGRFGPDDQKVLDLIPPGTPTLLVANKLDRVSDKDTLYPFFQKMGELREFAEIVPLSAKHPEDIQRLMNTIKPYLPEGDAIYGEDDLTDRSSRFLAAEILREKVFRWTGDELPYTSTVVIDKFEEEGRLTRVFATILVERDSHKAMVIGKKGAKLKQISTEARQDMEKLFDGPVYLETFVKVRSGWADNEAGLRAYGYE

SEQ ID NO: 23020 - protein, 515 aa, Burkholderia thailandensis E264
MTSSNSLSPLSPLNAIADEAIGLPAAAAAAQPAVSDAGDAAPDEPTFASLGLSPEIVSALQAAGYVKPTPVQQRAIPAGIAGRDLLVSSPTGSGKTAAFMLPAIERFAQLQKAQAQQPRAPREAQPGERRGRRPQPVARPGLLVLTPTRELAMQVTTAASTYGKHLRRLRTVSILGGVAYGQQLMLLAKNPEILVATPGRLLDHLERGRIDLSELKMLVLDEADRMLDMGFIDDIDTIVAATPASRQTMLFSATLDGKIGSLTNRLLKDPERIEITQKIESRSNIAQTVHYVDDRDHKDRLLDHLLRDTALDQAIIFTATKIDADQLAGRLADAGFQSAALHGDLPQGARNRTIRALRERRVRVLVATDVAARGIDIPGITHVFNYDLPKFAEDYVHRIGRTGRAGRSGTAVSLVHHAEQGALKRIERFVRAPLPVNVVEGFEPRKAPPPRNDRGNGRGRPGGNGGRRFGGKPGGGHGGGRSGGWSGKPGGNREGYGARRSDGQRGGPRRGNSAA

SEQ ID NO: 23021 - protein, 907 aa, Burkholderia thailandensis E264
MTEPDTTRHFPVLHASVAYSRIHDRDMTVSRQALFGKLGHSLFRSIESATAFCKLRGNPYVELVHWLHQMLQAADGDIQRIARHCDIDIGELDRDMVRALDELPAGASSISDFSHHIETAIERAWVLATLDFGDRRIRGAWLLAALLKTPELRRVLLSISSAFGRIRVDELDAMLPAWIDGSPEANETPYDNSDFGAATPGEASSALQQKGGGSPLEQFCLDLTARARAGQIDPVVGRELEIRTMIDVLLRRRQNNPLLTGEAGVGKTAVVEGLARAIADGDVPPKLADVRLLSLDVGALLAGASMKGEFEARLKGVLEAATKATQPVILFVDEIHTLIGAGGQAGTGDAANLLKPALARGTLRTIGATTWAEYKRHIEKDPALTRRFQVLQVPEPDEAAAIDMVRGLTRTFSRHHGVVVLDEAIRAAVKLSHRYIPSRQLPDKAISLLDTACARVALSQHAPPRELQDVRRRLEAARVRLELLDGEQRIGLGDESALAQSRDEIAALEVQEQAIDACWRQQIEAAQALLSAREAAGDDPATAIDALRELERALSSLQGDCAFVFPEVNEAIVAEIMSDWTGIPVGRMVTDEVSAVRALPDTLAARVIGQRDALHQICDRVQTARAGLTDPKKPLGVFLLAGPSGVGKTETALALAEALYGGEQNLITINMSEYQEAHTVSGLKGAPPGYVGYGEGGVLTEAVRRRPYSVVLLDEIEKAHPDVHEMFFQVFDKGYMEDGDGRYIDFRNTTILLTSNAGSELVSGLCTDEACAPDADGLCAALAPALLKTFPAAFLGRVTLVPYRPLAQETLSRIVRLHLDRVVARMAENQAVALSYSDNVVDYVVGRCLVQETGARLLIGFIEQHVLPLLAKCWLDSLSSKTVFTRVDLDVADSGAAPAQAFVLRAS

SEQ ID NO: 23022 - protein, 866 aa, Burkholderia thailandensis E264
MARAHRGAAGLRADAGEPCGAARGRRGLTLTRAAARDAESIAKENDMTQAAPAAPEAPPSVAPFHDGELAAQRRAGVADAAAESGGRGIRAFMPDQHRAFFAQLPFFVVGGVDGDGQPWATLRVGAPGFISSPQPRTLDIAGGALRDDPLAGSWRVGSLLGGLGIELHTRRRNRINGVVASLEGDAMSVTVGQSFGNCAKYIQSRTPTPAPPQRAYAAPPQRRAARLDADDRALLARADTFFIATANTSDAAGGARGVDVSHRGGPPGFVRVDDDRTLTTPDYSGNNFFNTIGNLLRDPRAGLLFVDFARGDLLYVAADAEIVWDGPALAAFDGAQRLVRLRIREVRRSAAVLPFRWSAPRFAPQFAAWGGAGVFSSSSSSGMGAAGVAGLARVESAELPESSMLSKVLKASEASEASEASEASEASETRDGPKAPEAPHTTQATNEAEMPQASAAISARSPDARWRTLVVAAVRDETPDVRSFELEAADAGPLAPFEPGQHLTIRLPAAGQSGPLIRSYTLSDAFDGRRYRISVKRDGRASSWLHDHARPGVRIDATAPRGAFTFDAASPRPAVFVSAGIGITPMIAMLNAVLARRAAGAPADAHAKRIYFVHGARRGDERPFAAHLAAAARAHPALSVHLFDSRADGASAGASPGRVSIDALQRVLPFGSYDFYLCGPASFMKSLYDGLRALDVPDGRIRLEAFGPASVRRTALRGGAAAIVAADEKPIVKHGGNGDGNDGEKSGEKSGEKSGKKSGGGDDAKAGGQAGAHAATVVFSRSRRTVEWTPRDGTLLELAEAHGVPADSNCRSGACGTCTTRVLGGRVRYGGTVDAEVAPGMALVCMATPDCAGDAESGPPCVTLDL

SEQ ID NO: 23023 - protein, 378 aa, Burkholderia thailandensis E264
MRDAANFEPADSRVTRPAFWQALPERWTSDVEETLVCCHVRQETHDVKSFFFRSPQGRAFSFEPGQFVTLELDIDGETINRCYTISSSPARPHTISITVKRVPGGKVSNWLHDNLRPGAPLRVLGPAGEFTCARHPARKYLFLSAGSGVTPLMSMSRAHHDLAEDRDIVFVHSARTPDDIIFARELDLIASTHANFRTAFVCERLGARTNWHGVTGFLSLLLLKLIAPDFLEREIFTCGPAPYMKAVRDLLAEAGFDRGRYHEESFSFETLAQSDVRTEAPAGDAASDAQARRHTVAFAKSNREIACGADEHVLDAARRAGVRLPASCTQGMCGTCKVKLVSGQVDMKHNGGIRQREIDQGMVLLCCSKPLSDLVVDK

SEQ ID NO: 23024 - protein, 136 aa, Oryza sativa Japonica Group
MQDQAAPVPWSTDLFDCFDDSSNCFMTWLCPCITFGQIAEIVDRGSSSCGTSGSLYALVFLVTGCSCIYSCIYRSKLRSQYGLQETPCPDCLVHLWCEPCALCQEYRELKKRGFDMSLGNRKFNSTANYQLQIIYN

SEQ ID NO: 23025 - protein, 129 aa, Oryza sativa Japonica Group
VVFVFLAPLRLRAARGAQQAGHGARQGQGDRRLLPRRRLQSKTYCPFCARVKRLLAELAASYKAVELDVESDGSELQSALADWTGQRTVPCVFIKGKHIGGCDDTMAMHKGGNLVPLLTEAGAIATPSL

SEQ ID NO: 23026 - protein, 424 aa, Oryza sativa Japonica Group
MKWNILTLTAKILFRHLAQLEPWARGPLIRLFAKHILVFWGPRVNLAQNANGRSTALRCADGRFMMRLKLPNGVTTSEQTRYLASVIEAYGKDGCADVTTRQNWQIRGVTLPDVPAILDGLNAVGLTSLQSGMDNVRNPVGNPLAGIDPDEIVDTRSYTNLLSYITSNFQGNPTITNLSGMEVFWSEVEKRMPNGVLERAAPEDLIDKKWQRRDYLGVHPQKQEGLSYVGLHVPVGRVQAADMFELARLADEYGSGELRLTVEQNIVIPNVKDEKVEALLAEPLLQKFSPQPSLLLKGLVACTGNQFCGQAIIETKQRALLVTSQVEKLVSVPRAVRMHWTGCPNSCGQVQVADIGFMGCLTKDSAGKIVEAADIFVGGRVGSDSHLAGVYKKSVPCDELAPIVADILVERFGAVRREREENEE

SEQ ID NO: 23027 - protein, 874 aa, Oryza sativa Japonica Group
MIRFTNIDCGFVDGESYTDSTTNLTYVPDHEFVEGGTHHEVVPKLISGSTDEQEKTLRSFPDGQRNCYTIPSTSGKKYLIRTTFTYGNYDGLRSSENGSLFLFGLHIGVNFWTTVNLTKQDSSDTIWKEVLTVAPDEFIYVCLVNFGSGTPFISALELRQLDDPMYPFLNLFVSVSYFTRMRFGAVDDFITRYPTDLFDRFWEAAQCYSYPWLNLTTNQTVNKLPGNDNFQVPTLIVQKASTINSGFSWLNISITAGDNLNGQSLELLPIFHFAEIEKNRPNRTFQIYSDGNELHQAFSPSYLQVDSVYLRDRYLHESGTTFTLCKTNSSELPPLINAFEAYSLVRMENLTTDTIDVSSMKQVKTQYNVQRRSWNGDPCSPKEYTWEGVKCNYYDGKQNPRIILVNLSASRLSGWINPSFRNMSLEILDLSHNNLSGTIPYNQVNSLKSLNLSYNQLIGSVPDYLFKRYKADKAKKNTATLLIAVIVPVVAITLMLFLWMLCCKGKPKEHDDYDMYEEENPLHSDTRRFTYTELRTITNNFQSIIGNGGFGTVYHGILGNGEEVAVKVLRETSRALSKDFLPEVQTLSKVHHKNLVTFLGYCLNKKCLALVYDFMSRGNLQEVLRGGQDYSLSWEERLHIALDAAQGLEYLHESCTPAIVHRDVKTANILLDENLVAMISDFGLSRSYTPAHTHISTIAAGTVGYLDPEYHATFQLTVKADVYSFGIVLLEIITGQPSVLVDPEPVHLPNWVRQKIARGSIHDAVDSRLMHQYDATSVQSVIDLAMNCVGNVSIDRPSMTEIVIKLKECLLAGTGKKQLVSGSYKQKDAMDAGIARQFQLLISGVPIVSNECISGGITELSYYSGSSTVEQVGA

SEQ ID NO: 23028 - protein, 547 aa, Oryza sativa Japonica Group
MELAPALSLSMAMSSWVATIVTLLIGVAVASLRGRQRRTKARLNLPPGPRGWPVFGSLGALAGALPPHRALAALAARHGPLMHLRLGSFDAVVASSAGAARLVLKTHDAAFADRARTAAGELVAYNYKGIVHTPYGAYWRMARKLCATELFSPRRVDSYERIRAEEIGALARDLFGRAGRAVAVRERLASATLRNILRMSVGDKWSGVYGSADGEAFRRTLDEAFEVSGAVSNVGEWVSLLGWLDVQGFRRRMKRLSKMYDRFLEQILHEHEASMAAAGDGGQPAAAACDLVDVLLQLSGEEEEGSAGAGADSEARLTRDGVKAFILDIIAGGTESSAVAMEWAMAELLRRPDAMAAATDELDRVVGTARWVTERDIPDLPYVDAVVKEALRLHPVGPLLVPHHAMEDTVVAGGYVVPAGARVLVNAWAIARDPASWPDRPDAFLPERFLPGGGAAAAGLDVRGQHYELLPFGSGRRVCPATNLAMKMVALGVASLVQGFAWRLPDGVAAEDVSMEELVGLSTRRKVPLVAVAEPRLPAHLYAGTAA

SEQ ID NO: 23029 - protein, 146 aa, Oryza sativa Japonica Group
MAKPSAGAVTGVPIGSAAWSTGLCDCFDDCGLCCTTCWCPCITFGRVAEIVDRGSTSFGTGGALYALLGCTCTYRGKMRAQHGLGDAACGDCCVHCCCESCALCQEYRELVARGYDPKLGWHLNVERGAAAAAAAAAAPAVQHMGR

SEQ ID NO: 23030 - protein, 149 aa, Oryza sativa Japonica Group
MSRSQLMHMYKLGDLTPAPSMTIPMAHSSRPTLGFPLGTALLIFVIFSLSGIFSCCYHWDKLRAFLWSRHPDVILQEGQHTVISIASPSKTTSDHKNEKAEKECGLPVIMPGDRIPKFFARPCPHEKCLPAAEEEEAEVQVKCSVPQSS

SEQ ID NO: 23031 - protein, 202 aa, Oryza sativa Japonica Group
MYSRRILLHTPFSGQPSGPSQPVSGATIVEGGSPGSNFDANIVMILAVLLCALICALGLNSIVRCALRCSSRMVVDPEPSRVTRLAQSGLRRKALRSMPILLYSTGLKLNTVSPMCAICLSDFEDGEHVRVLPKCNHGFHVRCIDRWLLARSTCPTCRQSLFGAPQKASGCSESEGSQAEPAPARPVLAPLRPEGLVTPYDF

SEQ ID NO: 23032 - protein, 173 aa, Oryza sativa Japonica Group
AASEMDYRPSRMAVVAKYAEVFIREFFDQNPLSHVGIVTMKDGISHRLTEIGGSPESQIKALMGKLECSGEPSLQNALELVHGYLDQVPSYGHKEVLFLYSALNTCDPGDIMETIAKCKKSKIRCSVIGLAAEIFICKYLCEETGGSYTVALDEVLKYALCVYLSLFSYCEDK

SEQ ID NO: 23033 - protein, 100 aa, Oryza sativa Japonica Group
NILLHPFHIDSARACYGPKHVEIANERLAIQTLLITDNLFRNSDIATRQNYVRLVESVKKFGGTVHIFSSMHVSGEQLAQLTGIAAILRFPLPDLEDIEM

SEQ ID NO: 23034 - protein, 728 aa, Oryza sativa Japonica Group
MSRYPDDPRDRVWTPWDSPSNWTEISTTRPVQQTYDDLFEVPTAVMQTAIVPMFATDNIELAWVAYTQPKDPSPGYIAIMHFSELELSPPSRDVREFYINLNGNMMYSKGYKPVYLYAHAIYNTNPFLRYPQYNISINATYNSTMRPFINAMEVYSVFSTTTIGTYGQDASAMMVIKEKYQVKKNWMGDPCIPTEFTWESLTCSYENSKHVIKINLSSSGLSGEISSSFGDLKALQYLDLSNNNLTGSIPDALSQLPSLTVLDLTGNQLNGSIPSGLLKRIQDGTLNIKYGNNPNLCTNDNSCQAAKHKSKLAIYIVAPVVLVLVIVSVTILLFCLLGQKKKQGSMNTSIKPQNEANYVPTNDSDGHGSSMQLENRRFTYKDLEKITNNFQRVLGRGGFGKVYDGFLEEGTQVAVKLRSESSNQGDKEFLVEAQILTRIHHKNLVSMIGYCKNGKYMALVYEYMSEGTLQEHIAGKRNNGRHLTWRERLRIALESAQGLEYLHKWCNPPLIHRDVKATNILLNARLEAKIADFGLSKSFNLENGTHVSTNTLVGTPGYVDPEYQATMQPSTKSDVYSFGVVLLELVTGKSAVLRDPEPISIIHWAQQRLAQGNIEEVVDACMCGDHDVIGVWKVADIAFKCTAQVSARRPTMTDVVAQLQECLELEEEHCAVNDANNNFYTSNNSKPNSSYDTYAADHSIDVSQNSVAFEMEKNFGRMPSTAPGPATR

SEQ ID NO: 23035 - protein, 917 aa, Oryza sativa Japonica Group
MAAWSWLILLCLVAAATAGVLQARAQPDSKDCGLPGKTSYVDDKTKISYAADDGFTDGGSFHNISAEYITPALSARYHNVRSFPDGARNCYTLRSLVAGLKYLIRATFMYGNYDGLSKLPIFDVYIGVNFWMMVNISDPSGATLLEAIVVVPDDFVQVCLVNTGTGTPFISGLDLRPLEKKLYPQANDKRGLSLFGRWNFGPISTTEFIRYPDDPHDRIWMPWVSPSYWVEVSTTRPVQHTDEDVFDAPTKVMQTAIAPLNASSNIEFAWVPYTQPKDPAPGYITVMHFSELQLRSSNATRQFYINLNGNMVFSQGYTPAYLYADAIFNSNPFLRYPQYNISINATANSTLPPIINAIEVFSVFSTATVGTDGQDASAMMVIKEKYQVKKNWMGDPCVPKTLAWDKLTCSYDSSKPARITDINLSSGGLSGEISSAFANLKALQNLDLSNNNLTGSIPDALSQLPSLAVLDLTGNQLNGSIPSGLLKRIQDGTLNIKYGNNPNLCTNDNSCQPAKHKSKLAIYVAVPVVLVLVIVSVTILLFCLLGRKKKQGSMNTSVKPQNETASYVPTNGSHGHGSSMQLENRRFTYNDLEKITNNFQRVLGEGGFGKVYDGFLEDGTQVAVKLRSESSNQGDKEFLAEAQILTRIHHKSLVSMIGYCKDGKYMALVYEYMSEGTLREHISGKRNNGRYLTWRERLRIALESAQGLEYLHKWCNPPLIHRDVKATNILLNAKLEAKIADFGLSKTFNLENGTHVSTNTLVGTPGYVDPEYQATMQPTTKSDVYSFGVVLLELVTGKPAVLRDPEPISIIHWAQQRLAQGNIEGVVDARMHGDHDVNGVWKATDIALKCTTQVSAQRPTMTDVVAQLQECLELEEGRCAISNANNNFYTDNNSNSNSSYDMYATDHSIDIQSWGTP

SEQ ID NO: 23036 - protein, 912 aa, Oryza sativa Japonica Group
MAARWWLLLLLGLAVAGVVRGQGGAPDTSGFISIDCGLPEKTSYVDDATKLKFTSDDAFTDAGTIHNVSSEFATPTTTTDRSLYNVRSFPAGARNCYTVPSVVPGSKYLVRAKFLYGNYDGLNKPPVFDLHLGVNFWQTVTVPSADWLGNAEVIAVVPDDFLQVCLVNTGAGTPFISGLDLRPLPSSLYAPANATQGLVLLDRRNFGASGSTVIRYPDDTYDRVWWPWSNPPAEWSDISTADKVQNTIAPVFDVPSVVMQTAITTRNSSIPIQFSWDTKPNHVYPDPGSIFTLYVTELELLAGNAVRQFNVTINGVIWTKAPYKPVYLSTDAMYNGDRPYRGITRYNFSLNAAGSSTLPPILNAAEAFSVISTADLATDAQDVSAITAIKAKYQVNKNWTGDPCAPKTLAWDGLTCSYAISTPPRITGVNMSYAGLSGDISSYFANLKEIKNLDLSHNNLTGSIPNVISQLQFLAVLDLTGNQLNGSIPSSLLKRSQDGSLTLRYGNNPNLCSNSSSCQLPQKKSNSMLAVYVAVPVVVIGAVAVFLIFFIRKKKNKSKGAVKPQILGNGVQSHSQNGSGGSLLELHNRQFTYKDLAVITNNFQRVLGKGGFGPVYDGFLKDGTHVAVKLRDESSSQGYSEFLTEAQTLTKIHHKNLVALIGYCKDEIHLALVYEHMSEGTLEDKLRGKDRKGRSLTWRERLRIVLESAQGLEYLHKACSPRFVHRDVKSSNILLNANLEAKVADFGLTTAFKCDGDTHVSTVRVVGTYGYLAPEYATALQVSEKIDVYSFGVVLLEVITGQPPIIKLPEPTTIIQWTRQRLARGNIEGVVDVNMPDDRYDINCIWKVADVALKCTAHAPGQRPTMTDVVTQLKECLELEETSFKGDTSSSYMSGSSIDPNSSYNTYTTEMS

SEQ ID NO: 23037 - protein, 353 aa, Oryza sativa Japonica Group
MGFLFARSSGYSFVALALLACVLLAPCQAAKAGLSIKFYAKTCPGVDTIVRSVVAQAVAKEPRMGASIIRLFFHDCFVNGCDASILLDDTLTFTGEKNAGANINSVRGYEVIDAIKSQVEAACKGVVSCADIVALASRDAVNLLGGPTWNVQLGRKDSRTASGTAANANLPGPASSGASLVAAFAGKGLSAREMTALSGAHTVGRARCLMFRGRIYGEANINATFAAALRQTCPQSGGGDGNLAPFDDQTPDAFDNAYFKNLVAQRGLLHSDQELFNGGSQDALVRKYAGNAGMFAGDFAKAMVKMGGLMPAAGTPTEVRLNCRKSKYNTGRLTINLYHIFVHVELKGKRTGE

SEQ ID NO: 23038 - protein, 545 aa, Oryza sativa Japonica Group
MSTSSNPSYHQLGLDAISCCFVAGGGGAEAAAPFFGFGFGDVDGEFLVASPVAAVGDELACAVPLRRPQGSVSEEEVNAAAVAAAAAGGAESCSTVHSVLGSVEFGCGTSSGVTIAQASRMGRLAGEAPCGDAGGGGWIYGGSGIAPLHGAYYLSGFSSGAGAGFLSPFAASSVAAAAPAASELSLRLGATKCSSPSSMANASSEVSCSGLTHVSSGGGLGYHQAAAAGAGAALFHPTHGDDAAAAAAGELRQAYHSRAPPHFSQVVSRSAVLAHVAQELLNGFVACLLQDVAADAASGVDGGEASQALSSGFSARITTAPTEDASPGSGGARWAAEAQRLRKLLQLVDEKCNQCVEEMQSTAARFNSMVRSTGGGGGGLTAAFAGRAVAAAYRRVRRRVMGQLVAAATARSSSSAAAAALEEKERSWESSFIQKHWAMQQLRRGDQQSWRPQRGLPEKSVAVLKAWMFENFLRPYPKDSEKDMLAARSGLSRSQVSNWFINARVRLWKPMIEDMYEELKKTSGGSDGAAEIEHLSSKDVLSLES

SEQ ID NO: 23039 - protein, 85 aa, Oryza sativa Japonica Group
STRLLRNRVSAQQARERKKAYMSELEARVKDLERSNSELEERLSTLQNENQMLRQVIKLYFEADMCICIILNSDQLFIYTHLIDS

SEQ ID NO: 23040 - protein, 175 aa, Oryza sativa Japonica Group
MGTSLLRTAPARWWRFLPRRLVSTVMPSVTLLPRILFLHPTTVMFHMNRTNYQLIDISEDGLFVSLLTESGNTKDDLGLPTYDNLLGQIKTGFGEGKDVVVTVMSAMGRSRSDFTDKGLIPVFEDRTSPTKEIEISILLMALRVDRVHVANILITAKYAEDLYVISANNSAPMKD

SEQ ID NO: 23041 - protein, 212 aa, Oryza sativa Japonica Group
VKHSQLTESHTWSNTATAGTTAAAWLSPQPPVPARRRRHPRNRSRLATTTRRRGAPRCRRPAAAAGFIGVRKRPWGRFAAEIRDSTRNGVRVWLGTFETAEAAAMAYDQAALSARGAAAALNFPVERVRESLRALALGAAGGSPVLALKGRHSKRKRRKRSELAGATATANKTTTTTSATTGGEHKQIVLELEDLGADYLEELLWMSEQTSH

SEQ ID NO: 23042 - protein, 362 aa, Oryza sativa Japonica Group
ELTQPHGYLDDEAAAAAVNSIARSSSSSSIGSGEGDRSPAEASDAGEAADPEEIPRTGVGSGGSLEMSSQQQHAGEAPASAAAAARARLRWTGQLHERFVLAVAELGGADRATPKSVLRAMAVPGLTLYHLKSHLQKYRQAVSRGGNGGGGGSGSLNDRSSSSERQPADHDGDSAADEPRTIAYDGDSDGDAKEGLRDSSRSMVQMQREVQRKLQEQIEVKRHLQLRMEAQGRYLQSVLRRAQQVLADHSLASSPEAATAELSELASAVDIECMSSSSPPRHHRQSAATDSCVTTTSSSEAESKAAGSKRLHTSDCTVEQPVQGKRAFNFLQRHNQADQEEEQEEEYAGAEDGSSSEIDLNR

SEQ ID NO: 23043 - protein, 464 aa, Oryza sativa Japonica Group
MDDPGAADPGARPHHLSPGQPPVVPRSPTPLDLSSAAAAAAAASYRRLSPSLRPPAHPQARLPSPYPQIPSSSSAAAAGSSGHHARSLSQPLFFSLDSLPPLPYADLAAPPAIPPSPPSSSSDPPPPGLPPRKGGHRRSQSDIPFGFSHLSPPLPPPAPVKREAATAAEGCRSDGDDFALYDLVNSYMDLDGMEALNSSEERHEDRDSRASGTRTGSVADSSENEAESHSTPVERKDGGGKSRHCRSLSVDSFIEKLNFDESPKLPLPSPSGGLSRSGSGSLDGGAASLFGAEFANGEFTEAEKKKIMANERLAEIALTDPKRVKRILANRQSAARSKERKMRYIQELEHKVQVLQTEATTLSAQLTMLQRDSTGLATQNNELKIRLQAMEQQAQLRDALNEALTAEVQRLKLATGEITDGRMSKGLQQQMNSQLIQLQQLQIQQQQSSQTTQQGQQQQPQKSA

SEQ ID NO: 23044 - protein, 1033 aa, Oryza sativa Japonica Group
MGLRRGPNAKCLLPWTTTLAPETCERRFGPNDPTREPEHESASASINNHGDVLQKVESRQFTYKELEKLTNHFEQFIGQGGFGSVYYGCLEDGTEIAVKMRSDSSSHGLDEFFAEVQSLTKVHHRNLVSLVGYCWEKDHLALVYEYMARGSLSDHLRGNNVVGEGLNWRTRVRVVVEAAQERVCDLFSRVKCRDWEPKLTYQLLQLGQQVIWIQTHGAVGQPGFLSIDCGLDGNYSSGYKDPDEGITYVPDGTYVDAGENHRVAADRESGRLRSDLTVRSFPSGVRNCYALPTVAGAKYLVRVIAFYGNYDGKNSSSLQFDLYLGVNYWNTVSADGDEVYEAMFVAWASWAPVCLVNTGGGTPFVSSVNLRTLGSGVYHPVLAANQSMCLFDRRNMGSNVSILRYPDDPYDRYWWKMRSDPTWKNLSTASTIEQNDNFVVPLPVMQTAIEASNNDTIIKVTRKDKTAHKCMIFAYLADFQNSQLRQFNITLSDTKPLLYSPPYLSAGIVDISDWDMPNNGMYTITLEPTSASKLPPMLNAFEIYTLIPSDNPMTFPRDSWDGVKCSNPSDNTSRIISLDLSNSNLHGPISNNFTLFTALEHLNLAGNQLNGPIPDSLCRKNNTGTFLLSFDSDRDTCNKSIPGINPSPPKSKVNRAAILAISVVVPVMAIVVLVLAYLIWRQKRKRDNVPHSEPELEIAPASRKYHEDGLQRVENRRFTYKELEKITNKFSQCIGQGGFGLVYYGCLEDGTEVAVKMRSELSSHGLDEFLAEVQSLTKVHHRNLVSLIGYCWEMDHLALVYEYMSQGTLYDHLRGNNGARETLSWRTRVRVVVEAAQGLDYLHKGCSLPIIHRDVKTQNILLGQNLQAKIADFGLCKTYLSDTQTHISVAPAGSAGYMDPEYYHTGRLTESSDVYSFGVVLLEIVTGESPMLPGLGHVVQRVKKKIDAGNISLVADARLIGAYDVSSMWKVVDIALLCTADIGAHRPTMAAVVVQLKESLALEEARADSGFKGSIGTLSDTTISTSTFGPSAR

SEQ ID NO: 23045 - protein, 286 aa, Oryza sativa Japonica Group
MEEAELRRRRRKRPFLTTTHDELELQMEDLVDELYGVDEQGSSSAAARKRRLTAEQVRALERSFEEEKRKLEPERKSELARRLGIAPRQVAVWFQNRRARWKTKQLELDFDRLRAAHDELLAGRTALAADNESLRSQVILLTEKLQANGKSPSPSPAPAEQTAVPAAPESAKSFQLEEGRRLYDAAGSTTTTNGGGGGVAMPAARVAAARAASNDSPESYFAGARSPPSSSEDDCGGAGSDDDYPSSSVLLPVDATLVGDAFEHAVAATVAADEEAPLNSWEWFWN

SEQ ID NO: 23046 - protein, 667 aa, Oryza sativa Japonica Group
MDKGALVVQVMDDSSNGGVGAAAAGGSFSSLRAYGRALAQTPRRLARRACAATSPGEEMSRVRARSGARMARRLRWHDLVGLGLGGMVGAGVFVTTGRATRLYAGPGVVVSYAIAGLCALLSAFCYTEFAVDMPVAGGAFSYLRVTFGELAAFLTGANLIMEYVFSNAAVARSFTAYLGTAVGVDAPSKWRIAVPGLPKGFNEVDLIAVGVILLISVCICYSTKESSVVNMVLTAVHVAFILFIIVMGFWRGDTRNLTRPVDLAHNPGGFFPHGAAGVFNGAAMVYLSYIGYDAVSTMAEEVERPSRDIPVGVSGSVVLVTLLYCLMAASMSMLLPYDAIDTEAPFSGAFKGSSGWGWVSNVIGAGASLGILTSLMVAMLGQARYLCVIGRSGVMPAWLAKVHPCTATPVNASAFLGVFTAALALFTELDVLLNLVSIGTLFVFYMVANAVVYRRYVAADDDDADHRRAWPTLVFLAAFSLVALCFTLLWQFAPAGRARTGLLAACGAAAVATVGAFRALVAEARRPELWGVPAMPWVPAASVFLNVFLLGSLDRPSYVRFGFFTAAAVLVYVLYSVHASYDAEEGGGAGAGAAALDGAKVQDEAADFKLRSPNGHCSLTVKHYLGRQKFRSHLRLLQTFSHHLTCTEDKILGAMQWSGLHFQSSKQ

SEQ ID NO: 23047 - protein, 448 aa, Beta vulgaris
MSSSDPENASRPTNGASLNDNSSNQSQTVVVPQTAHQISTDSWLQAGFVLTTGINSAYVLGYSGAIMVPLGWIPAVLGLMAATGISLYANSLVAKLHEFGGKRHIRYRDLAGFIYGPRAYKLTWASQYINLFMINTGFIILAGSSIKAAYTLFKDDDALKLPYCIIIAGFVCALFAIGIPHLSALRIWLGVSTFFGLIYIIIAIALSLKDGLQSPPRDYTPPTKRNQVFTTIGAAANLVFAFNTGMLPEIQATVRKPVVENMMKALYFQFTVGVVPMYAIVFIGYWAYGNKTSSYLLSSVHGPVWLKALANISAFLQTVIALHIFASPMYEYLDTRFGISGNALNPKNLGFRVIIRGGYLALNTFVSALLPFLGDFMSLTGAISTFPLTFILANHMYFRAKRNKLSLAMKIWLWVNIVFFSCMALASFIAALRLIATDSKEYHLFADL

SEQ ID NO: 23048 - protein, 495 aa, Solanum lycopersicum
MEASILQLLLLLSLTSCTIVFYKIRGRWRRRPPSPPSLPIIGHLHLLNQMPHHTFFNLSQKLGKIIYLQLGQIPTLIISSPRLAELILKTNDHIFCSRPQIIAAQYLSFGCSDITFSPYGPYWRQARKICVTELLSSKRVHSFEFIRDEEINRMIELISSRSQSEVDLSQVFFGLANDILCRVAFGKRFIDDKLKDKDLVSVLTETQALLAGFCFGDFFPDFEWVNWLSGMKKRLMNNLKDLREVCDEIIKEHLMKTREDGSEDFVHVLLKVQKRDDLQVPITDDNLKALILDMFVAGTDTSAATLEWTMTELARHPSVMKKAQNEVRKIVANRGKVEEFDLQHLHYMKAVIKETMRLHPPVPLLVPRESIEKCSIDGYEVPAKTRVLINTYAIGRDPEYWNNPLDYNPERFMEKDIDLRGQDFRFLPFGGGRRGCPGYALGLATIELSLARLLYHFDWKLPSGVEAQDMDLSEIFGLATRKKVALKLVPTINKL

SEQ ID NO: 23049 - protein, 539 aa, Bacillus subtilis subsp. subtilis str. 168
MNQLHRRMGTFSLMMVGLGSMIGSGWLFGAWRAAQIAGPAAIISWVIGMVVILFIALSYSELGSMFPEAGGMVKYTQYSHGSFIGFIAGWANWIAIVSVIPVEAVASVQYMSSWPWEWAKWTSGLVKNGTLTGEGLAFASVLLLIYFLLNYWTVNLFSKANSLITIFKIIIPGLTIGALLFVGFHGENFTGGQSIAPNGWASVLTAVATSGIVFAFNGFQSPINMAGEAKNPGKSIPIAVVGSLFVATVIYVLLQIAFIGAVNPSDIAHGWSHLNFNSPFADLAIALNINWLVIVLYADAFVSPSGTGITYTATTSRMIYGMEKNKYMPSIFGKLHPIYGVPRQAMFFNLIVSFIFLFLFRGWGVLAEIISVATLISYITGPITVMTLRRTGKDLYRPLRLKGLNVIAPLGFIFASLVLYWARWPLTGQVLFIILIGLPIYFYYQAKAKWKGFGRNFKAGVWMVFYLLAMMVISYLGSDKFGGLNVIHYGWDMVLIAMVSLVFYVWALKSGYQTEYLKDAKEINSQLLNGQSEAAAGKE

SEQ ID NO: 23050 - protein, 446 aa, Bacillus subtilis subsp. subtilis str. 168
MSQTKKDQPKGNLAWWQLSLIGVGCTIGTGFFLGSSIAIVKSGFSVLLSFLIAGIGTYFVFEQLAKLSAKQPEKGSFCAYARKAFGKWAGFSNGWVYWTSEMLITGSQLTAISLFTKHWFPQVPLWVFASIYAVLGLLIIFTGLSVFEKTENVLAVIKTAAIFMFIVIAILALCGILSGGNHGIHVPNKTSEFFPYGAMGLWTGLIYAFYAFGGIEVMGLMAVHLKKPEEASKSGKLMLATLAIIYIISIGLALLLVPLHTFTEQDSPFITSLKGYNLEIILDIFNGIFIIAGFSTLVASLFAVTTLLCTMADDGDAPKCFTLKEGKKICWPALGLTFAGLVLSIILSLVLPKNIYEHMTTAAGLMLLYTWLFILFSSKKLTDPEGMGKTQIYLAMVLIAAAVSGTLFEKSSRPGFFVSIGFLVIIAIVTMIYQKKQGHKDRPASP

SEQ ID NO: 23051 - protein, 473 aa, Bacillus subtilis subsp. subtilis str. 168
MLLIGYFAYKRTSNLTDYMLGGRSLGPAVTALSAGAADMSGWLLMGLPGAMFSTGLSGAWIVIGLCLGAWANWLYVAPRLRTYTEKAGNSITIPGFLENRFGDQTKLLRLFSGIVILVFFTFYVSSGMVSGGVLFNSILGMDYHTGLWIVTGVVVAYTLFGGFLAVSWTDFVQGIIMFAALILVPIVTFFHTGGAGDTVAEIRSVDPDMFNIFKGTSVLGIISLFAWGLGYFGQPHIIVRFMAITSVKEIKRARRIGMGWMILSAVGAVLTGLGGIAYYHQRGMTLKDPETIFIQLGNILFHPIITGFLISAILAAIMSTISSQLLVTSSSLVEDLYKSMFRRSASDKELVFLGRLAVLAVSIVALVLAWEKNNTILGLVSYAWAGFGASFGPVVLLSLFWKRMTKWGALAGMIVGAATVIIWANAGLSDFLYEMIPGFAASLLSVFFVSILTQAPSQAVTDQFNDYQDTMSQ

SEQ ID NO: 23052 - protein, 115 aa, Cicer arietinum
MSGATPNPTPNPEEDKKPNDAAHINLKVKGQDGNEVFFRIKRNTQLKKLMNAYCDRQSVDLNSIAFLFDGRRLRAEQTPDELDMEDGDEIDAMLHQTAEPVKLGCCSGSCENFNT

SEQ ID NO: 23053 - protein, 323 aa, Listonella anguillarum
MEFKVIVKPSGVEYQSGRNILDDAFASSISLEHSCKTGDCGVCCAEVISGLVENENGELVTQGHILTCQSKAKSDVVLKANYYPELVDIKQQTISCKVASFEFVTKDIVSIRFRFSPKTIFNYLPGQYVDLSFRGVKRSYSIANAKSKSNELELHIRKVPNGEMSELLFEHLKENQLMRIEGPKGTFFVRDNIKPLIFIATGTGIAPIKAIVEELIAKEDKRNVYIYWGMRYKNEIYCDELSLLAAENQNIFFNLVLSREFEVSPDYKKGYVQDAVIRDFNSLKDIEVYACGSSKMIECAKALLLQHQLPNDAFFSDAFTPAK

SEQ ID NO: 23054 - protein, 476 aa, Clostridium perfringens SM101
MRNIPIINGISMYLREEIVPFSMPGHKNGRGFKGFEEILLQGDLTEVEGLDNLQHPEGIIKEAEDKLSKLYKSKKSYFLVNGSTCGNLIMIFSLFKEGDKVLVERNFHKSIMNGIIMRKLKPVFINNIFHSKLKAPVGIDLNHLKEQISLNKDLKGIILTYPNYYGVGVNIDETIKIAREANLKVGIDSAHGAHFGFNKLLPESVQELKTDIVVMSAHKTLPSLTQTAWMHVNNEDFIEEIEFYKNIFMSTSPSYMFMMSLDYSRNFLEEHGEEAYNNLFKIIEDFKNHIKDLSYFKILDKEFLINGLEKNIKINDIKIDNSRIVLNLRENLNGNKLLDYLRSKNIQCEMSDNKNIVLIPSPFNTEEDFKILKDALKYCDINCLKDEEIDFYLTDLPEKKLEPFEVLELEYERININDAVGKIVAESIVPYPPGVPMLIMGEIIEERHIKLLNEYMKSKVDLIGIKDKKVKVIKNK

SEQ ID NO: 23055 - protein, 395 aa, Glaucocystis nostochinearum
TYSCVGIWQNDRVEIIANDQGNRTTPSYVAFSDSERLIGDAAKNQVAMNPENTIFDAKRLIGRKFSDPVVQSDMKHWPFKVIARDGDKPYMQVKYKGEVKTFAPEEISSMVLLKMKETSEAFLGKEVKSAVITCPAYFNDSQRQATKDAGAIAGLNVLRIINEPTAAAIAYGLDKKGSGERNILIFDLGGGTFDVSLLTIDDGIFEVRATAGDTHLGGEDFDNRMVNHLLQEFKRKFKKDPSSSARALRRLRTACERAKRTLSATTQTTIEIDSLFDGIDFNTTMTRAKFEELNADLFRACLDPVEKVLRDSKVDKSSIHDVVLVGGSTRIPKVQQLLRDLFNGKELCQSINPDEAVAYGAAVQAAILTGEGSQKVQDLLLLDVAPLSLGLETAG

SEQ ID NO: 23056 - protein, 392 aa, Glaucocystis nostochinearum
SCVGVYKNGRVEIIANDQGNRITPSWVAWTTDGERLIGDAAKNQAAVNPTNTVFDVKRLIGRKFEEKEVQSDMKHFPFKVVSKEGKPYIQVEVKGEKKTFSPEEITAMILTKMKETAEAFLGKTVKNAVVTVPAYFNDAQRQATKDAGTIAGLNVMRIINEPTAAAIAYGLDKKGGEKNILVFDLGGGTFDVSLLTIDNGVFEVIATNGDTHLGGEDFDNRVMDFLTKQFKKKHQKDMTKDKRAIQKLRRKVEDAKRALSSQTQVRIEVEALHDGIDFTETLTRARFEELNADLFKKTLGPVSKVMDDASLKKSEVDEVVLVGGSTRIPKVQQLLKDFFNGKEPNRGVNPDEAVAYGAAVQGGILSGEGGAETTDVLLLDVTPLTLGIETVG

SEQ ID NO: 23057 - protein, 391 aa, Cyanophora paradoxa
CVGVYKNGRVEIIANDQGNRITPSWVAFTETGERLIGDAAKNQAAQNPVNTVFDVKRLIGRKFDEKEVQSDMKHFPFKVVNKEGKPFIQVDVKDETKTFSPEEISAMVLTKMKETAEAYLGRTVKNAVVTVPAYFNDAQRQATKDAGTIAGLNVLRIINEPTAAAIAYGLDKKGGEKNILVFDLGGGTFDVSLLTIDNGVFEVIATSGDTHLGGEDFDNRVMDYLIKVFKKKHNKDLTKDKRSMGKLRRKVEDAKRALSTQTQVRVEVEALFDGIDFSETLTRARFEELNNDLFKKTLAPVQRVLEDSGLKKTDVDEIVLVGGSTRIPKVQQLLKDFFNGKEPNRGVNPDEAVAYGAAVQGGILSGEGGDETKDILLLDVTPLTTGIETVG

SEQ ID NO: 23058 - protein, 201 aa, Rhizobium leguminosarum bv. viciae
TQIKEFDAFPTLEQLPLWGFDGSSTQQAEGRSSDCVLKPVAIYPDPARTNGALVMCEVMMPDGVTPHASNARATILDDEDAWFGFEQEYFFYQNGRPLGFPEQGYPAPQGPYYTGVGYSNVGDVAREIVEEHLDLCLAAGINHEGINAEVAKGQWEFQIFGKGSKKAADQIWMARYLLQRLTEKYGIDIEYHCKPLGDTDW

SEQ ID NO: 23059 - protein, 201 aa, Rhizobium leguminosarum bv. viciae
TQIKEFDAFPTLEQLPLWGFDGSSTHQAEGRSSDCVLKPVAIYPDPARTNGALVMCEVMMPDGVTPHASNARATILDDEDAWFGFEQEYFFYQNGRPLGFPEQGYPAPQGPYYTGVGYSNVGDVAREIVEEHLDLCLAAGINHEGINAEVAKGQWEFQIFGKGSKKAADQIWMARYLLQRLTEKYGIDIEYHCKPLGDTDW

SEQ ID NO: 23060 - protein, 201 aa, Rhizobium leguminosarum bv. viciae
TQIKEFDVFPTLEQLPLWGFDGSSTQQAEGRSSDCVLKPVAIYPDPARTNGALVMCEVMMPDGVTPHASNARATILDDEDAWFGFEQEYFFYQNGRPLGFPEQGYPAPQGPYYTGVGYSNVGDVAREIVEEHLDLCLAAGINHEGINAEVAKGQWEFQIFGKGSKKAADQIWMARYLLQRLTEKYGIDIEYHCKPLGDTDW

SEQ ID NO: 23061 - protein, 201 aa, Rhizobium leguminosarum bv. viciae
TQIKEFDEFPTLEQLPLWGFDGSSTMQAEGRSSDCVLKPVAIYPDPARTNGALVMCEVMMPDGVTPHSSNARATILDDEDAWFGFEQEYFFYQNGRPLGFPEQGYPAPQGPYYTGVGYSNVGDVAREIVEEHLDLCLAAGINHEGINAEVAKGQWEFQIFGKGSKKAADQIWMARYLLQRLTEKYGIDIEYHCKPLGDTDW

SEQ ID NO: 23062 - protein, 201 aa, Rhizobium leguminosarum bv. viciae
TQIKEFDEFPTLEQLPLWGFDGSSTMQAEGRSSDCVLKPVAIYPDPARTNGALVMCEVMMPDGVTPHASNARATILDDEDAWFGFEQEYFFYQNGRPLGFPEQGYPAPQGPYYTGVGYSNVGDVAREIVEEHLDLCLAAGINHEGINAEVAKGQWEFQIFGKGSKKAADQIWMARYLLQRLTEKYGIDIEYHCKPLGDTDW

SEQ ID NO: 23063 - protein, 216 aa, Chrysanthemum x morifolium
MVRGKTQMRRIENATSRQVTFSKRRNGLLKKAFELSVLCDAEVALVIFSPRGKLYEFANSSMQETIERYRSHVKDIQTDTSSVEDVQNLKHETAAMAKKVEALEVAKRKLLGEGLGTSTIDELVQIEQQLERSVRIIRARKMQVYNEQIEQLHAKEKMLAAENAILTEKCIIQTDKATEEMGVDLNVLESGENSDVETELFIGPPETRMKQLTWPK

SEQ ID NO: 23064 - protein, 663 aa, Porphyra yezoensis
MADKKDVPSGPSIGIDLGTTYSCVGIWQNDRVEIIANDQGNRTTPSFVAFTDSERLIGDSAKNQVAINATNTVFDAKRMIGRKFSDPSVQQDMKHFSFKVVQKEGDKPVVEVQYKGETKQFSPEEISAMVLSKMREVAESYLGKEVKTAVVTVPAYFNDSQRLATKDAGTIAGLHVSRIINEPTAAAIAYGLDRKTAGDTALERTVLIFDLGGGTFDVSLLSIEDGIFEVKATAGDTHLGGEDFDNRLVNHFSAEFKRKNKKDMSNNPRSQRRLRTACERAKRTLSSATQTTIEIDSLFEGVDFYSSLSRAKFEELCMDLFRGTLEPVEKVLRDAKAAKGDVDDIVLVGGSTRIPKVQSLLVDFFNGKELSKSINPDEAVAYGAAVQAAILAGDTSERTQDLLLLDVAPLSLGIETAGGVMTPLIKRNTTIPTKKSQIFSTYADNQTGVLIQVYEGERTRTKDCGLLGKFELTGIPPAPRGQPQLEVVFDVDANGILNVSATDKSTGKQNKITITNDKGRLSKEQIEAMVQEAEKYKAEDEAAQAKIEARNGLENYCYNLKNTTVGDATVKEKLSEDDAKAIETIVADTLAWLESNDNAEKEEYDAKLKEVEAVAHPIMTKMYAAGGGAPGGMPDMSGMGGAGAAPMDTGGADNPDITVEDID

SEQ ID NO: 23065 - protein, 444 aa, Methanocaldococcus jannaschii
MELKNKKLSLWEAVSMAVGVMIGASIFSIFGVGAKIAGRNLPETFILSGIYALLVAYSYTKLGAKIVSNAGPIAFIHKAIGDNIITGALSILLWMSYVISIALFAKGFAGYFLPLINAPINTFNIAITEIGIVAFFTALNFFGSKAVGRAEFFIVLVALLILGLFIFAGLITIHPSYVIPDLAPSAVSGMIFASAIFFLSYMGFGVITNASEHIENPKKNVPRAIFISILIVMFVYVGVAISAIGNLPIDELIKASENALAVAAKPFLGNLGFLLISIGALFSISSAMNATIYGGANVAYSLAKDGELPEFFERKVWFKSTEGLYITSALGVLFALLFNMEGVASITSAVFMVIYLFVILSHYILIDEVGGRKEIVIFSFIVVLGVFLLLLYYQWITNRFVFYGIIATFIGVLIFEIIYRKVTKRTFSNNMYVKSLESSGLVPR

SEQ ID NO: 23066 - protein, 444 aa, Methanocaldococcus jannaschii
MELKNKKLSLWEAVSMAVGVMIGASIFSIFGVGAKIAGRNLPETFILSGIYALLVAYSYTKLGAKIVSNAGPIAFIHKAIGDNIITGALSILLWMSYVISIALFAKGFAGYFLPLINAPINTFNIAITEIGIVAFFTALNFFGSKAVGRAEFFIVLVKLLILGLFIFAGLITIHPSYVIPDLAPSAVSGMIFASAIFFLSYMGFGVITNASEHIENPKKNVPRAIFISILIVMFVYVGVAISAIGNLPIDELIKASENALAVAAKPFLGNLGFLLISIGALFSISSAMNATIYGGANVAYSLAKDGELPEFFERKVWFKSTEGLYITSALGVLFALLFNMEGVASITSAVFMVIYLFVILSHYILIDEVGGRKEIVIFSFIVVLGVFLLLLYYQWITNRFVFYGIIATFIGVLIFEIIYRKVTKRTFSNNMYVKSLESSGLVPR

SEQ ID NO: 23067 - protein, 173 aa, Hordeum vulgare subsp. vulgare
  misc_feature (51)..(68): Xaa can be any naturally occurring amino acid
  unsure (1)..(173): unsure at all Xaa locations
MDKHQLFGSSNVDTTFFAANGTAQGETSKQRARRRRRRSARCGGGDGDGGXXXXXXXXXXXXXXXXXXEILELSFREDRKLETARKVYLAAELGLDPKQVAVWFQNRRARHKNKTLEEEFMRLKHAHDAAILHKCHLENELLRLKERLGATDRRCGASGRQLGATGHLWMADT

SEQ ID NO: 23068 - protein, 173 aa, Hordeum vulgare subsp. vulgare
MDKHQLFGSSNVDTTFFAANGTAQGETSKQRARRRRRRSARCGGGDGDGGEMDGGGDPKKRRLTDEQAEILELSFREDRKLETARKVYLAAELGLDPKQVAVWFQNRRARHKNKTLEEEFARLKHAHDAAILHKCHLENELLRLKERLGATDRRCGASGRQLGATGHLWMADT

SEQ ID NO: 23069 - protein, 383 aa, Thermus aquaticus
MRGLSQRVKSMKPSATVVVNARALELRRKGVDLVALTAGEPDFDTPHHVKERARRGLAQGKTKYAPPAGIPELREAVAEKFRGENGLEVTPEETIVTVGGKQALFNLFQAILDPGDEVIVLAPYWVSYPEMVRFAGGVPVEVPTLPEEGFVPDPERVRRAITPRTKALVVNSPNNPTGVVYPEEVCEALAEMALQHDFYLVSDEIYEHLIYEGAHFSPRHLAPEHTITVERAANAFAMTGWRIGYACGPKAVIKAMADVSSQSTTSPDTIAQWATLEALTNREASMAFIAMAREAYRKRRDLLLEGLSRIGLEAVRPSGAFYVLMDTSPFAPNEVEAAERLLMAGVAVVPGTDFAAFGHVRLSYATGEENLKKALERFAQALQ

SEQ ID NO: 23070 - protein, 575 aa, Lactococcus lactis
MKKIKLEKPTSGSQLVLQTLKELGVEIIFGYPGGAMLPLYDAIHNFEGIQHILARHEQGATHEAEGYAKSSGKVGVVVVTSGPGATNAVTGIADAYLDSVPLLVFTGQVGRQSIGKDAFQEADTVGITAPITKYNYQIRETADIPRIVTEAYYLARTGRPGPVEIDLPKDVSTLEVTEINDPSLNLPHYHESEKATDEQLQELLTELSVSKKPVIIAGGGINYSGSVDIFRAFVEKYQIPVVSTLLGLGTLPISHELQLGMAGMHGSYAANMALVEADYIINLGSRFDDRVVSNPAKFAKNAVVAHIDIDAAELGKIVKTDIPILSDLKAALSRLLQLNKVRTDFNDWIKTVIENKEKAPFTYEPQNHDIRPQETIKLIGEYTQGDAIIVTDVGQHQMWVAQYYPYKNARQLITSGGMGTMGFGIPAAIGAKLAQPNKNVIVFVGDGGFQMTNQELALLNGYGIAIKVVLINNHSLGMVRQWQESFYEERRSQSVFDVEPNFQLLAEAYGIKHVKLDNPKTLADDLKIITEDEPMLIEVLISKSEHVLPMIPAGLHNDEMIGLHFTDKNEEIDNA

SEQ ID NO: 23071 - protein, 497 aa, Staphylococcus aureus
MLTMGTALSQQVDANWQTYIMIAVYFLILMLLAFTYKQATGNLSEYMLGGRSIGPYITALSAGASDMSGWMIMGLPGSVYSTGLSAMWITIGLTLGAYINYFVVAPRLRVYTELAGDAITLPDFFKNRLNDKNNVLKIISGLIIIVFFTLYTHSGFVSGGKLFESAFGLDYHFGLILVAFIVIFYTFFGGYLAVSITDFFQGVIMLIAMVMVPIVAMMNLNGWGTFHDVAAMKPTNLNLFKGLSFIGIISLFSWGLGYFGQPHIIVRFMSIKSHKMLPKARRLGISWMAVGLLGAVAVGLTGIAFVPAYHIKLEDPETLFIVMSQVLFHPLVGGFLLAAILAAIMSTISSQLLVTSSSLTEDFYKLIRGEEKAKTHQKEFVMIGRLSVLVVAIVAIAIAWNPNDTILNLVGNAWAGFGASFSPLVLFALYWKGLTRAGAVSGMVSGALVVIVWIAWIKPLAHINEIFGLYEIIPGFIVSVIVTYVVSKLTKKPWCIC

SEQ ID NO: 23072 - protein, 681 aa, Volvox carteri
MALRFCPTAAPPRGCGTPIQHPVLLLPHKALLPYSTAASRQAARPARVCVTAYAKLADGSARRMQSEEVRRAKEVAQAALAKESPADWVDRFGSEPRKGADILVQCLEREGVDNVFAYPGGASMEIHQALTRSDRITNVLCRHEQGEIFAAEGYAKASGRVGVCIATSGPGATNLVTGLADAMMDSIPLVAITGQVPRRMIGTDAFQETPIVEVTRAITKHNYLVLDIKDLPRVIKEAFYLARTGRPGPVLVDVPKDIQQQLAVPDWDSPMSITGYISRLPPPVEESQMIPVLRAIQSASKPVIYYGGGCLDARDELREFAARTGIPLASTFMGLGVVPAEDPNHLQMLGMHGTVAANYAVDQADLLVALGVRFDDRVTGRLDAFASRARIVHVDIDAAEISKNKTAHVPVCGDVKQALRHLNRMLEAEPLSDRFVAWRAELAAKRAEFPLRYPQRDDAIVPQYAIQVLGEETKGEVIITTGVGQHQMWAAQWYPYKEPRRWISSGGLGSMGFGLPAALGAAVAFDGKQGREKRIVVDIDGDGSFLMNVQELATVFIEKLDVKVMILNNQHLGMVVQWEDRFYKANRAHTYLGKREAEWHATGDEEDIYPNFVGMARSFGVPSMRVIRKEDLRGAIRTMLDTPGPYLLEVMVPHIEHVLPMIPGGATFKDIITEGDGSVKY

SEQ ID NO: 23073 - protein, 552 aa, Pseudomonas aeruginosa PAO1
MYVYDEYDQRIVEDRVKQFRDQTRRYLAGELTGEEFRPLRLQNGLYIQRYAPMLRIAVPYGLLSSRQLRKLAQIARDYDKGYAHISTRQNVQFNWPELEDVPEILAELATVQMHAIQTSGNCIRNTTTDQFAGVARDELVDPRPWCEIIRQWSTFHPEFAHLPRKFKIAVNGAVSDRAAIEVHDIGLEAVKNEAGELGFRVSVGGGLGRTPIVGSFINEFLPWQHLLGYLDAILRVYNRYGRRDNKYKARIKILVKALTPEVFAERRRGRMGQPQGRTEHLTEAEVQRVAAHFVDPAYKALDDLDESLARLDAEHPGFARWRARNTFAHKKPGYVAVTLSLKPTGTAPGDVTDKQLEAIADLADRYSFGEVRNSHNQNIILADVEQGELFALWGELRELGFATPNVGLLTDIICCPGGDFCSLANAKSIPIAEAIQPGFDNLDYLFDIGDIDLNISGCMNACGHHHVGHIGILGVDKKGAEFYQVSLGGSSARDASLGQILGPSFAQEQMADVIDKIIQVYVERRTEEEPFIDTFRRIGIDPFKERVYAANH

SEQ ID NO: 23074 - protein, 308 aa, Aquifex aeolicus
GHHHHHHMKVGYVAIVGKPNVGKSTLLNNLLGTKVSIISPKAGTTRMRVLGVKNIPNEAQIIFLDTPGIYEPKKSDVLGHSMVEIAKQSLEEADVILFMIDATEGWRPRDEEIYQNFIKPLNKPVIVVINKIDKIGPAKNVLPLIDEIHKKHPELTEIVPISALKGANLDELVKTILKYLPEGEPLFPEDMITDLPLRLLAAEIVREKAMMLTREEVPTSIAVKINEIKPGDANPNMLVIKGEIIVDRENLKPIIIGKKGQRLKEIGKRARQELELILGRPVYLELWVKVVPDWRRRPEYVRLFGYAL

SEQ ID NO: 23075 - protein, 393 aa, Thiobacillus intermedius K12
MRLAQRNQSIEPFYVMDVVRAAAEQQTAWEAQGRRMIHLSVGEPDFTAPEPVVKAATRALRDGRTGYTLAPGLPALRERIAQHYAQVHGVTLDPARVFITAGASGALTLASLLLFNPGDEVLMPDPSYPCNKNFVAAAGARARMLPAPAAQRFQLTASEVEAAWTPQTAGVLLASPSNPTGTSIAPDELRRIADGVRARGGVSIVDEIYLGLSYEAGYGHTALAAGDDIITVNSFSKYFQMTGWRLGWLVVPPALVAPLERMAGNLFICASSVAQQAALACFEPDTLAEYERRRAEFQRRRDLIVPGLEALGLRVPVRPDGAFYVYADCSAYSADSWDFCFEVMRDTGVVLVPGKDFGTAEPQRYFRLSYANSIANLQEALARLRGYLERKVA

SEQ ID NO: 23076 - protein, 301 aa, Thiobacillus intermedius K12
MTSSPPDSPRRFGTVAIVGRPNVGKSTLLNALVGAKVSITSHKAQTTRHRILGVTTHGASQFAFVDTPGFQTQHMHALNRAMNRTVTGALSEVDLVLWVLEAGKILPQDRTVLEVLPDDRPVIAVVNKLDRITPREKLLPWLAELGQLRKFAEIVPMSAQKKADAPRLLSIMEPYLHEGEWGYEEDALTDRSERFLAAEILREKLFRLTGDELPYTSTVVIEQFAQEGDLRRISAAIIVDRDGHKAMVIGAGGERLKRISTEARQDMQVLFDGPVFLEVWVKTRSGWADDQAAVRAFGYED

SEQ ID NO: 23077 - protein, 297 aa, Thiobacillus intermedius K12
MTTSIAFIGLGAMGAPMLGHLLQLGSSAKAYARSDSSRAAAAELGVQLCASPAEAARGAEFIFTNVTSTEDVRNVLCGPEGALHGAQPGAVCVDHSTISPEGAREIGQALQSAGLHFLDAPVSGGVNGAKQASLSIMVGGDAEVFARALPLLRALGQNVRHVGPSGSGQVAKACNQLIQVVTIEAIAEALLYATRQGVDAHEVLGAISTGFAGSRMLDLMGPKMAQRDFAAGIEARLHAKDFGLIAASAKAAGLHLPALEQVQRQLDALMQSGWGRDDTSSLLRVLESQQDGLNRPE

SEQ ID NO: 23078 - protein, 446 aa, Thiobacillus intermedius K12
MATILQNLPTGQKVGIAFSGGLDTSAALLWMQKKGAQPYAYTANLGQPDESDYDDIPRKAMGFGAEKARLIDCRVQLAHEGIAAIQCGAFHISTGGVTYFNTTPLGRAVTGTMLVAAMKEDDVNIWGDGSTFKGNDIERFYRYGLLTNPALKIYKPWLDQTFIDELGGRKEMSEFLIANGFDYKMSVEKAYSTDSNMLGATHEAKDLEQLSSGIRIVNPIMGVAFWKPEVEVKAEEVTIRFEEGQPVALNGQTFSDAVALFLKANEIGGRHGLGMSDQIENRIIEAKSRGIYEAPGMALLHIAYERLVTGIHNEDTIEQYRMGGLKLGRLLYQGRWFDPQTMMLRESAQRWVARAVTGEVTLELRRGNDYSILNTESPNLTYAPERLSMEKVEDAPFSPADRIGQLTLRNLDITDTRAKLGIYAKTGLISLGEGASMLRLEGEKGE

SEQ ID NO: 23079 - protein, 306 aa, Thiobacillus intermedius K12
MSASPVIHLIGAPTDIGAGDRGASMGPEALRVAGIDRALRAQGLTVLDTGNLIGPHNPWQPPACGYRHLPEVIAWNTAVHQAVGDVLRAQALPILLGGDHCLAIGSLSAVAQHCRAQGRKLRVLWLDAHADFNTHTVTPTGNIHGMPVACLCGNGPQALTTLGGPAPQLQPSCIRQIGIRSVDAEEKRLVHQAGLDVFDMRYIDEYGMRDAMRRALEGVDADTHLHVSFDVDFLDPDIAPGVGTTVPGGPTYREAQLCMEMIADTGLLASLDVVELNPAFDERNRTAEVAVDLIESLFGKSTLMRK

SEQ ID NO: 23080 - protein, 545 aa, Thiobacillus intermedius K12
MASIHLDTPAAAGTPGRNIRKAAGIWSLLFASLTAIIGSGWLFAPLTAATQAGPASILSWAIGGAAILVLAFVNAELTSSFPGMGAVITFPKLSHGHLAAAVVSWVVFLGYVTVAPAEVLAVVTYANNYLPGMVDAKTSLLTDTGMIVSILLLGAFILINAWGVRALLRLGNTLMIWKLIIPILTIVALMLASFHVGNFTAQGFAPFGAKGTIAAIATSGIVFSYLGFRQAIELSGEATNPQRDVPIAIIGSVLIAGAIFVMLEVALIGAVNPSDIAQGWAKLHFTGVSGPFAGLAVILGMSWLAILLYIDAVVSPAGTGLVYGGTTARVVYATGRDGLSTPWFAKLNKNGAPSTGLWITWIVGILFFLPFPSWQKIVTFISSATVLGYGIGPVALMTLRRSMPLGTYPRPFTLKGASLWAPLAFIVANFIIYWSGASTDNFLFGGLAIIFVLFVIGQAITHGGKLSHLQWKGAWWLAPYFFAMWLVTYLGPKDLIGGTGLLTFYQGMVVVVIISIAIMAIAVASGLPEPEEARELIAMTGRTRG

SEQ ID NO: 23081 - protein, 410 aa, Thiobacillus intermedius K12
MREFRKSDKLADVCYDIRGPVLDKARQMEEEGQRIIKLNIGNLAVFGFEPPDEIVQDMIHNLPSAAGYTDSKGLFAPRKSIVHYTQEKGIAGVSIDDVFIGNGASELINMSMNALLNNGDEVLIPAPDYPLYTASVALSGGKPVHYICDEQSDWYPDIADIRSKITPNTRAIVVINPNNPTGALYPRELLEEIVQVAREHELIVFADEIYDKTLYDGNTHTSIASLADDVLFITFNGLSKNYRSCGYRSGWMVVSGNKRCARDYIEGLTMLASMRLCANTPGQLAIQTALGGYQSIKDLVAPQGRLTKQRDLAYDLLTQIPGVSVVKPKAALYMFPRLDPEIYPIADDQQFAYDLLAQEKVLIVQGTGFNWPQPDHFRLVFLPNADDLTEAIGRIARFLETLRKRSRAAA

SEQ ID NO: 23082 - protein, 512 aa, Thiobacillus intermedius K12
MNVVATVVFVALFVGIAVLGFASAHWRKGDMNHLHEWGLGGRRFGTWITWFLIGGDLYTAYTFVAVPALVFGAGALGFFALPYTVLVYPMVFAILPRLWIVAKKHNYITASDFVAGRYGSPALALAIAVTGIVATMPYIALQLVGIQVVIGGLGFSTQGLMGDVPLVIAFVILAAFTYTSGLRAPASIAVVKDLLVYITVIALIIVVPYKLGGFGNIFAAIPKGHLLLPPVKDGNLGLQTFYPTLAFGSALALMLYPHATTAVLSAKGPNTLRRNWVFLPAYSFMLGLIALLGYMAYASGIAKLPDLAPYFKQYGPQFAMPGLLLHYFPSWFVGVGFAAVAIGALVPAAIMSIAAANLFTRNIYKPYINPNCSTHKETEMAKLVSLLVKFGALLFIVFLPLTYAIQLQLLGGILILQTLPAIVSGIYTRWFDAKALLLGWAAGLVWGVWAASLSGFKASGYGLHIAGMVIPAYIGLYALVINFVVAIVATLVIGALGMANKQDATVAADYAG

SEQ ID NO: 23083 - protein, 399 aa, Thiobacillus intermedius K12
MQDASSGNVLFILLGAILVLAMHAGFAFLELGTVRKKNQVNALSKIITDFSVSAIAYFLIGYGIAYGHHFLVGDDVLTRDHGYELTRFFFLLTFAAAIPAIISGGIAERAKFWPQLIATFTIVAFIYPFFEGIVWHGNLGIQAWLQSTFGAPFHDFAGSVVVHAMGGWIALPAVLLLGPRRGRYHANGQMSAHPPSSIPFLALGSWILIVGWFGFNVMSAQKLDQISGLVAVNSLMAMVGGTLAALAAGKNDPGFLHNGPLAGLVAVCAGSDVMHPLGALVVGAVAGALFVWMFTLTQNRWKIDDVLGVWPLHGLCGTWGGIAAGIFGMKALGGLGGVSLASQIVGTLMGITVALIGGFVVYGVLKKTLGIRLDAEEEFNGADLSIHRISATPEREASW

SEQ ID NO: 23084 - protein, 196 aa, Thiobacillus intermedius K12
MPMIDASALRQLFDQARTHNAWLDQPVPEHLLHQLYDLMKWGPTSANCSPARIVFVQSQEAKARLAPCMSEGNLAKTLKAPVTAIIGMDMAFYEQLPQLFPHNLDARNWFAGKPDFIASSAMRNSSLQGGYFILAARALGLDCGPMSGFDADAVNAAFFAGTEVKVNFLCNLGYGDASALFPRSPRLSFEQACRIA

SEQ ID NO: 23085 - protein, 589 aa, Thiobacillus intermedius K12
MEPVDKPSNFLRQIIERDLAQGTYANRRFAGHPADAAGHAAGQPDPARIRTRFPPEPNGYLHIGHAKSICLNFGLAQDFGGVCHLRFDDTNPEKEDQEYVDAILDAVHWLGFDWNAGGVSHLFYASDDFDFMYRCACALIEHGLAYVDEQNADDMRRNRGTLTEPGVDSPWRNRTPEENLRRFEEMRAGQHPEGSMVLRAKIDMAAPNINLRDPAIYRIRFAHHHRTGDTWCIYPMYTFAHPIEDAMECISHSLCTLEFEDQRPFYDWLLDHLVRLGLVASPRPHQYEFARLNLTYVVTSKRKLAQLVAERHVGGWDDPRMPTLVGLRRRGYTPESLRLFTDRIGVSKADSWIDYSVLEQALRDDLDARAPRAMAVLDPLKLELTNWAEVFGNAAHAEPCSAPVHPGHSEMGRRQFDLTAQVWIEREDFMEVPPKGYHRLTPGGMARLKYGYVIRCTGCEKDADGRVTKVLAELLPDTKSGTPGADAVKVKGVITWVSASMGVAAQVRLFDRLFTEAHPDAGGRDFLAVLNPQSKQTVQAYIEPALATAPAGASFQFERHGYFVADRVDHSSAQPVFNRTTTLRDSWGK

SEQ ID NO: 23086 - protein, 373 aa, Thiobacillus intermedius K12
MRIGIPAETLAGEARVAATPETVKKLIAQGHTVVMQADAGLRADAPDADYIAVGATIGDRTEAFAADMVLKVRPPTAEELGLMKPGTVLVGMLDPFNAEGLQAMTDAGLTAFALEAAPRTSRAQSMDVLSSQANIGGYKAVILAANLYQRFMPMLMTAAGTVKAARVVILGAGVAGLQAIATAKRLGAVIEASDVRPAVKEQIESLGAKFIDVPFETDEERDIAQGVGGYARPMPASWMQRQSALVAERVKQANVVISTALIPGRRAPVLITEEMVKSMKPGSVIIDMAAAQGGNCPLTEAGKTVVKHGVTLVGETNLPALVAADASALYARNVLDFLKLVFDKEKGFVVNMEDDIVAACLMCRDGQLLRKTA

SEQ ID NO: 23087 - protein, 297 aa, Thiobacillus intermedius K12
MIKKLFGLTILAAAAMSCAQAAELTGTLKKVKETNSITVGYRESSIPFSYLDNNGKPIGYAMELCGKVVDAVKADLKMPGLKVNYTPVTSSNRIPLLENGTIDLECGSTTNSVARQKQVAFGPTYFVINVTAAVKKDSGISDFAQLAGKTIVTTSGTTAVPLLKKYEKTKDMEFKEIYGKDHAESFLLMADGRAAAFVMDDILLAGQIANSKDPAAYKILPGSLRQEPYSMMLRKDDPQFKALVDKTIDGVMKSGEINKIYAKWFTSPIPPKGINLNFPETPAIKEAFAHPNDKGVE

SEQ ID NO: 23088 - protein, 323 aa, Thiobacillus intermedius K12
MTPNPADFILFTGNANPALAQEVAEQLGIGLGQAYIGRFSDGEVTVEIQQNVRAREVFIVQSTCAPTNDNLMELLIMVDALKRASAERITAVIPYFGYARQDRRPRSARVPITAKVVANMLQAAGVARVVTMDLHADQVQGFFDIPVDNIYASPILLSDLREKNYSDLIVVSPDIGGVVRARALAKLMDCDLAIIDKRRPKPNVSEVMNVIGEIDGRNCIIMDDMVDTAGTLTKAAEVLKARGAKRVMAYCTHPVLSGPAIQRLQNSAIDELVVTNTIPLRQEARECGKVRQLSAAPLIAQTLQRIAYGGSVLQLFNEQETLF

SEQ ID NO: 23089 - protein, 392 aa, Thiobacillus intermedius K12
MTDPIVMVSAARTPIGGLLGDFAAVPAWELGATAIAAAVQRAGIAGDAVNEVLMGNCLMAGQGQAPARQAALKAGLPQSAGAVTLSKMCGSGMRAMMFAHDMLAVGSADVMVAGGMESMTNAPHLAFVRKGVKYGLTQFYDHMALDGLEDAYDRGKAMGVFAESCVSKYAFSREEMDAFAIASTERSRQANEDGSFEWEMAPVTVAGRGGEVKIARDEQPFKAKLDKIPTLKPAFKKDGAITAATSSSISDGAAALVLMRQSTADKLGCAPIARIRAHAVHAQAPEWFTTAPVGAIQKVLDKAGWKAADVDLWEVNEAFAAVTMAAMREYKLPHEIVNVHGGAVALGHPIGASGARIVVTLLGALRQRGLKKGVAALCIGGGEATAMAVELL

SEQ ID NO: 23090 - protein, 493 aa, Thiobacillus intermedius K12
MASSLVIVYHRQPYEEYSEGGQTVLRENKSPNGIVPALKGFIGQVDRASWVAWKKAPTGKAAKFERRITVHDSYGSYEVVRLPLTAEQISQFYHVVSKEALWPILNSFPSLYSTENCQWSVFREVNRLFAQAACAEAAPGAVIWVHDYNLWLVPGFVRQMRPDVKIAFFHHTPFPAPDVFNILPWRDEILASLLDCDLVGFHVPRYARNFAALVQSLRKTVGLVERAVEPELQATGTALSEPVTPVSITVGGRTIRIDASPIGTHADLIRSTVQKPDNLAQVAHIRREMCGQTTIVSIGRVDYAKGMREMLLAFERLLARRPELHGRIRLLVTAVAAADGMRVYKRAQQNIEQLVGRINGHHGSLTWTPILLSTTPMPFEETLSYYRAADICWITPLRDGLNLVAKEFIAAHVNESGVLVLSEFAGAAVELQDAVLVNPYSISQMDDAIDRALDMPRDEQRERMLRMDALIQRYDITHWTHHVLELFEQLRAQ

SEQ ID NO: 23091 - protein, 379 aa, Thiobacillus intermedius K12
MEPGRLLAEDVTEVTIMYQNFSILRSININQRPRAHNSVPFFSTITHTMSTTSAPQSAEPAHASSWLAHFPITLFATVMGTTGLAIAWHKSAQVLAMPHGVGIGLSYVALALFVLLLLGYGAKAIRYPGELRAEFNHPVRISFFPAISISALLLSIAFLHVQPVWSQAMWWGGITLHLVFTVVIMSSWIHHTHYQIQHSTPAWFIPVVGNILVPIAGMTHGSPEISWFFFSVGLVFWIVLLTVMMNRFFFHPPVPAKLLPTLFILIAPPAVGFLSYLALDGGVIDNFARVLFYVALFTTLLLFYQIPQFRKVPFFMSWWAYSFPLAAITIASLTMGSKIGSSFLMGLGGALLALTSALIALLVVLTLKAIGDGKVFIPE

SEQ ID NO: 23092 - protein, 645 aa, Thiobacillus intermedius K12
MAKIIGIDLGTTNSCVAVMEGNTPKVIENSEGARTTPSIVAYMEDGEILVGASAKRQSVTNPKNTLFAVKRLIGRKFTEKEVQKDIDLMPYSIVKADNGDAWVEVRGKKLAPPQISAEVLRKMKKTAEDYLGEEVTEAVITVPAYFNDSQRQATKDAGRIAGLEVKRIINEPTAAALAFGLDKHGKGDRKIAVYDLGGGTFDVSIIEIADVEGEKQFEVLSTNGDTFLGGEDFDQRIIDYIIAEFKKEQGVDLSRDVLALQRLKDAAEKAKIELSSSTQTEINLPYVTADASGPKHLNLKLTRAKLESLVEELIERTIAPCRTAITDAGVKVGDIDDVILVGGMTRMPKVQDKVKEFFGKEPRKDVNPDEAVAVGAAIQGSVLAGDRKDVLLLDVTPLSLGIETMGGVMTKMITKNTTVPTKHAQVYSTADDNQPAVTIKVFQGEREMAAGNKLLGEFNLEGIPPAPRGVPQIEVTFDIDANGILHVSAKDKGTGKENKITIKANSGLSEEEVQRMVRDAEMNAEEDHKKRELVDARNQADAAVHSVRKSLSEYGDKIDAGEKSAIEDALKAAEEAIKSEDKAEIEAKTSALLAASQKLGEKMYASQAAEPGAAGGASSGSGGGQAAGDDTVVDAEFKEVKDGKA

SEQ ID NO: 23093 - protein, 353 aa, Thiobacillus intermedius K12
MPRVHILPAETDLLADPDENLLKLLRRHQVPIRYSCKSGECGSCKCVLESGQVKLKKYDPKALPDAQRDSGIILACRAILSEDITIRLTDSDDLIAHPERKLLCRVVALEPLTQDIFALRLHIEFADMEGIPFTFSAGQYAQIVVEVDGQEIARDFSMASTPVDAEYDDLLEFHIRRTPTGALSSLLGSVIRPGAQLLVRGPMGTSYFRPRHQGPLYAVGGGTGLAPMLSVAHTALDNGKLEPVVLFAGFRNQADVYGLEQMEQMRRSYRNFSYHLALDEAQPGDPPQAVHRPLAAHLLEQVADFAGSKVYLAGPPGMVEAISASLLERGLPENDLHADAFYPPVTAELAPAA

SEQ ID NO: 23094 - protein, 635 aa, Thiobacillus intermedius K12
MNNQWFSKIAIWLVIGLVLFTVFKQFDRPQQTADAVSYTQFMQDAKAGRIKKVIVHQSGILDVTTTEGRRFNLTSPGDLWMVGDLVKDGVDVVGAPRQEQSFLTQIFISWFPMLLLIGVWVYFMRQMQGGGRGGAFSFGKSKARLLDESSNNVTFADVAGCDEAKEDVKELVDFLKDPQKFQKLGGRIPRGVLLVGPPGTGKTLLAKSIAGEAKVPFFTISGSDFVEMFVGVGAARVRDMFENAKKHAPCIIFVDEIDAVGRHRGAGLGGGNDEREQTLNQMLVEMDGFETNLGVIVIAATNRPDILDPALLRPGRFDRQVYVTLPDIRGREQILQVHMRKIPVGTDIRADILARGTPGFSGADLANLVNEAALFAARRSARVVEMEDFERAKDKIMMGAERKGMVMPEEERRNTAYHESGHALVAMMLPKTDPVHKVTIIPRGRALGVTMQLPETDRYSMDRDRMLNMISVLFGGRIAEEVFMNQMTTGASNDFERATQLARDMVTRYGMTESLGPMVYAENEGEVFLGRSITKTTHVSEQTMQKVDSEIRRIIDEQYALARRLIEENKDKMHAMAAALLEWETIDSDQLADIMAGREPRPPKLPPSSGPTSAPRTPSAPATGAAPDAPSATAA

SEQ ID NO: 23095 - protein, 332 aa, Thiobacillus intermedius K12
MHTPYSPERAVQLARDTLDIEARALLSLCERLAAPPLSSAFAQAVQCILRSPGRVVVSGMGKSGHVGRKIAATFASTGTPAYFVHPAEASHGDLGMVTRDDVFLALSNSGETEELTRIVPQVKRLGATLISMTGRTDSTLARHADILLDCAVEQEACPLNLAPTASTTAQLALGDALAVALLDARGFGPEDFARTHPGGSLGRKLLTHVRDVMRSAEAVPSVTGDAPFTAALMEITRKGLGMTAVVDAHGVLAGIITDGDLRRLIEKGANLNTLQAQQAMHPQPHTIGPDALAVEAVQLMEQYRINQLLVVDAQGKPVGALNMHDLFAAKVI

SEQ ID NO: 23096 - protein, 317 aa, Thiobacillus intermedius K12
MVRHAFAYLSQQRFLGAAASAENAPTPRFGVAGVAWDGAVTNRPGARFGPNAIRQASQMLCDATHPFFDLSPTADLCDHGDLYLPNTSLETMRTALEAQARTLLAHQHMVWLGGDHSITLSLLRALRAVHGQPLAVLHFDAHCDTWSDHFGEPSGHGTWVYEAVQEGLVVPQGVVQVGIRSAAERAAREYVNTIGGRVITARELRGLESPSQLAPITADIRARLAASSAPVYVTLDIDCLDPAFAPGTGTPEPGGLSSAQVLSLLEELCAMQLPFVGMDCVEVSPPYDHAELTSNIAALCVWTYLCARLASEKTVSP

SEQ ID NO: 23097 - protein, 762 aa, Thiobacillus intermedius K12
MSSPEDTKAKLRQAALEYHEFPRPGKLAVVATKQLSNQRDLALAYSPGVASACEEIQSKPDDAFRYTGRGNLVAVITNGTAVLGLGDIGPLAAKPVMEGKAVLFKKFAGIDVFDIEVNEKDPAKLVEIIAALEPTFGGINLEDIKAPECFEVERKLRTRMNIPVFHDDQHGTAIIVGAAILNGLKVVGKDIAQVKLVCSGAGAAALACLSLLVDLGLPRKNIWVSDLAGVVYAGRTELMDEDKRRFAQDTPARTLAEIIDGADVFLGLSAGGVLKPEYTLRMADKPIILALANPTPEILPEEARAARPDAIIATGRSDYPNQVNNVLCFPYIFRGALDSGATTITAEMEVAAVRAIAELAQAEQSDVVAATYVGEPLRFGPDYLIPKPFDPRLMIKIAPAVAEAAAKSGVARRPIADLDAYRDSLQQFVYQSGALMRPMFSIAKKAAKKRIVYAEGEDERVLRAVRVVVDEHLARPILVGRPAVIAQRIERFGLRLEQERDYDVVNTDFDPRYRDFWQTYHQLAGRKGVTPAMAKIEMRRRLTLISSMMLHKGEADGMLCGTWGNTHIHLHYIDQVIGRRPGAKVYAAMNVLVLPGRQVALVDTHVNIDPSADEIAEITCMASQELRRFGIVPKVALLSHSNFGSSPAPSALKMREALALLREREPDLEVDGEMQGDTAVDPVLRASLMVDSALTGEANLLVFPNLDAANISYNLLKATAGNNIAIGPVLLGAAKPVHILTASSTVRRIVNMTALTVAEANL

SEQ ID NO: 23098 - protein, 400 aa, Thiobacillus intermedius K12
MPSPTLLCLNTGSASLKFALFKLDNCHGPHLPEAAQLRGEIDSHDGQATLRWTDAQGQTHRTASSDPRGDIAAEVDTLLDTLITPALCGPSCGPIAAVAHRIVHGGTTFTSAQRITPSVRAALDALRSLAPLHQGPGLAGVDAATARLPDVPQIACFDTAFHATQADLARRYAIPRDWHDKGFKRYGFHGLSYDAIAHKLPPLLGERAQGAIIVAHLGGGSSLCGLRGLRSVSTTMGFTALDGLVMSTRCGTIDPGLVLHWITEEHLDPQRITAMLYHDSGLKGVSGLSGDMRTLEASPDARAQEAIALFTASVAHHIGALAADIGGLDALVFTGGIGTHSARVRQEVCNALSWLGLRLDPLSNAAGQTCITHGNSPIPAFALPTDEEGVMALQTAALLA

SEQ ID NO: 23099 - protein, 597 aa, Thiobacillus intermedius K12
MCGICGELRFDGQAADLPAVERMRDALKPRGPDHAGQWHGGPVAFGHTRLSIIDLSQAGDQPMRDADTGCVLVFNGVIYNYRALLGELGKLGRRFVSSGDTEVLLKAYAQWGEDCVRRLDGMFAFALWDPRRQSLLLARDRFGMKPLYLAQDGTRLRFASSLPALLAAGGVDTAIDPVALHHLFSLHAVVPAPRTILRGVRKLEPAHTLRVQPDGMRWLARYWELNATRPDPLPSEREWIGATRDTLQAALDSHVHAADVPVGVLLSGGLDSSLLVGMLAGEARNLRTYSIGFESLDADTEKADEFEYSDLVAQTFGTRHHKLSIPNSAVLERLPQTIARMTEPMFSHDVVAFDLLAEWVSCDVKAVLAGQGADEVFAGYFWYPRMQAEAGLPVERFSQHYVDRDHAEWLRFIDPAHHVPDLTREFLESALQRPQGDSFLDQVLRLDVTTLIVDDPVKRVDNLPMAHALELRVPFLDRALVELAARMPPELRLQAGGKFPLKAVARGVLPDAVIDRPKGYFPVPALKHVRGPFLARMRELLESRACRERGLYQRGFVDALLAAPEAPAHFTRIQGSKLWHAALLEWWLQIHVDGAAH

SEQ ID NO: 23100 - protein, 392 aa, Thiobacillus intermedius K12
MTDIVIVSAVRTAVGKFGGALAKVSAVDLGALVIKEAVARAKLEPGQVSEVIFGQVLQAGCGQNPARQSSIKAGLPDMVPAMTINKVCGSGLKAVMLAAQAIRDGDADIVVAGGQESMSASPHVLPGSRDGQRMGDWKMIDTMIVDGLWDAFNQYHMGTTAENVAKKYGITREMQDAFAAASQNKAEAAQKVGRFTDEIVPVMLPQRKGDPIAFATDEFVRHGVTAESLGGLRPAFDKGGTVTAGNASGLNDGAAAVVVMSARRAAELGLKPLATIRAYANAGLDPAYMGMGPVPSSTRCLSRAGWTPQELDLMEINEAFAAQAIAVNQQMGWDTAKVNVNGGAIAIGHPIGASGCRILVTLLHEMNKRDAKKGLASLCIGGGMGVAMALER

SEQ ID NO: 23101 - protein, 105 aa, Thiobacillus intermedius K12
MSSVQEQIDQIVKNNDVVLFMKGSPQFPMCGFSGRAVQLLKSCGVSQIKAVDVLQDEGIRQGIKEYANWPTIPQLYVKGEFVGGSDIMAEMAQSGELQALLGSLK

SEQ ID NO: 23102 - protein, 387 aa, Thiobacillus intermedius K12
MSLQTHQTPHIASRLPQVGTTIFTVMSALAQEHGAINLGQGFPDFSCDPRLIDAVDQAMRRGANQYPPMTGVPALRQAVADKIAALHGARYDADAEITITAGATQAIFTALLAVVHPGDEVIVLTPSYDSYLPNIALCGGVARTVPLQADFRPDFAAIAAAITPRTRALLINSPHNPSGTVWSEADMRQLEALLAPTDIVLIADEVYEHMVFDGAQHQSAVRFPGLAARTFVVSSFGKTFHVTGWKVGSVAAPAALTAEFRKVHQFNVFTVNTPMQHGLADYLADPAPYRDLPGFYQAKRDRFRAGLAASRFELLPCSGSYFQCVRYDAISDLPDDAFCRWLTAEIGVAAIPLSAFEPDGRQRGVVRFCFAKQDATLDAALKRLAAL

SEQ ID NO: 23103 - protein, 601 aa, Thiobacillus intermedius K12
MSAEYASSRSLPQTDKRPRSRSMRSLSGLLPFLRPYRGRIAVALLFLLFAAGSTLAFPMALRWLIDAGMLHAQASRAALGWHFAGLFGLAVALGVFSAARFYMVSWLGERITADVRSAVYAHVLRQSPQFFEHTQTGEVLSRLTTDTTLVQTVVGTSFSMGLRNVVVLIGGMTMLIITNPGLMLGVLVVIAVVVAPAVFIGRRVRRLSRASQDRIADASALASEVLAAMPVVQSYAREDDEARRFSNSAETAFRTAVSRNKVRSLLTAFIIVAMFGALLYGLYLGTVSVMEGRMSAGVLGQTVLYIGLVAGSAAALAEVFGDLLRAAGATERLMELLAEQSPVRNPAHPVALPAVQRGSAVVLDHVRFFYPSRPDKPALDDFSLRIEPGETVALVGPSGAGKTTVLQLLLRFYDAQQGSIRIDGVDVQQADFKALRQRIGLVPQDAVIFSASAADNIRYGRPEATDAEVQAAARAAQAEEFLRELPQGDATYLGERGVRLSGGQRQRISIARAILKNAPLLLLDEATSALDAASERDVQTALEHAMRDRTTLVIAHRLATVQRADRIVVMDQGRIIDIGTHAELMARGGLYASLASLQFMQ

SEQ ID NO: 23104 - protein, 67 aa, Thiobacillus intermedius K12
MATGTVKWFNESKGFGFIKPDEGGEDLFAHFSEIQAKGFRTLQENQRVEFTVKAGPKGPQASAIRPI

SEQ ID NO: 23105 - protein, 296 aa, Thiobacillus intermedius K12
MATLGFIGLGIMGTPMAGHLLAGGHTLYVHTRSKVPQALLDAGAKPCASNAEVAQKADIIFTMVPDTPDVQKVLFADDGVAQGLTPGKIVVDMSSIGPVETKDFARRINALGCEYLDAPVSGGEVGAKAASLTIMVGGKQEVFDKVEPLFKLMGKNITLVGGNGDGQTCKVANQIIVALNIQAVAEALLFASKAGADPAKVRQALMGGFAASRILEVHGERMVKRTFQPGFRINLHQKDLNLALSGAKQLGVALPNTAVAQQLMSACAANGMDGLDHSALCRAVELMSHHTIAPDA

SEQ ID NO: 23106 - protein, 439 aa, Thiobacillus intermedius K12
MKKSLAIPAALGAMLLGMGSAWAQTAPAAAASNPAAFINSGDNAWMLTSTALVLMMTIPGLALFYGGMVRKKNVLATLMQSFAITCLVTVLWMIIGYSLAFTPGNGFIGGLSRFFLGGMGLDSANPLAPTIPESTYMTFQMTFAIITPALIVGSFADRMKFSALLWFMGIWLLAVYAPIAHMVWGGGFLGGDGVLDYAGGTVVHINAGIAGLVAALVMGKRIGYGKEAMPPHNLVLTMIGASLLWVGWFGFNAGSAVAASDRAGMAMAATQIATAAAALGWMFAEWIARGKPTILGITSGAVAGLVAITPASGFVGPGGALAIGLIAGVVCFWTAVYMKEMIGYDDSLDAFGVHAIGGIVGAMLTGVFAVKAIGGTAGALEGNMAQVLIQAKGVGFTIVYDAIITFIILKVIDRVIGLRVTEEQEREGLDISLHGEQVL

SEQ ID NO: 23107 - protein, 328 aa, Thiobacillus intermedius K12
MSNLVADGPLRVLVARAVFPDVIEPLRAVAEVETTPDDAIATPEALRQRLADKHGAFITGSERIDAALLDACPQLLVVSTMTVGVDHIDLAACAERGVIVTHAPDVLTETTADFGFALLLAAARQVGEAERYLRAGQWKKWSVDLFAGADVHGATLGIVGMGRIGQAIARRAAHGFNMRVLYYNRRRLAAHLEDDLRASYRELPELLRESRHVLLALPYSPAAYHLIGATELAQMQPGATLVNIARGGVVDETALAHALQSGHLGAAGLDVFEGEPAVNPALLAAPRLVLTPHIASSSIRTRRAMAQLAVDNLVAVLQGQPPITPVTG

SEQ ID NO: 23108 - protein, 301 aa, Thiobacillus intermedius K12
MNTPTLPDSATHTVAFLGLGVMGDPMAGHLARVGHRVTVYNRTASKAHDWVRRNGGHSAATPREAAAGADFVFSCVGNDDDLRAVALGPDGAFAGMQPGAVFIDHTTTSADVARELGLAARERGLFFLDAPVSGGQAGAQNGTLTVMCGGEAPAFERAQPVIAAFARAVTRLGDNGAGQLCKMVNQIAIAGVVQSLAEAIAFGEHAGLDLSTVLQVIGKGAAQSWQMDNRGPTMIEGRYDFGFAVDLMRKDFGLCLQEARHNGARLPVLALVDQFYADVQAAGGGRLDTSSLLTRLRDKND

SEQ ID NO: 23109 - protein, 377 aa, Thiobacillus intermedius K12
MCAGFASRGFLSFQRSEPTVKFVDEVVIEAHAGNGGNGCVSFRREKFIPFGGPNGGDGGRGGHVIARADVNLNTLVDFRFSKLHRGRNGEHGRGADQYGAGGDDKVLRMPVGTLIFDAETDELIADLVQDGQEIIIARGGQGGLGNLHFKSSVNRAPRESTKGQEGEHRKLRLELKVLADVGLLGMPNAGKSTLISAVSNARPKIADYPFTTLYPNLGVVRLGPGRSFVIADIPGLIEGAAEGQGLGHQFLRHLQRTKLLLHIVDMAPIEEGADPVKDVRAIVAELKKYDADLAAKPRWLVLNKLDLLPEDERDAAVKNLLRRLRYKGPVFPISALAREGLDPLLHAIAEHIGQSKPVETVEPDPRFRDDFRDDVRP

SEQ ID NO: 23110 - protein, 103 aa, Thiobacillus intermedius K12
MYAVIKTGGKQYRVAAGEKIKVEQMPADVGQDIVLEEVLAVVNGEDAKFGTPLVDGAKVTAKVLSHGRHDKVRIFKMRRRKHYQKHQGHRQNYTELQIETISA

SEQ ID NO: 23111 - protein, 406 aa, Thiobacillus intermedius K12
MSTTPHLPIYMDYAATTPVDPRVVDAMIPWLREHFGNPASRSHAWGWEAEAAVEKAREQVAALINADAKEIIWTSGATESNNLAIKGAAEFYQGKGKHIVTVKTEHKAVLDTVREMERRGFEATYLDVQPNGLLDLDVFKAALRPDTILVSVMLVNNEIGVIQDIPEIGRICRERGIIFHVDAAQATGKMVIDLQTWPVDLMSLASHKTYGPKGIGALYVRRKPRVRLIPQMHGGGHERGLRSGTLPTHQIVGMGEAFRIAKAELGASIERARMLQQRLLDGLKDIEEVYVNGDLERRVPHNLNISFNYVEGESLIMAIKGIAVSSGSACTSASLEPSYVLRALGRSDELAHSSLRMTIGRYTTEEEIDSAVRQLRESVAKLRDLSPLWDMYKEGIDISTIQWAAH

SEQ ID NO: 23112 - protein, 861 aa, Thiobacillus intermedius K12
MRIEKLTTQFQEALAEAQSLAVNHGNAYIEPVHLLHALLGQDGPKALLARAEVNVPGLTAATAQAIDRLPEVEGTDGNVQVSRELNGLLNLTEKEATKRNDQFVASELFLLAVADDKGEAGRIARENGLSRKSLESAIEAVRGGQNVNSAEAEGARESLKKYTIDLTERARQGKLDPVIGRDDEIRRAIQVLQRRTKNNPVLIGEPGVGKTAIVEGLAQRIVNDEVPDSLRGKRLLVLDIALLLAGAKFRGEFEERLKNVLKELSQDAGQTIVFIDEIHTMVGAGKGEGAMDAGNMLKPALARGELHCIGATTLDEYRKYIEKDAALERRFQKVMVDEPSVEDTIAILRGLQEKYEVHHGVEITDPAIVAAAELSHRYITDRFLPDKAIDLIDEAAAKIKIEIDSKPEAMDKLDRRRIQLKIEREAVKREKDEASQKRLALIEEELAKLDREYADLDEIWKAEKAAVQGSAAIKEEIDKIRFEIEELKRKGDFNKVAELQYGRLPELERKLHEAQAKETADGDQPQARRLLRTQVGAEEIAEVVSRATGIPVSKLVQGERDKLVHMEERLHRRVVGQDEAIRAVSDAIRRSRAGLSDPRRPYGSFLFLGPTGVGKTELTKGLAEFLFDTDEHIVRLDMSEFMEKHSVARLIGAPPGYVGYDEGGYLTEAVRRKPYSVVLFDEVEKAHPDVFNVLLQVLDDGRLTDGQGRTVDFKNTVIVMTSNLGSHQIMAMSGQPQQAIRDAVWEEVKAHFRPEFLNRIDEVVVFHALGEKEIADIARIQLRGLEGRLAQLDMRLDVSSEALAEIAREGFDPVFGARPLKRAIQQRIENPLAKLILEGRFGPKDVIPVNLKDGQIVFERG

SEQ ID NO: 23113 - protein, 638 aa, Thiobacillus intermedius K12
MCGIAGRLNWNAPIDPAQLAAMIGQLHHRGPDQQGFYNKGPIGLAHARLSIIDLSGGDQPMCNEDGTVWVVFNGEIFNYIELRAELQRRGHRFATQSDTEVLVHLYEDHGDALVDRLNGQFAFALWDVPRQRLLLARDRTGIRPLFHTRVPGGLAFASEVKALFALPEVPRRLDAQALGEVFTYWAPLPPHAVFEGIESLPPGHVMSVDARGTQTRRYWDWSFPPAPIEDGRSAAACADELRDLLIDAVRLQLRADVPVAAYLSGGLDSSIVTTLIRHYADTPLRTFSLTFDDAEFDESPWQQQLVRHLGTDHTTVHCTRADIAAAFPRTIAHTETPIVRTAPAPMMLLAAGVRAAGYKVALTGEGADEVFGGYDLFKEARVRRFMARQSASRWRPRLLERLYPYLKHSPASGRAMTERFFREGEAHFREPWFAHLPRWTTTRRITGFLSPEWRAAATAADPIATIAAQLPADISRWEPLCQDQYIEAHTLMSGYLLCSQGDRMAMAQSIETRFPFLDHRLIAFASQLPPRYKLMGLVEKYLLKRSMDGLLPDALRHRTKQPYRAPDSQSFFHNGEPVDYVADLFSAARLKEAGYFDPQAAIRLFDKARAGKVIGFGDNMAFVGMLSTLLLHDQFIRR

SEQ ID NO: 23114 - protein, 195 aa, Thiobacillus intermedius K12
MKLLILDRDGVINQDSDDFIKSPDEWVPIPGSLEAIARLNHEGWHVAVATNQSGIGRGLFDMSTLNAIHRKMHKALAAVGGRIDAIFFCPHAPEDHCSCRKPKPGLFQDIARRYELENLQGVPSVGDSVRDLQAGEPLGCGLHLVRTGKGERLADLGNLPAGTRVHDDLAAFAAWLLEQPKAKSEKTSDKTPDPA

SEQ ID NO: 23115 - protein, 565 aa, Thiobacillus intermedius K12
MDLRRSVLWVVFTMSMIFLYNSWLRYNGETDLFGTPPAHPAQVASAPTSAVPQAAPTTATPPNIAGAAATAPLSAPVAAASAAPAAQLTTIRTDLMDVKISSRGGNLVYAKLLKYESRTEPGKNVVLFDDTPSNKYMAQSGLIGGDFPNHETEMTVLPGPRDMGNAKTLQVKLVSPDLGGIKLERTYTFTRDSYVVNVQNTITNTGSVAVAPQMYMQLVRDGNTPAGDESHFYHTYTGPAYYDNANKFQKFEFKDLKTNEAPKKADSGWVAMIQHYFVSAWVPEPYEGSRDLYTRKLGDNLYAVGVIQPLPQIAPGKSITTDAKLFVGPELESTLGALAPGLELVKDYGWVTILAKPIFWLLEMIHKVVQNWGWSIIVLTLLIKLAFFPLTAASYKSMARMKAVGPRINALRESYKGDQAKMNQAMVELYRKEKINPLGGCLPIVIQIPVFIALYWVLLSSVELRGAPWILWIHDLSAKDPYYILPAIMTATSFLQVKLNPTPPDPMQARLMWIMPAAFSIMFFFFPAGLVLYWLTNNTTSIAQQWFINKKMGVGVLTDTTAAAK

SEQ ID NO: 23116 - protein, 69 aa, Thiobacillus intermedius K12
MAMQTGAVKWFNESKGFGFIAQDGGDADLFVHFSEIQGNGFKTLAENQRVQFEVKQGPKGLQASNVTPL

SEQ ID NO: 23117 - protein, 165 aa, Thiobacillus intermedius K12
MPKSRPASAVAPSGGPYTQVQDSPIHGRGVFARRPIHAGQRLLEYKGERIDWPEALRRHPRDPAQPNHTFYFSLGDDTVIDGGVQGNSARWINHSCAPNCEAQQVGSRVFIDALRDIAPGEELFFDYALELDARYTAKLKRDYACRCGAPNCRGTLLAPKRRKGK

SEQ ID NO: 23118 - protein, 600 aa, Thiobacillus intermedius K12
MCGIYGFFDRTGLNLSEQTLAAMDASLVHRGPDDSGAFTASGVTIGNRRLSIIDLAGGHQPFVSDDGRIALVQNGEIFNHVELRAEAQRQGVRFHSDHSDTEVLLRLYEREGLGFLPRLNGMFAIAIWDGRDPENPRLHLVRDRIGVKPLFVHDDGRQVLFGSEIKAVLAALPGRPALDLPALQHYLAYNYVPPPFTLFAGVRHVMPGTVLTVDGAGSHACRWWSLAEQTPVPQTFSAWQGEFLDLLDDAVRLRLRADVPFGAFLSGGVDSSTVVALMARHVREPARTFCIGFPDPRFDESPYAREAAQRFGATHRERIVQPDMLDDWGRVLWHCDQPHGDASFMPTRSVSQLAVQDVKVVLTGDGGDELFAGYDKYASFMADPALRDLPAADFARQYVEHTGLFGEQARAALFQPWLRAKLADVDSVRDVAAPWFEQASHFDRINQMLFLDMMLLLPGNNLVKPDRMGMSVSLEARTPFLDWRMMEFAFRAPGDTKLKDGDKKHWFKRAVEPLIGADLAHRKKQMFTVPIGEWFRGPRKAWLAALLFAPNALGAQLFEADTVRKLFDDHVSGAANHTRELRALAALELWAQQFEPELPA

SEQ ID NO: 23119 - protein, 360 aa, Thiobacillus intermedius K12
MDTRFYPLRVRAVEPDTDEAMIVSFDVPDDLADRFAFTQGQYLNLRATIDGAEVRRSYSVCAGVDDAVLRIGVRKVRGGVFSNWIAENLHEGDTIDIMPPQGRFYVPINPEEKRHYLAIAGGSGITPVLSILKTVLGREPQSRFTLIYGNRSLRSTMFKEELEDLKNRYLSRLEIHHVFSEENAQSPLHHGLLDRERIGQFLSLAIRPQTIDHAFVCGPHLMNDGAEAALLAANVASERIHIERFNLPQGKPEAGAAMHEIQSRDAAHSRVMIVRDGQRREIEVRKGDPSVLDVAIAAGMDLPFSCTSGVCGTCRARLLCGEVRMDRNFALEKADVDAGFILTCQSHPLTEQVEISFDDR

SEQ ID NO: 23120 - protein, 404 aa, Thiobacillus intermedius K12
MSHERQAWIVDGVRTPFGRYGGALAPVRADDLGAIPVRALIGRHAGIDWSTADELFYGCANQAGEDNRNVARMVGLLAGLPVDVPGCTVNRLCASGLEAVAQAARAIRCGEADLVIAGGVESMSRAPFVIGKAETAYSRSARIEDTTIGWRFVNPAIQSQYGIDSMPETAENVATEFNISRDDQDAFALRSQQRCLAAQQAGFFDGEIVPVQVPRAKGDPVVVTRDEHPRGDTTIDDLRKLRAVIRPGGSVTAGNASGVNDGACALLIASDDALRRWGLTPRARIVGACSAGVAPRVMGVGPVPATRKLLDRIGWSLETIDAIELNEAFAAQSLAVLRQLGLPDDASQVNPNGGAIALGHPLGASGARLALTALRQLERNNGRRALATLCVGVGQGMALALERP

SEQ ID NO: 23121 - protein, 270 aa, Thiobacillus intermedius K12
MQMPARLQTQATQPLLQIRGLRAEIDGKRVLDGIDLDIAPGEVVAIMGPNGSGKTTLAQVLAGRELYRVTGGTVRFDGQDLLALPPQERALAGLFLAFQYPVEIPGLSNVYLLKAALNAQRKHRGLPELDAMEFLQQVKALMRELGMDEKFLQRGVNEGFSGGEKKRNDMLQMALLQPRLAILDETDSGLDVDALKVVAQAVNAMRSPERALVLITHYERLLEVIVPDRVHVLWQGRIVASGGAELARRIEREGYAWLQPGAALASVQEV

SEQ ID NO: 23122 - protein, 417 aa, Thiobacillus intermedius K12
MALIVQKYGGTSVGSAERIKNVARRVAKWHEAGHQVVVVVSAMSGETNRLIALAKEIQPQPDPRELDVVASTGEQVTIGLLSMALQALGHKARSYTGAQIAVHTDSAFTKARIESIDADKLKADLAQGIIPVVAGFQGVDAQGNITTLGRGGSDTSGVALAAALQADECQIYTDVDGVYTTDPRIVPEARRLDTITFEEMLEMASLGSKVLQIRSVEFAGKYKVRLRVLSSLTPWDLPLEQESRSGTLITFEEDENMEQAVVSGIAFARDEAKIIVVGVPDRPGIAYQILSAVGEANIEVDMILQNQSVAGFTDFTFTVGRGDYARALDILKSSVQAHIGAKEILGDPKVCKVSIVGMGMRSHAGVASKMFRTLSEEGINIQMISTSEIKVSVVIEEKYMELAVRSLHKAFDLEQSV

SEQ ID NO: 23123 - protein, 236 aa, Thiobacillus intermedius K12
MSTLRLTPIDPESADLIGRDDGLPAIAPERLEPDWLRRRFASPTAWTPELFEDSLRLSSQALRGAAVLIPLVPRAEGLQVLLTRRNLHLHEHAGQISFPGGRCDRQDIHPAATALREAHEEIGLRPAGTEVLGTLPLYCTASRYAVTPVVALIPAAENLQPQPDEVSEVFEVPLAFLMNPRHHELREWRPGNDVAPNPVAVRRRFLVMPYVANGQRYVIWGATAAMLRNLYRLLVA

SEQ ID NO: 23124 - protein, 67 aa, Streptomyces sp. C
MAAGTVKWFNAEKGFGFIEQDGGGPDVFAHYSNIAAQGFRELNEGQKVNFDIAQGQKGPTAENIVPA

SEQ ID NO: 23125 - protein, 475 aa, Streptomyces sp. C
MASLWSGQGVLRRKPIEHIEEPEGAPSQQLTRTLGLWQLTAIGVGGIIGAGIFTLAGTVANGVAGPAVLLSFLIAGVASAAAAFSYAEFAGLIPKAGSAYTYGYAVLGELAGWFIGWDLLLEYTAIVAVVAIGISGYFNFLLEETGASLPTWMLGAPGTGEGHRFDLIAAVLCLFTAYLLTLGIKNAARFETVVVVLKVLVVLLVVVVGFFHVTSDNYTPFFPFGVGGAFTGAATVFFAVFGYDAMSTAAEESKDAQRHMPKAILYSLAIAMVLYVLACLVLTGMQKYTDIDPESGFSSAFKAAGLPVVADIIAVGAIIGILTVMFTFMLGVTRVWFSMSRDGLLPGWFAKTHPTRHVPTRVTWIVGVASAAIAGFVPIGEAAELTNIGILLAFAVVCTSVIVLRYKRPDLPRTFRTPLMPFTPAVGVIASIWLITYLRVETWLRFVVWFLVGLVIYFGYSYRNSKMAGRTDPGR

SEQ ID NO: 23126 - protein, 484 aa, Streptomyces sp. C
MSKVLTSLPAGERVGIAFSGGLDTSVAVAWMRDKGAVPCTYTADIGQYDEPDIASVPGRAKTYGAEIARLVDCRAALVEEGLAALTCGAFHIRSGGRAYFNTTPLGRAVTGTLLVRAMLEDDVQIWGDGSTFKGNDIERFYRYGLLANPHLRIYKPWLDADFVTELGGRKEMSEWLLAHDLPYRDSTEKAYSTDANIWGATHEAKTLEHLDTGVETVDPIMGVRFWDPSVEIATEDVTIGFNQGRPVTINGKEFASAVDLVMEANAIGGRHGMGMSDQIENRIIEAKSRGIYEAPGMALLHAAYERLVNAIHNEDTLAQYHNEGRRLGRLMYEGRWLDPQALMVRESLQRWVGAAVTGEVTLRLRRGEDYSILDTRGPAFSYHPDKLSMERTEDSAFGPVDRIGQLTMRNLDIADSRAKLEQYAVLGLIGTGSPSVGAAQAAATGLIGTMPEMPEGGAEAIASRGEVSADEQMLDRAAMEFGTD

SEQ ID NO: 23127 - protein, 602 aa, Streptomyces sp. C
MCRIHGCFGGEPAGREVLDAVAAAMFEGGPDAQTVRRGDGWALGNNRLAIQGIASGDQPFVRGALCCVFNGEIYNHRQLRAELAAHGYSFEGDCDGDVLLPLYELYGDAFTSRLEGMFAIAVVDEREEPCLKLFTDHAGMKSLYYYVSADGRRLCFASELRALSRFPDFPDELDPLAVDRYLGGKAVWGPGTVYTRVRTLEPGSVLRFADGRETLTRTALEPAEVDWPGGEPTVEAAAELLDGLLRTEMGRILDADVPVCVITSGGLDSSYTTALAAHLVSDVASFNIAYRGDWPADERHWAAEVARHCGTEHHQVLLDPAGFPELVERFTRHLDQPNNAPHSLSTFALFEAVHEAGFKVALTGDGADELFAGYARFTKADRDGDSAWHRAYQDTMAVAGPAALGRLYTPAHLERVRAAGGHFGDLSGDELARRVRSGPHGKLETLLRYDQAERFPYYILRRVDHLSMAHSVEARIPFLQPSVMRLAHALPAAVKVAGDTVKAPVARAARPWVPRSVVDRPKQPFTLPVAAMIRPGEALYDMVGDVLLGPGARCLDYVRRDAVRELFRSQTESPGAHSGELLWSLLVLETWLSARGLTPAPL

SEQ ID NO: 23128 - protein, 644 aa, Streptomyces sp. C
MCGIAGTYRWPDGKAVTDRLTETLAHRGPDGAGRYGHPVGDGEVQLGHRRLAIIDLSETGAQPMVSDGLVLTYNGELYNAPELRAELAAAGVRFRGTSDTEVLLEAWRRWGTDCLPRLRGMFAFGVFDERTGELVLARDQLGIKPLFLLRRGGGLVFASELKALAAATGGTLEVDHAALVASLLYYWVPDSRCAYREAEKLPPGSWLRCRPDGSVERGSYWSLRDVAAEGRERARAGELPDLAAIVEESTRRHLLSDVPVATFLSGGLDSSYLTALAARHQPGMSAYTIGFRAEDARFEAMPDDLRYARTVAERFGVDLHEIEIAPDVLDLLPRMTYHLDEPIGDPAAINTFLICSAAREAGVKVMLSGMGADELFAGYRKHLANVLALRYQRVPGPVRRGLSGAVDRLPVASARRGYRSVRFAKRFLSFADLPEETAFRRSYTMYDRGELLDLIDPDLAGTVDDVLTEHADVYGDNDLDDFVNRMCLGDSRMFLPGLNLAYTDRSSMAASTEVRVPYVDVEVVKAAFTFPGDRKIVGRQGKAVLKEAAASVLPREIVYRPKGLFSAPLRAWMSRDLAPLVREVIHDGELVRSGFLRRDALARLAAEDAAGQQDFSKHLWHVLTLEYWYRGATSGSGQSAGFTA

SEQ ID NO: 23129 - protein, 512 aa, Streptomyces sp. C
MDQSRTPVLDALAAYHEAAQTPFTPPGHKQGRGADPRVRAVLGDAVFRSDVLATSGLDDRTSSQGIVEEAQALMAEAVGADHAFFSTCGSSLSVKSAMLSAAGPHEKLVVGRDAHKSVVSGLILSGIRPVWVDPQWDAERHLAHPPSAAAFEQALAEHPDARGALVTTPTPYGTCSDLAAIAEVCHRRGVPLIVDEAWGAHLPFHPDLPTWAMDAGADVCVTSVHKMGSALEQSSVFHLQGDLVAPEVLKSREDLLGTTSPSVLVYAALDGWRRQMAEHGKALYDDALALAGRVRDRLSRTDGLHVHGRADFCGPGKASDLDPLQVIVDISALRVTGYRAADWLRRHHRVNLHVCDHRRISAQLTHADDDRTAGLLLDALTDFAAHAPELRTGQPVEVPSPSGLRLEQAVLPRDAFFGRTEQVPGGTGRRSHRRRDAHPPTHRASPPPCPGERLTAEVLRYLRTGVEAWILLPDAVDTDATSIRAPARGGLSGPPLTAGRSCPPAAARAARS

SEQ ID NO: 23130 - protein, 254 aa, Streptomyces sp. C
MRHHPVTGTSAGTSSGTSAGTSSGTSAGGAPAAAVPWLWDRPAAPGTPHRPGPAGRLPEAVLFDRDGTLVADVPYNGDPARVSPLPTALAAVTALRELGIPVGVVSNQSGVARGLLTREDVLAVRRRVDELFGPFDVWAVCPHGPADRCGCRKPAPGLILAACQRLGAAPERTVVVGDIGADVRAASAAGARGVLVPTPVTRPEEVAAAAETARDLLTAVRLVSYPSASGAGRAGAHATPGAMGARPPAVGGGR

SEQ ID NO: 23131 - protein, 479 aa, Streptomyces sp. C
MSEQFLKDEKRPTTRHVDAGDTGYSKSLKPRHVNMIAIGGAIGTGLFLGAGGRLAEAGPSLFVAYAVCGIFAFLVVRALGELVLYRPSSGAFVSYAREFLGEKGAYTAGWMYFLNWATTGIADITAVATYTHYWHLFSDVPQWVIALIALAVVLAVNLISVRIFGELEFWFAIVKVGALVVFMGIAVFLLVTRHPVDGTVPGPALITDNGGIFPNGLLPMLLIVQGVVFAYASVELVGVTAGETENPEKIMPKAINSIMWRVGLFYVGSVVLLSMLMPWSSYSAGQSPFVTVLSHIGVPAAADVMNLVVLTAAMSSLNSGLYSTGRILRSMAVNGSAPQFTARLSRTQVPYGGILLTSGMCVLGVGLNFVVPADAFEIVLNLAAIGILATWGMIMVCHLLFWRKTRSGELTRPSYRLPGSPWTELVTLAFLASVLVLMYADGGAGRTTVLCVPLIAAALVAGWYAVRGRVARAAAGSDG

SEQ ID NO: 23132 - protein, 634 aa, Streptomyces sp. C
MPHDEPKWTPSNEALDPTRPAPADRPRELRRILGLFRPYRGRLAAVGALVGASSLVGVASPFLLKEILDVAIPQGRTGLLSLLALGMILTAVVTSVFGVLQTLISTTVGQRVMHDLRTAVYAQLQRMPLAFFTRTRTGEVQSRIANDIGGMQATVTSTATSLVSNLTAVIATVVAMLALDWRLTAVSLLLLPVFVWISRRVGNERKKITTQRQKQMAAMAATVTESLSVSGILLGRTMGRSQSLTDAFAEESEKLVGLEVRSSMAGRWRMSTIGIVMAAMPALIYWAAGIALQTGAPSLSVGTLVAFVTLQQGLFRPAVSLLSTGVQIQTSLALFARIFEYLDLPVDITEREEPVRLDRARGEIRLEDVHFAYEAKTGPTLTGIDITVPAGGSLAVVGPTGSGKSTLSYLVPRLYDVTGGRVALDGVDVRDLDFDSLARSIGVVSQETYLFHASVADNLRFAKPDATQEEIVEAARAAQIHDHIESLPDGYETLVGERGYRFSGGEKQRLAIARTILRDPPVLILDEATSALDTRTEHAVQRAIDNLSKGRTTITIAHRLSTIRDADQIVVLDAGRIAERGTHEELLGAGGRYAALVRRDRDAAAHAPDRERGDSGRGPAGESAGDPVPTPVNV

SEQ ID NO: 23133 - protein, 336 aa, Streptomyces sp. C
MVTTPLLPSDYLDLVSPLRAGADLRGRIEAVHPETGDAATIVIRPGRGWRGHTAGQYVRIGVDVDGRRLWRAYSLTSPTNRRDGRVTITVKAVPDGKVSNHLVRRAKPGTLIQLDQATGDFVLPEVKPAKVLYLTAGSGITPVMGMLRDTEFDDAVMVHCAPQPQDVIFRDELHALVADGKLRLTEVHTDTDGKLDITRLDELVPDWAERETWACGPAGLLDAAEELWSDHGVRERLHTERFRPGIVVAGDGGEVTFSATGKTVDADGATPLLDVGEEAGVLMPSGCRMGICFGCVTPLKAGAVRDLRTGEITEAEPGVLIQTCVSAAAGPCDIER

SEQ ID NO: 23134 - protein, 565 aa, Streptomyces sp. C
MTSTVPTTAVPHSDGQPPITMFGPDFPYAYDDFLAHPAGLGQIPATEHGTEVAVIGGGLSGIISAYELMKMGLKPVVYEADQIGGRLRTVGFEGAGTEGLTAEMGAMRFPPSSTALQHYIDLVGLQTQPFPNPLSEATPSTVVDLKGETHYAETIADLPQVYRDVAAAWNACLDEGADFSDMNTAMRERDVPRIREIWAKLVEKLDDETFYGFLCKSEAFQSFRKREIFGQVGFGTGGWDTDFPNSILEILRVVYTEADDHHRGIVGGSQQLPMRLWEREPEKILHWAQGTSLSSLHDGTPRPAVTRLHRTAGNRITVTDASGDIRTYRAAIFTAQSWMLLSKIACDDTLFPIDHWTAIERTHYMESSKLFIPVDRPFWLDKDEETGRDVMSMTLTDRMTRGTYLLDNGPDQPAVICLSYTWCDDSLKWLPLSANERMEVMLKSLGEIYPKVDIRRHIIGNPVTVSWENEPYFMGAFKANLPGHYRYQRRLYTHFMQDRLPEDKRGIFLAGDDISWTAGWAEGAVQTALNAVWGVMHHLGGSTDAANPGPGDVFDEIAPVELPED

SEQ ID NO: 23135 - protein, 489 aa, Streptomyces sp. C
MLDQGQAPALSQETRKPVNPLMRRKPVERLVSEGGQGEGGSLRRSLTMWQLTMISIGATLGTGIFVVLGTAAPKAGPAVTISFILAGLTALFSALSYAELAGSVPVSGSSYSYAYATMGELIAWICGWCLVLEYAVSVAAVAVGWGQYLNEFLDGTIGVTVPEAVSAPLGEGGFINLPALIVVLLSMVFLMRGAKESATVNSIMVAVKIVTLLLFIGIGVMGIKAGNYTPLAPLGMSGIAAGASTLFFSYIGFDAASTAGEEAKDPKKDLPRAIMLSLAIVTVLYVLVAFVAVGAMPWQDFEGTEAALAQIMTDVTGTSVWGVVLAAGAIVAIFSVVFAVLYGQTRILFAMSRDGLVPKVFAKVDEKTGAPRANVVIVSLFCGVLAAFIPLGKLADATSIGTLFAFGLVNVAVIILRRTRPDMPRTFKVALFPVTPILGALACAYMMFELDSATWMVFGGWMIVGLVFYFLYGVRRSRLATEEVATAEK

SEQ ID NO: 23136 - protein, 488 aa, Streptomyces sp. C
MADDIAPVPVSAPPAAKGDADAEYLERRTLRRGSAGWLLLTGLGVAYVVSGDFSGWNVGLDKGGFGGLAIATVLMGAMYACLVFSLAELSTILPTAGGGYGFARRALGPWGGFLTGTAILIEYILAPAAIVIFIGDYVESLGLFGLTSSWPVYLGCFVIFIGVHLWGVGEALRFSLVVTAVAVAALLIFALGALTEFDAGSLDDIAVDTTAFGSSSWLPFGVLGIWAAFPFGMWFFLGVEGVPLAAEEAKDPVRSMPKALAISMGILALLALITFFAATGAQGADAVKTAGNPLVVALEGDGGPTALSRFVNYAGLAGLVASFFSLIYAGSRQLFALSRAGYLPRFLSLTSKRKAPYLGLVIPGAIGFALAAATGNGARMLNIAVFGATISYALMALSHIVLRRREPGLDRPYRTPGGVLTSSIAFVLALSALVATFLVDKDAALIALAVYAVALAYFAIYSRHHLVASAPEEEFAALAEAEAELTRD

SEQ ID NO: 23137 - protein, 476 aa, Streptomyces sp. C
MAEAPAEPSRRPVDAGDEGYSKDLKSRHINMIAIGGAIGTGLFLGAGGRIAGAGPSLAIAYAVCGVFAFFVVRALGELVLYRPSSGAFVSYAREFMGEKGAYTAGWLYFLNWSTTTVADITAAATYAHFWSLFTDVPQWLLAFIALAVVLTANLISVKYFGEMEFWFSLVKVAALTLFLLVGIYLVATSHDIGGNTPGLANITDNGGIFPSGVLPMLLVIQGVVFAYASVELCGVAAGETENPEKIMPKAINSIMWRVGVFYVGSVVLLALLLPYTAYSADQSPFVTVFDKLGIPGAAGIMNLVVLTAALSSLNSGLYSTGRILRSMAMSGSAPKFTGVMNKGKVPYGGVLFTAAFGVAGVGLNYWMPGEAFEIVLNLASIGILGTWAMVMLCSLFFWHRSKNGLVERPSYRLPWAPYTQIVTLVFLVAVLVLMWCDGGVGRTTVMFLPAIAAALVGGWFLVRRRVTELASANAAD

SEQ ID NO: 23138 - protein, 371 aa, Streptomyces sp. C
MKVGIPREVKNNEFRVAITPAGVHELVRNGHQVFIEQNAGVGSSITDAEYVAAGAEILGTADEVWETADLLLKVKEPIAEEYHRLRKDQTLFTYLHLAASRECTDALLESGTTAIAYETVELANRALPLLAPMSEVAGRLAPQVGAYHLMRSAGGRGVLPGGVPGTHAGECVVIGGGVSGWNAAQIAIGMGFHVTLLDRDINKLREADKIFGTKIKTIVSNAYELEKAVVEADLVIGAVLIPGAKAPKLVTNELVAKMKPGSVLVDIAIDQGGCFEDSRPTTHAEPTFQVHNSVFYCVANMPGAVPNTSTYALTNATLPYIVQLANLGWAEALRRDPALALGLNTHDGKVVYGPVAEAHGLETLELSTLLG

SEQ ID NO: 23139 - protein, 545 aa, Streptomyces sp. C
MTPSAHTLPGLTSAAGASEHRPLIITLFGLFVVATLVITVWAGRQTKDAADFYAGGRQFTGFQNGLAISGDYMSAASFLGIAGAIALFGYDGFLYSIGFLVAWLVALLLVAEPLRNSGRYTMGDVLAYRMRQRPVRTAAGTSTIVVSIFYLLAQMAGAGVLVSLLLGITSDGGKVAVVALVGLLMIVYVTVGGMKGTTWVQMVKAVLLIAGALLITFLVLLKFDFNVSALLGQAAENSGQGTKFLEPGLKYGKDGLTKLDFISLGLALVLGTAGLPHILIRFYTVPTAKAARKSVNWAIGIIGAFYLMTIALGFGAAALLKRADILASNKAGNTAAPLLAQEIGGGPDSTGGAVLLAVISAVAFATILAVVAGLTLASSSSFAHDIYVNVIRKGQATEKEEVRAARWSTVVIGAVAIFLGALARDMNVAGLVALAFAVAASANLPTILYSLFWKRFTTRGALWSIYGGLIAAVGLVLFSPVVSGKPTSMFKDADFYWFPLENPGIISIPLGFLLGWLGTVLSKEEADPQKFAELEVRSLTGTGAH

SEQ ID NO: 23140 - protein, 255 aa, Streptomyces sp. C
MATLEIHDLHVSVEAENGAREILKGVDLTVKQGETHAIMGPNGSGKSTLAYSLAGHPKYTITGGTVTLDGEDVLEMSVDERARAGVFLAMQYPVEVPGVSVSNFLRTSATAIRGEAPKLRTWVKEVKSAMEQLQMDPAFAERNVNEGFSGGEKKRHEILQLELLKPKIAILDETDSGLDVDALRQVSEGVNRVRATGEVGTLLITHYTRILRYIKPDFVHVFSEGRIVESGGAELADKLEAEGYESYSTKGGATA

SEQ ID NO: 23141 - protein, 604 aa, Streptomyces sp. C
MTTITADTAQTTAADTGFIAIPEKTARLLATAGGLLTVISCFLSWTWTAAFPGNLTVYGYPGGLQWLVLVGGALTTLFGLASYGVKGLGWLIPGGADAAIKLSALAALATAWYTVITITVQLGGVVNLEPGGYIVALTTLATVVGALALPFKRPVLEAADPDDNGWDTFKHNAGNVWTTVKASLAARTPDAARALPGWAEILVITAVLAVALGVFTYGITTPYQELFVGFLITAGFGFGALNKSGLVARFTALTTKHRNVALVGAFVAAMAFPLTQTDDQYATVGVNILIFATVALGLNIVVGLTGLLDLGYVAFLGVGAYTAALVSGAPNSPFGVHLPFWAAILIGAIASMVFGVLIGAPTLRLRGDYLAIVTLGFGEIFRITMNNFDGVSGPNVTNGSKGISNIPNVNLFGFDFGASHTIAGFTIGRFANYFLLLLLVTLIVVMVFRRSAESRIGRAWVAIREDETAAEAMGINGFRVKLIAFALGATLAGLAGAVQAHVQYTVTPDQYQFANSLPPNSAFLLAAVVLGGMGTISGPLVGGSLLFLIPNKLQFLGDYQLLVFGIALVILMRLRPEGLIPNRRNQLELHKDLEAPTVLGKAGA

SEQ ID NO: 23142 - protein, 422 aa, Streptomyces sp. C
MPEPQVPALPPVAAFEDMDMPEALLKTLAAQGVTEPFPIQAATLPNSLAGRDLLGRGRTGSGKTLAFGLALLARTAGRRAQPTAPLAMVLVPTRELAQQVTDSLSPYATSVNLRIATVVGGMSINRQAGALRRGAEVLVATPGRLKDLIDRGDADLSQVSITVLDEADQMTDMGFMPQVTALLKQVAPEGQTMLFSATLDKNIDKLVKMFLDDPVAFSVDPSAGAVSTMEHHVLYVMDETDKKAVATRIAARDGRVIMFVDTKRGVDRMVKRLLADGVRASGLHGGRSQPQRNRTLDWFKTGEVTALIATNVAARGIHIDDLDLVVNVDPPTDHKDYLHRGGRTARAGESGSVVTLVLPDQKRDMSRLMSDAGITPRTAQVKSSDEELSRLTGAREPSGVPRRAGGPPRPRSPKARTGSGSG

SEQ ID NO: 23143 - protein, 67 aa, Streptomyces sp. C
MANGTVKWFNSEKGFGFIEQDGGGPDVFAHYSNIATQGFRELTEGQRVTFDVTQGQKGPQAENILPA

SEQ ID NO: 23144 - protein, 385 aa, Streptomyces sp. C
MPEAYIVDAVRTPVGRRGGGLSAVHPADLGAHVLKALVERSGVDPAAVEDVVFGCLDTVGPQAGDIARTAWLAAGLPEEVPGVTVDRQCGSSQQAVHFAAQGVLSGTQDLVVAGGTQNMSMIPIAFASRQAAEPLGLTEGPYAGSAGWRARYGDAPVNQFHGAQLIAEKWGISRQDMEEFALRSHRRAVRAIDEGRFARETVAHGDVTVDEGPRRDTTPEKMAALKPVVEGGTITAAVSSQVSDGAAAMLIASEGAVAEHGLNPRARIHHLSVRGEDPIRMLSAPIPATAYALKKTGLTLDAIDLVEINEAFAPVVLAWLKETGADPDRVNVNGGAIALGHPLGATGVKLMTTLLHELERTGGRYGLQTMCEGGGQANVTIIERL

SEQ ID NO: 23145 - protein, 459 aa, Streptomyces sp. C
MPYFDTASAAPLHPVARQALQAALDEGWADPARLYREGRRARLLLDAAREAAAEAVGCRADELVFTPSGTHAVHTGMAGVLGGRRRVGGHLVVSAVEHSSVLHAADAHAAAGGTVTEVPVDRLGAVSATGYEAALGSTTALACLQSANHEVGTVQPVAEVAEVCGAAGVPLLVDAAQSLGWGQVEGAWSVLAASAHKWGGPPGVGLLAVRKGVRFSAQGPADERESGRSPGFANLPAIVAAAASLRAVRAEADAEAARLRILVDRLRRRVVRLVPDVEVVGDADRRLPHLVTFSCLYVDGETLLHELDRAGYSVSSGSSCTSSTLTPSHVLRAMGVLSEGNVRVSLPPGTSADEVNGFLEVLPGAVAGVREKLGVSEPAAVAPVADAVEVDALGLRCPQPVIELARAIVTVPVGGTVTVVSDDEVARLDIPAWCAMRGHTYLGEAPRGAAVAYRVRREG

SEQ ID NO: 23146 - protein, 339 aa, Streptomyces sp. C
MSYKAEYIWIDGTEPTAKLRSKTKILADGAELPIWGFDGSSTNQAEGHASDRVLQPVFSCPDPIRGGSNILVLCEVLNIDMTPHESNTRALLRPVAEKFASQEAIFGIEQEYTFFDGVRPLGFPVGGFPAAQGGYYCGVGADEIFGRDIVEKHLDHCLAAGLEISGINAEVMPGQWEFQVGPLGPLEVSDQLWIARWLLYRTAEDFNVSATLNPKPVKGDWNGAGAHTNFSTRAMREDYRAIISACEALGEGSKPLDHVKNYGAGIDERLTGLHETAPWNEFSYGVSDRGASVRIPWQVEKDGKGYIEDRRPNANVDPYVVTRLITDTCCTGLEKDGLV

SEQ ID NO: 23147 - protein, 313 aa, Streptomyces sp. C
MSDRSPEPTAPHRAGFACFVGRPNAGKSTLTNALVGTKVAITSNRPQTTRHTVRGIVHRPDAQLVLVDTPGLHKPRTLLGERLNDVVRTTWAEVDVIGFCLPADQKLGPGDKFIAKELAGIKKTPKIAIVTKTDLVESKQLAEQLLAIHQLGAELGIEWAEIVPVSAVGDTQVQLLADLIAPLLPESPPLYPEGDLTDEPEMVMVAELIREAALEGVRDELPHSIAVVVEEMIPRENRPADRPLLDIHANVYIERPSQKGIIIGPKGSRLKEVGMKSRKHIEALLGTPVFLDLHVKVAKDWQRDPKQLRKLGF

SEQ ID NO: 23148 - protein, 481 aa, Streptomyces sp. C
MTTFVDRVELHVAAGNGGHGCASVHREKFKPLGGPDGGNGGRGGDVILVVEQAITTLLDYHHSPHRKATNGKPGEGGNRSGKDGQDLVLPVPDGTVVLDKQGNVLADLVGQGTTYVAAEGGRGGLGNAALSSARRKAPGFALLGVPGDSGDIVLELKTVADVALVGFPSAGKSSLISVLSAAKPKIADYPFTTLVPNLGVVTAGSTVYTIADVPGLIPGASQGKGLGLEFLRHVERCSVLVHVLDTATLETDRDPVADLDVIEEELKIYGGGLEKRPRLVVLNKVDIPDGQELADMVRPDLEARGYKVFEVSAVARTGLKELSYFLAEVVAKARARKPKQEATRIVIRPKAVDDAGFTVTYDEVEDVYRVRGEKPERWVRQTDFNNDEAVGYLADRLNRLGVEDALKKAGAKAGDGVAIGSEENAVVFDWEPTVMAGAEMLGRRGEDHRLDAPRPATQRRNEKEARRGDSAQKEYDEFRPF

SEQ ID NO: 23149 - protein, 462 aa, Streptomyces sp. C
MREDLSVTGSELPPEPLSHSLKQRHLTMLGLGGVIGAGLFVGSGAGIGIAGPAIICSYLLAGVLAMLVMRMLGEMSAAMPASGSFSVYAEKALGRWAGFSAGWLYWFLLVVVLAVEATGAANIAHGWVPAVDQWLWVLIFMVVFTLSNLAAVRNFGEFEFWFAALKVGAIVLFLILGTLAVFGLLPDTEPVGMANLTGQGGFFPAGIGGVIAGMLAVVFAFGGLEVVTIAAAESDDPAKSVSRAVRSAVWRILFFYVGSMLVIVSLLPWDSLEPGESPYVAVLDSIGIPAAGQIMNIVVFVALLSALNANLYGSSRMVFSLAERGEAPKSLLKVSGSGVPTRAVLASVAFGFVSVVLNLLWPDTVFLYMLNAVGAVLLFVWALIAVSQLRLRPRLERDMPERLTLPMWAFPYLTWAALAGMAAVLVLMLFDDSARPQLLWSSGAAAAVLLVAWYREVRDRRS

SEQ ID NO: 23150 - protein, 326 aa, Streptomyces sp. C
MRGAAGRLRGWGGVSAMAAACAVTAAAVLLPLAGASPSDGSGAVHDPASVTVVPYAPADTCQDPEASLRPSGLDGPAIERIRKAGKLVAGVDQNSFKWGYRNPDGHLDGFDIDLVKAIAKDILGNEDLVIYRAIPTSQRVPALQEGRVDIVVRTMTINCKRLEDVAFSTAYFEAGQQVLAPKGSPITGYDASLKGRRICTAAGSTAEAALKSQSYGSVGVSVANQLDCLVRLQLGEVEGIITDNALAAGQAAQDPSVQLVGAPFTREFYGVAMNKDASDLVRRVNKVLENYRAGGEQSPWATSYRKHFEDVLPKASVPPAPKYRDG

SEQ ID NO: 23151 - protein, 561 aa, Streptomyces sp. C
MTHDHDLVLRPTEAQTAAALAPPPGRTGGDLVVETLRGLGATTVFGLPGQHALGLFDAVGRSDLRLVTLRTENNAGFAADAYGRLTGEAVPLLLSTGPGALMSLPALAEAAAASAPVLAISSQVPTAGLGGGRRGHLHELRDQSASFREVVKSVHTARTPSQIPSAVAEAWESALTAPHGPVWVEIPEDVLRAETLIPEVTGLDATPHETAPRPELTALAAHWLSKASRPVIIAGGGVVRADAAGKLRQLAERLNAPVVTTFGGKGAFPWNHPLSLRSWMEDRHTTDFLEDADVLLVVGSGLGELSSNYHTFFPTGRVVQIEADLGKLESNHPALGIHADARLALQALLETVEPREDDEAPERVRALLAAVEDRLAPQDVTLERELLDSIRQALPPRSPSFWDMTILAYWAWSAFDPKHPNTMHSAQGAGGLGYAFPAALGAAVAEPGTPVLAVSGDGGAMYSLSELATAKEHDLDVTWLIVDDGGYGILREYMTASFDGRTTATELARPDFTALAASFGVPASTTTPATLREDLTRALKTPGPSLLVLPATLKMFAPTHL

SEQ ID NO: 23152 - protein, 320 aa, Streptomyces sp. C
MSTQPRGPVDSSRIPRYAGPATFARLPRLDEVGSADVAVVGVPFDSGVSYRPGARFGGNAIREASRLLRPYNPAQDASPFALAQVADAGDIAVNPFNINEAVETVEAAADELLGNGSRLMTLGGDHTIALPLLRSVAKKHGPVALLHFDAHLDTWDTYFGAEYTHGTPFRRAVEEGILDTEALSHVGTRGPLYGKQDLDDDAKMGFGIVTSADVYRRGADEVADQLRQRIGDRPLYISIDIDVLDPAHAPGTGTPEAGGMTSRELLEIIRGLSSCNLVSADVVEVAPAYDHAEITSVAASHTAYELTTIMSRQIAASRQG

SEQ ID NO: 23153 - protein, 481 aa, Streptomyces sp. C
MTSVQVEQHDRTPGEGGQGEGDGEGYHRALGARQIQMIAIGGAIGTGLFLGAGKAISKAGPSLILAYAIAGLVIFFIMRALGELLMYRPVSGSFSDYAREFLGPFWGYATGWTYWLFWVVTGITEVTAAAKYMSYWTNDSFPQWAYALIFTVILYAANLISVKLFGELEFWFSMVKVTAIVGMILICAGILTIGFSDAAATASVSNLWNDRGFFPNGIGETLMTLQIVMFAFLAVELVGVTAGESKDPAKTLPKAINTVPWRIAVFYVGALIMIMSVIPWSNFKAGESPFVLAFEKMGLGIGAAIVNFVVLTAALSSCNSGMYSTGRMLRDLALNGQGPKFFTRLTKNGTPLAGTTFSAALMLVGVWINYVAPGKAFDYVVSFATISGMWAWVMILVCQIRYRAKADRGELPQSAFRAPGAPWTSWFALLFIGMVIVMMGVDKDSRVSLYCAPLWGLILGVSYLVLKARNPQGAAFNKVSR

SEQ ID NO: 23154 - protein, 225 aa, Streptomyces sp. C
MKGRVLVVDDDTALAEMLGIVLRGEGFEPSFVADGDKALAAFREAKPDLVLLDLMLPGRDGIEVCRLIRAESGVPIVMLTAKSDTVDVVVGLESGADDYIVKPFKPKELVARIRARLRRSEEPAPEQLVIGDLVIDVAGHSVKRDGASIALTPLEFDLLVALARKPWQVFTREVLLEQVWGYRHAADTRLVNVHVQRLRSKVEKDPERPEIVVTVRGVGYKAGPS

SEQ ID NO: 23155 - protein, 390 aa, Streptomyces sp. C
MVERRAEHAVKYFYSHLFWHNPGLRELFPSSAEDMERQRDRLFAALTHVVTHLESGTLVPYLRDLGRDHRKFLVGPEHYAAVGTSLIAALAQTSGDAWTPAVEKAWYEAYQVIADAMTAGAAGSDEPPWWEAEVVRHLQYGEDIGVLTLAPRTPLTYRPGQYVSVSSARVPTTWRTYSLANAPRPDGTVDLHVSRIDGGRLSTALVRDVLPGEVLRLGAPGGRLTLRREDRPLTLIAAGTGWAPVRALLEELLQHPPDHDVRLFVVARDAAHLYDRPLIDRHAAACRWLGVTYITPAPGQHRNQATDRLATALGNRALWREQDVYLSGPAVFVEETSHLLRELGARPDRLFHDAVPVPGSQRPRPLGFGEWFLHRPSPHWHNPSARAPRD

SEQ ID NO: 23156 - protein, 325 aa, Streptomyces sp. C
MTGIKTTGEKKLMLFSGRAHPELAEEVAHQLGVGLVPTKAFDFANGEIYVRFQESARGADCFLIQSHTAPINKWIMEQLIMIDALKRASARSITVIVPSYGYARQDKKHKGREPISARLVADLLKTAGADRILTVDLHTDQIQGFFDGPVDHLSALNVLADYVGAKVDRTKLTVVSPDAGRVRVADRWCDRLDAPLAIVHKRRDKDVANQVTVHEVVGEVKGRVCVLVDDMIDTGGTICAAAEALFAHGAEDVIVTATHGILSGPAADRLKNSKVSEFIFTNTLPDPSDLELDKITVLSIAPMIARAVREVFEDGSVTSLFEEQQ

SEQ ID NO: 23157 - protein, 650 aa, Streptomyces sp. C
MQPGAQLAGRYRLVERLGQGGIGEVWRAQDVELDRAVAVKVLLEFDASEELLGRFRREASIGARLQHPGLTVVHDIGRHGDRLFMVMELLEGQDLSRLLARTPGVGLPLPQVLDLALQTAEALAAAHAQKVVHRDLKPGNLFLLSDGRLKICDFGIARTADATGGLTVTGRVFGTPSYMAPEQWRGEHVDGSCDLYALGCVLYALLTGAPPFAGTEQAWVLMRMHLEEAPPALGAVRADLPPGLVELVDALLAKEPGDRPDALAVADRLRALLYEPAVRDVPTMDLGTTAPIAAAPAPSRRNVLLGLGGLGLLAGAGGGTYAVWRLTGDENDGGKNPGDKKNGGGPSAEGTTEPGTAGVRTVAEIKKHAGSVDSVAISPDSRFLVSGGNDRSIQLYNFAGGGTITLSPMPEAAVTCVSYSPDGKVLVGGSDKVLRLHDVYSLELLGILAEHTGLVRAVAFSPDSKTLASGADDGTIRLWDVVTRSTVAVATLTGHTKPVLSLAFAPDGTLASGCADGTIRLWDLASRTSTATLTGHTKAVAAVAFSPDGKVLASGSADSSVRLWDPAARTGTSTLPGHNSPVRSVAFSADGQTIASGGGRTIRLWDVPSREHRATLNGHTAAVTSVAFSADGKTLASASEDDSIRVWKRT

SEQ ID NO: 23158 - protein, 238 aa, Streptomyces sp. C
MTRGTQDETTAAAREGDGLALTTAGLPSWLEPVVAAARSVQPRQLSRFLPPEDGRGRQSAVLILFGEGPRGPELLLQERAGSLRSHAGQPSFPGGALDPEDGDPHTTGPLRAALREAEEETGLDPSGVQLFGVLPRLYIPVSEFVVTPVLGWWREPSPVGAVDPAETARVFTVPVADLTDPAHRVTVVHPRGHEGPGFTVESALVWGFTAGVIDRILHFSGWERPWDRSRHVPLDWHA

SEQ ID NO: 23159 - protein, 224 aa, Streptomyces sp. C
MDDVLRRAPLFAALDDEQAAELRASMAEVTLARGDALFHEGDPGDRLYVVTEGKVKLHRTSPDGRENMLAVLGPGELIGELSLFDPGPRTATATALTEVKLLGLGHGDLQPWLNARPEVATALLRAVARRLRKTNDQMSDLVFSDVPGRVARALLDLSRRFGVQSEEGIHVVHDLTQEELAQLVGASRETVNKALADFAGRGWLRLEARAVILLDVERLAKRSR

SEQ ID NO: 23160 - protein, 426 aa, Streptomyces sp. C
MGLVVQKYGGSSVADAEGIKRVAKRIVDAKKNGHQVVVVVSAMGDTTDELIDLAEQVSPMPAGREFDMLLTAGERISMALLAMAIKNLGHEAQSFTGSQAGVITDSVHNKARIIDVTPGRIRTALDEGNIAIVAGFQGVSADSKDITTLGRGGSDTTAVALAAALDAEVCEIYTDVDGVFTADPRVVKKARKIDWISSEDMLELAASGSKVLLHRCVEYARRYNIPIHVRSSFSGLPGTWVSNEKPESQGDEQVEHAIISGVAHDVSEAKITVVGVPDKPGEAAAIFRAIADAEINIDMIVQNVSAASTGLTDISFTLPKTEGHKAIDALEKAKAQIGFDSLRYDDQIGKISLVGAGMKTNPGVTASFFQALSDAGVNIELISTSEIRISVVTRQDDVNAAVIAVHTAFGLDSDSDEAVVYGGTGR

SEQ ID NO: 23161 - protein, 391 aa, Streptomyces sp. C
MSAPAGSSRPYLNRNLAAFGTTIFAEMSALAAATGSINLGQGFPDTDGPAEIAEAAVRAIRDGRGNQYPPGPGVPELRTAITAHQQRFYGLSHDPDTEVLVTAGATEAIAASLLALLEPGDEVIALEPFYDSYAACIAMAGAVRVPLTLRAPHFRPDLDALRDAITPRTRLLLLNTPHNPTGTVLTPEELAVIAELAVERDLLVVTDEVYEHLVFEGAHVPLASLPGMRERTVTISSAGKTFSFTGWKVGWITAPPALVSAVRSAKQFLTYVSSGPFQYAVAEALALPDSYFDDFRADLAAKRDLLSDGLAAAGFEVFRPQGTYFITTDVSPLGEKDGLAFCRALPGRCGVVAIPNQVFYDDKSAGATQVRWAFCKRTDVLQEAVERLRRL

SEQ ID NO: 23162 - protein, 866 aa, Streptomyces sp. C
MDAELTNKSRDALNAATSRAVKDGHADLTPAHLLLALLAGEDNENVVDLLVATDADQAAVRTGAERLLAALPSVTGSTVAPPQPSRDLLAVLAEADSQAGRLGDEYLSTEHLLIAVAAKGGPAGEVLSAQGATAKKLLDAFQNARGARRVTTPDPEGQYKALEKFGTDFTAAARDGKLDPVIGRDHEIRRVVQVLSRRTKNNPVLIGEPGVGKTAVVEGLAQRIVKGDVPESLKGKRLVSLDLGAMVAGAKYRGEFEERLKTVLAEIKSSEGQIITFIDELHTVVGAGAGGDSAMDAGNMLKPMLARGELRMVGATTLDEYRERIEKDPALERRFQQVLVAEPTVEDTIAILRGLKGRYEAHHKVVINDSALVAAATLSDRYITSRFLPDKAIDLVDEAASRLRMEIDSSPVEIDELQRSVDRMRMEELALKNESDPASIERLDKIRKDLADKEEELRGLTARWEKEKQSLNRVGELKERLDDLRGQAERAQRDGDFDTASKLLYGEIPGLERELAEATEAEEEAAKTGAAKNSMVKDEVGPDDIADVVGAWTGIPAGRLLEGETQKLLRMEDELGRRLIGQTEAVRAVADAVRRTRAGIADPDRPTGSFLFLGPTGVGKTELAKALADFLFDDERAMVRIDMSEYSEKHSVARLVGAPPGYVGYEEGGQLTEAVRRRPYSVVLLDEVEKAHPEVFDILLQVLDDGRLTDGQGRTVDFRNTILILTSNLGSQFLVDPATPAEQKKAQVLEVVRASFKPEFLNRLDDIVVFSALTRDELAHIAELQIAKLAKRLADRRLALDVTPEALAWLADKGNDPAYGARPLRRLIQTAVGDRLAKEILSGEVRDGDTVRVDVAGEDLLVGRAL

SEQ ID NO: 23163 - protein, 614 aa, Streptomyces sp. C
MARAVGIDLGTTNSVVSVLEGGEPTVITNAEGARTTPSVVAFAKNGEVLVGEVAKRQAVTNVDRTIRSVKRHMGTDWKINLDGKDFNPQQMSAFILQKLKRDAEAYLGEKVTDAVITVPAYFNDSERQATKEAGEIAGLNVLRIVNEPTAAALAYGLDKDDQTILVFDLGGGTFDVSLLEIGDGVVEVKATNGDNHLGGDDWDQRVVDYLVKQFANGHGVDLSKDKMALQRLREAAEKAKIELSSSTETTINLPYITASAEGPLHLDEKLTRSQFQQLTADLLDRCKTPFHNVIKDAGIALSEIDHVVLVGGSTRMPAVAELVKELTGGQDANKGVNPDEVVAIGATLQAGVLKGEVKDVLLLDVTPLSLGIETKGGIMTKLIERNTTIPTKRSEIFTTAEDNQPSVQIQVYQGEREIAAYNKKLGMFELTGLPPAPRGVPQIEVSFDIDANGIMHVTAKDLGTGKEQKMTVTGGSSLGKDEVDRMRQEAEQYAEEDLRRKEAAESRNQGEQLVYQTEKFLADNAEKVPAEVKTEVETAVTELKDKLKGEDTAEIRTATEKLAAVSQKLGQAIYADAQAAQAAGGAGDAGQAKADDDVVDAEIVDDEKPKGGAA

SEQ ID NO: 23164 - protein, 67 aa, Streptomyces sp. C
MASGTVKWFNAAKGFGFIEQDGGGDDVFAHFSNIATQGFRELLEGQKVTFDIAQGQKGPTAENIVPV

SEQ ID NO: 23165 - protein, 508 aa, Streptomyces sp. C
MNRTRTNDRSSRTRSRTGGPSYGAAAGSERGSRFGSSTPSRSGSPSRSRGYGRRSAPVQGEFALPKTTTPALPAVEAFTDLDMPAELLAALGAQGVTVPFPIQGATLPNTLAGRDVLGRGRTGSGKTLAFGLALLARTAGLRAEPRQPLALILVPTRELAQQVTDALTPYARAVKLRLTTVVGGMSIGRQAGALRGGAEVVVATPGRLKDLIDRGECRLNQVAITVLDEADQMTDMGFMPQVTALLDQVRPEGQRMLFSATLDRNVDLLVRRYLIDPVVHSVDPTAGAVTTMEHHVLHVHGADKQRTTTEIAAREGRVMMFLDTKHAVDRLTQDLLNSGVRAAALHGGKSQPQRTRTLAQFKTGHVTVLVATNVAARGIHVDSLDLVVNVDPPTDPKDYLHRGGRTARAGESGSVVTLVTPNQRREMTRLMQAAGITPQTTQVRSGEEALNRITGAQAPSGIPVVITAPVVERAKRSSASRGRRRPTSTARRGSVSASARRSAFDAAT

SEQ ID NO: 23166 - protein, 366 aa, Streptomyces sp. C
MAAPRHGAFHPLTVAAVDRLTDDSVALTLRVPEELREDYRHAPGQHLTLRRRAAEGTEVRRTYSICSPAPAPDGPGPAELRVGVRLVEGGEFSTFAHKEVAAGDVLDVMVPAGRFVLEPAAAPRAAHYAAIVGGSGITPVLSIAASVLAARPDTRFCLVRSDRTAASTMFLEDVADLKDRYPDRFQLVTVLSREEQEAGLPSGRLDEARLVSLLPALLPVEEVTGWFLCGPYGLVTGAERALGALGVVRTRVHEEVFHVEETAPQGPVRSVPPPAHGRVTARLDGRSGTWPVQDGESLLDTVLRNRADAPYACKGGVCGTCRAFVVSGEVRMDRNFALEAEETDAGFVLACQSHALTEEVEIDFDR

SEQ ID NO: 23167 - protein, 354 aa, Streptomyces sp. C
MSWIIVQFHKVYGAIFGADSGWAWGLSIVSLVILIRICLIPLFVKQIKATRGMQALQPKMKAIQERYKNDKQRQSEEMMKLYKETGTNPLSSCLPILAQSPFFFALYHVLASIANGKTIGVINQPLLESARQAHIFGAPLAAKFMDSAEKVAALDASITNVRIVTAVMIVMMSLSQFYTQRQLMQKNVDLSVKTPFMQQQKMLMYIFPVIFAVMGINFPVGVLVYWLTTNVWTMGQQMYVINQNPTPGSKAQDQYLTRLLKHVTTHGDVKGRGKKKIVAAIVAKGPDRNDNERKFITALTKQGMAAQADGSVIKSSEATADSDAASGGVATKRQQPKRQSKSKRQTPPSKPSKK

SEQ ID NO: 23168 - protein, 366 aa, Streptomyces sp. C
MLIRRTLAEIAPVADKVTSYFYALVFTGHPEVREMFPAAMDVQRDRLLKALLTAAEHIDDPAVLTPYLRRLGAGHRKYGTVSAHYPAVGEALIGALARYAELTWGPEAEAAWVRAYTAISQTMIDAAAEDEARAPAWWHAEVVSHDLRTSDIAVLTVRPDQPYPFLAGQYTSLETPWWPRVWRHYSFASAPRADGLLSFHVKAVPAGWVSNALVRHARPGDVLRLGPPAGSMVVDHSTDNGMLCLGGGTGIAPIKALIEDVAEHGERRPVEVFFGARSDHDLYDKDTLLGLQRSHPWLSVRPVIGEGLAGQLPQAVGENGPWSSYDAFISGPPAMVRSGVDALKRIGIPGERIRFDALEELAGVAG

SEQ ID NO: 23169 - protein, 694 aa, Streptomyces sp. C
MPENDSTEIVDAETLAVTEAMDAIERDEIIEALEADVADVADVTAEADAADADDAEPTITFADLGLPEGVVRKLGQNGVTSPFPIQAATIPDALAGKDILGRGRTGSGKTLSFGLPTLARLADGHTEKKKPRAVILTPTRELAMQVADALQPYGDVLGLKMKVVCGGTSMGNQIYALERGVDVLVATPGRLRDIINRGACSLENVEVAVLDEADQMADLGFLPEVTELLDQVPAGGQRMLFSATMENEIGTLVKRYLSNPVSHEVDSAQGNVTTMTHHVLVVKPKDKAPVTAAIAARKGRTIIFVRTQLGADRIAEQLIEAGVKADALHGGMTQGARTRVLADFKDGYVNALVATDVAARGIHVDGIDLVLNVDPAGDHKDYLHRSGRTARAGKSGVVVSLALPHQRRQIFRLMEDAGVDASRHIVQGAGAFDPEVAEITGARSLTEVQADSANNAAKQAEREVADLTKQLERATRRAAELREEADRLVARSARERGEDPEAAVAEVVEAAEAEVAAAVAAVAEPVAQERTFERRDDRGNYERRDNRGGDRGGDRGGFRRDDRPSGGFRRDDRRDDNRGGGFRRDDRPSGGFNRDDRGGDRGGFRRDDRPSGGFRRDDRRDDNRGGGFRRDDRPSGGFNRDDRGGDRGGFRRDDRPSGGFRRDDRPSGGFNRDDRSGDRGGFRRDDKPRWKRNG

SEQ ID NO: 23170 - protein, 307 aa, Streptomyces sp. C
MSTSMSTSTSTQQATVTVLGLGPMGRALAGAFLDAGVRTTVWNRTPGREEDLVARGAIPAASAQEAVAASALTVVCVVNYDAADAILRPDAVTAALKGRTLVNLTADTPARARDTGAWADAHGIRYLDGAIMTPTPTIGTPDAVFIHSGPEDLYREHRPVLDVLGGTHTHLGEDIGRAAAYDIALLDIFWTSMAGYAHALAVAKAEGVSAGELTPFAQGIAAILPPLFEEFAADVDSGSYSGRLNPLTSGASSMAHIIHASEEHGIEAALMRATEGLAQRAIAHGHGGDGFIRVAEFLGRTAVPARA

SEQ ID NO: 23171 - protein, 489 aa, Streptomyces sp. C
MASPVAPQVLVAANRGPLSYALDTDGTLSARRGGGGLVSGLSAALSAQPEALWICAALSDADREAVRRGVAEPGVRMLDIDPAVYDDAYNGIANSVLWFTHHHLYDVPREPVFDAEFRRRWDSYTAYNRAFAEALAEEAAEGACVLVQDYHLALVPGQLRELRPDLRIAHFTHTPWASREFLEMLPDDIRSELVWGMLGADRLGFHTELWAINFVSGATTDDERGIAESSIPRNSAPGVHHRRLTADGGYGEKRFTTVTAYPLGVDGDDLRALAHRPEVDDKLAALRAEVGDRKTIVRVDRTELSKNILRGLLAYRELLATHPEWRGRVVHLASAYPSRQDLKVYRDYTESVRRLAEEINAEFGTDDWQPVMVSVQDDFARSLAAYRLADVALINPVRDGMNLVAKEIPVVSEAGCALVLSTGAGAYEELRANALTVNPYDVTATAEALHEALTMPEAERAERTKRLAASATALPPAAWFTAQLEALRG

SEQ ID NO: 23172 - protein, 69 aa, Streptomyces sp. C
MAQGTVKWFNAEKGYGFIAVDGGADVFVHYSAIQMDGYRTLEEGQRVEFEISQGQKGPQADMVKLAPAG

SEQ ID NO: 23173 - protein, 127 aa, Streptomyces sp. C
MPTGKVKWFNSEKGFGFLSRDDGGDVFVHSSVLPAGVDALKPGQRVEFGVVAGQRGDQALSVTVLDPAPSVAAAQRRKPDELASIVQDLTTLLENITPMLERGRYPDKSHGTKIAGLLRAVADQLDV

SEQ ID NO: 23174 - protein, 67 aa, Streptomyces sp. C
MATGTVKWFNAEKGFGFIAQDGGGPDVFVHYSAINASGFRSLEENQQVNFDVTQGPKGPQAENVTPA

SEQ ID NO: 23175 - protein, 413 aa, Streptomyces sp. C
MDNELRRTLGVSDAVVVGLGAMVGAGIFAALAPAARAAGGGLLAALAVAALVAYCNAWSSARLAARYPASGGTYVYGRERLGPFWGYLAGWGFVVGKTASCAAMALTVGAYVWPGRQHAVAVAAVVALTAAGYGGVQKSARLARLIVAAVLAVLAGVVVVCLTSGAADPGALAGGEWDAAGLLQGAGLLFFAFAGYARITTLGEEVRDPERTIPRAVPLALGIALLVYAAVAVAALSVLGSDGLAASAAPLADAVRAAGWPGLSPVVRVGAALAALGSLLALVLGVSRTVLAMARDGHLPRALAAVHPRRQVPHHAELAVGAVVAVLAATADLRGAIGFSSFGVLVYYAIANASAWTLGSAVKDRAVAAVGLSGCVVLACALPLASAVSGAAVLAVGALVYKVRVGLRPRTGR

SEQ ID NO: 23176 - protein, 397 aa, Streptomyces sp. C
MSARIGAISESATLAVDAKAKALKAAGRPVIGFGAGEPDFPTPDYIVEAAVEACRDPKFHRYTPAGGLPELKKAIAAKTLRDSGYEVDASQVLVTNGGKQAIYEAFAAILDPGDEVIVPAPYWTTYPESIRLAGGVPVEVVADETTGYRVSVEQLEAARTERTKVVLFVSPSNPTGAVYSEDDAKAIGEWAAEHGLWVLTDEIYEHLVYGDAKFTSLPVLVPALRDKCIIVNGVAKTYAMTGWRVGWVIAPQDVIKAATNLQSHATSNVSNVAQVAALAAVSGNLDAVAEMRKAFDRRRQTMVKMLNEIDGVFCPTPEGAFYAYPSVKELLGKEIRGKRPQTSVELAALILDEAEVAVVPGEAFGTPGYLRLSYALGDEDLVEGVSRIQNLLAEAKA

SEQ ID NO: 23177 - protein, 391 aa, Streptomyces sp. C
MLIAGGGIGGIATALALQQQGIDSIVFESAPQLRDGGAGLHIWTNGMLALEYLGLADAVRETAPAQEVCSFADWRGNSIGDWPVGQFTSRYGQPTVAIGRSALHGIMSDALTVPVRTGARVTGYAQDREGVTVRFDDGTEERGDVLIGADGVRSAVRAQLLGPQPPHYTGYIAWRGHANMSPEEIPPGSFLGLFGRGTRFTYYDIAPGVVHWMSVANGPAGGRDQGTPQDTLRMLQARHRGWVDPVARILAATDPDSIIRNDVTERKPDPVWGSGRVTLLGDAAHAVSFNIGQGACLAIEDALVLAEHLTRPGDVTSALRAYEAERRTRTAPMQLLAARIGWAGALENPLAVWIRDQLMRAAWTRVAFAAAEKEHVAYGTRWRERALQNHH

SEQ ID NO: 23178 - protein, 403 aa, Streptomyces sp. C
MQVIQSTKLANVCYEIRGPVLEEAMRLEAAGHRILKLNTGNPAAFGFDCPPEILEDMLRNLGNAHGYGDAKGLLSARRAVMQHYQTKGIHLDVEDIYLGNGVSELIQMSMQALLDDGDEVLVPAPDYPLWTASVSLAGGTAVHYRCDEQSDWMPDLADIERKVTDRTRAIVIINPNNPTGAVYDDEMLRGLTDIARRHNLVVCSDEIYDRILYDGTTHTNTAAIAPDLLTLTFNGLSKNYRVAGYRAGWMAVCGPKKHASSYIEGLTILANMRLCANMPSQHAVATALGGRQSIVDLVLPGGRLLEQRDTAYDLLTQIPGITCVKPKGALYLFPKLDPAVYKVKDDRQMVLDLLRAEKIMVVHGTGFNWPEPDHFRIVTLPNAKDLADAVTRIGRFLDGYGQP

SEQ ID NO: 23179 - protein, 196 aa, Streptomyces sp. C
MSLVLDAAAQDLLFREARTANSFSDEPVTEEQVQAIYDLVKFGPTAFNQTPLRITLVRSAEARERLVKHMEEGNKAKTAAAPLVAILSADNEFHEELPQLLPHFPQAKDAFFSERPVRERAALLNGALQAAYFIIGVRAAGLAAGPMTGVDFAGVQKEFLDADHTPLMVVNIGKPGENAWFPRSPRLDFDQVITTV

SEQ ID NO: 23180 - protein, 459 aa, Streptomyces sp. C
MASATDSSTAAPAALRRSLGFRDLVVYGLLFIAPMAPVGVFGTLDAKSHGAVALVYAVATVAMAFTAFSYAQMVRVAPQAGSVFTYARKGLGEGAGLIAGWMAMLDYLLIPAVAYLFSGIAMHALVPEVSRWVWTALAVVATTALNLWGVRAAARVGFAVLAMEIAVLLVFLVAAVTVLARDGARRGWLSPLTGDGPLGFSAAAVLGAVSVAVLSYLGFDAIASFAEEVTGGSARVARAVLFCLALTGVLFVAQTYLAALLSPVSSAELAADPGRQGPAFYDAVEASVGSWLHDLVAVSKAIGAAFAALAGQAAAGRLLFAMARERRLPRALARTSGGTPRAALLVAAAVTLVAAVWAARRDDGLDHLVSVVDVGALVAFTLLHASVVGWFVVRRRAGAPVWWKHLVVPVLGAAVTVAVIVEASWTAQLVGAAWLLAGLTVLLVQRGRGPVGADTRPRA

SEQ ID NO: 23181 - protein, 515 aa, Streptomyces sp. C
MSPFPIQEMTLPVALSGTDVIGQAKTGTGKTLGFGLPLLERVVVPADVEAGRARPDQLTDSPQALVVVPTRELCTQVTNDLLTAGKVRNVRVLAIYGGRAYEPQVEALKKGVDVIVGTPGRLLDLAGQKKLDLSRVKALVLDEADEMLDLGFLPDVEKIMNLLPAKRQTMLFSATMPGAVIGLARRYMSQPTHIRAVSEDGEGATVANITQHVFRAHNMDKPELVSRILQAEGRGLAMIFCRTKRTAADIAEQLERRGFASGAVHGDLGQGAREQALRAFRNGKVDVLVCTDVAARGIDVEGVTHVINYQTPEDEKTFLHRVGRTGRAGNKGTAVTLVDWDDIPRWQLINKALELDFHEPEETYSTSPHLYEQLNIPAGTKGILPRAERTRAGLKAEELEDLGETGGRGGRGGRGAAAAAVVTEERPARTRTPRQRRRTRGGSELGDGAGVESAAVAVAPAAEAPAAEVPAADEPRRPRRRRTRVTASTVAAAAEAAVAEAPVAVSAPVAEIVVE

SEQ ID NO: 23182 - protein, 399 aa, Streptomyces sp. C
MLSEKSTATVRATLPAVGAAITDITELFYAKLFAAHPALLRDLFNRGNQSAGLQKQALAGSVAAFATHLLEHPDTRPDVMLSRIAHKHASLGVTREQYPVVHRHLFEAMAEVLGEAVTPEVAEAWDEVYWLMANALIAAEERLYAERQVLAGDVWREWTVTARVEETADCTTFHLVPADGAPAPGFKPGQYVSVQVELPDGARQIRQYSLSSSPGSPVRAITVKRVHGPAAGGGPDGEVSHHLHARVRTGDTLRVSAPYGDLVLQDPDSPVLLASAGIGCTPMLSMLEHLAETGHTGRVTVVHADRSPADHALRTDHRALTHKLSDATARFWYESAAEAGDCTGLVDLTAVPVAPGTRAYLCGPLPFMRSVRAQLIAKGVPASDIHYEVFGPDLWLASA

SEQ ID NO: 23183 - protein, 400 aa, Streptomyces sp. C
MSGTNNTTSVIVAGARTPMGRLLGSLKSFSGADLGGFAIKSALERAGISGDQVQYVIMGQVLQAGAGQIPARQAAVKAGIPMNVPALTINKVCLSGLDAIALADQLIRAGEFDIVVAGGQESMTNAPHLLPKSREGYKYGAIEMLDAMAYDGLTDAFENIAMGESTEKHNTRLGIERAPQDEFAAVSHQRAAAAQKNGVFEAEITPVEIPQRKGEPVVFAADEGIRPETTAESLGKLRPAFAKDGTITAGTSSQISDGAAAVVVMSKAKAEELGLEWLAEIGAHGNVAGPDNSLQSQPSNAILHALKKDGLKVSDLDLIEINEAFAAVAVQSMKDLGVTPEKVNVNGGAIALGHPIGMSGARVVLHLALELKRRGGGTGAAALCGGGGQGDALVIRVPKA

SEQ ID NO: 23184 - protein, 404 aa, Streptomyces sp. C
MTATRVLVLNSGSSSVKYQLLDMADRSRLAAGLVERIGEETSRLVHEPFTGAGAEGGRRERLGPIADHGAALRAVAAELAADGLGLDSPELAAVGHRVVHGGTRFTRPTVIDDEVLAEIRSLIPLAPLHNPANVTGIEVARELRGDLPQVAVFDTAFHSTMPEHVARYAIDAATAEKYAIRRYGFHGTSHAYVSRTAAALLGKPVEDVNVIVLHLGNGASASAVRGGVCVETSMGLTPLEGLVMGTRSGDLDPAVIFHLARVGGLSVDEIDSLLNKKSGLLGLCGDNDMREVTRRAGEGDEAARLALAAYVHRLKKYIGAYTAVLGRVDAVVFTAGVGENASAVREAAIAGLEELGLALDLEANAARSPEPRLISPDYARVAVAVVPTDEELEIASQAYALVTQ

SEQ ID NO: 23185 - protein, 695 aa, Streptomyces sp. C
MTRSVYVTGIERGDGRQVVELGIMELLTRQTGRVGVYRPLLHDGPDRLFDLLRARYRLDQDAATAYGMEYHEASAILAEKGTDELVSRLVDRYHRVARDYEVMLVLGTDYAETNLPDELALNARLANELGAVVVPVLGGAKQPAEAVRAEARNAHRAYESLGCHVVAMVVNRVAPEDRDAIAERLAARLPVPCYVLPDDKNLSAPTVAQITRALGGEVLLGDDAGLARDAVDFVFGGAMLPNFLNALTPGCLVVTPGDRADLVVGALAAHASGTPPIAGVLLTLNERPSADVLTLASKLAPGTPVVSVAGNSFPTAAELFSLQSRLNSATPRKLETALGLFERHVDTAELRGLLSVARSERVTPMMFEHELLERARSERRRVVLPEGTEERVLRAADVVLRRGVCDLTLLGEEQAILKKAGDLGVDISAAQLIDPATSPLRERFAEYYAKARAHKGMTVELAHDVVTDVNYFGTLMVQEGLADGMVSGSVHSTAATIRPAFEIIKTKPEASIVSSVFFMCLADQVLVYGDCAVNPDPDAAQLADIAVQSAATAAAFGVDPRIAMLSYSTGTSGSGADVEKVRKATEAVRAQRPDLLIEGPIQYDAAVEPSVAATKLPGSEVAGRASVLIFPDLNTGNNTYKAVQRSAGAVAVGPVLQGLRKPVNDLSRGALVQDIVTTVAITAIQAQSQSRPQAQ

SEQ ID NO: 23186 - protein, 387 aa, Streptomyces sp. C
MAYLDHAATTPMLPEAAAAMTAQFAATGNASSLHAAGRRARRTVEEARESLAEALGARPSEVVFTAGGTEADNLAVKGLYWTRRDADPARRRVLASPVEHHAVLDAVHWLAEHEGAEVEYLPVDRYGRVHPGDFRAALERNPDDVALATVMWANNEIGTVMPVGELAAVAREFAVPLHSDAVQAFGQLDVRFGDSGLAAMTVSGHKVGGPYGIGALLLGRDQSPVPVLHGGGQERHVRSGTLDVPAIAAFAVAAVLAAERRERFAAEVGALRDELIAAVLAAVPDAVLGGDPVDRLPANAHFSFPGCEGDSLLLLLDAQGIECSTGSACTAGVAQPSHVLLAAGTDPRLARGTLRFSLGHTSTKEDVAAVAAAIGPAVERARSAGLS

SEQ ID NO: 23187 - protein, 627 aa, Streptomyces sp. C
MTEQASGAHHPQPRPRTGGQNQPTAVEHVTGAQSLIRSLEEVGCDTVFGIPGGCILPAYDPMMDSKKVRHILVRHEQGAGHAATGYAQATGKVGVCMATSGPGATNLVTPIADAHMDSVPLVAITGQVSSKAIGTDAFQEADIVGITMPITKHNFLVTKAEDIAKTIAEAFHIASTGRPGPVLVDIAKDALQAKTTFSWPPSQDLPGYRPVTKPHAKQIREAAKMIAAAKRPVLYVGGGVMKAGATAELKVLTELTGVPVVTTLMALGSIPDTHPQNVGMPGMHGAVTAVTALQKSDLLIALGTRFDDRVTGKLDSFAPFAKVIHADIDPAEIGKNRAVDVPIVGDAREVIADLIQAVQAEANEGNTGDYTAWWKDLNRWRETYPLGYDLPEDGSLSPQQVIERIGQLAPQGTIYAAGVGQHQMWASHFVNYEEPRTWLNSGGAGTMGYAVPAAMGAKVGMPERTVWAIDGDGCFQMTNQELATCALNNIPIKVAIINNGALGMVRQWQTLFYNQRYSNTVLHADETGHDTVGSQLGESASPRMGTRVPDFVKLSEAMGCVALRCEDPADLDKVIAEANAINDRPVVIDFIVHEDAMVWPMVAAGTSNDEVMAARGVRPDFGDNEDD

SEQ ID NO: 23188 - protein, 529 aa, Streptomyces sp. C
MSSKPVVLIAEELSPATVDALGPDFEIRHVNGADRAELLPAIVDVDAILVRSATKVDAEAIAAARKLKVVARAGVGLDNVDVSAATKAGVMVVNAPTSNIVTAAELACGLLVATARNIPQANTALKNGEWKRNKYTGVELSEKTLGVVGLGRIGVLVAQRMSAFGMKIVAYDPYVQPARAAQMGVKMLTLDELLEVADFITVHLPKTPETLGLIGDEALHKVKPSVRIVNAARGGIVDEAALYSAIKEGRVAGAGLDVYAKEPCTDSPLFELDQVVCTPHLGASTDEAQEKAGIAVAKSVRLALAGELVPDAVNVQGGVIAEDVRPGLPLAEKLGRIFTALAGEVAVRLDVEVCGEITQHDVKVLELSALKGVFEDVVDETVSYVNAPLFAQERGVEVRLTTSSESPDHRNVVTVRGTLSDGQEVSVSGTLAGPKHLQKIVGVGEYDVDLALADHMIVLRYTDRPGVVGKVGQLLGEAGLNIAGMQVARAEEGGEALVVLTVDAEVPVDVLAAISEEIGAASARTVNLG

SEQ ID NO: 23189 - protein, 284 aa, Streptomyces sp. C
MKVLKTGAAVATAVVLALTATACGGGSKDAASDGGASGGTKSDKIVIGIKFDQPGLGLKTPDGKFEGFDVDVATYVAKELGYQPDQIEWKQAVSAERENLISNGDVKFIAATYSINDKRKAKVDFAGPYFLAHQDLLVRADDSSITKVEDLNKKKLCSVTGSTSAQNIKKDLAKDADLQEFPGYSECLTGLENKAVDALTTDNSILAGYAAQEKNKGKFKLVGLSMSNENYGIGLKKGDKDLQTKINAALRKMVADGSWEAAVKKNLGPANYKNEPAPQITEGS

SEQ ID NO: 23190 - protein, 530 aa, Streptomyces sp. C
MTTEHQTLALILFSAFIAVTLGITTWVSRNRHGSAEEFYAGGRLFSPMENGFAIAGDYMSAASFLGISGLIALFGYDGLLYSVGFLVAWLVVLFLVAELVRNCGRFTLADVVAARMSERPVRIAAGTSSVVVSVLYLVAQMVGAGSLVGLLLSDSGPAARTLTVIGVGALMVVYVTFGGMRATTWIQIVKAVLLMGGAVALTVLVLLRFHGNLDQLLTGAAERSGHGARFLSPGLKYGGGWTTRVDFMSLGLALVLGTAGLPHILSRFYTVPTARAARRSVVWAIALIGGFYLMTVVLGFGAAALVGPDEVRASNASGNTAVPLLAAFLGGGAESTGGAVLFAIVAAIAFATILAVVAGITLASSASVAHDLYASLKRRRARQRSEVAVARIAAVGIGAVAIALGLLAQDLNVAFLVGLAFAVAASANLPVLLYSLFWRGFTTRGAVWSVYGGLVPAVLLVVLSPVVSGSPESLFPGVDFQYFPLQNPGIVSIPLGFLAGWLGTVTSAEEADERKHAETEVRSLTGAGAV

SEQ ID NO: 23191 - protein, 413 aa, Streptomyces sp. C
MTPASVGELQEVVRRAAEEGLRVKAVGTGHSFTAAAATDGVLVRPQALSGILAVDRTAGTVTVAAGTALKDLNRDLARQGLSLTNMGDIMEQTVSGATGTGTHGTGRDSASISAQIRALELVTADGRLMTCSEKENPEVFAAARVGIGALGVVTSITFAVEPLFLLTAREEPMRFDRVTAEFDQHVAENEHFEFYWFPHTGNCNTKRNNRSQGPAAPPGAVSAWIEDELLSNGLFQAVNSLGRAVPATIPSIARVASRALSARTYTDIPYRVFTSPRRVRFVEMEYALPRERAVEALRELKATVDRSGLRISFPVEVRTAPADDITLSTTSGRETAYVAVHMYRGTPYQAYFTAAERIFTAHGGRPHWGKVHSRDAEQLAAVYPRFAEFTAVRDRLDPDRLFGNDYLRRVLGD

SEQ ID NO: 23192 - protein, 497 aa, Streptomyces sp. C
MSTDQNSPFRTKTVEQSIRDTEEPEHALRKSLSAWDLTVFGVGVIIGTGIFVLTGIAARNNAGPATALSFVVSGVVCALAALCYAEFASTVPVAGSAYTFAYASIGELPAWIIGWDLVLEFALGTAVVAVGWSGYVRHLMHTNLGWDMPVALSGPDAGGTFDLMAFLLVIVLTAILVVGTKLSARITAVVVAIKVFVVLLVIVAGLFFVKADNYSPFIPPAKPQEGGSGWTAPLVQLLFGYEPTNFGVMGIFTAASLVFFAFIGFDVVATAAEETKNPQRDMPRGILGSLLICTLLYVAVTIVVTGMQYYAEMSPTAPLAEAFKSVNQPFFSGAISLGAAVGLITVSMILLLGQTRVFFAMSRDGLLPRVFSVTHPKYRTPYRATLLLGGIIAVIAGFTSLAKLAELVNIGTLFAFVIVALGVIILRKTRPDLHRSFRTPWVPVIPILSMAASLWLMLNLPAETWLRFGIWMAVGFVVYFLYGRRKSRLAQVGQDAR

SEQ ID NO: 23193 - protein, 568 aa, Streptomyces sp. C
MAATPETPAAAPAAAARRKTGRHRGEGQWAVGHHTPLNGNEQFKKDDDGLNVRTRIETIYSKTGFDSIDPNDLRGRMRWWGLYTQRKPGIDGGKTAILEPEELDDKYFMLRVRIDGGRLTTEQLRVIGEISEEFARGTADLTDRQNVQYHWIRIEDVPEIWRRLEAVGLSTTEACGDTPRVILGSPVAGIAQDEIIDGTPAIEEIYRRIVGNPDFSNLPRKFKSAVSGSPLLDVAHEINDIAFVGVNHPEHGPGFDVWVGGGLSTNPKLGVRLGTWVSLDEVPDVYEGVISIFRDYGYRRLRTRARLKFLVADWGPAKFRQVLEDEYLKRKLTDGPAPEQPSGQWRDHVGVHQQQDGRFYVGFAPRVGRVDGATLTKIADVAEQHGSGRLRTTAEQKMIVLDIEADQVDSVVAALEALDLRVKPSPFRRGTMACTGIEFCKLAIVETKARGASLIDELERRLPDFAEPLTININGCPNACARIQVADIGLKGQLVLDDDGNQVEGYQVHLGGALGLEAGFGRKVRGLKVTSAGLPDYVERVVKRFEEEREDGERFAAWVGRASDASLS

SEQ ID NO: 23194 - protein, 595 aa, Streptomyces sp. C
MPRMTAAAAAVEILKLEGVEQAFGVPGAAINPFYRELKNVGGIAHTLARHVEGASHMAEGYTRAQAGNIGVCIGTSGPAGTDMITGLYSAIADSIPILCITGQAPVSKLHKEDFQAVDIATIAKPVTKAATTVLEAAQVPGVFQQAFHLMRSGRPGPVLIDLPIDVQLTEIEFDPETYTPLPVYKPQASRAQAEKALGFLLEAERPLIVAGGGIINADASDLLVEFAELTGIPVISTLMGWGTIPDDHELAAGMVGVQTAHRYGNATFLESDTVIGIGNRWANRHTGYNLDAYTKGRKFVHVDIEPTQLGKIFAPDFGIASDAKVALELFIEVAKEWKAEGKLPDFSAWAASAQERKATLQRRTHFENIPMKPQRVYEEMNKAFGPETRYVTTIGLSQIAAAQFLHVYKPRHWVNCGQAGPLGWTIPAAIGAATAQPEVPVVALSGDYDFQFMIEELAVAAQHKVPYVHVLVNNAYLGLIRQAQGGLGINFEVNLEFENINTPEIGVYGVDHVKVAEGLGVKAIRVTDPDKLGEAFEEAKKLAQEFQVPVVVEAILERVTNIAMSKTVDMSDVTEFEELATEPGHAPTAIKALQV

SEQ ID NO: 23195 - protein, 296 aa, Streptomyces sp. C
MSNLPKIAWIGLGIMGSPMSENLLKAGYSVTGFTLEQDKLDRLAAAGGSAAGSIAEAVADADVIITMVPASPQVEAINYGPNGILENAKSGALIIDMSSITPQTSVDLAKNAAEKGIRVIDAPVSGGEAGAIEAVLSIMVGGEQADFDAALPILETLGKVIVLCGPHGSGQTVKAANQLIVAVNIQACAEAVVFLEKSGVNLEAALDVLNGGLAGSTVLTRKKDNFLNRDFKPGFRIDLHHKDMGIVTDAARNVGAALPVGAVVAQLVASLRAQGDGGLDHSALLRAVERLSGAQV

SEQ ID NO: 23196 - protein, 301 aa, Streptomyces sp. C
MKHTLRALALAALLLATTACGKSGSPPVKGPQPEDLPVYKVDTGFSLPESRTWQKARKRGRLVVGVKEDQPYMGEKDPASGRYSGFDIEIAKMMAASLGFDPKTIEFKTIASANRETALQNGQIDYYVGTYTINDNRKKQVGFAGPYFMAGQSLLVRRNEKDIKGPEDLAGKKVCSAAGSTPYQRLQREFPKAVLVAYDTYSVCVDNLLTYQVDAVSTDDSILLGYAAKVPEELKVVGEPFSKEPYGIGVPRGDDALRFALDDALEADEKNGDWKKAYEATLGLSGRPAPRPPAIDRYPAG

SEQ ID NO: 23197 - protein, 536 aa, Streptomyces sp. C
MLAVLAVVGWAALGKDSFDTASSTALAWVLANFAWLFVIAADVFLVMCVVLAISRFGRIRLGADDSEPEFGNLAWIAMMFSAGMGIGLMFYGVGEPLTHYLNPPPASGAAPGTGAAARAALDYSFFHWTLTPWAIYGIAGLALAYATFRKGRGNRLSSAFVPLMGEARAGGGPGKAIDLLAVFATVFGTATSLGLGALQVSKGLNITTGIEDSTGVELVIIASLSAAFVLSAFSGLHKGVKWLSTLNIVLAAALMLFVFVLGPTVYVLDVIPAGVGSYLHELLPMASRTGAFTDSAWLGAWTIFYWAWWLSWAPFVGTFIARISRGRTIREFLVGVLLVPSGATVVWFCVMGGTAIRLDSTGAADLASKVKEGAEASLFAMLDALPLGTLTSWVAMALVMTYFVTSADSASLVMGSLTSRGSLHPPTWLVVTWGVLMAAVAAVLLVAGGLKSLQTATILVALPFVIVMLLLCWALLKELREDPGAGPARHPALHGLRDAVKAMVGDAITEHGQTRHPRLRRVAGSRGRDREDGDGT

SEQ ID NO: 23198 - protein, 471 aa, Streptomyces sp. C
MTSTAAPPAEATAPAQAPPQESPQASRQGDRHARRFGLPVAVCLVMGNVIGGGIFLLPASVAPFGTISLLAFAVLTLGAIALALVFGRLAQRHPQTGGPYVYVRAAFGDFAGFLAAYSYWMTAWVSNAALAVASVGYLAVLFPAVGEHRWTMCLAALAVQWLPALSNLAGTRYVGAVQVVATVLKLVPLLLVAVGGLFFFDPANLGPFQATDQNPVGAVSASAAILLFSYIGVESAAVSAGEVRDPARNVGRATVLGTIGAATVYLLGTLSVFGLVAHDKLVSSEAPFTDAVNVMFGGSWGGTLVAGAAVVSMLGALNGWTLLSAQTPYAAAKDGLFPKAFEKKQRGVPVVGVVVTVVLASALTVYNYTAGSAAVFESLVLITTFTATVPYLLSTAAQLYFLASGQGERVRRGRLVRDAVLAGAAFAFSMWLVAGSGYAAVYQGVLFLFAGVLVYALMAARKRRAAGTAAE

SEQ ID NO: 23199 - protein, 353 aa, Streptomyces sp. C
MPVLTRLIPSPVVVDISRGAMDQLDGILADQRISASGRLAIAISGGSGQALRARLEPALPLADWYPVVDGTIDSAVKLADDIKGRRYDAVVGLGGGKIIDVAKYAAARVGLPMVAVATNLSHDGICSPVSILDNDNGRGSYGVPTPIAMVIDLDVIREAPTRFIRAGVGDAISNISAIADWELSHRITGESVDGLAAAMARTAGESVLRHPGGCGDDEFLTVLSEALVLSGIAMSISGDSRPSSGACHEISHAFDLLYPGRSALHGEQVGIGAAFAMHLRGAADQAGLFTEVLRRHGLPVLPEEIGFSVDEFVAAVEYAPQTRPGRFTVLEHLNLSAAEIRDAYADYAQTIRS

SEQ ID NO: 23200 - protein, 571 aa, Streptomyces sp. C
MRVYEAIVKGLEGVGVRAAFGGAGENAAGLMLALKHSKLIRPVITRHEQAASFMACGYAMYTNRLGFCFATAGPGAFNLFSGLAVAMSDSYPVLAVSGYASMEWRGWGSLNETSGLNRTPDSQAMFAATTKKSFLLTDAADTCDVLEEAVNTAFEGRPGPVHIHVPENLTHRGVEVRGFRPVRLDVAPVLPDPARVEEIADVLADALARGRRIVALVGFGAVRSGAGSEVKRLIERFRIPLLTTLDGKGIVSEGHPLSVGVFADSGHSSAWKAFREADVVLCVGNSLNQHATFNYRPDLFEGKVLIHVNISEGEFHKAYPPDHALLSDARPALAALTEALERRVGEVPPVEVAGRDYEARHITHLTGGIHPGQLAQSIGRMLPPRGVLLADAGAHLAWLGYYVELEEGQNFRKAGSFGPMAGHVNGAIGLKVAHPDRTVVVGCGDGCYSLSGFELMTAVENEIPVVWVVFNDGQFKLIKLFQLVTYGESALVEFRNPDFAAYARACGAEGYRVETLSEFEEAFRAALASGRPALIDARITRWAVPHYSPSPDGVIAGLVETVEERLRDAWD

SEQ ID NO: 23201 - protein, 139 aa, Streptomyces sp. C
MMRTMFKSKIHRATVTQADLHYVGSVTIDADLLDAADLLPGELVHIVDITNGARLETYVIEGERGSGVIGINGAAAHLVHPGDLVILISYAQVEDAEARALKPRVVHVDGDNRIVELGADPSAPVPGTDQERSPHSVAV

SEQ ID NO: 23202 - protein, 399 aa, Streptomyces sp. C
MSIRTVRDVYVVDAVRTPIGKFGGALAGARPDDLAAHVVRALVDRTPDLDPARIDDVVFGDANGAGEDNRDVARMAVLLAGLPVTVPGVTVNRLCGSGLEAVIQAARAIALGDASVAIAGGVESMSRAPWVVQKPERAFPAGHQQMWSTTLGWRMTNPRMPAEWTVSLGEGAELVAEKHGITREAQDAFALESHRKAAAAWADGLYDGEVVPYPGADLPRDECIREGSTPEALARLKPAFRTDGSGTVTAANASPLNDGAAALLLTDEEGLAATGREPLARISASAVTGIEPQLFGLGPVDAVERALGRAGRSLSDLTAFELNEAFAAQALGCLAAWPELDPAVVNPRGGAIAIGHPLGASGARLAGSVAHQLAAAGSGTGMAALCIGVGQGIALVLER

SEQ ID NO: 23203 - protein, 270 aa, Streptomyces sp. C
MKVPKAGAVATVIALAATASGCGGEAPKEPISIGIKFDQPGIGMREPDGTFTGFDVDVATYIAKELGYKANEIEFKQVYSSDRELLIQYNEVKFVAASYTINDKRREKVEFAGPYFVAHQDLMIRADDNSITKAEDLNNKRLCTVSGSTSAENIRKNLAPKASVLELGGYSECLVAIRDNTADAMTTDNSILAGYAARKENAGKFKLLGLNMSNENYGIGLKKGDNDLQRKINTAITKMVSDGSWEAAVKKNFGPANYKYEPAPQVTTGN

SEQ ID NO: 23204 - protein, 626 aa, Streptomyces sp. C
MDMEVTAWHSLHSAINAQQDRRPLSRASLRRIAAFARPHRRGLTLFLLLSVVGALLAVATPLLASRIVDTIVGHGDEGEVVRLALLIAVIAVAEAGLGLLTRKLSATLGEGLILDLRRAVFDHVQRMPVAFFTRTRTGALVSRLNNDVIGAQRAFSNTLSGVVSNIVTLLLTLGVMLTISWQITLLALVLLPVFVLPARRMGARMAGMQREASALNAAMGTQMTERFSAPGATLVKLFGRPSDESAEFAARAARVRDIGIRTAMAQSAFITALTLVSALALALVYGLGGYFALRGTLEAGSVVALALLLTRLYAPLTALAGARVEVMSAMVSFERVFEILDLEPLIAQKPDAVRVPDGPVSVEFDRVSFGYPSPDKVSLASLEEVAVLDARGGTRVLHEVSFRAEPGQMIALVGSSGAGKSTIAQLLPRLYDADAGAVRLGGVDVRDLTADSIRDTLGMVTQDGHLFHESVRANLLLARPGAGEDELWEALRRSRLDTLVASLPDGLDTVVGERGYRLSGGERQRLTIARLLLARQRVVILDEATAHLDSTSEAAVQEALAEALSGRTAVVIAHRLSTVQAADLILVVEDGRIVERGTHPELLAADGRYAELYRTQFATRGAPAAG

SEQ ID NO: 23205 - protein, 67 aa, Streptomyces sp. C
MASGTVKWFNAEKGFGFIEQDGGGADVFAHYSNIATQGYRELQEGQKVNFDVTQGQKGPQAENIVPA

SEQ ID NO: 23206 - protein, 765 aa, Streptomyces sp. C
MRRIGKELENQGLELRWAPSARDARAALQTEAGLAAAVVAWDLPRTAGGAVEEGGAEVLRHIGRRFKDLPVFLVMADDSDQDLERLPLWVSEAVVGYIWPLEDTPSFIAGRVATAARGYHRDLLPPFFKALRRFDDSHEYSWHTPAHSGGVAFLKSPAGRAFFDYYGERLFRTDLSVSVGELGSLFEHNGPIGEAERNAARVFGSDRTYFVLHGDSTADRMVGHYSVTTDEIALVDRNCHKSVLHGLVISGARPVYLVPTRNGYGLAGPLPPAVTDPAAVAATIARNPLTAGACSAEAQYAVVTNSTYDGLCYDTVAAARALAPSTPRLHFDEAWFAYARFHPLYAGRYGMAVGPDTFPDTGSGPGRPTVFATQSTHKLLAALSQCAMVHVKSAPRAPVEHERFNEAFMMHGTTSPLYPAIASLDVAAAMMDGPQGQWLIDEAVTEAVRFRQAVVRTGRRIAAAGDRPGWFFGVWQPETVTDPATGASVAFADAPPSLLSREPSCWHLEPGADWHGFAGLTEGYCLLDPVKVTLTCPGVTATGETGDWGIPARILTAYLASRGIVVEKTDSYTTLVLFSMGITKGKWGTLMDALMDFKALYDADAPLERVLPGLVEQFPLRYAGATLGGLCRGMHEHLTRADLITALDAAFQDLPEPVAPPRLCYQRLVRGGTERVRLAEAAGRVAAAMVTVTPPGIPVLMPGESTGTADGPLLRYLRALEAFDRAFPGFHSEAHGVTVDPGSGDYLIECVRPEALAGVVGPPAP

SEQ ID NO: 23207 - protein, 67 aa, Streptomyces sp. C
MATGTVKWFNAEKGFGFIAQDGGGPDVFAHYSAINSTGYRELQEGQAVTFDVTQGQKGPQAENINLA

SEQ ID NO: 23208 - protein, 363 aa, Streptomyces sp. C
MNQMCGIAGLAGGDALRHEKTVAAMGDSQHYRGPDGTMHAAARDGRAVLAMNTLLIVDPQAMPGPYLDRDTGILLAFNGEIYNWRTQAAAWGIEVGERESDAHFLLRAWAKIGPSCLDGLDGMFAIAVHDPRTAKLFLARDRLGEKPLYWRLDGGRLAFASEVTTLTGYGPAPLVLRPEVTAIETPVGVDTPFQGIQLLAPATLLTFDVTTGSIDQMTWWHLEDRAPFTGTYDAALARFSTILAEQIPLRSPACDFALLLSGGLDSAVLAYLMRPPVCVTVRYPGQDRLDESTTAAVIARDIGAELVVVEPDHADFTRALPHMMRALDYPMGNASTFSEHMAYRKIADLGLRVVVGGLGPDEF

SEQ ID NO: 23209 - protein, 593 aa, Streptomyces sp. C
MCGLTGEVRFDGGRPDLAAVERMTDALEARGPDGRGSWSQGAVALGHRRLQIIDLSERGAQPMVDTRLGLTVVFNGCVYNYRTLRARLEGLGHHFFSDSDTEVIVKAYAQWGRDCVRYLVGMFAFAVAEHRTGRVVLGRDRLGIKPLYVTEDSDRLRFASSLPALLAGGGVDTAIDPVALHQYLSWHGTVAAPRTVLAGVRKVPPATVRVVEPDGTHHDHCYWQPSYTRHSDLGHDPALWREAVHDALRTAVRRRTVADVPVGVLLSGGLDSSLMVAMLAEDGHEDVPTFAMGFEEENGETGDEFVYSDLVARRFSTDHRQFLIASDRLPAALDAAIGAMSEPMVSHDAVAFHLLSEQVSKEVKVVLCGQGADEVFAGYHWYPRIAAAARADAADTYARTYFDRTHTDLTAMIHPDLAPGHDTSTGFVRDHMAAPGADTALDAALRMDVHALMPDDPVKRVDNMTMAWGLEARVPFLDQDLVELAAACPPQLKLAQGGKAVLKDIARTVLPREVVDRPKGYFPVPAVRHMAGPVLARVRDALTSPEARRRGIFDEHCVAELLAAPNRHRARRGANTLWQVASLEIWLQAHGIH

SEQ ID NO: 23210 - protein, 319 aa, Streptomyces sp. C
MSDSGQMLLFSGRAHPALARAIAAELGTELVPTKAVDFANGEIYIRYQASVRGADCFVIQSHTAPVNKSIMEHLIMVDALKRASARSITVILPFYGYARQDRKHSGREPISARLVADLLKTAGADRILTVDLHADQIQGFFDGPVDHLFAMPVLADHIASKADPADLTVVSPDAGRVRVADGWCDRLGAPLAIVHKRRDKDVAHQVTAHEVVGEVRDRVCVLVDDMIDTGGTICAAADALFAQGARDVIVAATHGVLSGPAADRLKNSRVSEFVFTDTLPVPGALGLDKVTVLSIAPLIAGASREVFENGSVTRLLRSR

SEQ ID NO: 23211 - protein, 568 aa, Streptomyces sp. C
MTETVAAPPVRTTRTARPASAGKRPEGQWALDGHEPLNPNEEFKAAEDPLLVRDRIERIYSREGFASITPDDLRGRMRWWGLYTQRKPGIDGGRTASLPPEDLEDEHFMMRVRSDGGTLDAAQLRAIADISMRFARNTADVTDRQNIQLHWVRIEDVPTIWRRLEQVGLSTTEACGDCPRVIVGSPVAGVGADEILDATPAVREIAARYIGDPSLSNLPRKYKTAVSWLPDVPYEINDLAFLGAVHPEHGPGFGMWVGGGLSTVPILAQHVGVWIPLSDVPDVWVAVARLFRDYGYRRLRSRARLKFLVADWGVEKFRRVLEEEYLGRPLPDGPAPSLPPAPIDHIGVHRQRDGLSYVGAAPVAGRLSGTKLAALADLAESHGSGRVRLTPYQKLLVLDVADPEPLISALAEIGLQARPSPWRRNTMACTGIEYCKLAIVETKERAATLVKELEKRLANEEASLTINVNGCPNSCARTQVADIGLKGQLVPDENGRQVEGFQIHLGGTLTLSSDQQGTFGKKLRGLKTTAADLPDYVERLTRAYLADRTDPSESFTAWIARCDESSLQ

SEQ ID NO: 23212 - protein, 170 aa, Rosa luciae
DPLVVGRVIGDVLDPFTKSVSLRMTYSNNREVTSGCELKPSHVVNRPRVEIGGDDLRTFYTLVMVDPDAPSPSDPNLKEYLHWLVTDIPATTAASFGRELVSYETPRPAMGIHRFVSVLFRQLGRQTVYAPEWRQNFNTREFAENYNLGSPVAAVYYNCQRESGSGGRRV

SEQ ID NO: 23213 - protein, 341 aa, Actinomadura hibisca
MTEPEGPHAASLRLQSLLDGMRVAKVVQVLAELQVADAVADGPCKPAEIAADVGADPDALYRVLRCAASFGVFTEDEDGRFGLTPMAALLRTGTDDSHRDLFMMAAGDLWWRPYGELLETVRTGRPAAELAFGMPFYDYLGTDPAAAGLFDRAMTQVSKGQAKAILGRCSFERYARIADVGGGHGYFLAQVLRSSPRTEGVLLDLPHVVAGAPAVLEKHEVADRVQVVPGSFFDALPTGCDAYLLKAILINWPDADAERILHRVREAIGTDRDARLLVVEPVVPPGDVRDYSKATDIDMLAIIGGRQRTVAEWRRLLRAGGFELVGEPTPGRREVMECRPI

SEQ ID NO: 23214 - protein, 764 aa, Sinorhizobium meliloti
MPGIDKTDRAMTSVTAQEALDFHSQGRPGKLEISPTKPMATQRDLSLAYSPGVAVPVKAIADDPATAYDYTARGNMVAVISNGTAILGLGNLGALASKPVMEGKAVLFKRFADVDSIDLEVDTENVDEFVNCVRFLGPSFGGINLEDIKAPDCFIIEQRLREVMDIPVFHDDQHGTAIIAAAGLVNALTLTGRDFKTAKLVCNGAGAAAIACIELIKAMGFNPENIIFCDTKGVIYKGRTDGMNQWKSAHAVETDRRTLAEALDGADVFFGLSAKGALSADMVRSMGARPIIFAMANPDPEITPEEVALIRDDAIVATGRSDYPNQVNNVLGFPYIFRGALDVRASTINDAMKIAAAEALANLAKEDVPDDVAAAYQGNRPRFGPQYIIPVPFDPRLISAIPMAVAKAAMETGVARKPIEDLKAYGQQLSARRDPIASTLQRIVERVRRQPKRIVFAEGEEVQMMRSAIAYANQQLGTALLLGREEVMRETAEREGIDLDRAGIQIVNARLSKRVGAYTDFLYSRLQRKGYLFRDVQRLINTDRNHFAASMVALGDADGMVTGLTRNYSTALEDVRRCIDPKPGHRVIGVSIALCRGRTVLVADTAVHKHADLRGAGAMLAYSTFGHPSGERSERVREAVKILDRRRVDFEYDGEMAADVALNARVMEQYPFCRLSGTANVLVMPAFHSASISTKMLQELGGSTVIGPLLVGLDKSVQIASMSAKDSDLVNLAAIAAYNAGTRRGSAESRKTAGTSSVAASPDG

SEQ ID NO: 23215 - protein, 184 aa, Arabidopsis thaliana
MTRVYVGNLDPRVTERELEDEFKAFGVLRNVWVARRPPGYAFLEFDDERDALDAISALDRKNGWRVELSHKDKGGRGGGGGRRGGIEDSKCYECGELGHFARECRRGRGSVRRRSPSPRRRRSPDYGYARRSISPSGRRSPPRRRSVTPPRRYSRSPPYRGSRRDSPRRRDSPYGRRSPYANGV

SEQ ID NO: 23216 - protein, 200 aa, Arabidopsis thaliana
MSRVYVGNLDPRVTERELEDEFRAFGVVRSVWVARRPPGYAFLDFEDPRDARDAIRALDGKNGWRVAQSHNRGERGGGGRGGDRGGGGAGRGGRGGSDLKCYECGETGHFARECRNRGGTGRRRSKSRSRTPPRYRRSPSYGRRSYSPRARSPPPPRRRSPSPPPARGRSYSRSPPPYRAREEVPYANGNGLKERRRSRS

SEQ ID NO: 23217 - protein, 226 aa, Clostridium beijerinckii
MKLIIDDVNIEKIKDVFSIFQIDGVTSNPSILHKYGKQPYEILIKIREFIGENSELHVQVISESSEGMLKEAHKIIKELGKNTYVKIPVTRDGLKAIKILRKEEINVTATAIYTQMQAYLAGKAGAQYAAPYVNRIDNLGANGVQVAKDIHDIFEKNNFKTEVLAASFKNSQQVLELCKYGIGAATISPDVIEGLIKNDCVDVAVENFKKDFEILCGQGNTMLNCR

SEQ ID NO: 23218 - protein, 381 aa, Medicago sativa
MSCSVAVSNSPVFSPSSSLFCNKSETLTLSLSHLKPSSTTTTTTTSSSSSSSSPSPCSSPSSPFCLRLPKLPLVFTSNKDSGSQNDAVLKRKRPTRLNIPVSEHAFCVPATPSAVARDVVEAEGDGYSVYCKRGRREYMEDRYTAGVNLRGENNLAFFGVFDGHGGAKAAEFARNNLEKNILDEVIMTDEDDVEEAVKRGYLNTDSEFMKKDLHGGSCCVTAFIRNGNLVVSNAGDCRAVISRGGVAEALTSDHRPSREDEKDRIETLGGYVDLCRGVWRIQGSLAVSRGIGDRHLKQWVTAEPETKVIRIEPEHDLLILASDGLWDKVSNQEAVDIARQFCVGNNNQQPLMACKKLAQLSVSRGSLDDTSVMIIKFKHYV

SEQ ID NO: 23219 - protein, 996 aa, Oryza longistaminata
MISLPLLLFVLLFSALLLCPSSSDDDGDAAGDELALLSFKSSLLYQGGQSLASWNTSGHGQHCTWVGVVCGRRHPHRVVKLRLRSSNLTGIISPSLGNLSFLRTLQLSNNHLSGKIPQELSRLSRLQQLVLNFNSLSGEIPAALGNLTSLSVLELTNNTLSGSIPSSLGKLTGLYNLALAENMLSGSIPTSFGQLRRLSFLSLAFNHLSGAIPDPIWNISSLTIFEVVSNNLTGTLPANAFSNLPNLQQVFMYYNHFHGPIPASIGNASSISIFTIGLNSFSGVVPPEIGRMRNLQRLELPETLLEAEETNDWKFMTALTNCSNLQEVELAGCKFGGVLPDSVSNLSSSLVSLSIRDNKISGSLPRDIGNLVNLQYLSLANNSLTGSLPSSFSKLKNLRRLTVDNNRLIGSLPLTIGNLTQLTNMEVQFNAFGGTIPSTLGNLTKLFQINLGHNNFIGQIPIEIFSIPALSEILDVSHNNLEGSIPKEIGKLKNIVEFHADSNKLSGEIPSTIGECQLLQHLFLQNNFLNGSIPIALTQLKGLDTLDLSGNNLSGQIPMSLGDMTLLHSLNLSFNSFHGEVPTNGVFANASEIYIQGNAHICGGIPELHLPTCSLKSRKKRKHQILLLVVVICLVSTLAVFSLLYMLLTCHKRRKKEVPATTSMQGHPMITYKQLVKATDGFSSSHLLGSGSFGSVYKGEFDSQDGEITSLVAVKVLKLETPKALKSFTAECETLRNTRHRNLVKIVTICSSIDNRGNDFKAIVYDFMPNGSLEDWLHPETNDQAEQRHLTLHQRVTILLDVACALEHLHFHGPEPIVHCDIKSSNVLLDADMVAHVGDFGLARILVEGSSLMQQSTSSMGIRGTIGYAAPEYGVGNTASTHGDIYSYGILVLETVTGMRPADSTFRTGLSLRQYVEPGLHGRLMDVVDRKLGLDSEKWLQARDVSPRSSITECLVSLLRLGLSCSQELPSSRTQAGDVINELRAIKESLSMSSDM

SEQ ID NO: 23220 - protein, 423 aa, Streptomyces sp. NRRL 5331
MGLVVQKYGGSSVADAEGIKRVAKRVVDAKRNGNQVVVVVSAMGDTTDELIDLAEQVSPIPAGREFDMLLTAGERISMALLAMAIKNLGHEAQSFTGSQAGVITDSVHNKARIIDVTPGRIRTSIDEGNIAIVAGFQGVSQEGKNITTLGRGGSDTTAVALAAALDAEVCEIYTDVDGVFTADPRVVKKAKKIDWISFEDMLELAASGSKVLLHRCVEYARRYNIPIHVRSSFSGLRGTWVSNEPQGDQKVEHAIISGVAHDVSEAKVTVVGVPDKPGEAAAIFRAIANAEVNIDMVVQNVSAASTGLTDISFTLPKAEGRKAIDALERAKGSIGFESLRYDDQIAKISLVGAGMKTNPGVTAGFFEALSDAGVNIELISTSEIRISVVTRADDVNEAVRAVHTAFGLDSDSDEAVVYGGTGR

SEQ ID NO: 23221 - protein, 295 aa, Digitalis lanata
GEVFTEITKPGLEPYVGLHYPATDIPQAARFLFMKNKVRMICDCRAKHVKVVQDEKLPLDLTLCGSTLRAPHTCHLQYMENMDSIASLVMSIVINEGDEEGSEPVQVQNRKRLWGLVVCHNTTPRFVPFPLRYACEFLAQVFSIHVNKELELENQMFEKNILRTQTLLCDMLLRDAPLGIVSQSPNVMDLVKCDGAALLYKDKKYKLGLTPTDFQIRDIVSWLDEYHRDSTGLSTDSLYDAGFPGALSLGGSISGMAAVKISEKDWLFWFRSHTAAEVRWGGAKHEPGEKDDGSR

SEQ ID NO: 23222 - protein, 1126 aa, Physcomitrella patens
MSTTKLAYSSGSSVKSKHSVRVAQTTADAKLQAVYEESGDSGDSFDYSKSVHASKSTGENVPALAVTAYLQRMQRGGLVQTFGCMLCVDESSFRVIAYSENAPEMLDLMPQAVPSVGQQEVLGIGTDARTLFTPSSAAALEKCAGAVDVTMLNPISVHCRSSGKPFYAILHRIDVGLVIDFEPVRPNDAVVSSAGALQSHKLAAKAISRLQALPGGDIGLLCDTVVEEVRQLSGYDRVMAYKFHEDEHGEVLAEIRRSDLEPYLGLHYPATDIPQASRFLFMKNRVRMIGDCYAPPVKVVQDKDLRQPISLAGSTLRAPHGCHAQYMGNMNSIASLVMAVIVNDPDEDPNSRGGQQRGRKLWGLVVCHHTSPRTVSFPLRSACEFLMLVFGLQLNMEVELAAQLREKHILRTQTLLCDMLLRDAPIGIVSQSPNIMDLVKCDGAALYYGKRFWLLGITPNEVQIKEIADWFLEHHQDSTGLSTDSLADAGYPGAAQLGDAVCGMAAAKITPRDFLFWFRSHTAKEIKWGGAKHDPDEKDDGRKMHPRSSFKAFLEVVKRRSLPWEDIEMDAIHSLQLISRGSFQDIDDSDTKTMIHARLNDLKLQGMDELSTVANEMVRLIETATAPILAVDSSGFINGWNAKVAELTGLPVGEAMGRSLVKDLILEESIDVVQRLLYLALQGEEEQNIEIQLKTFGPQKEKGAVILIVNACSSRDVQDNVVGVCFVGQDVTGQKQVLDKFTRIQGDYKAIVQNPNPLIPPIFGTDEYGYCSEWNPSMEKLTGWKREEVLGKLLVGEIFGMQLMCCRLKGQDAMTKFMIALNSAMDGQDTDRFPFSFFDRQGKYVDALLTVNKRTDAEGSITGVFCFLHTTSVELLQALTVQRATEKVAFAKLKELAYIRQEIKNPLYGIMFTRNLMEDTDLSEDQRQFVETSAVCERQLRKVLDDMDLESIEDGYLELDTNEFVMGTVMDAVVSQGMITSREKGLQLIRETPREIKNMCLFGDQVRLQQVLADFLLNAVKFTPSSGGWVGIKVVPTKKRLGGGIHVMHLEFRVTHSGMGLPEELVHEMFDRGRGMTQEGLGLSMCRKLVKLMNGNVQYIRETGKSYFLVEVELPLAQRDDAGSVR

SEQ ID NO: 23223 - protein, 1123 aa, Physcomitrella patens
MSTPKKTYSSTSSAKSKAHSVRVAQTTADAALQAVFEKSGDSGDSFDYSKSVSKSTAESLPSGAVTAYLQRMQRGGLTQSFGCMIAVEGTGFRVIAYSENAPEILDLVPQAVPSVGEMDTLRIGTDVRTLFTASSVASLEKAAEAQEMSLLNPITVNCRRSGKQLYAIAHRIDIGIVIDFEAVKTDDHLVSAAGALQSHKLAAKAITRLQALPGGNIGLLCDTVVEEVRELTGYDRVMAYRFHEDEHGEVVAEIRRADLEPYLGLHYPGTDIPQASRFLFMKNKVRIIADCSAPPVKVIQDPTLRQPVSLAGSTLRSPHGCHAQYMGNMGSIASLVMAVIINDNEEDSHGSVQRGRKLWGLVVCHHTSPRTVPFPLRSACGFLMQVFGLQLNMEVELAAQLREKHILRTQTLLCDMLLRDAPIGIVSQIPNIMDLVKCDGAALYYGKRFWLLGTTPTESQIKDIAEWLLEYHKDSTGLSTDSLADANYPAAHLLGDAVCGMAAAKITAKDFLFWFRSHTAKEIKWGGAKHDPGEKDDGRKMHPRSSFKAFLEVVKRRSLPWEDVEMDAIHSLQLILRGSFQDIDDSDTKTMIHARLNDLKLHDMDELSVVANEMVRLIETATAPILAVDSNGMINGWNAKIAQVTGLPVSEAHGRSLVKDLVTDESVAVVERLLYLALRGEEEQNVEIKLKTFGTQTEKGVVILIVDACSSIHVSENVVGVCFVGQDVTGQKMFMDKFTRIQGDYKTIVQNPHPLIPPIFGADEFGYCFEWNPAMEGLTGWKKDEVVGKLLVGEIFGMQMMCCRMKSQDAMTKFMIALNTAMDGQSTDKFTFSFFDREGKYVDVLLSTNKRTNADGVITGVFCFLQIASSELQQALKVQRATEKVAVAKLKELAYIRQEIKNPLCGITFTRQLLEDTDLSDDQQQFLDTSAVCEQQLQKVLNDMDLESIEDGYLELDTAEFEMGTVMNAVISQGMTTSREKGLQIFRETPREINTMRLLGDQIRLQQVLSDFLLNTVRFTPSPEGWVKIKVVPTRKRLGGSVHVVHLEFRVSHPGAGLPEELVLEMYDRGKGMTQEGLGLNMCRKLVRLMNGDVHYVREAMQCYFVVNVELPMAQRDDASSQM

SEQ ID NO: 23224 - protein, 1130 aa, Physcomitrella patens
MSTPKLAYSSGSSVKSKHSVRVAQTTADAKLQAVYEESGDSGDSFDYSKSVHASKSTGENVSAQAVTAYLQRMQRGGLMQTFGCMLCVEESNFRVIAFSENAPEMLDLMPQAVPSVGQQEVLGIGTDARTLFTPSSAAALEKCAGTVDVTMLNPISVHCRSSGKPFYAILHRIDVGLVIDFEPVRSNDAIVSSAGVLQSHKLAAKAISRLQALPGGDIGLLCDIVVQEVRELSGYDRVMAYKFHEDEHGEVLAEIRRSDLEPYLGLHYPATDIPQASRFLFMKNKVRMIGDCFASPVKVIQDKDLRQPISLAGSTLRAPHGCHAQYMGNMNSIASLVMAVIVNDPDEDPNARGGQQRGRKLWGLVVCHHTSPRTVSFPLRSACEFLMQVFGLQLNMEVELAAQLREKHILRTQTLLCDMLLRDAPIGIVSQSPNIMDLVKCDGAALHYGKRFWLLGITPNDAQIKEIADWLLEHHQDSTGLSTDSLADAGYPGAAQLGDAVCGMAAAKITSKDFLFWFRSHTAKEIKWGGAKHDPDEKDDGRKMHPRSSFKAFLVVVKRRSLPWEDIEMDAIHSLQLILRGSFQDIDDSDTKTMIHARLNDLKLQDMDELSTVANEMVRLIETATAPILAVDSGGFINGWNAKVAELTGLPVEEAMGRSLVKDLILNESIDVVQRLLHLALQGDEEQNIEIQLKTFGPQKEKGAVILIVNACSSRDVQDNVVGVCFVGQDVTGQKQVLDKFTRIQGDYKAIVQNPNPLIPPIFGTDEYGYCSEWNPSMEKLTGWKREEVIGKLLVGEIFGIQLMCCRLKSQDAMTKFMIVLNGAMDGQDTDRFPFSFFDRQGKYVDPLLTVNKRTDAEGSITGVFCFLHTTSVELLQALTVQRSTEKVAFAKLKELAYIRQEIKNPLYGIVFTRNLMEDTDLSVDQRQLVETSAVCERQLRKILDDLDLESIEDGYLELDTTEFEMGTVMDAVVSQGMITSREKGLQLIRETPSEIKNMCLYGDQVRLQQVLADFLLNAVRFTPSSEGWVGIKVVPTKKRLGRGVHVMHVEFRVTHPGLGLPEELVHEMFGRGRGMTQEGLGLSMCRKLVKLMNGTVQYIRETGKSCFLVEVELPLAQRDDAGSVRSTVV

SEQ ID NO: 23225 - protein, 1122 aa, Physcomitrella patens
MSAPKKTYSSTSSAKSKAHSVRVAQTTADAALHAVFEKSGVSGDNFDYSKSVSKSTAGSLHTGAVTAYLQRMQRGGLTQSFGCMVAVEETGFRVIAYSENAPEFLDLMPQAVPNIGEINTLGIGTDVRTLFTPSSAASLEKAAETQEISLLNPITVYCRSKKPLYAIAHRIDIGIVIDFEAVNMNDVTISADGALQSHKLAAKAITRLQALPGGDIGLLCDTVVEEVRELTGYDRVMAYKFHEDEHGEVVAEIRRTDLEPYLGLHYPATDIPQASRFLFMKNRVRMIGDCSAPPEKIVQDPNLRQPVSLAGSTLRSPHGCHAQYMGNMGSISSIVMAVIINDNEDDSRGSVQRGRKQWGLVVCHHTSPRTVPFPLRSACEFLMQVFGLQLNMEVELAAQLREKHILRTQTLLCDMLLRDAPTGIVSQVPNIMDLVKCDGAALYYGKRFWLLGTTPTESQIKDIAEWLLEYHKDSTGLSTDSLADANYPAAHLLGDAVCGMAAAKITSKDFLFWFRSHTAKEIKWGGAKHDPGEKDDNRKMHPRSPFKAFLEVVKRRSLPWEDVEMDAIHSLQLILRGSFQDIDDSDTKTMIHARLNDLKLHDMDELSIVANEMVRLIETATAPILAVDSNGMINGWNAKIAQETGLPVAEAMGRSLVKDLVMDESLEVVERLLYLALRGEEEQGVEIKLKTFGAQTVKGAVTLIVNACASRDVSENVVGVCFVGQDVTGQKMFMDKFTRIQGDYKTIVQNPHPLIPPIFGADEFGYCFEWNPAMEGLTGWKRDEVIGKLLVGEIFGMQKMCCQMKSQDAMTKFMISLNSAMDGQNTDKFSLSFFDREGRYVDALLSTNKRTNADGAITGVICFLQIASSELQQALRVQQATEKVAIAKLKELAYIRQEIKNPLCGITFTRQLLEDTDLSNDQKQFLDTSAVCEQQLQKVLNDLDLESIEDGYLELDTAEFEMRTVMDAVISQGMTISREKGLQIIRETPREIITMRLFGDQVRLQQVLSDFLLNAVRFTPSSEGWVKIKVVPTRKRLGGNEHVMHLEFRVSHPGAGLPEELVLEMFDKGKGMTQEGLGLNICRKLVRLMNGDVQYVREAMQCYFVLYVELPLAQQDDAASQM

SEQ ID NO: 23226 - protein, 1126 aa, Ceratodon purpureus
  misc_feature (344)..(344): Xaa can be any naturally occurring amino acid
  unsure (1)..(1126): unsure at all Xaa locations
MASAKMAYSSGSGIKSKHSVRVAQTTSDAKLQAVYEESNDSGDSFDYSKSVAQAAKSTGQQQVPAQAVTAYLQRMQRGGLTQTFGCMLAVEENTFRVIAYSENAPELLDVMPQAVPSLGQQDVLGIGTDARSLFTPSSATALERAAGAADLSLVNPISVHSRASGKPFYAIIHRIDVGIVMGFEPVRPNDVIVSTAGTLHSHKLAAKAIARLQALSGGDIGLLCDTVVEEVRELTGYDRVMAYKFHEDEHGEVLAEIRRSDLEPYLGLHYPSTDIPQASRFLFMKNRVRMIVDCWAPPVKVIQDKDLRQPISLAGSTLRAPHGCHAQYMGNMGSVASVTMAVIXNDQEDDFGGQQTRARRLWGLVVCHHTSARTISFPLRSACEFLMQVFGLQLNMEVELENQKREKHILRTQTMLCDMLLRDAPVGIVSQCPNIMDLVKCDGAALYYGKRFWLLGITPSEEQIEEIANWLLEHHQDSTGLSTDSLADAGYPGANLLGDAVCGMAAARITPTDFLFWFRSHTAKEIKRGGAKHEADDKDDGRKMTPRSSFNAFLEVMKRRSVPWEDIEMDAIHSLQLILRGSFQDIDDSDTKTMIHARLNDLKLQGMDELSTVANEMVRLIETATAPILAVDSNGFINGWNAKVAELTGLPVGDAMGRSLVQDLIVDESVEVVERLLYLALQGDEEQDVEIQLRTFGPQKGKGAVILIVNACSSRDVQDNVVGVCFVGQDVTSQKQVHDKFTRIHGDYKSIVQNPNPLIPPIFGSDELGYCTEWSPSMEKLTGWKRDEVLGKMLVGEVFGTQQICCRLKGQDSVTKFMIVLNNAMDGQDTDKYPFSFYDRQGKFVEALLTANKRTDADGYITGVFCFLHIASPELLQALTVQRATEKVAFAKLKELAYIRQEIKNPLYGIMFTRNLMEDTDLSDEQKQFMDTSAVCERQLRKILDDMDLESIEDGYLELETAESELGSMMDAVVSQGMITSREKGLQLIRETPREINDMSLFGDQVRLQHVLADFLLNAVRLTPSSEGWVGIKVVPTKKRLGGGFHVVHLEFRVAHPGSGLPEELVHEMFDRGRGMTQEGLGLSMCRKLVKLMNGEVKYIRDTGKSYFLVNLELPLTVRDESGMLR

SEQ ID NO: 23227 - protein, 315 aa, Gaeumannomyces graminis var. tritici
MTSKDDIRIMGMPPFMIDFLMGGVSAAVSKTAAAPIERIKLLVQNQEEMLKAGRLDRRYDGIMDCFRRTTADEGVMALWRGNTANVIRYFPTQALNFAFRDKFKKMFGYRKEKDGYAKWMAGNLASGGAAGATSLLFVYSLDYARTRLANDNKSAKGGGARQFNGLVDVYRKTLASDGIAGLYRGFGPSVAGIVVYRGLYFGMYDSIKPVVLTGNLETNFLASFALGWCVTTGAGIASYPLDTVRRRMMMTSGEAVKYSSSLDAFRQIVAKEGVKSLFKGAGANILRGVAGAGVLSIYDQLQLIIFGKAFKGGSG

SEQ ID NO: 23228 - protein, 245 aa, Solanum lycopersicum
MDSSSSSSQFFYSMNSDLNSSDSSYEWSNFNTQSYLPFNVNDSEEMLLFGVLNAAHEETTSETVTSHRVKEEEVTSESEVIEAIPAKEKSYRGVRRRPWGKFAAEIRDSTRNGVRVWLGTFDSAEDAALAYDQAAFSMRGNSAILNFPVETVRDSLRDMKCHVDDDCSPVVALKKRHSMRKRSTNSKKVNSISKVVREVKMENVNNVVVFEDLGADYLEQLLSTSCQVIKVVVMQLISVHGKIKD

SEQ ID NO: 23229 - protein, 563 aa, Candida glabrata
MSEITLGRYLFERLNQVDVKTIFGLPGDFNLSLLDKIYEVEGMRWAGNANELNAAYAADGYARIKGMSCIITTFGVGELSALNGIAGSYAEHVGVLHVVGVPSISSQAKQLLLHHTLGNGDFTVFHRMSANISETTAMVTDIATAPAEIDRCIRTTYITQRPVYLGLPANLVDLKVPAKLLETPIDLSLKPNDPEAETEVVDTVLELIKAAKNPVILADACASRHDVKAETKKLIDATQFPSFVTPMGKGSIDEQHPRFGGVYVGTLSRPEVKEAVESADLILSVGALLSDFNTGSFSYSYKTKNIVEFHSDYIKIRNATFPGVQMKFALQKLLNAVPEAIKGYKPVPVPARVPENKSCDPATPLKQEWMWNQVSKFLQEGDVVITETGTSAFGINQTPFPNNAYGISQVLWGSIGFTTGACLGAAFAAEEIDPKKRVILFIGDGSLQLTVQEISTMIRWGLKPYLFVLNNDGYTIERLIHGEKAGYNDIQNWDHLALLPTFGAKDYENHRVATTGEWDKLTQDKEFNKNSKIRMIEVMLPVMDAPTSLIEQAKLTASTNAKQ

SEQ ID NO: 23230 - protein, 659 aa, Chlamydophila abortus
MSEQKKSSKIIGIDLGTTNSCVSVMEGGQAKVIVSSEGTRTTPSIVAFKGNETLVGIPAKRQAVTNPAKTLASTKRFIGRKYSEVESEIKTVPYQVASGSNGDVVFPIDGKQFTPEEIGAQVLIKMKETAEAYLGEPVTEAVITVPAYFNDSQRASTKDAGRIAGLDVKRIIPEPTAAALAYGIDKAGDKKIAVFDLGGGTFDISILEIGDGVFEVLSTNGDTHLGGDDFDEVIIKWMIEEFQKQEGIDLSKDNMALQRLKDAAEKAKIELSGMSSTEINQPFITMDANGPKHLTLTLTRAHFEKLASNLIERTKAPCQKALADAKLSASDIDDVLLVGGMSRMPAVQEVVKSIFGKEPNKGVNPDEVVAIGAAIQGGVLGGEVKDVLLLDVIPLSLGIETLGGVMTPLVERNTTIPTQKKQIFSTAADNQPAVTIVVLQGERPMAKDNKEIGRFDLTDIPPAPRGHPQIEVTFDIDANGILHVSAKDAASGREQKIRIEASSGLKEDEIQRMINDAEKNKEEDKKRREASDVRNEADSMIFRAEKAISDYKENIPESLTKEIEERIEKVRSALKEDAPTEKIKEASDELSRHMQKIGEAMQSQSASAAANAQDGPNINTEDLKKHSFSTKPPTGNSSSSANNENIEEADVEIVDKPND

SEQ ID NO: 23231 - protein, 514 aa, Solanum tuberosum
MDGTAVQGTSSVDSFLRNYKLGKTLGIGSFGKVKIAEHTLIGHKVAVKILNRRKIRNMDMEEKVSREIKILRLFMHGHISRLYEVIETPSDIYVVMEYVKSGELFDYIVEKGRLQEDEARNFFQQIISGVEYCHINMVVHRDLKPENLLLDSKWNVKIADFGLSNIMRDGHFLKTSCGSPNYAAPEVISGKLYAGPEVDVWSCGVILYALLCGTLPFDDENIPNLFKKIKGGYITLPSHLSAGARDLIPRMLIVDPMKRMTIPEIRLHPWFQAHLPRYLAVPPPDTMQQAKKIDEEILQEVVKMGFDRNNLTESLRNRVQNEGTVPYYLLLDNRHRVSTGYLGAEFQESMEYGYNRINSNETAASPVGQRFPGIMDYQQAGARQFPIERKWALGLQSRAHPREIMTEVLKALQELNVCWKKIGQYNMKCRWVPSVPGHHEGMGVNSMHGNQFFGDDSSIIENDGDTKLTNVVKFEVQLYKTREEKYLLDLQRIQGPQFLFLDLCAAFLAQLRVL

SEQ ID NO: 23232 - protein, 690 aa, Ophiorrhiza pumila
MDTKLELIRSIESALGVSLGDDVNQILLVLTTSLAVIVGLLMFLWKRSGDRGKEIKPVGCSQGCALLVEEEKEEVDPTKVKVTVFFGTQTGTAEGFAKALSEEIKARYEKAVFKVFDLDDYAADDDQYEEKLKKETLAFFMLATYGDGEPTDNAARFYKWFTEGKEREPWLQQLTYGVFGLGNRQYEHFNKIGNVIHEQLSEQGAKRIVPVGLGDDDQCIEDDFAAWREQLWPELDQILRDEDDATSAATPYTAAILEYRVVIHNSEAASYEDKQFSMANGNSSYDIHHPCIVNVAVQRELHKPESDRSCIHLEFDISGTGINYETGDHVGVYAENCDGTVEQAAKVLGQPLDLVFSIHADKEDGTSLGGSLPPPFPGPCSLRTALARYADLLNYPRKAALVALAAHASEPSEAERLKFLSSPQGKDEYAQGIVGNQKSLLEVMAEFPSAKPPLGVFFAAMAPRLPPRYYSISSSPRFAPNRVHVTCALVYGPTPTGRIHKGICSTWMKNAVPSERSHECSKAPIFIRSSNFKLPADPSTPIIMVGPGTGLAPFRGFLQERLALKELGAQLGPALLFFGCRNRRMDFIYEDELSGFVNQGVISELIVAFSREGPQKEYVQHKMTEKAAQFWSLISQVGYLYVCGDAKGMARDVHRTLHTIVQEQENVDSSKAEAIVKKLQTDGRYLRDVW

SEQ ID NO: 23233 - protein, 604 aa, Escherichia coli CFT073
MFMSLSANCLSKIGRLMCFTHFFRQTVRQAMEMLSGAEMVVRSLIDQGVKQVFGYPGGAVLDIYDALHTVGGIDHVLVRHEQAAVHMADGLARATGEVGVVLVTSGPGATNAITGIATAYMDSIPLVVLSGQVATSLIGYDAFQECDMVGISRPVVKHSFLVKQTEDIPQVLKKAFWLAASGRPGPVVVDLPKDILNPANKLPYVWPESVSMRSYNPTTSGHKGQIKRALQTLVAAKKPVVYVGGGAITAGCHLQLKEAVEVLNLPVVSSLMGLGAFPATHRQALGMLGMHGTYEANMTMHNADVIFAVGVRFDDRTTNNLAKYCPNATVLHIDIDPTSISKTVTADIPIVGDARQVLEQMLELLSQESAHQPLDEIRDWWQQIEQWRARQCLKYDTHSEKIKPQAVIETLWRLTNGDAYVTSDVGQHQMFAALYYPFDKPRRWINSGGLGTMGFGLPAALGVKMALPEETVVCVTGDGSIQMNIQELSTALQYELPVLVVNLNNRYLGMVKQWQDMIYSGRHSQSYMQSLPDFVRLAEAYGHVGIQISHPQELESKLSEALEQVRNNRLVFVDVTVDGSEHVYPMQIRGGGMDEMWLSKTERT

SEQ ID NO: 23234 - protein, 632 aa, Escherichia coli CFT073
MVSYFYPSLKSPHSIKPVKNYRSINKYTQKPSPFSSISNRHYVFYFSTAKSLAHRAALRHFFNKQTQHAVNTRLTEKVMCSIFGVFDIKTDAVELRKKALELSRLMRHRGPDWSGIYASDNAILAHERLSIVDVNAGAQPLYNQQKTHVLAVNGEIYNHQALRAEYGDRYQFQTGSDCEVILALYQEKGPEFLDDLQGMFAFALYDSEKDAYLIGRDHLGIIPLYMGYDEHGQLYVASEMKALVPVCRTIKEFPAGSYLWSQDGEIRSYYHRDWFDYDAVKDNVTDKNELRQALEDSVKSHLMSDVPYGVLLSGGLDSSIISAITKKYAARRVEDQERSEAWWPQLHSFAVGLPGSPDLKAAQEVANHLGTVHHEIHFTVQEGLDAIRDVIYHIETYDVTTIRASTPMYLMSRKIKAMGIKMVLSGEGSDEVFGGYLYFHKAPNAKELHEETVRKLLALHMYDCARANKAMSAWGVEARVPFLDKKFLDVAMRINPQDKMCGNGKMEKHILRECFEAYLPASVAWRQKEQFSDGVGYSWIDTLKEVAAQQVSDQQLETARFRFPFNTPTSKEAYLYREIFEELFPLPSAAECVPGGPSVACSSAKAIEWDEAFKKMDDPSGRAVGVHQSAYK

SEQ ID NO: 23235 - protein, 244 aa, Escherichia coli CFT073
MRQLFREFSRDSLHSDKKYILRMVMELYLDTSDVVAVTALSRIFPLAGVTTNPSIIAAGKKPLEVVLPQLHEAMGGQGRLFAQVMATTAEGMVNDARKLRSIIADIVVKVPVTAEGLAAIKMLKAEGIPTLGTAVYGAAQGLLSALAGAEYVAPYVNRIDAQGGSGIQTVTDLHQLLKMHAPQAKVLAASFKTPRQALDCLLAGCESITLPLDVAQQMISYPAVDAAVAKFEQDWLGAFGRTSI

SEQ ID NO: 23236 - protein, 582 aa, Escherichia coli CFT073
MIFFRHHKEWKMSSMTTTDNKAFLNELARLVGHSHLLTDPAKTARYRKGFRSGQGDALAVVFPGSLLELWRVLKACVTADKIILMQAANTGLTEGSTPNGNDYDRDIVIISTLRLDKLHVLGKGEQVLAYPGTTLYSLEKALKPLGREPHSVIGSSCIGASVIGGICNNSGGSLVQRGPAYTEMSLFARINEDGKLTLVNHLGIDLGETPEQILSKLDDDRIKDDDVRHDGRHAHDYDYVHRVRDIEADTPARYNADPDRLFESSGCAGKLAVFAVRLDTFEAEKNQQVFYIGTNQPEVLTEIRRHILANFENLPVAGEYMHRDIYDIAEKYGKDTFLMIDKLGTDKMPFFFNLKGRTDAMLEKVKFFRPHFTDRAMQKFGHLFPSHLPPRMKNWRDKYEHHLLLKMAGDGVGEAKSWLVDYFKQAEGDFFVCTPEEGSKAFLHRFAAAGAAIRYQAVHSDEVEDILALDIALRRNDTEWYEHLPPEIDSQLVHKLYYGHFMCYVFHQDYIVKKGVDVHVLKEQMLELLQQRGAQYPAEHNVGHLYKAPETLQKFYRENDPTNSMNPGIGKTSKRKNWQEVE

SEQ ID NO: 23237 - protein, 394 aa, Escherichia coli CFT073
MMKDVVIVGALRTPIGCFRGALAGHSAVELGSLVVKALIERTGVPAYAVDEVILGQVLTAGAGQNPARQSAIKGGLPNSVSAITINDVCGSGLKALHLATQAIQCGEADIVIAGGQENMSRAPHVLTDSRTGAQLGNSQLVDSLVHDGLWDAFNDYHIGVTAENLAREYGISRQLQDAYALSSQQKARAAIDAGRFKDEIVPVITQSNGQTLVVDTDEQPRTDTSAEALARLNPSFDSLGSVTAGNASSINDGAAAVMMMSEAKARALNLPVLARIRAFASVGVDPALMGIAPVYATRRCLERVGWQLADVDLIEANEAFAAQALSVGKMLEWDERRVNVNGGAIALGHPIGASGCRILVSLVHEMVKRNARKGLATLCIGGGQGVALTIERDE

SEQ ID NO: 23238 - protein, 1522 aa, Escherichia coli CFT073
MRGARMTRKPRRHALTVPVRSGSEVGFPQSLGEVHDMLYDKSLERDNCGFGLIAHIEGEPSHKVVRTAIHALARMQHRGAILADGKTGDGCGLLLQKPDRFFRIVAQERGWRLAKNYAVGMLFLNKDPELAAAARRIVEEELQRETLSIVGWRDVPTNEGVLGEIALSSLPRIEQIFVNAPAGWRPRDMERRLFIARRRIEKRLEADKDFYVCSLSNLVNIYKGLCMPADLPRFYLDLADLRLESAICLFHQRFSTNTVPRWPLAQPFRYLAHNGEINTITGNRQWARARTYKFQTPLIPDLHDAAPFVNETGSDSSSMDNMLELLLAGGMDIIRAMRLLVPPAWQNNPDMDPELRAFFDFNSMHMEPWDGPAGIVMSDGRFAACNLDRNGLRPARYVITKDKLITCASEVGIWDYQPDEVVEKGRVGPGELMVIDTRSGRILHSAETDDDLKSRHPYKEWMEKNVRRLVPFEDLPDEEVGSRELDDDTLASYQKQFNYSAEELDSVIRVLGENGQEAVGSMGDDTPFAVLSSQPRIIYDYFRQQFAQVTNPPIDPLREAHVMSLATSIGREMNVFCEAEGQAHRLSFKSPILLYSDFKQLTTMKEDHYRADTLDITFDVTKTTLEATVKELCDKAEKMVRSGTVLLVLSDRNIAKDRLPVPAPMAVGAIQTRLVEQSLRCDANIIVETASARDPHHFAVLLGFGATAIYPYLAYETLGRLVDTHAIAKDYRTVMLNYRNGINKGLYKIMSKMGISTIASYRCSKLFEAVGLHDDVVGLCFQGAVSRIGGASFEDFQQDLLNLSKRAWLARKPISQGGLLKYVHGGEYHAYNPDVVRTLQQAVQSGEYSDYQEYAKLVNERPATTLRDLLAITPGENAVNIADVEPASELFKRFDTAAMSIGALSPEAHEALAEAMNSIGGNSNSGEGGEDPARYGTNKVSRIKQVASGRFGVTPAYLVNADVIQIKVAQGAKPGEGGQLPGDKVTPYIAKLRYSVPGVTLISPPPHHDIYSIEDLAQLIFDLKQVNPKAMISVKLVSEPGVGTIATGVAKAYADLITIAGYDGGTGASPLSSVKYAGCPWELGLVETQQALVANGLRHKIRLQVDGGLKTGVDIIKAAILGAESFGFGTGPMVALGCKYLRICHLNNCATGVATQDDKLRKNHYHGLPFKVTNYFEFIARETRELMAQLGVTRLVDLIGRTDLLKELDGFTAKQQKLALSKLLETAEPHAGKALYCTENNPPFDNGLLNAQLLQQAKPFVDERQSKTFWFDIRNTDRSVGASLSGYIAQTHGDQGLAADPIKAYFNGTAGQSFGVWNAGGVELYLTGDANDYVGKGMAGGLIAIRPPVGSAFRSHEASIIGNTCLYGATGGRLYAAGRAGERFGVRNSGAITVVEGIGDNGCEYMTGGIVCILGKTGVNFGAGMTGGFAYVLDESGDFRKRVNPELVEVLSVDDLAIHEEHLRGLITEHVQHTGSQRGEEILANWSTFATKFALVKPKSSDVKALLGHRSRSAAELRVQAQ

SEQ ID NO: 23239 - protein, 485 aa, Escherichia coli CFT073
MTMQLEVILPLVAYLVVVFGISVYAMRKRNTGTFLNEYFLGSRSMGGIVLAMTLTATYISASSFIGGPGAAYKYGLGWVLLAMIQLPAVWLSLGILGKNFAILARRYNAVTLNDMLFARYQSRLLVWLASLSLLVAFVGAMTVQFIGGARLLETAAGIPYETGLLIFGISIALYTAFGGFRASVLNDTMQGLVMLIGTVVLLIGVVHAAGGLSNAVDTLQTIDPQLVTPQGADDILSPAFMTSFWVLVCFGVIGLPHTAVRCISYKDSKAVHRGIIIGTIVVAILMFGMHLAGALGRAVIPDLTVPDLVIPTLMVKVLPPFAAGIFLAAPMAAIMSTINAQLLQSSATIIKDLYLNIRPDQMQNETRLKRMSAVITLVLGALLLLAAWKPPEMIIWLNLLAFGGLEAVFLWPLVLGLYWERANAKGALSAMIVGGVLYAVLAKLNIQYLGFHPIVPSLLLSLLAFLVGNRFGTSVPQATVLTTDK

SEQ ID NO: 23240 - protein, 380 aa, Escherichia coli CFT073
MPHLALLISKGVIMDRIIQSPGKYIQGADVINRLGEYLKPLAERWLVVGDKFVLGFAQSTVEKSFKDAGLVVEIAPFGGECSQNEIDRLRGIAETAQCGAILGIGGGKTLDTAKALAHFMGVPVAIAPTIASTDAPCSALSVIYTDEGEFDRYLLLPNNPNMVIVDTKIVAGAPARLLAAGIGDALATWFEARACSRSGATTMAGGKCTQAALALAELCYNTLLEEGEKAMLAAEQHVVTPALERVIEANTYLSGVGFESGGLAAAHAVHNGLTAIPDAHHYYHGEKVAFGTLTQLVLENAPVEEIETVAALSHAVGLPITLAQLDIKEDVPAKMRIVAEAACAEGETIHNMPGGATPDQVYAALLVADQYGQRFLQEWE

SEQ ID NO: 23241 - protein, 183 aa, Phormidium laminosum
AERVYFLLKGAVKLSRVYEAGEEITVALLRENSVFGVLSLITGQKADRFYHSVAFTPVELLSVPIEQVEKALKENPDLSMLMLKGLSSRILQTEMMIETLAHRDMGSRLVSFLLILCRDFGVPTSEGITIDLKLSHQAIAEAIGSTRVTVTRLLGDLRQDRMISIHKKKITVYNPVALSQQSP

SEQ ID NO: 23242 - protein, 564 aa, Vibrio cholerae
MGKIIGIDLGTTNSCVAVLDWRQARVIENAEGERTTPSVIAYTDGETLVGQPAKRQAVTNPQNTLFAIKRLIGRRFEDEEVQRDIKIMPYKIVKADNGDAWVEAKGQKMAAPQVSAEVLKKMKKTAEDFLGEPVTAAVITVPAYFNDAQRQATKDAGRIAGLEVKRIINEPTAAALAYGLDKQGGDRTIAVYDLGGGTFDISIIEIDEVEGEKTFEVLSTNGDTHLGGEDFDNRMINYLVDEFKKDQGIDLRNEPLAMQRLKEAAEKAKIELSSAQQTDVNLPYITAPITGPKHMNIKVTRAKLEALVEDLVQRSLEPLKVALADADLSVTDITDVILVGGQTRMPMVQKKVAEFFGKEPRKDVNPDEAVRVGAAVQGGVLAGEVKDVLLLDVTPLSLGIETMGGVMTKLIEKNTTIPTKANQVFSTAEDNQSAVTIHVLQGERKQAMYNKSLGQFNLEGINPAPRGMPQIEVIFDLDADGILHVSAKDKQTGKEQKITIQASGGLSDAEIEKMVQEAEANKEADKKFEELATARNQADQMIHATRKQITEAGEALPADEKAKI

SEQ ID NO: 23243 - protein, 595 aa, Brevibacillus brevis
MIVTKQDPQTRKRKNAVFGWVLSFVKPYRTWVVICIFASLLVAVADILMGVLIQRMVEHTNDFDKLVQIALIIFCLTIVGFLAKYFITYSAARFSARAMRDLKNKMAAHLEKVPMSTMDQYHSGDLVSRLTSDAQILQSFLQQHFFQLFYLPVVFAGALTLLLSINWKLIIFSVAILPIAIVITGRMSRPLQTYAERMQEHLGQANTVAQDTLSGIHMVKAFQLENVMYRKYAAGMKQVLKNGILAEKKRAWMTAPGILLFSAPILFFVAYGGYLIQTGELSLGSLVIFSYLLHFIIEPLSLAPVLFAQVQETSGAAKRLQDIFLQPVEENGRTAIPIDPAAVPVEFENVSFAYEKTKILENVSFVLPPNKTVALVGASGSGKSTILKLLCGFYRIEPGNGCMKVFGHSLNDWNTAEMRHYLSLVSQDTTLFPVSIAENISYGRVHATRDEIIAAAKAANAHDFILELPQGYETKVGERGSRLSGGQKQRIAIARALLKDAPILLLDEPTSALDTESEALVQEALENVMRNRTVLVIAHRLSTIKDADEVLVLEQGQIVERGTHYELLAQGGVYTRLYQKQFATDEQRALAAEGV

SEQ ID NO: 23244 - protein, 504 aa, Escherichia coli CFT073
MKNEKRKTGIEPKVFFPPLIIVGILCWLTVRDLDAANVVINAVFSYVTNVWGWAFEWYMVVMLFGWFWLVFGPYAKKRLGNEPPEFSTASWIFMMFASCTSAAVLFWGSIEIYYYISTPPFGLEPNSTGAKELGLAYSLFHWGPLPWATYSFLSVAFAYFFFVRKMEVIRPSSTLVPLVGEKHAKGLFGTIVDNFYLVALIFAMGTSLGLATPLVTECMQWLFGIPHTLQLDAIIITCWIILNAICVACGLQKGVRIASDVRSYLSFLMLGWVFIVSGASFIMNYFTDSVGMLLMYLPRMLFYTDPIAKGGFPQGWTVFYWAWWVIYAIQMSIFLARISRGRTVRELCFGMVLGLTASTWILWTVLGSNTLLLIDKNIINIPNLIEQYGVARAIIETWAALPLSTATMWGFFILCFIATVTLVNACSYTLAMSTCREVRDGEEPPLLVRIGWSVLVGIIGIVLLALGGLKPIQTAIIAGGCPLFFVNIMVTLSFIKDAKQNWKD

SEQ ID NO: 23245 - protein, 456 aa, Escherichia coli CFT073
MEGQQHGEQLKRGLKNRHIQLIALGGAIGTGLFLGSASVIQSAGPGIILGYAIAGFIAFLIMRQLGEMVVEEPVAGSFSHFAYKYWGSFAGFASGWNYWVLYVLVAMAELTAVGKYIQFWYPEIPTWVSAAVFFVVINAINLTNVKVFGEMEFWFAIIKVIAVVAMIIFGAWLLFSGNGGPQASVSNLWDQGGFLPHGFTGLVMMMAIIMFSFGGLELVGITAAEADNPEQSIPKATNQVIYRILIFYIGSLAVLLSLMPWTRVTADTSPFVLIFHELGDTFVANALNIVVLTAALSVYNSCVYCNSRMLFGLAQQGNAPKALASVDKRGVPVNTILVSALVTALCVLINYLAPESAFGLLMALVVSALVINWAMISLAHMKFRRAKQEQGVVTRFPALLYPLGNWICLLFMAAVLVIMLMTPGMAISVYLIPVWLIVLGIGYLFKEKTAKAVKAH

SEQ ID NO: 23246 - protein, 190 aa, Escherichia coli CFT073
MAKSVPAIFLDRDGTINVDHGYVHEIDNFEFIDGVIDAMRELKKMGFALVVVTNQSGIARGKFTEAQFETLTEWMDWSLADRDVDLDGIYYCPHHPQGSVEEFRQVCDCRKPHPGMFLSARDYLHIDMAASYMVGDKLEDMQAAAAASVGTKVLVRTGKPITPEAENAADWVLNSLADLPQAIKKQQKPA

SEQ ID NO: 23247 - protein, 677 aa, Escherichia coli CFT073
MTDLSHSREKDKINPVVFYTSAGLILLFSLTTILFRDFSALWIGRTLDWVSKTFGWYYLLAATLYIVFVVCIACSRFGSVKLGPEQSKPEFSLLSWAAMLFAAGIGIDLMFFSVAEPVTQYMQPPEGAGQTIEAARQAMVWTLFHYGLTGWSMYALMGMALGYFSYRYNLPLTIRSALYPIFGKRINGPIGHSVDIAAVIGTIFGIATTLGIGVVQLNYGLSVLFDIPDSMAAKAALIALSVIIATISVTSGVDKGIRVLSELNVALALGLILFVLFMGDTSFLLNALVLNVGDYVNRFMGMTLNSFAFDRPVEWMNNWTLFFWAWWVAWSPFVGLFLARISRGRTIRQFVLGTLIIPFTFTLLWLSVFGNSALYEIIHGGAAFAEEAMVHPERGFYSLLAQYPAFTFSASVATITGLLFYVTSADSGALVLGNFTSQLKDINSDAPGWLRVFWSVAIGLLTLGMLMTNGISALQNTTVIMGLPFSFVIFFVMAGLYKSLKVEDYRRESANRDTAPRPLGLQDRLSWKKRLSRLMNYPGTRYTKQMMETVCYPAMEEVAQELRLRGAYVELKNLPPEEGQQLGHLDLLVHMGEEQNFVYQIWPQQYSVPGFTYRARSGKSTYYRLETFLLEGSQGNDLMDYSKEQVITDILDQYERHLNFIHLHREAPGHSVMFPDA

SEQ ID NO: 23248 - protein, 458 aa, Escherichia coli CFT073
MMESKNKLKRGLSTRHIRFMALGSAIGTGLFYGSADAIKMAGPSVLLAYIIGGIAAYIIMRALGEMSVHNPAASSFSRYAQENLGPLAGYITGWTYCFEILIVAIADVTAFGIYMGVWFPTVPHWIWVLSVVLIICAVNLMSVKVFGELEFWFSFFKVATIIIMIVAGFGIIIWGIGNGGQPTGIHNLWSNGGFFSNGWLGMVMSLQMVMFAYGGIEIIGITAGEAKDPEKSIPRAINSVPMRILVFYVGTLFVIMSIYPWNQVGTAGSPFVLTFQHMGITFAASILNFVVLTASLSAINSDVFGVGRMLHGMAEQGSAPKIFSKTSRRGIPWVTVLVMTTALLFAVYLNYIMPENVFLVIASLATFATVWVWIMILLSQIAFRRRLPPEEVKALKFKVPGGVATTIGGLIFLLFIIGLIGYHPDTRISLYVGFAWIVVLLIGWMFKRRHDRQLAENQ

SEQ ID NO: 23249 - protein, 430 aa, Escherichia coli CFT073
MMNTEGNNGNKPLGLWNVVSIGIGAMVGAGIFALLGQAALLMEASTWVAFAFGGIVAMFSGYAYARLGASYPSNGGIIDFFRRGLGNGVFSLALSLLYLLTLAVSIAMVARAFGAYAVQFLHEGSQEEHLILLYALGIIAVMTLFNSLSNHAVGRLEVILVGIKMMILLLLIIAGVWSLQPAHISVSAPPSSGAFFSCIGITFLAYAGFGMMANAADKVKDPEVIMPRAFLVAIGVTTLLYISLALVLLSDVSALELEKYADTAVAQAASPLLGHVGYVIVVIGALLATASAINANLFAVFNIMDNMGSERELPKLMNKPLWRQSTWGNIIVVVLIMLMTAALNLGSLASVASATFLICYLAVFVVAIRLRHDIHASLPILIVGTLVMLLVIVGFIYSLWSQGSRALIWIIGALLLSLIVAMVMKRNKTV

SEQ ID NO: 23250 - protein, 292 aa, Escherichia coli CFT073
MKLGFIGLGIMGTPMAINLARAGHQLHVTTIGPVADELLSLGAVSVETARQVTDASDIIFIMVPDTPQVEDVLFGENGCTKVSLKGKTIVDMSSISPIETKRFARQVNELGGDYLDAPVSGGEIGAREGTLSIMVGGDEAVFERVKPLFELLGKNITLVGGNGDGQTCKVANQIIVALNIEAVSEALLFASKAGADPVRVRQALMGGFASSRILEVHGERMIKRTFNPGFKIALHQKDLNLALQSAKALALNLPNTATCQELFNTCAANGGSQLDHSALVQALELMANHKLA

SEQ ID NO: 23251 - protein, 472 aa, Escherichia coli CFT073
MPLNKKDTQGKGVKNASTVSEDTASNQEPTLHRGLHNRHIQLIALGGAIGTGLFLGIGPAIQMAGPAVLLGYGVAGIIAFLIMRQLGEMVVEEPVSGSFAHFAYKYWGPFAGFLSGWNYWVMFVLVGMAELTAAGIYMQYWFPDVPTWIWAAAFFIIINAVNLVNVRLYGETEFWFALIKVLAIIGMIGFGLWLLFSGHGGEKASINNLWRYGGFFATGWNGLILSLAVIMFSFGGLELIGITAAEARDPEKSIPKAVNQVVYRILLFYIGSLVVLLALYPWVEVKSNSSPFVMIFHNLDSNVVASALNFVILVASLSVYNSGVYSNSRMLFGLSVQGNAPKFLTRVSRRGVPINSLMLSGAITSLVVLINYLLPQKAFGLLMALVVATLLLNWIMICLAHLRFRAAMRRQGRETQFKALLYPFGNYLCIAFLGMILLLMCTMDDMRLSAILLPVWIVFLFVAFKTLRRKVN

SEQ ID NO: 23252 - protein, 362 aa, Escherichia coli CFT073
  misc_feature (124)..(124): Xaa can be any naturally occurring amino acid
  unsure (1)..(362): unsure at all Xaa locations
MPHNPIRVVVGPANYFSHPGSFNHLHDFFTDEQLSRAVWIYGERAIAAAQTKLPPAFELPGVKHILFRGHCSESDVQQLAAESGDDRSVVIGVGGGALLDTAKALARRLGLPFVTVPTIAATCXAWTPLSVWYNDAGQALHYEIFDDANFMVLVEPEIILNAPQQYLLAGIGDTLAKWYEAVVLAPQPETLPLTVRLGINNAQAIRDVLLNSSEQALSDQQNHQLTQSFCDVVDAIIAGGGMVGGLGDRFTRVAAAHAVHNGLTVLPQTEKFLHGTKVAYGILVQSALLGQDDVLAQLTGAYQRFHLPTTLAELEVDINNQAEIDKVIAHTLRPVESIHYLPVTLTPDTLRAAFEKVESFKA

SEQ ID NO: 23253 - protein, 386 aa, Escherichia coli CFT073
MTNNPLIPQSKLPQLGTTIFTRMSALAQQHQAINLSQGFPDFDGPRYLQERLAYHVAQGANQYAPMTGVQALREAIAQKTERLYGYQPDVDSNITVTAGATEALYAAITALVRNGDEVICFDPSYDSYAPAIALSGGIVKRIALQPPHFRVDWQEFAALLSERTRLVILNTPHNPSATVWQQTDFAALWQAIAGHEIFVISDEVYEHINFSQQGHASVLAHPQLRERAVAVSSFGKTYHMTGWKVGYCVAPAPISAEIRKVHQYLTFSVNTPAQLALADMLRAEPEHYLALPDFYRQKRDILVNALNESRLEILPCEGTYFLLVDYSAVSTLDDVEFCQWLTREHGVAAIPLSVFCADPFPHKLIRLCFAKKESTLLAAAERLRQL

SEQ ID NO: 23254 - protein, 453 aa, Escherichia coli CFT073
MSFDSLGLSPDILRAVAEQGYREPTPIQQQAIPAVLEGRDLMASAQTGTGKTAGFTLPLLQHLITRQPHAKGRRPVRALILTPTRELAAQIGENVRDYSKYLNIRSLVVFGGVSINPQMMKLRGGVDVLVATPGRLLDLEHQNAVKLDQVEILVLDEADRMLDMGFIHDIRRVLTKLPAKRQNLLFSATFSDDIKALAEKLLHNPLEIEVARRNTASDQVTQHVHFVDKKRKRELLSHMIGKGNWQQVLVFTRTKHGANHLAEQLNKDGIRSAAIHGNKSQGARTRALADFKSGDIRVLVATDIAARGLDIEELPHVVNYELPNVPEDYVHRIGRTGRAAATGEALSLVCVDEHKLLRDIEKLLKKEIPRIAIPGYEPDPSIKAEPIQNGRQQRGGGRGQGGGRGQQQPRRAESGAKSGNAKPAEKPSRRLGDAKPAGEQQRRRRPRKPAAAQ

SEQ ID NO: 23255 - protein, 285 aa, Escherichia coli CFT073
MSTILKWAGNKTAIMPELKKYLPAGPRLVEPFAGSCAVMIETDYPSYLVADINPDLINLYKKVAADCEAFISRARALFEEANREVAYYNIRQEFNYSTEITDFMKAVYFLYLNRHGYRGLCRYNKSGHFNIPYGNYKNPYFPEKEIRKFAEKAQRATFICASFDETLAMLKAGDVVYCDPPYYGTFSGYHTDGFTEDDQYHLASVLEHRSSEGHPVIVSNSDTSLIRSLYRNFTHHYIKAKRSIGVSAGESKSATEIIAVSGARCWVGFDPSRGVDSSAVYEVRV

SEQ ID NO: 23256 - protein, 260 aa, Escherichia coli CFT073
MPQTRPKIIRLTDGSSIMKKLVLAALLASFTFGASAAEKINFGVSATYPPFESIGANNEIVGFDIDLAKALCKQMQAECTFTNHAFDSLIPSLKFRKYDAVISGMDITPERSKQVSFTTPYYENSAVVIAKKDTYKTFADLKGKRIGMENGTTHQKYIQDQHPEVKTVSYDSYQNAFIDLKNGRIDGVFGDTAVVNEWLKTNPQLGVATEKVTDPQYFGTGLGIAVRPDNKALLEKLNNALAAIKADGTYQKINDQWFPQ

SEQ ID NO: 23257 - protein, 398 aa, Escherichia coli CFT073
MPRFTYICINKIIVIIRLNIGNLYLINTIDIVTLFARCSLLINCFSGGCGKNSTHLLIFKIYFYLDNQIFTPYLHKNHASYGPISQARYDLYQFLIYNALLVSRRRLNKERVSVKADNPFDLLLPAAMAKVAEEAGVYKATKHPLKTFYLAITAGVFISIAFVFYITATTGTGTMPFGMAKLVGGICFSLGLILCVVCGADLFTSTVLIVVAKASGRITWGQLAKNWLNVYFGNLVGALLFVLLMWLSGEYMTANGQWGLNVLQTADHKVHHTFIEAVCLGILANLMVCLAVWMSYSGRSLMDKAFIMVLPVAMFVASGFEHSIANMFMIPMGIVIRDFASPEFWTAVGSAPENFSHLTVMNFITDNLIPVTIGNIIGGGLLVGLTYWVIYLRENDHH

SEQ ID NO: 23258 - protein, 582 aa, Escherichia coli CFT073
MHNDKDLSTWQTFRRLWPTIAPFKAGLIVAGVALILNAASDTFMLSLLKPLLDDGFGKTDRSVLMWMPLVVIGLMILRGITSYISSYCISWVSGKVVMTMRRRLFGHMMGMPVSFFDKQSTGTLLSRITYDSEQVASSSSGALITVVREGASIIGLFIMMFYYSWQLSIILIVLAPIVSIAIRVVSKRFRNISKNMQNTMGQVTTSAEQMLKGHKEVLIFGGQEVETKRFDKVSNRMRLQGMKMVSASSISDPIIQLIASLALAFVLYAASFPSVMDSLTAGTITVVFSSMIALMRPLKSLTNVNAQFQRGMAACQTLFTILDSEQEKDEGKRVIERATGDVEFRNVTFTYPGRDVPALRNINLKIPAGKTVALVGRSGSGKSTIASLITRFYDIDEGEILMDGHDLREYTLASLRNQVALVSQNVHLFNDTVANNIAYARTEQYSREQIEEAARMAYAMDFINKMDNGLDTVIGENGVLLSGGQRQRIAIARALLRDSPILILDEATSALDTESERAIQAALDELQKNRTSLVIAHRLSTIEKADEIVVVEDGVIVERGTHNDLLEHRGVYAQLHKMQFGQ

SEQ ID NO: 23259 - protein, 196 aa, Escherichia coli CFT073
MNEAVSPGALSTLFTDARTHNGWRETPVSDETLREIYALMKWGPTSANCSPTRIVFIRTAEGKERLRPALSSGNLQKTLTAPVTAIVAWDSEFYERLPQLFPHGDARSWFTSSPQLAEETAFRNSSMQAAYLIVACRALGLDTGPMSGFDRQYVDDAFFAGSTLKSNLLINIGYGDSSKLFARLPRLSFEEACGLL

SEQ ID NO: 23260 - protein, 502 aa, Escherichia coli CFT073
MAISTPMLVTFCVYIFGMILIGFIAWRSTKNFDDYILGGRSLGPFVTALSAGASDMSGWLLMGLPGAVFLSGISESWIAIGLTLGAWINWKLVAGRLRVHTEYNNNALTLPDYFTGRFEDKSRILRIISALVILLFFTIYCASGIVAGARLFESTFGMSYETALWAGAAATILYTFIGGFLAVSWTDTVQASLMIFALILTPVIVIISVGGFGDSLEVIKQKSIENVDMLKGLNFVAIISLMGWGLGYFGQPHILARFMAADSHHSIVHARRISMTWMILCLAGAVAVGFFGIAYFNEHPAVAGAVNQNAERVFIELAQILFNPWIAGILLSAILAAVMSTLSCQLLVCSSAITEDLYKAFLRKQASQKELVWVGRVMVLVVALVAIALAANPENRVLGLVSYAWAGFGAAFGPVVLFSVMWSRMTRNGALAGMIIGALTVIVWKQFGWLGLYEIIPGFIFGSIGIVVFSLLGKAPSAAMQKRFAEADAHYHSAPPSRLQEG

SEQ ID NO: 23261 - protein, 337 aa, Escherichia coli CFT073
MPGPHSFRQILSTNGRMPEVLLVPDMKLFAGNATPELAQRIANRLYTSLGDAAVGRFSDGEVSVQINENVRGGDIFIIQSTCAPTNDNLMELVVMVDALRRASAGRITAVIPYFGYARQDRRVRSARVPITAKVVADFLSSVGVDRVLTVDLHAEQIQGFFDVPVDNVFGSPILLEDMLQLNLDNPIVVSPDIGGVVRARAIAKLLNDTDMAIIDKRRPRANVSQVMHIIGDVAGRDCVLVDDMIDTGGTLCKAAEALKERGAKRVFAYATHPIFSGNAANNLRNSVIDEVVVCDTIPLSDEIKSLPNVRTLTLSGMLAEAIRRISNEESISAMFEH

SEQ ID NO: 23262 - protein, 366 aa, Escherichia coli CFT073
MTYYNRSKFCGSGYARENSIKCISNILYKLNKMSKKMQSDKVLNLPAGYFGIVLGTIGMGFAWRYASQVWQVSHWLGDGLVILAMIIWGLLTGAFITRLIRFPHSVLAEVRHPVLSSFVSLFPATTMLVAIGFVPWFRPLAVCLFSFGVVVQLAYAAWQTAGLWRGSHPEEATTPGLYLPTVANNFISAMACGALGYTDAGLVFLGAGVFSWLSLEPVILQRLRSSGELPTALRTSLGIQLAPALVACSAWLSVNGGEGDTLAKMLFGYGLLQLLFMLRLMPWYLSQPFNASFWSFSFGVSALATTGLHLGSGSDNGFFHTLAVPLFIFTNFIIAILLIRTFALLMQGKLLVRTERAVLMKAEDKE

SEQ ID NO: 23263 - protein, 528 aa, Escherichia coli CFT073
MAPDTSKPSSIKPMEGNIMRIGIPRERLTNETRVAATPKTVEQLLKLGFTVAVESGAGQLASFDDKAFVQAGAEIVEGNSVWQSEIILKVNAPLDDEIALLNPGTTLVSFIWPAQNPELMQKLAERNVTVMAMDSVPRISRAQSLDALSSMANIAGYRAIVEAAHEFGRFFTGQITAAGKVPPAKVMVIGAGVAGLAAIGAANSLGAIVRAFDTRPEVKEQVQSMGAEFLELDFKEEAGSGDGYAKVMSDAFIKAEMELFAAQAKEVDIIVTTALIPGKPAPKLITREMVDSMKAGSVIVDLAAQNGGNCEYTVPGEIFTTENGVKVIGYTDLPGRLPTQSSQLYGTNLVNLLKLLCKEKDGNITVDFDDVVIRGVTVIRAGEITWPAPPIQVSAQPQAAQKAAPEVKTEEKCACSPWRKYALMALAIILFGWMASVAPKEFLGHFTVFALACVVGYYVVWNVSHALHTPLMSVTNAISGIIVVGALLQIGQGGWVSFLSFIAVLIASINIFGGFTVTQRMLKMFRKN

SEQ ID NO: 23264 - protein, 248 aa, Escherichia coli CFT073
MLSIKDLHVSVEDKAILRGLSLDVRPGEVHAIMGPNGSGKSTLSATLAGREDYEVTSGTVEFKGKDLLALSPEDRAGEGIFMAFQYPVEIPGVSNQFFLQTALNAVRSYRGQETLDRFDFQDLMEEKIALLKMPEDLLTRSVNVGFSGGEKKRNDILQMAVLEPELCILDESDSGLDIDALKVVADGVNSLRDGKRSFIIVTHYQRILDYIKPDYVHVLYQGRIVKSGDFTLVKQLEEQGYGWLTEQQ

SEQ ID NO: 23265 - protein, 192 aa, Escherichia coli CFT073
MEYRSLTLDDFLSRFQLLRPQINRETLNHRQAAVLIPIVRRPQPGLLLTQRSIHLRKHAGQVAFPGGAVDDTDTSVIAAALREAEEEVAIPPSAVEVIGVLPPVDSVTGYQVTPVVGIIPPDLPYRASEDEVSAVFEMPLAQALHLGRYHPLDIYRRGDSHRVWLSWYEQYFVWGMTAGIIRELALQIGVKP

SEQ ID NO: 23266 - protein, 477 aa, Escherichia coli CFT073
MMTMSRLVVVSNRIAPPDEHAASAGGLAVGILGALKAAGGLWFGWSGETGNEDQPLKKVKKGNITWASFNLSEQDLDEYYNKFSNAVLWPAFHYRLDLVQFQRPAWDGYLRVNALLADKLLPLLQDDDIIWIHDYHLLPFAHELRKRGVNNRIGFFLHIPFPTPEIFNALPTYDTLLEQLCDYDLLGFQTENDRLAFLDCLSNLTRVTTRSAKSHTACGKAFRTEVYPIGIEPKEIAKQAAGPLPPKLAQLKAELKNVQNIFSVERLDYSKGLPERFLAYEALLEKYPQHHGKIRYTQIAPTSRGDVQAYQDIRHQLENEAGRINGKYGQLGWTPLYYLNQHFDRKLLMKIFRYSDVGLVTPLRDGMNLVAKEYVAAQDPANPGVLVLSQFAGAANELTSALIVNPYDRDEVAAALDRALTMSLAERISRHAEMLDVIVKNDINHWQECFISDLKQIVPRSAESQQRDKVATFPKLA

SEQ ID NO: 23267 - protein, 454 aa, Escherichia coli CFT073
MTMSHNVTPNTSRVELRKTLTLVPVVMMGLAYMQPMTLFDTFGIVSGLTDGHVPTAYAFALIAILFTALSYGKLVRRYPSAGSAYTYAQKSISPTVGFMVGWSSLLDYLFAPMINILLAKIYFEALVPSIPSWMFVVALVAFMTAFNLRSLKSVANFNTVIVVLQIVLIAVILGMVVYGVFEGEGAGTLASTRPFWSGDAHVIPMITGATILCFSFTGFDGISNLSEETKDAERVIPRAIFLTALIGGMIFIFATYFLQLYFPDISRFKDPDASQPEIMLYVAGKAFQVGALIFSTITVLASGMAAHAGVARLMYVMGRDGVFPKSFFGYVHPKWRTPAMNIILVGAIALLAINFDLVMATALINFGALVAFTFVNLSVISQFWIREKRNKTLKDHFQYLFLPMCGALTVGALWVNLEESSMVLGLIWAAIGLIYLACVTKSFRNPVPQYEDVA

SEQ ID NO: 23268 - protein, 394 aa, Escherichia coli CFT073
MKNCVIVSAVRTAIGSFNGSLASTSTIDLGATVIKAAIERAKIDSLHVDEVIMGNVLQAGLGQNPARQALLKSGLAETVCGFTVNKVCGSGLKSVALAAQAIQAGQAQSIVAGGMENMSLAPYLLDAKARSGYRLGDGQVYDVILRDGLMCATHGYHMGITAENVAKEYGITREMQDELALHSQRKAAAAIESGAFTAEIVPVNVVTRKKTFVFSQDEFPKADSTAEALGALRPAFDKAGTVTAGNASGINDGAAALVIMEESSALAAGLTPLARIKSYASGGVPPALMGMGPVPATQKALQLAGLQLADIDLIEANEAFAAQFLAVGKTLGFEPEKVNVNGGAIALGHPIGASGARILVTLLHAMQARDKTLGLATLCIGGGQGIAMVIERLN

SEQ ID NO: 23269 - protein, 714 aa, Escherichia coli CFT073
MSRIIMLIPTGTSVGLTSVSLGVIRAMERKGVRLSVFKPIAQPRTGGDAPDQTTTIVRANSSTTTAAEPLKMSYVEGLLSSNQKDVLMEEIIANYHANTKDAEVVLVEGLVPTRKHQFAQSLNYEIAKTLNAEIVFVMSQGTDTPEQLKERIELTRNSFGGAKNTNITGVIVNKLNAPVDEQGRTRPDLSEIFDDSTKAKVNNVDPAKLQESSPLPVLGAVPWSFDLIATRAIDMARHLNATIINEGDINTRRVKSVTFCARSIPHMLEHFRAGSLLVTSADRPDVLVAACLAAMNGVEIGALLLTGGYEMDARISKLCERAFATGLPVFMVNTNTWQTSLSLQSFNLEVPVDDHERIEKVQEYVANYINADWIDSLTATSERSRRLSPPAFRYQLTELARKAGKRIVLPEGDEPRTVKAAAICAERGIATCVLLGNPAEINRVAASQGVELGAGIEIVDPEVVRENYVGRLVELRKNKGMTETVAREQLEDNVVLGTLMLEQDEVDGLVSGAVHTTANTIRPPLQLIKTAPGSSLVSSVFFMLLPEQVYVYGDCAINPDPTAEQLAEIAIQSADSAAAFGIEPRVAMLSYSTGTSGAGSDVEKVREATRLAQEKRPDLMIDGPLQYDAAVMADVAKSKAPNSPVAGRATVFIFPDLNTGNTTYKAVQRSADLISIGPMLQGMRKPVNDLSRGALVDDIVYTIALTAIQSAQQQ

SEQ ID NO: 23270 - protein, 338 aa, Escherichia coli CFT073
MIIKRCRELALRAPARVVFPDALDQRVLKAAQYLHQQGLATPILVANPFELRQFALSHGVAMDGLQVIDPHGNLAMREEFAHRWLARAGEKTPPDALEKLTDPLMFAAAMVSAGKADVCIAGNLSSTANVLRAGLRIIGLQPGCKTLSSIFLMLPQYSGPALGFADCSVVPQPTAAQLADIALASAETWRAITGEEPRVAMLSFSSNGSARHPCVANVQQATEIVRERAPKLVVDGELQFDAAFVPEVAAQKAPASPLQGKANVMVFPSLEAGNIGYKIAQRLGGYRAVGPLIQGLAAPMHDLSRGCSVQEIIELALVAAVPRQTEVNRESSLQTLVE

SEQ ID NO: 23271 - protein, 759 aa, Escherichia coli CFT073
MDDQLKQSALDFHEFPVPGKIQVSPTKPLATQRDLALAYSPGVAAPCLEIEKDPLKAYKYTARGNLVAVISNGTAVLGLGNIGALAGKPVMEGKGVLFKKFAGIDVFDIEVDELDPDKFIEVVAALEPTFGGINLEDIKAPECFYIEQKLRERMNIPVFHDDQHGTAIISTAAILNGLRVVEKNISDVRMVVSGAGAAAIACMNLLVALGLQKHNIVVCDSKGVIYQGREPNMAETKAAYAVVDDGKRTLDDVIEGADIFLGCSGPKVLTQEMVKKMARAPMILALANPEPEILPPLAKEVRPDAIICTGRSDYPNQVNNVLCFPFIFRGALDVGATAINEEMKLAAVRAIAELAHAEQSEVVASAYGDQDLSFGPEYIIPKPFDPRLIVKIAPAVAKAAMESGVATRPIADFDVYIDKLTEFVYKTNLFMKPIFSQARKAPKRVVLPEGEEARVLHATQELVTLGLAKPILIGRPNVIEMRIQKLGLQIKSGVDFEIVNNESDPRFKEYWTEYFQIMKRRGVTQEQAQRALISNPTVIGAIMVQRGEADAMICGTVGDYHEHFSVVKNVFGYRDGVHTAGAMNALLLPSGNTFIADTYVNDEPDAEELAEITLMAAETVRRFGIEPRVALLSHSNFGSSDCPSSSKMRQALELVRERAPELMIDGEMHGDAALVEAIRNDRMPDSPLKGSANILVMPNMEAARISYNLLRVSSSEGVTVGPVLMGVAKPVHVLTPIASVRRIVNMVALAVVEAQTQPL

SEQ ID NO: 23272 - protein, 396 aa, Escherichia coli CFT073
MLDAQTIATVKATIPLLVETGPKLTAHFYDRMFTHNPELKEIFNMSNQRNGDQREALFNAIAAYASNIENLPALLPAVEKIAQKHTSFQIKPEQYNIVGEHLLATLDEMFSPGQEVLDAWGKAYGVLANVFINREAEIYNENASKAGGWEGTRDFRIVAKTPRSALITSFELEPVDGGAVAEYRPGQYLGVWLKPEGFPHQEIRQYSLTRKPDGKGYRIAVKREEGGQVSNWLHNHANVGDVVKLVAPAGDFFMAVADDTPVTLISAGVGQTPMLAMLDTLAKAGHTAQVNWFHAAENGDVHAFADEVKELGLSLPRFTAHTWYRQPNEADRAKGQFDSEGLMDLSKLEGAFSDPTMQFYLCGPVGFMQFAAKQLVDLGVKQENIHYECFGPHKVL

SEQ ID NO: 23273 - protein, 301 aa, Escherichia coli CFT073
MSIDKSYCGFIAIVGRPNVGKSTLLNKLLGQKISITSRKAQTTRHRIVGIHTEGAYQAIYVDTPGLHMEEKRAINRLMNKAASSSIGDVELVIFVVEGTRWTPDDEMVLNKLRDGKAPVILAVNKVDNVQEKADLLPHLQFLASQMNFLDIVPISAETGLNVDTIAAIVRKHLPEATHHFPEDYITDRSQRFMASEIIREKLMRFLGAELPYSVTVEIERFVSNERGGYDINGLILVEREGQKKMVIGNKGAKIKTIGIEARKDMQEMFEAPVHLELWVKVKSGWADDERALRSLGYVDDL

SEQ ID NO: 23274 - protein, 71 aa, Escherichia coli CFT073
MMSNKMTGLVKWFNPEKGFGFITPKDGSKDVFVHFSAIQSNDFKTLTENQEVEFGIENGPKGPAAVHVVAL

SEQ ID NO: 23275 - protein, 71 aa, Escherichia coli CFT073
MSNKMTGLVKWFNADKGFGFISPVDGSKDVFVHFSAIQNDNFRTLFEGQKVTFSVESGAKGPAAANVIITD

SEQ ID NO: 23276 - protein, 321 aa, Escherichia coli CFT073
MSEALLNAGRQTLMLELQEASHLPERLGDDFVRAANIILHCEGKVVVSGIGKSGHIGKKIAATLASTGTPAFFVHPAEALHGDLGMIESRDVMLFISYSGGAKELDLIIPRLEDKSIALLAMTGKPTSPLGLAAKAVLDISVEREACPMHLAPTSSTVNTLMMGDALAMAVMQARGFNEEDFARSHPAGALGARLLNKVHHLMRRDDAIPQVALTASVMDAMLELSRTGLGLVAVCDDQRLVKGVFTDGDLRRWLVGGGALTTPVNEAMTVGGTTLQSQSRAIDAKEILMKRKITAAPVVDENGKLTGAINLQDFYQAGII

SEQ ID NO: 23277 - protein, 878 aa, Escherichia coli CFT073
MTGNHPAALLRRLNPYCARALDAAASLCQTRAHAEITIEHWLLKLLEQGEGDITVIARRYEWDIDTLWQSLLAHLDTLPRPVRERPQLSEPLAALIRQAWLIASLEGDDPQIRSQHLLMALTEKPMLPACNDLWVLLSLSRVQLERLRPLLDAQSDECPARQPQVTEPLTSALPETATADAPAKTLTEKQDDALLAVLNRFTEDVTEKARSGRIDPVFGRDTEIRQMVDILSRRRKNNPILVGEPGVGKTALVEGLALRITEGNVPDSLKTVHIRTLDLGLLQAGAGVKGEFEQRLKNVIDAVQKSPEPVLLFIDEAHTIIGAGNQAGGADAANLLKPALARGELRTIAATTWSEYKQYFERDAALERRFQMVKVDEPDDDTACLMLRGLKARYAQHHGVHMLDSAIQTAVRLSRRYLTGRQLPDKAVDLLDTAGARVRMSLDTLPEPLTQLHVRLAALDIEREAIEQDSVFYPEASPERLAELTDLRDELQAEAGHLEAQYQQEKALAQQIMTLRQEGTDSTELQQQLRTHQGFAPLLALDVDARAVATVVADWTGIPLSSLLKDEQSDLLSMEQSLENRVVGQSPALCAIAQRLRAAKTGLTPENGPQGVFLLTGPSGTGKTETALTLADTLFGGEKSLITINLSEYQEPHTVSQLKGSPPGYVGYGQGGVLTEAVRKRPYSVVLLDEVEKAHRDVMNLFYQVFDRGFMRDGEGREIDFRNTVILMTANLGSDHIMQLLEEKPDATDADLHELLYPLLREHFQPALMARFQTVIYRPLGQEAMRAIVEMKLAQVARRLHQHYGLETEISNSLYDALTAACLLPDTGARNIDSLLNQQILPVLSQQLLAQQAVHHKPARLRLDWDDEDGIVLEFDEK

SEQ ID NO: 23278 - protein, 198 aa, Escherichia coli CFT073
MNNTDLIHLIKHFMHNELKAVEEVIDSPLSEFANLIKVLQSCQGKVVFIGVGKSGIIARKLAATFASTGTPSFFVHGTEAVHGDLGMVAKDDVVILISNSGETAEILATLPSLKKMGNYLISFTRSHHSSLAISCDLSVEIPVKSEADNLGLAPSCSSTVVLVVGDAVALALSELKKFTRADFGLYHPGGALGIKANS

SEQ ID NO: 23279 - protein, 306 aa, Escherichia coli CFT073
MSTLGHQYDNSLVSNAFGFLRLPMNFQPYDSDADWVITGVPFDMATSGRAGGRHGPAAIRQVSTNLAWEHNRFPWNFDMRERLNVVDCGDLVYAFGDAREMSEKLQAHAEKLLAAGKRMLSFGGDHFVTLPLLRAHAKHFGKMALVHFDAHTDTYANGCEFDHGTMFYTAPKEGLIDPNHSVQIGIRTEFDKDNGFTVLDACQVNDRSVDDIIAQVKQIVGDMPVYLTFDIDCLDPAFAPGTGTPVIGGLTSDRAIKLVRGLKDLNIVGMDVVEVAPAYDQSEITALAAATLALEMLYIQAAKKGE

SEQ ID NO: 23280 - protein, 339 aa, Escherichia coli CFT073
MTVALFPCKGADMSERHLPDDQSSTIDPYLITSVRQTLAEQSAALQNLSKQLDSGQYQRVLNLIMNCKGHVILSGMGKSGHVGRKISATLASTGTPSFFIHPAEAFHGDLGMITPYDLLILISASGETDEILKLVPSLKNFGNRIIAITNNGNSTLAKNADAVLELHMANETCPNNLAPTTSTTLTMAIGDALAIAMIHQRKFMPNDFARYHPGGSLGRRLLTRVADVMQHDVPAVQLDASFKTVIQRITSGCQGMVMVEDAEGGLAGIITDGDLRRFMEKEGSLTSATAAQMMTREPLTLPEDTMIIEAEEKMQKHRVSTLLVTNKANKVTGLVRIFD

SEQ ID NO: 23281 - protein, 335 aa, Escherichia coli CFT073
MNNWKRIMSHVELQPGFDFQQAGKEVLAIERECLAELDQYINQNFTLACEKMFWCKGKVVVMGMGKSGHIGRKMAATFASTGTPSFFVHPGEAAHGDLGMVTPQDVVIAISNSGESSEITALIPVLKRLHVPLICITGCPESSMARAADVHLCVKVAKEACPLGLAPTSSTTATLVMGDALAVALLKARGFTAEDFALSHPGGALGRKLLLRVNDIMHTGDEIPHVKKTASLRDALLEVTRKNLGMTVICDDNMMIEGIFTDGDLRRVFDMGVDVRRLSIADVMTPGGIRVRPGILAVEALNLMQSRHITSVMVADGDHLLGVLHMHDLLRAGVV

SEQ ID NO: 23282 - protein, 341 aa, Escherichia coli CFT073
MKKMMIATLAAASVLLAVANQAHAGATLDAVQKKGFVQCGISDGLPGFSYADADGKFSGIDVDVCRGVAAAVFGDDTKVKYTPLTAKERFTALQSGEVDLLSRNTTWTSSRDAGMGMAFTGVTYYDGIGFLTHDKAGLKSAKELDGATVCIQAGTDTELNVADYFKANNMKYTPVTFDRSDESAKALESGRCDTLASDQSQLYALRIKLSNPTEWIVLPEVISKEPLGPVVRRGDDEWFSIVRWTLFAMLNAEEMGINSQNVDEKAANPATPDMAHLLGKEGDYGKDLKLDNKWAFNIIKQVGNYSEIFERNVGSESPLKIKRGQNNLWNNGGIQYAPPVR

SEQ ID NO: 23283 - protein, 268 aa, Escherichia coli CFT073
MFTDTITKCAANAARIARLSANNPLGFWVSSAMAGAYVGLGIILIFTLGNLLDPSVRPLVMGATFGIALTLVIIAGSELFTGHTMFLTFGVKAGTISHGQMWAILPQTWLGNLVGSVFVAMLYSWGGGSLLPVDTSIVHSVALAKTTAPAMVLFFKGALCNWLVCLAIWMALRTEGAAKFIAIWWCLLAFIASGYEHSIANMTLFALSWFGNHSEAYTLAGIGHNLLWVTLGNTLSGAVFMGLGYWYATPKANRPVADKFNQTETAAG

SEQ ID NO: 23284 - protein, 278 aa, Escherichia coli CFT073
MKKNRAFLKWAGGKYPLLDDIKRHLPKGECLVEPFVGAGSVFLNTDFSRYILADINSDLISLYNIVKMRTDEYVQAARELFVPETNCAEVYYQFREEFNKSQDPFRRAVLFLYLNRYGYNGLCRYNLRGEFNVPFGRYKKPYFPEAELYHFAEKAQNAFFYCESYADSMARADDASVVYCDPPYAPLSATANFTAYHTNSFTLEQQAHLAEIAEGLVDRHIPVLISNHDTMLTREWYQRAKLHVVKVRRSISSNGGTRKKVDELLALYKPGVVSPAKK

SEQ ID NO: 23285 - protein, 425 aa, Escherichia coli CFT073
MKPMHIAMALLSAAMFFVLAGVFMGVQLELDGTKLVVDTASEIRWQWVFIGTAVVFFFQLVRPAFQKGLKSVSGPKFILPAIDGSTVKQKLFLVALLVLAVAWPFMVSRGTVDIATLTMIYIILGLGLNVVVGLSGLLVLGYGGFYAIGAYTFALLNHYYGLGFWTCLPIAGLMAAAAGFLLGFPVLRLRGDYLAIVTLGFGEIVRILLLNNTEITGGPNGISQIPKPTLFGLEFSRTAREGGWDTFSNFFGLKYDPSDRVIFLYLVALLLVVLSLFVINRLLRMPLGRAWEALREDEIACRSLGLSPRRIKLTAFTISAAFAGFAGTLFAARQGFVSPESFTFAESAFVLAIVVLGGMGSQFAVILAAVLLVVSRELMRDFNEYSMLMLGGLMVLMMIWRPQGLLPMTRPQLKLKNGAAKGEQA

SEQ ID NO: 23286 - protein, 401 aa, Escherichia coli CFT073
MFHLDTLATLVAATLTLLLGRKLVHSVSFLKKYTIPEPVAGGLLVALALLILKKSMGWEVNFDMSLRDPLMLAFFATIGLNANLASLRAGGRVVGVFLIVVVGLLVMQNAIGIGMASLLGLDPLMGLLAGSITLSGGHGTGAAWSKLFIERYGFTNATEVAMACATFGLVLGGLIGGPVARYLVKHSTTPNGIPDDQEVPTAFEKPDVGRMITSLVLIETIALIAICLTVGKIVAQLLAGTAFELPTFVCVLFVGVILSNGLSMMGFYRVFERAVSVLGNVSLSLFLAMALMGLKLWELASLALPMLAILVVQTIFMALYAIFVTWRMMGKNYDAAVLAAGHCGFGLGATPTAIANMQAITERFGPSHMAFLVVPMVGAFFIDIVNALVIKLYLMLPIFTG

SEQ ID NO: 23287 - protein, 406 aa, Escherichia coli CFT073
MQSISGGIMSLACVLVINCGSSSMKFSVIPQDADQPLLSGLAERLGIDHAVITFKDRDGHKSTVALDDASHQHALKVLFAKLDEQQLLEAINAVGHRVAHGGSDFKRSVLVTDDVIEKVRALSVLAPLHNPANLIGIEAARALLPALPHIAVFDTAFHQTLSPAAYTYAIPLEFQQDYMVRRYGFHGTSHRYIAAEALASLDLDPADHGIVIAHLGNGSSLCAVQNGTSIDTSMGMTPLEGLVMGTRCGDLDFGVVAYLAKRTGQTFDTLYKMLNNQSGLMGISGLSSDCRTLQQARDEGHERAALAIDVLVHRLARHIGGHVTSLKRFDALIFTGGIGENSALIRELTVQRLQALGLELDKERNQQLFGGRSGLISKTDTTKIAVIPTNEEKMIAIDAAEIARTA

SEQ ID NO: 23288 - protein, 562 aa, Escherichia coli CFT073
MASSGTTSTRKRFTGAEFIVHFLEQQGIKIVTGIPGGSILPVYDALSQSTQIRHILARHEQGAGFIAQGMARTDGKPAVCMACSGPGATNLVTAIADARLDSIPLICITGQVPASMIGTDAFQEVDTYGISIPITKHNYLVRHIEELPQVMSDAFRIAQSGRPGPVWIDIPKDVQTAVFEIETQPAMAEKAAAPAFSEESIRDAAAMINAAKRPVLYLGGGVINAPARVRELAEKAQLPTTMTLMALGMLPKAHPLSLGMLGMHGVRSTNYILQEADLLIVLGARFDDRAIGKTEQFCPNAKIIHVDIDRAELGKIKQPHVAIQADVDDVLAQLIPLVEAQPRAEWHQLVADLQREFPCPIPKACDPLSHYGLINAVAACVDDNAIITTDVGQHQMWTAQAYPLNRPRQWLTSGGLGTMGFGLPAAIGAALANPDRKVLCFSGDGSLMMNIQEMATASENQLDVKIILMNNEALGLVHQQQSLFYKQGVFAATYPGKINFMQIAAGFGLETCDLNNEADPQAALQEIINRPGPALIHVRIDAEEKVYPMVPPGAANTEMVGE

SEQ ID NO: 23289 - protein, 232 aa, Escherichia coli CFT073
MNKILLVDDDRELTSLLKELLEMEGFNVIVAHDGEQALDLLDDSIDLLLLDVMMPKKNGIDTLKALRQTHQTPVIMLTARGSELDRVLGLELGADDYLPKPFNDRELVARIRAILRRSHWSEQQQNNDNGSPTLEVDALSLNPGRQEASFDGQTLELTGTEFTLLYLLAQHLGQVVSREHLSQEVLGKRLTPFDRAIDMHISNLRRKLPDRKDGHPWFKTLRGRGYLMVSAS

SEQ ID NO: 23290 - protein, 810 aa, Escherichia coli CFT073
MSVIAQAGAKGRQLHKFGGSSLADVKCYLRVAGIMAEYSQPDDMMVVSAAGSTTNQLINWLKLSQTDRLSAHQVQQTLRRYQCDLISGLLPAEEADNLISAFVSDLEHLAALLDSGINDAVYAEVVGHGEVWSARLMSAVLNQQGLPAAWLDAREFLRAERAAQPQVDEGLSYPLLQQLLVQHPGKRLVVTGFISRNNAGETVLLGRNGSDYSATQIGALAGVSRVTIWSDVAGVYSADPRKVKDACLLPLLRLDEASELARLAAPVLHARTLQPVSGSEIDLQLRCSYTPDQGSTRIERVLASGTGARIVTSHDDVCLIEFQVPASQDFKLAHKEIDQILKRAQVRPLAVGVHNDRQLLQFCYTSEVADSALKILDEAGLPGELRLRQGLALVAMVGAGVTRNPLHCHRFWQQLKGQPVEFTWQSDDGISLVAVLRTGPTESLIQGLHQSVFRAEKRIGLVLFGKGNIGSRWLELFAREQSTLSARTGFEFVLAGVVDSRRSLLSYDGLDASRALAFFNDEAVEQDEESLFLWMRAHPYDDLVVLDVTASQQLADQYLDFASHGFHVISANKLAGASDSNKYRQIHDAFEKTGRHWLYNATVGAGLPINHTVRDLIDSGDTILSISGIFSGTLSWLFLQFDGSVPFTELVDQAWQQGLTEPDPRDDLSGKDVMRKLVILAREAGYNIEPDQVRVESLVPAHCEGGSIDHFFENGDELNEQMVQRLEAAREMGLVLRYVARFDANGKARVGVEAVREDHPLASLLPCDNVFAIESRWYRDNPLVIRGPGAGRDVTAGAIQSDINRLAQLL

SEQ ID NO: 23291 - protein, 220 aa, Escherichia coli CFT073
MELYLDTANVAEVERLARIFPIAGVTTNPSIIAASKESIWEVLPRLQKAIGDEGILFAQTMSRDAQGMVKEAKHLRDAIPGIVVKIPVTSEGLAAIKMLKKEGITTLGTAVYSAAQGLLAALAGAKYVAPYVNRVDAQGGDGIRTVQELQALLEMHAPESMVLAASFKTPRQALDCLLAGCESITLPLDVAQQMLNTPAVESAIEKFEHDWNAAFGTTHL

SEQ ID NO: 23292 - protein, 441 aa, Escherichia coli CFT073
MTHDNIDILVVDDDISHCTILQALLRGWGYNVALANSGRQALEQVREQVFDLVLCDVRMAEMDGIATLKEIKTLNPAIPVLIMTAYSSVETAVEALKTGALDYLIKPLDFDNLQATLEKALAHTHSVDAETPAVSASQFGMVGKSPAMQHLLSEIALVAPSEATVLIHGDSGTGKELVARAIHASSARSEKPLVTLNCAALNESLLESELFGHEKGAFTGADKRREGRFVEADGGTLFLDEIGDISPMMQVRLLRAIQEREVQRVGSNQTISVDVRLIAATHRDLAAEVNAGRFRQDLYYRLNVVAIEVPSLRQRREDIPLLANHFLQRFAERNRKAVKGFTPQAMDLLIHYDWPGNIRELENAVERAVVLLTGEYISERELPLAIASTPIPLVQSQDIQPLVEVEKEVILAALEKTGGNKTEAARQLGITRKTLLAKLSR

SEQ ID NO: 23293 - protein, 449 aa, Escherichia coli CFT073
MSEIVVSKFGGTSVADFDAMNRSADIVLSDANVRLVVLSASAGITNLLVALAEGLEPGERFEKLDAIRNIQFAILERLRYPNVIREEIERLLENITVLAEAAALATSPALTDELVSHGELMSTLLFVEILRERDVQAQWFDVRKVMRTNDRFGRAEPDVAALAELAALQLLPRLNEGLVITQGFIGSENKGRTTTLGRGGSDYTAALLAEALHASRVDIWTDVPGIYTTDPRVVSAAKRIDEIAFAEAAEMATFGAKVLHPATLLPAVRSDIPVFVGSSKDPRAGGTLVCNKTENPPLFRALALRRNQTLLTLHSLNMLHSRGFLAEVFGILARHNISVDLITTSEVSVALTLDTTGSTSTGDTLLTQSLLMELSALCRVEVEEGLALVALIGNDLSKACGVGKEVFGVLEPFNIRMICYGASSHNLCFLVPGEDAEQVVQKLHFNLFE

SEQ ID NO: 23294 - protein, 401 aa, Corynebacterium glutamicum
MTNRIVLAYSGGLDTTVAIPYLKKMIDGEVIAVSLDLGQGGENMDNVRQRALDAGAAESIVVDAKDEFAEEYCLPTIKANGMYMKQYPLVSAISRPLIVKHLVEAGKQFNGTHVAHGCTGKGNDQVRFEVGFMDTDPNLEIIAPARDFAWTRDKAIAFAEENNVPIEQSVKSPFSIDQNVWGRAIETGYLEDLWNAPTKDIYAYTEDPALGNAPDEVIISFEGGKPVSIDGRPVSVLQAIEELNRRAGAQGVGRLDMVEDRLVGIKSREIYEAPGAIALIKAHEALEDVTIERELARYKRGVDRRWAEEVYDGLWFGPLKRSLDAFIDSTQEHVTGDIRMVLHAGSITINGRRSSHSLYDFNLATYDTGDTFDQTLAKGFVQLHGLSSKIANKRDREAGNN

SEQ ID NO: 23295 - protein, 470 aa, Escherichia coli CFT073
MVDQVKVVADDQAPAEQSLRRNLTNRHIQLIAIGGAIGTGLFMGSGKTISLAGPSIIFVYMIIGFMLFFVMRAMGELLLSNLEYKSFSDFASDLLGPWAGYFTGWTYWFCWVVTGMADVVAITAYAQFWFPGLSDWVASLSVIILLLVLNLATVKMFGEMEFWFAMIKIVAIVSLIVVGLVMVAMHFQSPTGVEASFAHLWNDGGWFPKGLSGFFAGFQIAVFAFVGIELVGTTAAETKDPEKSLPRAINSIPIRIIMFYVFSLIVIMSVTPWSSVVPEKSPFVELFVLVGLPAAASVINFVVLTSAASSANSGVFSTSRMLFGLAQEGVAPKAFAKLSKRAVPAKGLTFSCICLLGGVVMLYVNPSVIGAFTMITTVSAILFMFVWTIILCSYLVYRKQRPHLHEKSIYKMPLGKLMCWVCMAFFVFVLVLLTLEDDTRQALLVTPLWFIALGLGWLFIGKKRAAELRK

SEQ ID NO: 23296 - protein, 261 aa, Bacillus subtilis
MTVYNRTKQKTEDLVTEGAQAADTPRLAAKSADIVITMLADDDSVSTVTFGEDGLLEGLAENGIHISMSTISVEFSEKLAAAHAEKGQFFLAAPVLGRPDAAAKAALRIITAGPAEAKQAAKPLLDSLSQQIFDVGEESKTANAAKISINFLLVSMLEALSESFLMMEKYGLEQKQFLEIASALFGSPVYQNYGTIMAEQKFEPAGFKMSLGLKDTNLALAAAKRVSANLPLAELAKSHFESGIEKGFGDLDWAALIKCIK

SEQ ID NO: 23297 - protein, 255 aa, Phaseolus vulgaris
MKCLVFFVAAVLVASQCHGASFRSFPLSMTTGYGDGASDTEVRCASWRLAVEAQNIFGFETIPQQCVDATANYIEGGQYRSDSKTVNQQIYFFARDRHVHENDVILFNIDGTALSNIPYYSQHGYGSEKFDSERYDEEFVNKGEAPALPETLKNYNKLVSLGYKIIFLSGRLKDKRAVTEANLKKAGYNTWEKLILKDPSNSAENVVEYKTAERAKLVQEGYRIVGNIGDQWNDLKGENRAIRSFKLPNPMYYTK

SEQ ID NO: 23298 - protein, 392 aa, Bacillus subtilis subsp. subtilis str. 168
MEHLLNPKAREIEISGIRKFSNLVAQHEDVISLTIGQPDFFTPHHVKAAAKKAIDENVTSYTPNAGYLELRQAVQLYMKKKADFNYDAESEIIITTGAQAIDAAFRTILSPGDEVIMPGPIYPGYEPIINLCGAKPVIVDTTSHGFKLTARLIEDALTPNTKCVVLPYPSNPTGVTLSEEELKSIAALLKGRNVFVLSDEIYSELTYDRPHYSIATYLRDQTIVINGLSKSHSMTGWRIGFLFAPKDIAKHILKVHQYNVSCASSISQKAALEAVTNGLDDALIMREQYKKRLDYVYDRLVSMGLDVVKPSGAFYIFPSIKSFGMTSFDFSMALLEDAGVALVPGSSFSTYGEGYVRLSFACSMDTLREGLDRLELFVLKKREAMQTINNGV

SEQ ID NO: 23299 - protein, 415 aa, Nitrosospira sp. NpAV
MNAKNLFKLGVIGLYGMATLALSTLDISPAAAHGERSQEPFLRMRTIQWYDMKWGPDTTKVNDFATMTGKFHLAEDWPRAVGKPGRAFFNVGSPSPVFVRLSTKLNGEPTYISGPLEIGRDYAFEVKLKARIPGRHHMHAMVNIKDAGPIAGPAAWMNITGSWDDFTNPVKLLTGETIDTETFNFNNGIFWHLLWLGLGCFWIGYYVARPMFLPRSRVLLAYGDDLLLDPMDKKVAWIVLIATFGIVWGGYRYTETKHPYTVPIQAGESKVQPMPVKPNPIAIKVTHANYDVPGRALRVTMSVTNSGDTAYRIGEFTTAGVRFINKVGLKHLDRNYPKELVATGLSFDNDAPIQPGETREVKMVAKDALWEVQRLMALLGDPESRFGGLLMTWSDSGDRNINSIAGAVIPVFTKL

SEQ ID NO: 23300 - protein, 418 aa, Klebsiella oxytoca
MGDKFSISRRRLLQTGAALGGAMLLPGIMQAAWAAGSDKPEQTTVRVGFIPLTDCAPLAIASLKGFDKKYGITLVPSKEASWAAVRDKLVAGELDAAHILYGMLYGLELGIASKPQAMANLMTLNRNGQAITLSSELQEQGVTDLSGLKKRIGQHAPGSYTFAHTFPTGTHAMWLYYWLASGGINPFADIRTVVVPPPQMVMNMRIGNMSGFCVGEPWNARAINDRIGFTAATSQDIWPEHPEKILGTRSEWVTRHPNTARALVAALMEAQRWIEASADNTRETARLLARRAWLNTKEQYLTGRMLGEYDNGIGRRWQDAHPMRFYEQGEVSFPWLSDGMWFLTQFRRWGLLKSAPDYLAVAQRINRIDVWKEAAQAVGGISAPTQAMRSSTLIDGKVWNGVDPEGYARSFAIQRKGA

SEQ ID NO: 23301 - protein, 467 aa, Pseudomonas putida
MQQAQGLKRGLNARHIRFMALGSAIGTGLFYGSASAIQMAGPAVLLAYLIGGAAVFMVMRALGEMAVHNPVAGSFGHYASTYLGPMAGFILGWTYAFEMVIVAIADVTAFGIYMGFWFPEVARWIWVLGIVFLIGGLNLCNVKVFGEMEFWLSLLKVGAIVAMILAGLGIMAFGFSQVGTGHAVGVSNLFDHGGFMPNGVGGLIASFAVVMFAFGGIEIIGVTAGEAKDPQRVIPKAINAVPLRILLFYVLTLFVLMCLYPWPQIGSEGSPFVQIFSNLGIGSAAAVLNVVVISAAISAINSDIFGAGRMMYGLAHQGHAPRSFGKLSKHGVPWMTVVVMGAALLIGVLLNYLIPENVFLLIASIATFATVWVWLMILLTQVAMRRSMSREEVAQLKFPVPFWPYGPAMAIAFMVFIFGVLGYFPDTQAALIVGVIWVVFLVASYLLWCKPRAGQGQPVAEPVELHR

SEQ ID NO: 23302 - protein, 437 aa, Arabidopsis thaliana
MEESSNQQILNSETRPDPIQKPPESPATKLSFPRLFLWFDQSNRIKTLLSWSIFFLLAVIVPMISHFVLICADCDFKHRRPYDGLVQLSLSIFAGISFVSLSDWSKKYGIRRFLFFDKLKDVSDKVRIGYEVKIQRSMKLLAIFVLPSTTLQAIYRIWWYASGFNQIPYIINPTLSHVLACTLQLSSWLYRTSLFIIACILYQNICHLQVLRLDEFARCFASEIKDFSSILAEHLKIRRELKIVSHRFRRFILLSLFFVTATQFMALLTTIRASVPFNIYEVGELALCSTSLVSGLFICLKSATQMTHKAQSVTSIATKWNVCASLDTFDVLYDGETPKCPTTTQHSQILSRRRNVVQSSDDDEEGEGDDNDLEIHPIFARAISSQKRQALVTYLENNRAGITVYGFLVDKTWLRMIFSIELALLLWLLKKTIMNIT

SEQ ID NO: 23303 - protein, 356 aa, Arabidopsis thaliana
MLCIIIIENMERVCEFCKAYRAVVYCIADTANLCLTCDAKVHSANSLSGRHLRTVLCDSCKNQPCVVRCFDHKMFLCHGCNDKFHGGGSSEHRRRDLRCYTGCPPAKDFAVMWGFRVMDDDDDVSLEQSFRMVKPKVQREGGFILEQILELEKVQLREENGSSSLTERGDPSPLELPKKPEEQLIDLPQTGKELVVDFSHLSSSSTLGDSFWECKSPYNKNNQLWHQNIQDIGVCEDTICSDDDFQIPDFDLTFRNFEEQFGADPEPIADSNNVFFVSSLDKSHEMKTFSSSFNNPIFAPKPASSTISFSSSETDNPYSHSEEVISFCPSLSNNTRQKVITRLKEKKRARVEEKKA

SEQ ID NO: 23304 - protein, 610 aa, Arabidopsis thaliana
MLRSLLLRRSVGHSLGTLSPSSSTIRSSFSPHRTLCTTGQTLTPPPPPPPRPPPPPPATASEAQFRKYAGYAALAIFSGVATYFSFPFPENAKHKKAQIFRYAPLPEDLHTVSNWSGTHEVQTRNFNQPENLADLEALVKESHEKKLRIRPVGSGLSPNGIGLSRSGMVNLALMDKVLEVDKEKKRVTVQAGIRVQQLVDAIKDYGLTLQNFASIREQQIGGIIQVGAHGTGARLPPIDEQVISMKLVTPAKGTIELSREKDPELFHLARCGLGGLGVVAEVTLQCVARHELVEHTYVSNLQEIKKNHKKLLSANKHVKYLYIPYTDTVVVVTCNPVSKWSGPPKDKPKYTTDEAVQHVRDLYRESIVKYRVQDSGKKSPDSSEPDIQELSFTELRDKLLALDPLNDVHVAKVNQAEAEFWKKSEGYRVGWSDEILGFDCGGQQWVSESCFPAGTLANPSMKDLEYIEELKKLIEKEAIPAPAPIEQRWTARSKSPISPAFSTSEDDIFSWVGIIMYLPTADPRHRKDITDEFFHYRHLTQKQLWDQFSAYEHWAKIEIPKDKEELEALQARIRKRFPVDAYNKARRELDPNRILSNNMVEKLFPVSTTA

SEQ ID NO: 23305 - protein, 401 aa, Arabidopsis thaliana
MKSSRMKFAKKLKSIRAGEYLNQDRILQVLSAADEFLPKISNHIPQITSAASIWRTPQKSENQIANVTELLENVRRGEEEASGNFVGDEENVRPPVNQIPRVPCDRKESKLAVSCGSDTGIGRKSFGSGFRRPDLNSTTLFDPKLLEAFELAALCFRKIKDFSREARVNDEDDIVFPEEEEIRKDGNSIPPVISVVEYRRKDENVVILHKDDGNALQIVNAIREEVIGEEDIGKDGNTLMDPLLEFEERCPPGGEESVVFYTTTLRGIRKTFDDCNMIRFLLDSFKVKYYERDVSMHREYREELRRISAAETEVLPPVLFVKGRCIGGAQRVLGLHEQGKFKILFEGIPITGDERCRRCDGFRFLMCDGCRGSRRIISGDGSRIQCLICNENGLIVCVGCS

SEQ ID NO: 23306 - protein, 413 aa, Arabidopsis thaliana
MGLEEQGRAREDTPLLGKGRPLSGKFKTFANVFIAIVGAGVLGLPYAFKRTGWLMGLLTLFSVAALINHCMMLLVHIRRKLGVSNIGSFGDLGFAACGNLGRFVVDILIILSQAGFCVGYLIFIGNTLANLSKPTKSTTLMSLRHLMGVSPKSLYIWGCFPFQLGLNSIKTLTHLAPLSIFADVVDLGAMAVVIVEDIKITVVQRPQVVAFGGMSVFFYGMGVAVYAFEGVGMVLPLESETKDKDKFGKVLALSMLFIAVMYGSFGVLGYMAFGDDTMDIITANLGAGVVSSLVQLGLCINLFFTFPLMMNPVFEIVERRFWSGMYCVWLRWLLVLAVTLVALLVPNFADFLSLVGSSVCCALGFVLPSLFHLMVFKDEMEWKQRALDVGILLLGVILGVSGTWSSLTEIFQE

SEQ ID NO: 23307 - protein, 159 aa, Arabidopsis thaliana
MDLGRFPIISILEDMLEVPEDHNNEKTRNNPSRVYMRDAKAMAATPADVIEHPNAYAFVVDMPGIKGDEIKVQVENDNVLVVSGERQRENKENEGVKYVRMERRMGKFMRKFQLPENADLDKISAVCHDGVLKVTVQNFLLRNQRNQRQFKFKLLEFVL

SEQ ID NO: 23308 - protein, 381 aa, Solanum tuberosum
MAMSRVASTAARAITSPSSLVFTRELQASPGPKKIVGVFYKANEYAEMNPNFLGCAENALGIREWLESKGHQYIVTPDKEGPDCELEKHIPDLHVLISTPFHPAYVTAERIKKAKNLQLLLTAGIGSDHVDLKAAAAAGLTVAEVTGSNTVSVAEDELMRILILVRNFLPGHHQVINGEWNVAAIAHRAYDLEGKTVGTVGAGRIGRLLLQRLKPFNCNLLYHDRLKMDSELENQIGAKFEEDLDKMLSKCDIVVINTPLTEKTKGMFDKERIAKLKKGVLIVNNARGAIMDTQAVVDACNSGHIAGYSGDVWYPQPAPKDHPWRYMPNQAMTPHISGTTIDAQLRYAAGTKDMLDRYFKGEDFPAENYIVKDGELAPQYR

SEQ ID NO: 23309 - protein, 227 aa, Streptomyces atroolivaceus
MNLLDVTEPTGFDARLRDFLRDQSPHTTTTMVRRNQSAYSCGGQDRNVYFLESGRLKTVMFSRSGKECLLRIHTPGSIFGELCSLGGIREESAIAMRDSVVHRMSYEHFLSSITEAGIVDEFINHLTRRLAEQQQSITHLVTVDSEQRLGEILLDLARKLGRGDGRRPHIAERITHEELAGMVGTTRSRVGHFLKGFRDRGLVEVTRESHLIIDQSRLAAYLESRCV

SEQ ID NO: 23310 - protein, 579 aa, Hordeum vulgare subsp. vulgare
MGEVAAEMYTQDGTVDIKGNPALKKDTGNWRACPYILANECCERLAYYGMSTNLVNFMKDRMGMANAAAANNVTNWGGTCYITPLIGAFLADAYLGRFWTIASFMIIYIFGLGLLTMATSVHGLVPACASKGVCDPTPGQSAAVFIALYLIALGTGGIKPCVSSFGADQFDEHDDVERKSKSSFFNWFYFSINIGALVASSVLVYVQTHVGWSWGFGIPAVVMAIAVGSFFVGTSLYRHQRPGGSPLTRIAQVLVAATRKLGVAVDGSALYETADKESGIEGSRKLEHTRQFRFLDKAAVETHADRTAAAPSPWRLCTVTQVEELKSVVRLLPIWASGIVFATVYGQMSTMFVLQGNTLDASMGPKFKIPSASLSIFDTLSVIAWVPVYDRILVPAVRSVTGRPRGFTQLQRMGIGLVVSMFAMLAAGVLELVRLRTIAQHGLYGEKDVVPISIFWQVPQYFIIGCAEVFTFVGQLEFFYDQAPDAMRSMCSALSLTTVALGNYLSTLLVTVVAKVTTRGGKQGWIPDNLNVGHLDYFFWLLAALSLVNFAVYLLIASWYTYKKTAGDSPDAKGGAHDQ

SEQ ID NO: 23311 - protein, 353 aa, Mycoplasma penetrans HF-2
MENNNLKQINIELKKFENDKESINNCNGVLSKYIFGTRILSLRQKVEINNNLQVVKPFLKWVGGKTQLLNEIKKYYPFHNNQITKYAEPFVGGGAVLFDVLSKYEVKEIYISDINAELINVYSVIKYKVKELIPVLQIMEKDFLLRNTDDRKWYYLIKKNRFNELKEKEDNQFLDVEKAALMIFLNKTCFNGLYRVNKKGLFNVSMGHYKNPKICDTLNLEAISKKLKNVNIVYGDYKKSEEFIDKNTFVYFDPPYRPITSTSSFTAYNKDLFNDQNQKELADYINKLNNKGTKILLSNSDPKNSDKNDSFFDEIYSAYNIKRVKAKRMINSDGSSRGEINELLISNFDINKK

SEQ ID NO: 23312 - protein, 326 aa, Mycoplasma penetrans HF-2
MYNLSILETQKAIKFIKDLFQVNLAHALKLHRVTAPLVLERNKGINDDLNGSENPVTFTSDGNGISGEIPQSLAKWKRMMLGKYEIPLHEGIYADMNAIRKDESLSSIHSIYVDQWDWELHIKKTERNLETLKVVVKKIYEIIRLCQKEVNKKYEWFAENLLPEEITFISSEDLLQRYPNKTPKERERLIASKYKAVFIIGIGDNLSDGKPHDLRAPDYDDWKLNGDIIVWNETTKSALELSSMGIRVDEVSLVEQLDKSNNNSRKELDFHKKLINKEFPYSIGGGIGQSRLCYFLLHKQHIGEVQSSLWPKDILEEAEKNNIKLL

SEQ ID NO: 23313 - protein, 308 aa, Mycoplasma penetrans HF-2
MKFYFLLRLKMTKRSPFFYVGDKYKIIKQINKFFPKNIKRLIEPFCGGGSVFLNTEAKYYIENDNNYWMIELHKFLCSFKNNPVLFFQKLEDEITKYNLSASKMGITVPLEYKKLYIKTYFAIFNKKAYANVRNDFNKDKSNYTLLYILLIYGFNHMLRFNSKGDFNLPVGNVDYNKNVYNALENYFNFLTKGNIDFKCLDFRTFLKSLEFDKDDFIYLDPPYLITKSEYNKNWTEKDERDLLVILDEINDLGIKFALSNVLRYKDKKNNMLISWSKKYNVLKIKSNYISYHDNSTNKIIDEVLIINY

SEQ ID NO: 23314 - protein, 429 aa, Mycoplasma penetrans HF-2
MLIDKCTLFLRAGNGGNGVISWRKEAHYPEGGPWGGDGGKGGDVYIIGDHNLNSLIDLRYKKKIEAEDGENGKTKLATGKNGNDIYIKVPVGTTITNSITNEVIVDILVTGQKYLICKGGMGGKGNAYFKSSKNRIPNLCENGELGETIEAQFELKYIADVGLLGLPNAGKSTLVNSLSNTNLKTANYMFTTLSPSLGVVNFEDEHLVFADIPGIIEDASNGSGLGLDFLKHIERCHFLIHLISVANIDTENPFKDYLTIVEELKKYNKEILKRKIFIVLNKIDENDSKDNINLFLKEFKKISNKKVYQISGFFKENTNELLKDIFKDYKKHKEQWERELEEKINSYSLVKVEKEQEDIVTYEKDENRIWVVSSKRIAYWFNRIPFNTDENVTRFMQKIKMDEIEQTLKDKGAKIGDSFRIQDVMFEIN

SEQ ID NO: 23315 - protein, 288 aa, Mycoplasma penetrans HF-2
MKITWIGTGIMGKAMLNRLASHGHIIHAYNRTYEKMNDLNHPNILKFRSIKDAVKDTNIIMTMVGYPSDVLDIYLNDEYGIFNYVSSEQICIDFTTSSPNFAVQLANNSKGIKVLDAPVTGGDIGALNGTLSIMVGGDFETFKKVESILKILGNKINYFGSAGKGQHAKLFNQILVAVNTFATAEVLNYCKKNNVDIEAAYKVFDKTIGNNWQLKNNGIKMLSSDLKPGFYIKHFIKDLKLVKENENDYLYGLNEILKLYQDFANQNELVNELGTQSIYELLKNIGEK

SEQ ID NO: 23316 - protein, 270 aa, Mycoplasma penetrans HF-2
MISSNKPQTTRNMIEISYDSIEDCVINFIDTPGLHNPKNKLDLFLNSQVKASLKKSDLVLFLFDLSRDFDSEDEECLKVLKDFNCNNVVLVLNKRDLKSEEEIKNAKQSISKMFDFTNVLEINSKSKEDVSVLLNTIKEHIKEYEGEKKDLELLKKEVSDKFFVSELIREIIINSFRQEIPYGVAILIDEMKYEQDKNLLTIVYSIIVEKESQKPIIIGKGGSMIKKINISLRERLSDIYDCKIFTNSYVKVKKDWRNNETQIKELGYKK

SEQ ID NO: 23317 - protein, 705 aa, Mycoplasma penetrans HF-2
MEFNFEPSNEKDILKKYSRNLNEEVSANKLNKIIGREQEIRRVIEILSRKEKNNPVLIGEPGVGKTAIVEGFVQKIISKEVPENLVHCVVYEVNLSSLIAGTFLQGEFEKRLNALIKEAKQNNGAVILFIDEIHQLMGMGKAGNNSGMDAANILKPIMARGEIKIIGATTSNEYRQYIEKDGALERRFQKILVEEPTPEEALTIMRGLKEKWEIYHKVRIQDNALVASVKLSERYISDKYLPDKAIDLIDEAAAKIKTEAHTSPSEPINKKIFYLETEKIALSKEEGTNQKERINEIEIELEKLKQERDLVEKEWKEQKEQQVALNKIKKEIEKNNWDVERYQNQGEYTEASKILYSVLPELKKKLEAIEKSISENKKVLIKDYISEIDVAEIISRITKIPLNKIFEKEQDKLLNLFNNLKKRVKGQDEALKLVSDTVLKNRVGINNPNRPIGSFLFVGPTGVGKTEVAKSLAENLFNTEKAIVRINMSEYMEKHSISRLIGAPPGYIGYEQAGELSEQIRRKPYSVVLLDEIEKAHPDILNVLLQVLDEGTLKDNQGRNINFKNTIIIMTSNVGALYLMENKEDMFERELKTSFKPEFLNRIDEIIKFNSITMEFAKEIAQKMLDDLEKRLKDNNYQITFDKSVVEYVAKNGYSKEYGARPINRFIQKTIENFITESILKNELIKDRSTIINFANNKLAILKSN

SEQ ID NO: 23318 - protein, 100 aa, Mycoplasma penetrans HF-2
MFAIFEVGSKQYKVQKGDVIYVEKQDKKVGESISFDKVLMVDATIGKPYIKNATVSCKVEKQGKQKKIFIIKHKRYTRSLKRQGHRQPYTKLVVTGINVK

SEQ ID NO: 23319 - protein, 324 aa, Mycoplasma penetrans HF-2
MKIIQNIKKDVSSLGYKPTIVYAEGWNKTIQEAATQVKNENLVDVVVIFRTQEELNGFNNTANVKTIVIENSDLSQYANLLFDLRKEKGLSYEDAVKLSKEPNYLACLMVKSNENWGAICGIEYTTKDTLRAALQVIKAKKGSIVNSIMILEREDKSIFASDIGLVINPSAEELSKIVYNCVDFIVNTLKIVNNNVAMLSYSTNGSGAGESVDKVKQAFELYKTLPQNPHANVYGEIQFDAAVDSKIRSKKSPDCTWSGDANVFVFPNLDAGNISYKILQRYAGFEPTGPIIIGLDKPVNDLSRGAGLFEVVSLSYVTALQTKN

SEQ ID NO: 23320 - protein, 396 aa, Mycoplasma penetrans HF-2
MSKSILVINAGSSSLKFKLYDWNMAELVSGICERIGIDGFFKIEYKSNHETKKYEGNADFQNHDLAIDYLFNKLVELKIVDNLEDIVGVGHRIVQGGSLSESSLVDDKILKIIEDCITLAPLHNKPEADVLKIVMNKIPNTKNVAVFDTSFHTSIPKINSYYAIPKEWIENYGIKKYGFHGTSYRYITEKMHDILNINRPLNLIICHLGNGASVCCVKEDKSFDTTMGLTPLCGLIMGTRSGDIDPSVFDLVAKETGMSAAEIFNKLNKESGLKSICGSSDFRDIESNTQPGNDYEFATEIFVQRIVNYIAMYKNMLEDKVDGIVFTGGIGENVWNVRKQICQKIKGLDLNPSINETRVGEWARISQPLSRHKVFVVRTNEELKIAQDTQKIVSNN

SEQ ID NO: 23321 - protein, 359 aa, Mycoplasma penetrans HF-2
MEDKTLNINVPKNELGAISNIKANFPSLAERSVVGVFVASNYKANKKYLKTFLEGMLAGFFVAIGYYVALYGASKFADAGVQTVLIGAMFPVAILLITFVGGSLFTTNCLGFTNACVKDVKFNKFFKNLAICYGGNIVGSLVVFLILLAMGVLVPYLKDSNGNNAYTDHGAFTQLAADFTLKKIGELGTALRTGESISAGLVIGTFFSNFFSGIICNVFVCVTLYITFSTKNIAAVVIMLWLTIFVFVISGTPHCVANLILFFCNISQSLVVSSGMDSANILAQSGQTFLPVETPYLFLGVNIIPSILGNFIGGGILIPGIVYLIYKDKIQKISKELSSESIADSAKELVSKLHSSIAL

SEQ ID NO: 23322 - protein, 545 aa, Mycoplasma penetrans HF-2
MRKITIGNYLLERLSEIGIKDIFGVPGDFNLGFLDDIIKNEDLNWIGCTNELNASYSVDGYARVNGIGAILTTYGVGELSAVNGIAGSYSEDVPVIHIVGTPKREYFKRHMILHHSLGTSDSFGAYKKIYENITSLTVWLDAKNAINQINNAIKYAVFYKKPVYIMIPQDVASFEIMADSDLLSFASGFDLEEHKEIIEDVKNKINNSNQAVIISGHKVIRYGLKSDLEKFVNRNGINVVTTGFGKGSVDETNELYLGVYSGLKTPDAAIAKIIDTADLVLIIGNKFTDLTSSFFQLNFNKDNVVEISDTHVKYDNKIFTNHSFGFLVKMLANDTNINYKGLSVLENRVAVEFNPTEEKITYNRLQVALNNYFVEKDILVSDVGTCTFLSQYIQLKKDMKFIMQPLWASIGFSFPASIGAQIASNSKVVNILGDGAFNMVFNELITVINKQIPITTILLNNNGYTIEKVIHGDGKPYNELPKVNYSQLIKAFDPEGEKSISLRVTNEIELQEALVISRSSDKFVFIEVCLEQNDIPEALKGFFNK

SEQ ID NO: 23323 - protein, 248 aa, Mycoplasma penetrans HF-2
MEKLTIENLHVSINEKEILKGIDIEVNKGEVVALLGPNGHGKSTLLKAIMHHYTTEITDGSIKVDGQDTAELETDEIARLGLFLAPQHSEEIPGVTMLDFLRSVLNARSEEKLKLSQYFPVFEQNLKSMGLDREYLNRFVNYGFSGGEKKKCEILQMKIIQPDFVLLDEIDSGLDIDSLKMVVDQINNWKSEDKALIVVSHHENLFKKIIPNRVYVIIDGKIAISGGVEIYERINREGYKWVTDLASK

SEQ ID NO: 23324 - protein, 332 aa, Mycoplasma penetrans HF-2
MIDNINNCIIFGLSNGYLYAKEVAEKTNIQLGTIKTSKFADGEILVKSNSTVRGMHVFLFQSTCNPVNDNLMELLIAIDSLKRASAKTITVIIPYFGYARQDRKAKGREPITCKLVANFLEGAGATKVILIDIHSEQTQGFFDIPVDTLTASCVLFNEFRKNNPSVIKNLTVVAPDYGAVKNVRKITETLNLNLAIMDKRRPQPNVVEISNVLGDVMGRDCLLLDDMIDTGGTILQNIELLKERGCKKIFVMATHGVFSNGALEKFKLALDKGLIDQLYVADTIEANTKIEHPNIKVVSLSNFYAEILDAQINHKSVSKIYEKYWNMVLCGC

SEQ ID NO: 23325 - protein, 529 aa, Fragaria x ananassa
MGNCCVTPPQTGSPLKNKKNKPNPFAIDYVVANGGKLSVLKNPTGTEIEQTYELGRELGRGEFGITYLCTDKATNENYACKSISKQKLRTAVDIEDVRREVEIMKHLPKHPNIVSLKDTYEDDNAVHLVMELCEGGELFDRIVSRGHYTERAAAAVTKTIVEVVQMCHKHGVMHRDLKPENFLFANKKETAPLKAIDFGLSVFFKPGERFSEIVGSPYYMAPEVLRRNYGPEVDVWSAGVILYILLCGVPPFWAETEQGVAQAIIRSVVDFKRDPWPKVSDNAKDLVKKMLDPDPKRRLTAQQVLDHTWLQNAKRAPNVSLGETVRARLKQFSVMNKLKKSALKVIAEHLSQEEVAGIQEGFKIMDTSNKGKINIDELRVGLHKLGHQIPDADVHILMEAGDVDNDGYLDYGEFVAISVHLRRMGNDDEHLRKAFDFFDQNKSGFIEVEELRTALATEVDDHVEDVISAIISDVDTDKDGKISYEEFATMMKAGTDWRKASRQYSRERFNSLSLKLMRDGSLEGKTESK

SEQ ID NO: 23326 - protein, 1408 aa, Filobasidiella neoformans
MSASPGLTAAAAGPDHLQARRDEKVIDSEKDALAHDAHAVNSGIPYPTATAPNVGAPTVPISVGRVSSAAEGKISRSSIAASSDTLRNSPLEKPISNAFSKSHPYKKSKFDFLKSRKKKEEEERKNKEKEKEASVLPPVSFFALFRFAAPLEIIAMVLGLVLAVAAGSCQPLMTLIFGRLTTSFTNYAVIANQISQGGLTPETSAALQAAKDDLKTQSGHNALYLMAIGIGMFLATWLYMFIWNVTGELNSKRIRERYLAAVLRQEIAYFDDLGAGEVATRIQTDCHLVQEGTSEKVALVFQYAGTFVCGFVLAFVRSPRLAGALVSILPVIMLCGGIMMTAMAKYGTAALDHIAKAGSLAEEVIGSIRTVQAFGKEKILGDKFADHIEQSKIVGRKGSIFEGFGLSIMFFVIYAAYALAFFYGGILVSNGQADSGIVINVFMSILIGSFSMAMLAPELAAVTKARGAAAKLFATIDRVPAIDSASEEGFKPDGLRGEISFENVKFHYPSRPSIPILKGFTTTFEAGKTFALVGASGSGKSTVVSLIERFYDPVSGVVKLDGRDIRSLNLNWLRQQIGLVSQEPTLFGTTVRGNVEHGLIGSRYENASLEEKFELVKKACVDANAHNFIMKLPQGYDTMVGERGMLLSGGQKQRVAIARAIVSDPRILLLDEATSALDTQSEGIVQDALDKASRGRTTITIAHRLSTIRDADRIYVMGGGEVLEQGSHNDLLANENGPYAQLVNNQKLAQEAAAEALQVDDDIEDPDDAVFIGGSSPMQEKDKQLHRAVTGRSLASIAMDDIQAKRAEEVAGEDKIPSSFGLYARLLRMNSADKFIYIIAFIAAICAGMVYPSLAILFGKALSDFEIQDPAELRHALSRSALWYFITALAAAFVIFFQSAGFSRAGWDLNGVLRKKLFTATLRHDIEWFDEERNSTGAVTSNLADQPQKVQGLFGPTLGTVVQSCATLIGGCIIGLCYGPLLALIGIACIPILVSGGYIRLKVVVLKDQRMKKLHAASAHLASEAAGAVKTVASLTREKDVRRIYSEALKAPMKLNFRTSIKSQCLFAASQGLTFCIIALVFYIGALWIIDAKYSTASFYTVLNSIVFASIQAGNVFTFVPDASKANSSAASIFRSIDNEPAINAESNEGKVLDHKHVVGHVRIEGVHFRYPTRPGVRVLRNLTIDVPAGTYVALVGPSGCGKSTTIQMLERFYDPLAGRVTLDGIDIKELNLASYRSQISLVSQEPTLYAGTIRFNILLGANKPIEEVTQDEIDAACKDANIYDFIVSLPDGFDTEVGGKGSQLSGGQKQRIAIARALIRNPKVLLLDEATSALDSQSEKVVQEALDKAAKGRTTIAIAHRLSSIQHSDRIYYFSEGRVAEHGTHQELLAKKGGYYELVQMQNLSRQ

SEQ ID NO: 23327 - protein, 219 aa, Helianthus annuus
MKSFTGTTQKCTVCEKTVYLVDKLVANQRVYHKACFRCHHCNSTLKLSNFNSFDGVVYCRHHFDQLFKRTGSLEKSFDGTPKFKPERTFSQETQSANRLSSFFEGTRDKCNACAKIVYPIERVKVDGTAYHRACFKCCHGGCTISPSNYIAHEGRLYCKHHHIQLFKKKGNYSQLEVEETVAAPAESETQNTETQNAETQNADTQNADTQNTETQNGSV

SEQ ID NO: 23328 - protein, 1307 aa, Aspergillus flavus
MKSDKDILMKPLPKSPGTGSTTTGHSVSHAEEVLDRQLHTPVSQIGFFGIYRYATRWDVAILFGSALAAIAGGAALPLFTVLFGRLTSTFQDIATHRITYDHFHHELTKNVVYFIYLGAAEFVAIYLATVGFIYTGDHVVQQIRVEYFQAILRQNIAFFDTLGAGEITTRITADTNLIQDGISEKVGLALTGLSTFVTAFIIAYIKNWKLALICSASLLALLLTMGGCSTLMLIFSKKALEYQGRGASMAEDILDSIRTVAAFNAQETLARKYESHLKDAEGPGMKSKVIFAIMVGALLCIMYLNYGLGFWMGSRFLVEGISNIKAGDVLTIMMAIILGSYNLGNVAPNGQALSDAVAAASKLYGTIDRQSPLDALSDQGKTLEFVRGNIVLQNIRHVYPSRPEVTVAHDLSCYIPAGKTTAFVGPSGSGKSTIISLLERFYDPVAGTIMLDGHDIQTLNLRWLRQQMSLVSQEPRLFATTIAENIRYGIIGSRFEKESTYEIRKRVEAAARMANAHDFIMALPNGYDTNIESFSLSGGQKQRIAIARAIIKDPKILLLDEATSALDTKSEKLVQAALDKASKGRTTIVIAHRLSTIQKAYNIIVLANGQIVEQGPHEHLMDRRGIYCDMVEAHEIKKRYSRYSKRYSQLLTNLSPKHNPMTFFFDKDYPGDDESDIYSILSDDASDIGLHTGEKQRPVSRMSLSHLMQPVKEEAYSFWTLFKFLASFNRPEWPFLLLGLCASILAGGIQPSQAVLFAKAVSTLSLPPLEYPKLRHDANFWCLMFLMIGIVSLVLYSVQGTLFAYSSEKMVYRARSQAFRVILHQDISFFDQQENTTGALTATLSAGTKELTGISGVTLGTILIVSVNLVASLGVALVIGWKLALVCISAVPALLMCGFVRVWMLERFQRRAKKAYQESASSACEAASAIRTVVSLTMETEALQSYQAQLRRQLKSDILPIVKSSLLYASSQALPFFCMALGFWYGGSLLGHGEYSLFQFYVCFSEVIFGAQAAGTVFSHAPDMGKAKHAAREFKRLFSSDTMHASRSKGVPVTSMRGLVEFRDVSFRYPSRLEQPILRHLNLTIKPGQFVALVGASGSGKSTTIALLERFYDPLKGGVYVDGKNIITLEMSSYRSHLALISQEPTLFQGTIRENILLGSNTPHVTDDFLVKACKDANIYDFILSLPQGFNTIVGNKGGMLSGGQKQRIAIARALIRNPKILLLDEATSALDSESEKVVQAALDAAARGRTTIAVAHRLSTIQRADLIYVLDQGEVVESGTHRELLRKKGRYYELVHLQNPDATGTK

SEQ ID NO: 23329 - protein, 791 aa, Aspergillus fumigatus
MRGIRSLPCWAPGLSTKRIPPRELFADLFPNACVISARHSARNGLIRQFSGCSGSISNSCNPRPYRSAITSLLSANVCSKGVSAVQPRFLSTVRLFSTSQRSLEPKSNVKSTGGQVVRPELHQDQEHEDIEKGFELSERAAQAAQVNLSAKLAKDGAAGKKAGFKEIWRLLLIARPEAKKLALAFLFLLVSSGITMSIPFSIGKIMDTSTKATTEGGNELFGLSLPMFYGALAGILTLGAAANYGRIIILRIVGERIVARLRSKLFRQTFVQDAEFFDANRVGDLISRLSSDTIIVGKSITQNLSDGLRAAVSGAAGFGLMAYVSLKLSSILALLLPPIGLGAFFYGRAIRNLSRQIQRNLGTLTKIAEERLGNVKTSQSFAGEVLEVRRYNNQVRKIFELGKKESLISATFFSSTGFAGNMTILALLYVGGGMVQSGAITIGELTSFLMYTAYAGSSMFGLSSFYSELMKGVGAASRLFELQDRQPTISPTKGEKVASARGPIRFENVTFSYPTRPAVPIFRDLNFEIPQGTNVAIVGPSGGGKSTIASILLRFYSPTEGRVLIGGKDITHMNAKSLRRKIGIVSQEPVLFSGTIAENIAYGKPQAKRSEIVAAARKANCQFISDFPDGLDTQVGPRGAQLSGGQKQRIAIARALIKDPDILILDEATSALDAESETLVNSALTALLRGNNTTISIAHRLSTIKRSDTIIVLGPDGRVAEQGSYEELSARPDGAFTKLMEWQMSGGEVMDQLANTPANPVAQETSWDLQSDDGTEISEDTNIPSEPRKID

SEQ ID NO: 23330 - protein, 432 aa, Crataegus crus-galli
MAQILAPTSQWRMKVTRSSATASPMTAKMWGSLVLKQNKKGPARSSTKFRVLATKSEGYTINRLEGLLNLDLTPFTDKIIAEYIWIGGSGVDVRSKSRTISKPVEDPSELPKWNYDGSSTGQAPGEDSEVILYPQAIFKDPFRGGNNILVICDAYTPQGEPIPTNKRARAAEIFKNKKVIDEVPWYGIEQEYTLLQTDVKWPLGWPIGGYPGPQGPYYCGAGADKSFGRDISDAHYKACLYAGINISGTNGEVMPGQWEYQVGPSVGIEAGDHIWASRYILERITEQAGVVLTLDPKPIEGDWNGAGCHTNYSTKSMREDGGFEVIKKAILNLSLRHVEHISAYGEGNERRLTGKHETASINTFSWGVANRGCSIRVGRETEKQGKGYLEDRRPASNMDPYIVTSLLAETTLLWEPTLEAEALAAQKLALNV

SEQ ID NO: 23331 - protein, 429 aa, Spiraea nipponica
MAHILAPTTQWQTRITKNATSASPMTAKMWGSLLLKQNKKGPTKTSTKFRVLAVKSEGYTINRLEGLLNLDLTPFTDKIIAEYIWIGGTGVDVRSKSRTISKPVEHPSELPKWNYDGSSTGQAPGEDSEVILYPQAIFKDPFRGGNNILVICDAYTPQGEPIPTNKRAKAAEIFAKQKVIDEVPWYGIEQEYTLLQTDVKWPLGWPVGGYPGPQGPYYCGAGADKSFGRDISDAHYKACLYAGINISGTNGEVMPGQWEYQVGPSVGIEAGDHIWASRYILERITEQAGVVLTLDPKPIEGDWNGAGCHTNYSTKSMREEGGFEVIKKAIHKLSLRHKEHISAYGEGNERRLTGKHETASINTFSWGVANRGCSIRVGRETEKQGKGYLEDRRPASNMDPYIVTGLLAETTLLWEEAEALAATKLEQNV

SEQ ID NO: 23332 - protein, 224 aa, Gazania splendens
GYPGPQGPYYCGAGADKSFGRDISDAHYKACLYAGINISGTNGEVMPGQWEFQVGPSVGIEAGDHIWCARYLLERITEQAGVVLTLDPKPIDGDWNGAGCHTNYSTLAMREDGGFEVIKKAILNLSLRHMEHISAYGEGNERRLTGKHETASINTFSWGVANRGCSIRVGRDTEKAGKGYLEDRRPASNMDPYTVTGLLAETTLLWEPTLEAEALAAQKLALNV

SEQ ID NO: 23333 - protein, 430 aa, Lotus japonicus
MAQILAPSTQWQTRITKTSPNASPITSNMWSSLLWKQNKKVARASKFRVLAIKSDGSTINRLEGLLNLDVTPYTDKFIAEYIWIGGTGVDVRSKSRTISKPVSHPSELPKWNYDGSSTGQAPGDDSEVILYPQAIFRDPFRGGNNILVICDAYTPQGEPIPTNKRHRAAEIFSNPKVQAEIPWYGIEQEYTLLQTDVKWPLGWPVGGYPGPQGPYYCAAGADKSFGRDISDAHYKACLYAGINISGTNGEVMPGQWEYQVGPSVGIEAGDHIWASRYLLERITEQAGVVLTLDPKPIEGDWNGAGAHTNYSTKSMREEGGFEVIKKAILNLSLRHQDHIRAYGEGNERRLTGKHETADINTFSWGVANRGCSIRVGRDTEKEGKGYLEDRRPASNMDPYVVTALLAETTLLWEPTLEAEALAAQKIQLKV

SEQ ID NO: 23334 - protein, 409 aa, Ochromonas danica
YSIEDLAHVIYDLHYINPRAAVSVKLVSEEGIGTVASGVAKAGADIIQISGHDGGTGASPAASIKHAGSPWELGLVEAHSVLRKNGLRDRVLLRADGGLKSGWDVVMAAAMGAEEYGFGTIALIAEGCIMARICHTNKCPVGVTTQNEALRKRFVGTPEHVVTFFQFVAEEVRHILAKLGYRSLEEIIGRPGLLQPRKSLSLRKVSRLDVSYLLTSLTCMPETGENFCDVDIDRSWLEHKSVETKRKESGVITVDERLLSDALMQKAINEHDKYNRAYHLVNTDRSAFARISGVLTEKYGDNGFEGSLEFDLTGAAGQSFGAFLSRGMDLNLKGYANDYVGKGMAGGVISIRAPEEELIQTKRSLALAGNTLLYGATGGKLFIGGRVGERFAVRNSGGLAVVEGMGDHG

SEQ ID NO: 23335 - protein, 526 aa, Saccharomyces cerevisiae
MSTIPFRKNYVFKNWAGIYSAKPERYFQPSSIDEVVELVKSARLAEKSLVTVGSGHSPSNMCVTDEWLVNLDRLDKVQKFVEYPELHYADVTVDAGMRLYQLNEFLGAKGYSIQNLGSISEQSVAGIISTGSHGSSPYHGLISSQYVNLTIVNGKGELKFLDAENDPEVFKAALLSVGKIGIIVSATIRVVPGFNIKSTQEVITFENLLKQWDTLWTSSEFIRVWWYPYTRKCVLWRGNKTTDAQNGPAKSWWGTKLGRFFYETLLWISTKIYAPLTPFVEKFVFNRQYGKLEKSSTGDVNVTDSISGFNMDCLFSQFVDEWGCPMDNGLEVLRSLDHSIAQAAINKEFYVHVPMEVRCSNTTLPSEPLDTSKRTNTSPGPVYGNVCRPFLDNTPSHCRFAPLENVTNSQLTLYINPTIYRPFGCNTPIHKWFTLFENTMMVAGGKPHWAKNFLGSTTLAAGPVKKDTDYDDFEMRGMALKVEEWYGEDLKKFRKIRKEQDPDNVFLANKQWAIINGIIDPSELSD

SEQ ID NO: 23336 - protein, 647 aa, Cucurbita maxima
MAGKGEGPAIGIDLGTTYSCVGVWQHDRVEIIANDQGNRTTPSYVAFTDSERLIGDAAKNQVAMNPINTVFDAKRLIGRRFSDAPVQSDIKLWPFKVIAGPGDKPMIVVSYKGEDKQFAAEEISSMVLIKMREIAEAYLGSTVKNAVVTVPAYFNDSQRQATKDAGVIAGLNVMRIINEPTAAAIAYGLDKKATSVGEKNVLIFDLGGGTFDVSLLTIEEGIFEVKATAGDTHLGGEDFDNRLVNHFVQEFKRKNKKDISGNPRALRRLRTSCERAKRTLSSTAQTTIEIDSLYEGIDFYSTITRARFEELNMDLFRKCMEPVEKCLRDAKMDKSTVHDVVLVGGSTRIPKVQQLLQDFFNGKELCKSINPDEAVAYGAAVQAAILSGEGNEKVQDLLLLDVTPLSLGLETAGGVMTVLIPRNTTIPTKKEQVFSTYSDNQPGVLIQVYEGERTRTRDNNLLGKFELSGIPPAPRGVPQITVCFDIDANGILNVSAEDKTTGQKNKITITNDKGRLSKEEIEKMVQEAEKYKSEDEEHKKKVEAKNALENYAYNMRNTVNDEKIGAKLSQADKKKIEDAIEQAIQWLDANQLAEADEFEDKMKELESICNPIIAKMYQGAGADMGGGADDSVPAGGSGAGPKIEEVD

SEQ ID NO: 23337 - protein, 652 aa, Cucurbita maxima
MAGKGEGPAIGIDLGTTYSCVGVWQHDRVEIIANDQGNRTTPSYVAFTDNERLIGDAAKNQVAMNPINTVFDAKRLIGRRFSDSSVQSDIKLWPFKVIAGPGDKPMIVVNYKGEEKQFSAEEVSSMVLIKMKEIAEAYLGTTVKNAVVTVPAYFNDSQRQATKDAGVISGLNVMRIINEPTAAAIAYGLDKKSTSTGEKNVLIFDLGGGTFDVSLLTIEEGIFEVKATAGDTHLGGEDFDNRLVNHFVQEFKRKNKKDISGNPRALRRLRTACERAKRTLSSTAQTTIEIDSLYEGIDFYSTITRARFEELNMDLFRKCMEPVEKCLRDAKMDKSTVHDVVLVGGSTRIPKVQQLLQDFFNGKELCKSINPDEAVAYGAAVQAAILSGEGNEKVQDLLLLDVTPLSLGLETAGGVMTVLIPRNTTIPTKKEQVFSTYSDNQPGVLIQVYEGERARTRDNNLLGKFELSGIPPAPRGVPQITVCFDIDANGILNVSAEDKTTGQKNKITITNDKGRLSKEEIEKMVQEAEKYKADDEEHKKKVEAKNSLENYAYNMRNTVRDEKFSSKLDPADKKKIEDAIEGAVQWLDNNQLAEADEFEDKMKELESICNPIVAKMYQGAGGPGMGGAAMDDDDVPPPSGGSGAGPKIEEVD

SEQ ID NO: 23338 - protein, 650 aa, Cucurbita maxima
MAGKGEGPAIGIDLGTTYSCVGVWQHDRVEIIANDQGNRTTPSYVGFTDTERLIGNAAKNQVAMNPINTVFDAKRLIGRRFSDSSVQSDIKLWPFKVIPGPGDKPMIEVNYKGEEKQFAAEEISSMVLIKMREIAEAYLGFNVKNAVVTVPAYFNDSQRQATKDAGVIAGLNVMRIINEPTAAAIAYGLDKKATSVGEKNVLIFDLGGGTFDVSLLTIEEGIFEVKATAGDTHLGGEDFDNRLVNHFVQEFKRKHKKDISGNPRALRRLRTSCERAKRTLSSTAQTTIEIDSLYEGIDFYSTITRARFEELNMDLFRKCMEPVEKCLRDAKMDKSTVHDVVLVGGSTRIPKVQQLLQDFFNGKELCKSINPDEAVAYGAAVQAAILSGEGNEKVQDLLLLDVTPLSLGLETAGGVMTVLIPRNTTIPTKKEQVFSTYSDNQPGVLIQVYEGERTRTRDNNLLGKFELSGIPPAPRGVPQITVCFDIDANGILNVSAEDKTTGQKNKITITNDKGRLSKEEIEKMVQEAEKYKSEDEEHKKKVEAKNALENYAYNMRNTVNDEKIGAKLSPADKKKIEDAIEQSIQWLDANQLAEADEFEDKMKELESICNPIIAKMYQGAGADMGGAGDDSIPTGASGGSGAGPKIEEVD

SEQ ID NO: 23339 - protein, 560 aa, Pseudomonas putida KT2440
MDIKRTILIAALAVVSYVMVLKWNDDYGQAALPTQNTAASTVAPGLPDGVPAGNNGASADVPSANAESSPAELAPVALSKDLIRVKTDVLELAIDPVGGDIVQLNLPKYPRRQDHPNIPFQLFDNGGERVYLAQSGLTGTDGPDARASGRPLYAAEQKSYQLADGQEQLVVDLKFSDNGVNYIKRFSFKRGEYDLNVSYLIDNQSGQAWNGNMFAQLKRDASGDPSSSTATGTATYLGAALWTASEPYKKVSMKDIDKGSLKENVSGGWVAWLQHYFVTAWIPAKSDNNVVQTRKDSQGNYIIGYTGPVISVPAGGKVETSALLYAGPKIQSKLKELSPGLELTVDYGFLWFIAQPIFWLLQHIHSLLGNWGWSIIVLTMLIKGLFFPLSAASYRSMARMRAVAPKLAALKERFGDDRQKMSQAMMELYKKEKINPLGGCLPILVQMPVFLALYWVLLESVEMRQAPWILWITDLSIKDPFFILPIIMGATMFIQQRLNPTPPDPMQAKVMKMMPIIFTFFFLWFPAGLVLYWVVNNCLSISQQWYITRRIEAATKKAAA

SEQ ID NO: 23340 - protein, 175 aa, Pseudomonas putida KT2440
MKLLILDRDGVINYDSDAYIKTLEEWVPIPGSVDAIAQLSKAGWTVAVATNQSGIARGYYPLATLEAMHARLRALVAEQGGEVGHIVYCPHGPDEGCDCRKPKPGMLRAIAEHYQIGLEGVWFVGDSKGDLEAALAVGAQPVLVKTGKGERTLEKGVPETTLIFDDLAAIARELI

SEQ ID NO: 23341 - protein, 521 aa, Pseudomonas putida KT2440
MHRLSLLLPFLTWLPRQSGRSLRQDLLVGLSGAILALPQSIAYALIAGLPAEYGLYAAIVPVLIACLWGSSWYLICGPTAAISIVLYASISPLAVAGSADYITLVLLLTFLGGIFQLLLGLLRFGALVNFVSHSVVLGFTLGAAIVIALGQLPNLLGMALPSQATALMTVQDLASHAGEVDLPSLLLGLATVVIGAAFKLWRPRWPSLLISLILVSLLAWLLPGFFGHVPRVAAFTGQLPPFSPLPLLDMELMLRLLPSAVAVGMLGLVTSLSIARSLSARSEQLIDPDQEIRAQGLSNIAGAFFSGYLSAGSFTRSGLSYEAGARSPMAGVFSALWVALFAVTGAGLIAHLPIPAMAGSILLICWGLVDHRGIRALFRVSRSEFLVMALTAAATLLLELQTAIYAGVLASLFFYLKRTSRPRIQQSREGDADVLRVGGSIFFGAAHYLQVRLQRCQGPHVVIDARQVNFIDYSGVDMLHREARRLRRLGGSLTLHRARPQVIEELQKLEGVELCPIRFEE

SEQ ID NO: 23342 - protein, 653 aa, Pseudomonas putida KT2440
MNPPVFYFAASFILIFGLVVISNPQAAGDWLLAAQNWAANTVGWYYMLAMTLYLVFVVVTALSGYGKIKLGADHDEPEFSYLSWAGMLFAAGISITLFFFCVSEPLTHMLQPPQGEAGTVEAGRQAMQILFLHWGLHGWGVFAFVGMALAYFAYRHNLPLALRSALYPLIGKRINGPIGYAVDGFGIIATVFGLGADMGFGVLHLNAGLDYLFGISHSQWVQVILITLMMGAAVAVAVAGVEKGVRVMSDINLFLACALLLFVLFAGPTQHLFNTLIQNLGDYLGALPRKSFDVYAYGENRGWLGGWTVFYWAWWIAWAPFVGLFIARISRGRTIREFVFGVLLIPLGFTLAWMSIFGNSALDQVINHGMTALGQSALDNPSMSLYLLLETYPWSKAVIATTVFISFVFFVTSADSGTVVLSTLSAKGGDADEDGPNWLRIFWGAMTALITSALLFAGSIDSLKSAVVLTSLPFSLILLCMMWGLHKAFYLESQRQIAQMHSLAPFAQSRRGRGGWRQRLSQAVHFPSRDEVYRFMDDVVRPAIADVREVFEQKGLVLITQDDPSHDNVSLKIGHGEEQPFIYQVQMRGYFTPSFALGGLGTQELKNRRYYRAEVHLSEGSQNYDLVGYSKEQIINDILDQYERHMQYLHLVR

SEQ ID NO: 23343 - protein, 368 aa, Pseudomonas putida KT2440
MNMSDTFLNPVTTQTWANGRHIVRCVKVIQETWDVRTFCFMADQPIMFFFKPGQFVTLELEIEGKPVMRSYTISSSPSVPYSFSITVKRVPGGLVSNFLHDTMHEGAELPVHGPVGLFNAIDFPAGKVLYLSGGVGITPVMSMARWFYDTNANVDMVFVHSARSPKDIIYHRELEQMASRIPNFSLHIICEKHGLGEPWAGYRGYLNQRLMELIAPDYMERVVFCCGPTPYMTAVKRMLEAVGFDMKNYHEESFGATPPEAKADAVEHAEQAADAPELDVSDLNLVEFIGSEKSIRIAPGETVHAAAAKVGLMIPKACGMGICGTCKVLKLGGEVEMEHNGGITEEDEAEGYILSCCSVPKGDVRIDY

SEQ ID NO: 23344 - protein, 560 aa, Pseudomonas putida KT2440
MNKKNRHPADGKKPITIFGPDFPFAFDDWLEHPAGLGSIPAERHGEEVAIVGAGIAGLVAAYELMKLGLKPVVYEASKLGGRLRSQAFNGTDGIVAELGGMRFPVSSTAFYHYVDKLGLETKPFPNPLTPASGSTVIDLEGQTYYAEKPTDLPQLFHEVADAWADALESGAQFADIQQAIRDRDVPRLKELWNKLVPLWDDRTFYDFVATSRSFAKLSFQHREVFGQVGFGTGGWDSDFPNSMLEIFRVVMTNCDDHQHLVVGGVEQVPQGIWRDVPERCVHWPEGTSLSTLHGGAPRTGVKRIARAADGRLAVTDNWGDTRHYSAVLATCQTWLLTTQIDCEESLFSQKMWMALDRTRYMQSSKTFVMVDRPFWKDKDPETGRDLLSMTLTDRLTRGTYLFDNGNDKPGVICLSYSWMSDALKMLPHPVEKRVQLALDALKKIYPKTDIAGHIIGDPITVSWEADPYFLGAFKGALPGHYRYNQRMYAHFMQQDMPAEQRGIFIAGDDVSWTPAWVEGAVQTSLNAVWGIMNHFGGHTHPDNPGPGDVFNEIGPIALAD

SEQ ID NO: 23345 - protein, 482 aa, Pseudomonas putida KT2440
MPSEHSAGSPAGSSVDFEKVGSDYFQQRELKKGAAGWVLLVGLGVAYVISGDYAGWNFGLAQGGWGGMFLATLLMATMYLCMCFSLAELSSMIPTAGGGYGFARSAFGPWGGFLTGTAILIEYAIAPAAIAVFIGAYCQSLFGIGGWMIYLAFYIVFISIHIFGVGEALKLMFIITAIAAIALAVFLIGMVPHFDAANLFDIAKTDAVGASSFLPFGYVGVWAAIPYAIWFFLAVEGVPLAAEETKNPKRDLPRGLIGAMLVLLAFALLILVVGPGGAGSEALKASGNPLVEALSKAYGGSTWMGGFVNLVGLAGLIASFFSIIYAYSRQIFALSRAGYLPRKLSETNKSKAPVLALVIPGIIGFALSLTGQGDLLILVAVFGATLSYVLMMAAHITLRIRRPKMERPYRTPGGIFTSGLALVLACIAVVAGFLVDPRVVIGAAVIYAVLIAYFAFYSRHHLVAGTPEEEFAAIQKAEEALH

SEQ ID NO: 23346 - protein, 854 aa, Pseudomonas putida KT2440
MRIDRLTSKLQLAISDAQSLAVGMDHPAIEPVHLLQALLEQQGGSIKPLLMQVGFDINGLRQGLVKELDQLPKIQNPTGDVNMSQDLARLLNQADRLAQQKGDQFISSELVLLAAMDENSKLGKLLLSQGVSKKALENAINNLRGGAAVNDANAEESRQALDKYTVDLTKRAEEGKLDPVIGRDDEIRRTVQVLQRRTKNNPVLIGEPGVGKTAIAEGLAQRIINGEVPDGLKGKRLLALDMGALIAGAKYRGEFEERLKSLLNELSKQEGQIILFIDELHTMVGAGKGEGAMDAGNMLKPALARGELHCVGATTLNEYRQFIEKDAALERRFQKVLVEEPSEEDTIAILRGLKERYEVHHKVAITDGAIIAAAKLSHRYITDRQLPDKAIDLIDEAASRIRMEIDSKPEVLDRLDRRLIQLKVESQALKKEEDEAAKKRLEKLTEEIERLEREYSDLEEIWASEKAEVQGSAQIQQKIEQSRQELEAARRKGDLNRMAELQYGVIPDLERSLQMVDQHGKTDNQLLRNKVTEEEIAEVVSKWTGIPVAKMLEGEREKLLKMEELLHQRVIGQSEAVTAVANAVRRSRAGLSDPNRPSGSFLFLGPTGVGKTELCKALAEFLFDTEEAMVRIDMSEFMEKHSVARLIGAPPGYVGYEEGGYLTEAVRRKPYSVVLLDEVEKAHPDVFNVLLQVLEDGRLTDSHGRTVDFRNTVIVMTSNLGSAQIQELVGDREAQRAAVMDAVGAHFRPEFINRIDEVVVFEPLGREQIAGITEIQLGRLRSRLLERELSLSLSPEALDKLIAVGYDPVYGARPLKRAIQRWIENPLAQLILAGKFLPGTAITAKVEGDEIVFG

SEQ ID NO: 23347 - protein, 479 aa, Pseudomonas putida KT2440
MSVQTTTTRNASAHTFKQDMQTRHIVMLALGGVIGTGLFLTSGYTVNQAGPLGAVIAYILGAIMVYLVMMCLGELAVHMPEVGSFSSYATRYLGPGTGYMVAWMYWLTWTVAIGSEFTAAGILMVRWFPDTPVWMWSALFGAAVFISNIISVRSFAETEFWLSLVKVLAVIAFLVVGGGAILGGFEIQQAHSAGLGNFTREGLFPTGFWSIAMTLLAVAFAFSGTELIGIAAGETKDPEKNVPKAIRTTVLRLALFFIGTIFVLATLLPREQAGVIESPFVMVFAMIGIPYAADIMNFVIITALLSAANSGLYAASRMLWTLSDQGNMPRRYATLSRRGTPFNAIVLSMAGGMASLLSSVFAPDTIYLALVSISGLAVVVVWISIAASQIAFRRHYIASGGKLEDLKFRVRGYPFVPLGAIFCCVLACVGIAFDPAQRVALYFGLPFIAWCYLAYWLTCKYRSRRTAPLEIVAPGSEAA

SEQ ID NO: 23348 - protein, 347 aa, Pseudomonas putida KT2440
MTEYKIALVGFGGVNRALAQLIAERNARWQHELGFGLKIVGVTDLFLGSVIDRDGLDAAVLAALPAQKGALAHIPQGSAEAFNEAVIKQSGADIIAEATFTNPKDGEPAATFCRWALEAGKHVVTTNKGPIALHAQALKALAKANNVSFEYEGAVMSGTPVLRMARQTLAGAGLVGFEGILNGTSNYVLTRMEEGLGFNEAVAQAQALGFAEADPTADVEGHDVRLKVVILANELLGACLQVGDVACSGISAIDSAAIERARAAGERWKLIGSARREAGGSVRASVEAKLLPGHHPLAGILGATNALAFDTELLGAVTVSGPGAGRIETAFALLSDIVAIHTAGHSA

SEQ ID NO: 23349 - protein, 408 aa, Pseudomonas putida KT2440
MKFVDEVSIRVKAGDGGNGCMSFRREKFIENGGPNGGDGGDGGSVYMIADENLNTLVDYRYTRHHEAQRGSNGGSTDCTGKKGEDLFLRVPVGTTVIDASTQEVIGDLVTPGQKLMVAQGGWHGLGNTRFKSSTNRAPRQTTPGKPGEQRDLKMEMKVLADVGLLGLPNAGKSTFIRSVSAAKPKVADYPFTTLVPNLGVVSVDRWKSFVIADIPGLIEGASEGAGLGIRFLKHLARTRVLLHLVDIAPLDESSPADAAEVIVNELTRFSPSLAERERWLVLNKADMVMDDERDERVQEVIDRLEWEGPVYVISAISKQGTDKLSHDLMRYLEDRADRLANDPAYAEELADLDQRIEDEARAQLQALDDARTLRRTGVKSVHDIGDDDGWDDDFEDDEDGPEIIYVRD

SEQ ID NO: 23350 - protein, 570 aa, Pseudomonas putida KT2440
MPQPTRFDWQRWLPGLVTLLHYKAAWLPKDIAAGLVLTTMLVPVGIAYAEASGVPGIYGLYATIIPLLAYALFGPSRILVLGPDSALAAPILAVVVQYAASDPQRAIAIASMMALVAGAFCVIAGLLRLGFITELLSKPIRYGYMNGIALTVLISQLPKLFGIKVDSEGPLRDLWYLGQALYAGQGHWPSFVVGAGSLALILLLKPFKRLPGILIAVVLATLAVSVFNLDQMGVKVLGQLPQGLPGFVFPWVSDIDLVEVLLGGIAVALVSFADTSVLSRSYAARLKMRVNPNQEMFGLGVANVASGLFQGIPISSSSSRTPVAEAAGSQTQLTGIIGALAVTLLLLVAPNLMQHLPNSALAAVVIAAALGLFEFADLKRIFRMQQWEFWLSFTCFVGVAVFGAIPGICIAVAVSVIEFLWDGWRPHYAVLGRADGLRGYHDIQRYPQARRIPGLVLLRWDAPLFFANAEQFQNTVMAAVDASPTPVQRVVIAAEPVTSIDITSADMLAELDRALEARGVELQFAEMKDPVKDKMRQFELFEHMGEKAFHPTVGAAVDAYLEESGVDWQP

SEQ ID NO: 23351 - protein, 313 aa, Pseudomonas putida KT2440
MSKMMVFTGNANPDLARRVVRQLHIPLGDVSVGKFSDGEISTEINENVRGKDVFIIQPTCAPTNDNLMELVVMADAFRRSSASRITAVIPYFGYARQDRRPRSARVAISAKVVADMLTVVGIDRVLTVDLHADQIQGFFDIPVDNIYGSPVLVDDIEDQRFENLMIVSPDIGGVVRARAVAKSLGVDLGIIDKRREKANHSEVMHIIGDVEGRTCILVDDMVDTAGTLCHAAKALKEHGAAKVYAYCTHPVLSGRAIENIEKSVLDELVVTNTVPLSAAAQACDRIRQLDIAPVVAEAVRRISNEESISAMFR

SEQ ID NO: 23352 - protein, 321 aa, Pseudomonas putida KT2440
MPSPRRAVFLDHQSLDLGDLDLSPLKQQFDQFELFAATRPEQVAERLQGAVAVVSNKVMLDAATLAANPQLKLILVAATGTNNVDLAAARAQGITVCNCQGYGTPSVAQHTLALLLALATRLCDYNQAVADGQWAKASQFCLLDFPIVELEGKTLGLLGHGELGGAVARLAEAFGMRVLSGQIPGRPERADRLPLDELLPQVDALTLHCPLNEHTRHMLGARELALLKPNALVVNTARGGLIDEQALADALRGGHLGGAATDVLSVEPPVNGNPLLEPGIPRLIITPHSAWGAVESRQRIVGQLSENAQAFFAGQPRRVVS

SEQ ID NO: 23353 - protein, 695 aa, Pseudomonas putida KT2440
MQTFFIAPTDFGVGLTSISLGLVRTLERAGLKVGFFKPIAQPHPGDTGPERSTELVARTHGIKPPVPLSLAHVERMLGDGQLDELLEEIIRLYQQACVGNDVVVVEGMVPTRHASYAARVNLHLAKSLDAEVILVSAPENEVLSELSGRVELQAQLFGGPRDPKVLGVILNKVRTDESMADFATRLREHSPLLRGNDFRLLGCIPYQPELNAPRTRDVAELLGAQVLNAGDYEQRRMSKIIICARTVANTVPLLTSGTLVVTPGDRDDIILAVSLAAINGVPLAGLLLTSDSKPDVRILGLCRGALQAGLPILSVSTGSYDTANQLNSLNREIPVDDRERAEFITDFVASHLDAAWLHQRCGTPRELRLSPAVFRYQLIQRAQQANKRIVLPEGAEPLLVQAAAICQARGIARCVLLAKPEDVDAVARAQGITLPPGLEILDPELIRGRYVEPMVELRKSKNLNAPMAEQQLEDPVVIGTMMLALDEVDGLVSGLVHSTANTIRPALQLIKTAPGSSLVSSVFFMLFPEQVLVYGDCVMNPHPSAAELAEIAQQSAASAQAFGIAPRVAMISYSSDSASDEEVEKVREATRLAQDAAQELLIDGPLQYDAAANPAIARELAPASPVAGRATVFVFPDLNTGNTTHKAVQRSADGVSLGPMLQGLRKPVNDLPRGAQVDDIVHTIALTAIQASVAR

SEQ ID NO: 23354 - protein, 392 aa, Pseudomonas putida KT2440
MLNAEQRAIIKATVPLLESGGEALTTHFYKMMLSEYPEVRPLFNQAHQASGDQPRALANGVLMYARHIDQLEQLGGLVGQIINKHVALQILPEHYPIVGSCLLRAIEEVLGKDIATPAVIDAWGAAYGQLADILIGAEENLYKEKEEAEGGWRGTREFRLVRREQESSEIVSFYFAPVDGMPVLKAEPGQYIGLKLDIDGAEQRRNYSLSALCDGKEYRISVKREAGGKVSNYLHDELKVGDTLQLFPPAGDFTLAASDKPLVLISGGVGITPTLAMLQAALQTRREVHFIHCARNGAVHAFRDWIDGLAARHPQLKRFYCYAEPEGGAAADAVGLLSEDLLAEWLPQERDVDAYFLGPKGFMAAVKRQLKGLGVPEQQSRYEFFGPAAALE

SEQ ID NO: 23355 - protein, 404 aa, Pseudomonas putida KT2440
MKLPIYLDYSATTPVDPRVAQKMADCLLVDGNFGNPASRSHVFGWKAEEAVENGRRQVAELINADPREIVWTSGATESDNLALKGVAHFYQTKGKHIITSKIEHKAVLDTARQLEREGFEVTYLEPGEDGIVTPAMVEAVLRDDTILVSLMHVNNEVGSINDIAAIGELTRSRGVLFHVDAAQSAGKVEIDLQKLKVDLMSFSAHKVYGPKGIGALYVSRKPRVRLEAIIHGGGHERGMRSGTLPTHQIVGMGEAFAIAKQEMVAENARIKALSDRFFKQVSNLEELYVNGSQTARVPHNLNLSFNYVEGESLLMSLKDIAVSSGSACTSASLEPSYVLRALGRNDELAHSSIRFSFGRFTTEEEVDYAAQKVCEAVNKLRELSPLWDMYKDGVDISKIEWAAH

SEQ ID NO: 23356 - protein, 382 aa, Pseudomonas putida KT2440
MIRSKLPNVGTTIFTTMSQLAVQTGALNLSQGFPDFNGPQALLDAVGRHVAAGHNQYSPMTGLPALRQQVAAKVERLYGARVDADQEVTITPGATEAIFCAIQAVVHAGDEVIVFDPCYDSYEPSVELAGGRCVHVQLSDGDFRIDWQKFSDALSPRTRMVILNSPHNPSGALITREDLDQLAALIADRDIYLVSDEVYEHLVYDGVRHASVLAHEQLYSRAFVVSSFGKTYHVTGWKTGYVIAPPALSAELRKVHQYVNFCGVTPLQCALADFMAGHPEHIDELPAFYQAKRDLFCGLLDGSRFNFTRTTGTYFQLVDYSQIRPDLNDVDMSLWLTREHGVATIPVSVFYQQPIPEQRLVRLCFAKREETLRQAAERLCAI

SEQ ID NO: 23357 - protein, 453 aa, Pseudomonas putida KT2440
MQDQSTPERLQRGLKNRHIQLIALGGAIGTGLFLGIAQTIQLAGPSVLLGYAIAGLMAFLIMRQLGEMVVEEPVAGSFSHFAHQYWSEFAGFVSGWNYWVVYVLVGMAELTAVGIYVQYWWPDFPTWATAAIFFVVINLINLTQVKVYGEMEFWFALVKVVAIVSMIGFGAWLLGSGHGGPDASVANLWQYGGFFPNGVTGLVMALAVIMFSFGGLELVGITAAEADNPRESIPKATNQVVYRILIFYIGALAVLLSLYPWQKVVQGGSPFVMIFHELDSDLVATILNIVVLTAALSVYNSCVYANSRMLFGLASQGDAPRQLLKVSRSGVPLTALAVSAFATGLCVLINYLMPGGAFGLLMALAVSALVINWASISITHLKFRKAKLAAGITPFYKSLGHPLTNYLCLAFIVLILVVMYLTPPIRISVMLIPAWIAVLWVAFKLKKARQAKG

SEQ ID NO: 23358 - protein, 324 aa, Pseudomonas putida KT2440
MSQSSELIQSAQRTLRLELEAVEALLARIDDNFVKACELILASKGRVVVVGMGKSGHIGNKIAATLASTGTPAFFVHPAEASHGDMGMITRDDVILALSNSGSTAEIVTLLPFIKRLGIKLISLTGNPDSPLAQAAEVNLDARVEQEACPLNLAPTSSTTAALVLGDALAIALLEARGFTAEDFAFSHPGGALGRRLLLKVENVMHAGDDLPQVPRGTLLKDALLEMSHKGLGMTVIVEADGKLAGIFTDGDLRRSLDRNIDVHTTLIDQVMTVHGKTARADMLAAEALKIMEDHKINALVVVDREDRPTGALNMHDLLRAGVM

SEQ ID NO: 23359 - protein, 165 aa, Pseudomonas putida KT2440
MAPGQAPCRFRQIGRLSANRQFSIRPRACFSLESWRRVTALCLHGSQQFVTWASSRDLLQPVRRLLLPATQPSNLSLTKKCESNCHQNLSFIGNKTMAERQKGTVKWFNDEKGYGFITPESGPDLFVHFRAIEGNGFKSLKEGQQVTFEAVQGQKGMQADKVQPV

SEQ ID NO: 23360 - protein, 401 aa, Pseudomonas putida KT2440
MFELDFYGTLVAASLVLLLGRGLVARIGFLRAYNIPEPVAGGLVVALSLLALRSFDVHVQFDTSLQTPLMLAFFATIGLSADFASLKKGGRVVAVFLLVVTGLLMVQNAMGIGLATALGLDPLMGLLAGSISLSGGHGTGAAWGATFTERFGLASASELAMASATFGLVLGGLIGGPVARLLIKRVETPGVQEEAPQLPKGFEQPDKERLITSFSFIETLALIAVSLLTGTLLNGLLKGTAFELPTFVCVLFVGVVLRNGLRALGVYKVFEREVSVLGNVSLSLFLAIALMSLKLWDLAALALPFFTLLAAQTLVMALFAIFVTFKVMGRNYDAAVLAAGHCGFGLGATPTAIANMQAVTQRYGASHLAFLVVPMVGAFFIDIINVIVIKLYLALPWFVAG

SEQ ID NO: 23361 - protein, 472 aa, Pseudomonas putida KT2440
MPVGNHSAHGQATEGGPLKRELGERHIRLMALGACIGVGLFLGSAKAIEMAGPAIMLSYIIGGLAILVIMRALGEMAVHNPVAGSFSRYAQDYLGPLAGFLTGWNYWFLWLVTCVAEITAVAIYMGIWFPDVPRWIWALAALGSMGAVNLVAVKAFGEFEFWFALIKIVTIIAMVLGGIGIIAFGFGNDGVAVGISNLWSNGGFMPNGVTGVLMSLQMVMFAYLGVEMIGLTAGEARNPQKTIPQAIGSVFWRILLFYVGALFVILSIYPWNEIGSQGSPFVMTFERLGIKTAAGIINFVVITAALSSCNGGIFSTGRMLYSLAQNGQAPAAFARTSKNGVPRNALLLSIGALLLGVLANYLVPEKVFVWVTSIATFGAIWTWVMILLAQLKFRAGLTTAERKALKYRMWLWPLSSYLALAFLVLVVGLMAYFEDTRVALYIGPAFLVLLTVLYYTFRLAPKDAQGVTSTAS

SEQ ID NO: 23362 - protein, 111 aa, Pseudomonas putida KT2440
MDIIETIKEQIANNTILLYMKGSPNAPQCGFSARASQAVMGCGEKFAYVDILQNPEIRANLPKYANWPTFPQLWVAGELVGGSDIMLEMFEKGELQTLIKDAAAKAKASEA

SEQ ID NO: 23363 - protein, 405 aa, Pseudomonas putida KT2440
MADVKKVVLAYSGGLDTSVILKWLQDTYNCEVVTFTADLGQGEEVEPARAKAQAMGVKEIYIDDLREEFVRDFVFPMFRANTVYEGEYLLGTSIARPLIAKRLIEIANETGADAISHGATGKGNDQVRFELGAYALKPGVKVIAPWREWDLLSREKLMDYAEKHGIPIERHGKKKSPYSMDANLLHISYEGGVLEDTWTEHEEDMWRWSVSPENAPDQATYIELTYRNGDIVAIDGVEKSPATVLADLNRIGGANGIGRLDIVENRYVGMKSRGCYETPGGTIMLKAHRAIESITLDREVAHLKDELMPKYASLIYTGYWWSPERLMLQQMIDASQVNVNGVVRLKLYKGNVTVVGRKSDDSLFDANIATFEEDGGAYNQADAAGFIKLNALRMRIAANKGRSLL

SEQ ID NO: 23364 - protein, 69 aa, Pseudomonas putida KT2440
MSNRQSGVVKWFNDEKGYGFITPQSGDDLFVHFKAIQADGFKTLKEGQAVTFVATRGQKGMQAEEVQIA

SEQ ID NO: 23365 - protein, 418 aa, Pseudomonas putida KT2440
MNRNLKQAFFSALLVWAVAFPVLGLKLSIDGISLVVHSQGSFTISIIAVCSVLMFLRVLFDKQWSSVMGRRSDRKLIPPAVSNYLTLPKTQRYVIIGLIVVALVWPFFGSRGAVDIATLILIYVLLGLGLNIVVGLAGLLDLGYVGFYAVGAYSYAMLSHYLGWSFWVCLPIAGLMAATFGFLLGFPVLRLRGDYLAIVTLGFGEIIRLFLRNLTDWTGGPNGISNIPKPEFFGLTFERRAAEGMQTFHEFFGLQYNSINKVIFLYLVALLLALLALFVINRLLRMPIGRAWEALREDEIACRALGLNPTVIKLSAFTLGACFAGFAGSFFAARQGLVTPESFTFIESAIILAIVVLGGMGSQLGVILAAIVMILLPELMREFSEYRMLMFGALMVLMMIWRPQGLLPMQRPHMELRR

SEQ ID NO: 23366 - protein, 295 aa, Pseudomonas putida KT2440
MSTALPSLGFAGIGLMGLPMCRRLLAAGYPLTVWNRSPDKCAALVAAGARLASSPAELCRDSDMVLLCLADTAVVREVVFGEQGIAQGGRSGQLLIDFSSLEPTATREMAAELAALCGMAWLDAPVSGGTPGAEAGTLAIMVGGEAADLQRARPVLQVLGQRVTHMGAVGAGQVTKACNQMIVACNALVIAEVVALAEQSGVDATLIAEALAGGFADSKPLQILAPQMAESRFEPIKWHVRTLLKDLDGAVKFSREQGSATPLSGLAAQLMRLHGSQGYLQKDPATLVELYRNKV

SEQ ID NO: 23367 - protein, 547 aa, Pseudomonas putida KT2440
MAKAADVVVQCLENEGVEYVFGIPGEENLDLLESLRKSKIKLVLTRHEQSAGFMAATYGRLTGKTGVSLSTLGPGATNLVTASAYAYLGGMPMMMITGQKPIKKSKQGRFQIIDVCGMMDPITKYTHQFASADNIPARMREAFRLAEEEKPGAVHLELPEDIAAEQTDALPIPRSLHRRPLAEHVAIEAAVEKLQNARNPILVIGAGANRKMTAKVLKQLIDKTGIPFITTQMGKGVVDERHPRFLGNAALSSGDFVHRAVEAADLIINIGHDVIEKPPFFMVRGGTEVIHINFRSAEVDAVYFPQVEVIGDIANAVWQISEALNDTSHWDFTRLMAIREANEAQIAEGADDDRFPVYPQRMVADIRRVLPSEGIVALDNGIYKIWFARNYKAHKPNTVLLDNALATMGAGLPSAMAAHLVHPDRPVISVCGDGGFMMNSQELETAVRLGMHITVVILRDDGYGMIRWKQANMGFTDFGLDYGNPDFVKYAEAYGANGHRVESAEGLLPLLEHCIKTPGVHVIDCPVDYSENDRILNSELRERALAV

SEQ ID NO: 23368 - protein, 678 aa, Pseudomonas putida KT2440
MQQSPDHRPSPWHAGEKTLQEKVGVAERMEAFGQKVIRDHMPDQHRTFYHQLPFMVAASVDAQGRPWATLLEGPEGFVSSPDPRMLTIHTTLPADDPATPGLAAGQAVGLLGIELHTRRRNRINGQIRHAAQGQLQVAVEQAFGNCPQYIQLRDYTRVTEPALGRIDATTLDTSTVSMIQAADTFFVASYVEHAYGQRSVDVSHRGGRPGFIKVEGNRLTIPDYAGNLHFNTLGNLVVNPRAGLLFIDFKNGNVLQLYGRAEVLLDSPAIQAFEGAERLWTLQVEKVVWRPAAVALRWAFKEYAPTSLMTGTWAEADARLEQRQQQRQWLAWRVLRVEQESRDIRSFYLEPPAGCRVAFAPGQHLPVQVPRDGESALIRTYSLSSAPDDGFLRISVKAQGPASRYLHERVVAGDVLNVRPPMGSFTLDQQSTRPLVLIGAGVGITPLLAMLRQQLRTGQARRIHLFHGARSLADLPFQQELAALRQQAGDLLQVHRALSQPEGHAQVGRDYEFAGRLGIEQVKATLALDDYDFYLCGPGSFTQQLYEGLRGVHVPDARIHAEAFGPSTLRRHTDADQPVLQQPPAADEPVPVYFAASAKEARWVPGSGTLLELAEARGLAPEFSCRGGSCGTCKTRLVSGQVHYPNPPAELPEAGSVLICCAVPAKVEEGMQALVLDV

SEQ ID NO: 23369 - protein, 91 aa, Pseudomonas putida KT2440
MGFARSTRKARGTQHVAQDAGNRDTGTVKWFNTSKGFGFISRDSGDDIFVHFRAIRGEGHRILVEGQRVEFSVMHRDKGLQAEDVVAVNRR

SEQ ID NO: 23370 - protein, 450 aa, Pseudomonas putida KT2440
MQPDHSASGNGQLRKTLRLWHVIIIGLAYLTPMTVFDTFGIVSGITAGHVPSAYILALAGILFTAVSYGTLVKRFPQSGSAYTYTQRAINPHVGFLVGWSSLLDYLLLPMVNALLAKLYLSAMFPEVPEWMWVAGFVTLISLINMRSVNLVAHFNLLFVGVQVAIIAVFIYLCVRGLDQGEGLGTTWSLIPFADSQTQFSALAAGATILCFSFLGFDAVTCLSEETRDPAKTIPRAIFLTALIGGVVFITVSYFIQAYFPTMARFHDQEAALPEIALYVGGKLFQSIFIACTVINTIASGLASQTSVSRLLYVMGRDNVIPASVFARLHSRYKTPVLNIAVVGLISLSAIFFDLVTATSIINFGALVAFSFVNLSVINHCYLREGNRKGLANQLKYLVLPTIGFCIIVSLWLDLNAHSLMFGGIWAALGLVYLGWLTKAFRAAPPNYVAE

SEQ ID NO: 23371 - protein, 537 aa, Pseudomonas putida KT2440
MSGKFKKQLSLLDLTFIGLGAIFGSGWLFAASHVSAIAGPAGILSWFLGGFAVLLLGIVYCELGAALPRAGGVVRYPVYSHGPLLGYLMGFITLIAFSSLIAIEVVASRQYAAAWFPGLTKAGSSDPTVLGWLVQFALLGLFFFLNYRSVKTFAKANNLVSVFKFIVPLLVIGVLFTFFKPENFEVQGFAPFGLSGVEMAVSAGGIIFAYLGLTPIISVASEVKNPQRTIPIALILSVLLSTAIYALLQLAFLGSVPTEMLANGWASVTKELALPYRDIALALGVGWLAYLVVADAVISPSGCGNIYMNATPRVIYGWAQTGTFFKYFTRIDAESGIPRPALWLTFGLSVFWTLPFPSWEALINVVSAALVLSYAVAPVSVAALRRNAPHMPRPFRVKGMTVLGPLSFIIAALIVYWSGWNTVSWLLALQIVMFVLYLLCSRFVPTQHLSLGQQVRSSAWLIGFYALTILLSWLGSFGGLGVIGHPFDTVVVAACALGIYYWGAATGVPAHLVRLEGDDESEACAETSNGRPVAVAS

SEQ ID NO: 23372 - protein, 324 aa, Pseudomonas putida KT2440
MKKTVLAFSRITPAMAERLQQDFNVILPNPKLGDISAQFNEALPEAHGLIGVGRKLGRAQLEGAARLEVVSSVSVGYDNYDLDYFNERGIALTNTPDVLTESTADLGFSLIMGCARRTAELDAWTKAGNWQATVGPAHFGSDVHGKTLGIVGMGNIGAAVARRGRFGFNMPILYSGNSRKTALEKELGAQFRSLDQLLAEADFVVIVVPLSDATRKLISSRELKLMKPSAFLINIARGPVVDEAALIEALQAGTIRGTGLDVYEKEPLSDSPLFKLPNALTLPHIGSATAETREAMANRAIDNLRAALLGERPRDLVNPQVWKG

SEQ ID NO: 23373 - protein, 342 aa, Pseudomonas putida KT2440
MKMLKTTLAVLTAAAALGAVSTAQAGATLDAVKKKGFVQCGVSDGLPGFSVPDAQGKIVGIDADVCRAVAAAVFGDATKVKFSQLNAKERFTALQSGEVDVLSRNTTWTSSRDAGMGLVFAGVTYYDGVGFLVNKKLGVSSAKELDGATICIQAGTTTELNVSDFFRANGLKYTPITFDTSDESAKSLESGRCDVLTSDKSQLFAQRSKLAAPTEYVVLPETISKEPLGPVVRKGDEEWFSIVKWTLFAMLNAEEAGITSKNVEAEAKATKNPDVARLLGADGEYGKDLKLPKDWVVQIVKQVGNYGEVFEKNLGQSTDLKIDRGMNALWNNGGIQYAPPVR

SEQ ID NO: 23374 - protein, 400 aa, Pseudomonas putida KT2440
MHDVFICDAIRTPIGRFGGALASVRADDLAAVPLKALIERNPGVQWDQVDEVFFGCANQAGEDNRNVARMALLLAGLPESIPGVTLNRLCASGMDAVGTAFRAIASGEMELVIAGGVESMSRAPFVMGKAESAYSRNMKLEDTTIGWRFINPLMKSQYGVDSMPETADNVADDYQVSRADQDAFALRSQQKAAAAQAAGFFAEEIVPVRIAHKKGEIIVERDEHLRPETTLEALTKLKPVNGPDKTVTAGNASGVNDGAAAMILASAAAVKKHGLTPRARVLGMASGGVAPRVMGIGPVPAVRKLTERLGIAVSDFDVIELNEAFASQGLAVLRELGVADDAPQVNPNGGAIALGHPLGMSGARLVLTALHQLEKSGGRKGLATMCVGVGQGLALAIERV

SEQ ID NO: 23375 - protein, 545 aa, Pseudomonas putida KT2440
MATCGEVLVKLLEGYGVDHVFGIPGVHTVELYRGLAGSSIRHITPRHEQGAGFMADGYARTRGKPGVCFIITGPGMTNITTAMGQAYADSIPMLVISSVQSRDQLGGGRGKLHELPNQAALVSGVAAFSHTLMSAADLPQVLARAFAVFDSARPRPVHIEIPLDVLVEPADFLLPGRPVRGSRAGAAPQAVAQMAERLASARRPLILAGGGALAAGAALARLAEHLQAPVALTINAKGLLPASHPLQIGSTQSLPATRALVAEADVVLAIGTELAETDYDVTFKGGFEIPGRLLRIDIDPDQTVRNYLPELALVADAELAAEALLGAVQAQPQPVHESTWGVARVADLRKVLAADWDQPTLSQTRLLSAILERLPDAILVGDSTQPVYTGNLTLDMQQPRRWFNASTGYGTLGYALPAAMGAWLGSAEQAVERAPAVCLIGDGGLQFTLPELASAVEAQVPLIVLLWNNQGYEEIKKYMVNRAIEPVGVDIHTPDFIGVARALGAAAENVADIAQLQAALGQAVERKGPTLIQVDQNQWQAAVLG

SEQ ID NO: 23376 - protein, 444 aa, Pseudomonas putida KT2440
MLNSVIVVDDEASIRTAVEQWLSLSGFSVELFARAEACLAHLPQHFPGVIISDVRMPGMDGLQLLERLQANDPDLPVILLTGHGDVPMAVEAMRSGAYDFLEKPFTPQDLLGSLRRALEKRQLVLENRRLHEQADLKSRLEGTLLGMSQGLQQLRRQVLDLAGLPVNVLIRGETGSGKERVARCLHDFGPRAAKPFVALNCAAIPESLFEAELFGHESGAFTGAQGKRIGKLEYANGGTVFLDEIESMPLAQQAKLLRVIQEQKLERLGANQSISVDLRIIAATKPDLLEEARAGRFREDLAYRLNVAELRLAPLRERREDIPLLFEHFARAAGEKLGRAAPPLSGAQLAQLLSHDWPGNVRELANAAERHALGLGSPNIEVAPAGQSLGEQMEAFEAQCLRAALRQHGGEIKSVMEALQLPRRTLNEKMQRHGLVREDFIGQA

SEQ ID NO: 23377 - protein, 568 aa, Pseudomonas putida KT2440
MFLSRWLPGLANLLHYRREWFHADLQAGLSVAAIQIPIAIAYAQIVGLPPQYGLYACVLPMMVYALIGSSRQLMVGPDAATCAMIAGAVAPLAMGDPQRIVELSVIVTVLVGVMLIAAGLARAGFIASFFSRPILIGYLNGIGLSLIAGQLSKVVGFKIEGDGFILSLINFFQRLGEIHWVTLIIGLAALGLLIWLPRRYPRLPAALTVVALFMLLVGLFGLDRFGVAVLGPVPAGIPQLAWPHSNLAEMKSLLRDALGIATVSFCSAMLTARSFAARHGYAINANHEFVALGVSNLAAGVSQGFAISGADSRTAVNDMVGGKSQLVGIIAALVIALILLFFTAPMAWIPQAALGAVLLMAGWGLIDIKSLGHIRRLSRFEFWLCLLTTAGVLSLGVLPGIVFAVTLAILRLLYSIYQPTDAVLGWLPGTEGQVDIRKFKDARTVPGLVVYRFDDAILFFNADYFKMRLLEAVQSQDQPKAVLFDAEAVTSIDVSGIAALREVRDTLAAQGILFAIARARGTFLRMLVRSGMARDMEEKLLFGSVRAGIRAYRVWRNRNRSVQVTEQG

SEQ ID NO: 23378 - protein, 302 aa, Pseudomonas putida KT2440
MAMTDSNPTRCGYVAIVGRPNVGKSTLLNHILGQKLAITSRKPQTTRHNMLGIKTEGDVQAIYVDTPGMHKANDKALNRYMNRNASAALKDVDVVIFVVDRTKWTDEDQLVLERVQYVTGPLIIAVNKTDRMEEKAELIPHLQWLQEQLPNAEVMPISAQQGHNLDALEAQIAKHLPENDHFFPEDQITDRSSRFLAAELVREKIMRQLGAELPYQITVEIEEFKQQGHVLHIHALILVERDGQKKIIIGDKGERIKRIGSEARKDMEVLFDSKVMLNLWVKVKGGWSDDERALRSLGYGDL

SEQ ID NO: 23379 - protein, 199 aa, Pseudomonas putida KT2440
MLDELLRRMSNHQPASLETDRRFPEAAVLLPITRSEAPELVLTLRAKGLSTHGGEVAFPGGRRDPEDPDLVFTALREAEEEIGLPPGLVEVIGPLSPLISLHGLKVTPFVGLIPDFVEYRANDAEIAAVFTVPLEFFRQDPRDHTHRIDYQGRSWYVPSYRYGEYKIWGLSAIMIVELVNLLFDAGISLHHPPERHIEN

SEQ ID NO: 23380 - protein, 69 aa, Pseudomonas putida KT2440
MSSRETGNVKWFNDAKGYGFIQREGGADVFVHYRAIRGEGHRTLVEGQRVEYACVQGQKGLQAEDVVGL

SEQ ID NO: 23381 - protein, 342 aa, Pseudomonas putida KT2440
MTHPRHALQRSSTMRALLFSSQHYDQESFTKAAGGTALELHFQPARLTLDTAALADGFEVVCAFINDELDAPVLQRLAAAGTRLIALRSAGYNHVDLAAAQRLGLAVVRVPAYSPHAVAEHAVALILALNRRLHRAYNRTREGDFTLHGLTGFDLHGKTVGVVGTGQIGVAFARIMAGFGCQLLAYDPYPNPELLALGARYLPLPELLREARIISLHCPLTEHTRHLINAQSLAQLQPGAMLINTGRGALVDTPALIDALKSGQLGYLGLDVYEEEAQLFFEDRSDLPLQDDVLARLLTFPNVIITAHQAFLTREALDAIAATTLDNINRWAAGNPQNLVMG

SEQ ID NO: 23382 - protein, 316 aa, Pseudomonas putida KT2440
MKPEVLQLSPILIPQIRERLEQLFTVHRYYEQADKEAYVSQHAGNIRGVITGGHTGISQALMARLPNLEVIAVNGVGTDAVDLAYARDRGIQVTATIGALTEDVADLAIGLLIGLCRGICTGDRFVRAGRWATSTTPLAPLPLARQVSGMRVGIVGMGRVGRAVAQRAAAFGCPIRYTDLQALDVPYGFEADLLQLAKDSDALILAAAADKGEALINRDVLQALGSEGYLINIARGKLVDEPALIAALQAGEIGGAALDVFADEPRAPEALFEREDVVLQPHRASATVQTRTRMGEMVVASLVDVFAGRTPQGLVI

SEQ ID NO: 23383 - protein, 554 aa, Pseudomonas putida KT2440
MIRQVKALAVLACGAFAPAVWAADALTGEVQKQPLNVSAIAMFVAFVAFTLGITYWASKRNKSASDYYAAGGKITGFQNGLAIAGDYMSAASFLGISALVFTSGYDGLIYSIGFLVGWPIILFLIAERLRNLGKYTFADVASYRLGQKEIRTLSASGSLVVVAFYLIAQMVGAGKLIELLFGLDYHVAVILVGILMCLYVLFGGMLATTWVQIIKAVLLLSGASFMALMVMKHVGFDFNTLFSEAIKVHAKGEAIMSPGGLVKDPISAFSLGLALMFGTAGLPHILMRFFTVSDAKEARKSVLYATGFIGYFYILTFIIGFGAILLVSTNPEFKDAAGALLGGNNMAAVHLANAVGGSVFLGFISAVAFATILAVVAGLTLAGASAVSHDLYASVWRKGKANDKDEIRVSKITTVALGVLAIGLGILFEKQNIAFMVGLAFSIAASCNFPVLLLSMYWKKLTTRGAMIGGWLGLVSAVTLMILGPTIWVQILGHEKPIYPYEYPALFSMAIAFVSIWFFSVTDKSKAAEDERALFFPQFVRSQTGLGASGAVSH

SEQ ID NO: 23384 - protein, 595 aa, Pseudomonas putida KT2440
MCGLAGELRFTPIDQAPRPADLAAVERITHHLAPRGPDAWGFHSQGPIALGHRRLKIMDLSDGSAQPMVDNTLGLSLAFNGAIYNFPELREELQALGYSFWSDGDTEVLLKGYHAWGAALLPKLNGMFALAIWERDNQRLFLARDRLGVKPLYLSRNGERLRFASTLPALLKGGDIDPMLDPVALNHYLNFHAVVPAPRTLLANVQKLEPGTWMRIDRHGEVERQVWWQLHYGPHPDERELDLEGWTTRVLDATRDAVAIRQRAAVDVGVLLSGGVDSSLLVGLLREVGVDDLSTFSIGFEDAGGERGDEFQYSDLIAKHYGTRHHQLRIAEHEIIDQLPAAFRAMSEPMVSHDCIAFYLLSREVAKHCKGVQSGQGADELFAGYHWYPQVDGADDAYAAYREAFFDRSHAEYRDTVQAPWLLETDAAGDFVREHFARPGAPAAVDKALRLDSTVMLVDDPVKRVDNMTMAWGLEARTPFLDYRLVELSARIPARFKLPDGGKQVLKQAARRVIPHEVIDRKKGYFPVPGLKHLEGATLGWVRELLTDPSQDRGLFNPTMLDRLLSNPHGQLTPLRGSKLWQLAALNLWLSEQGI

SEQ ID NO: 23385 - protein, 317 aa, Pseudomonas putida KT2440
MKMNHLDIAKEALVAQAQAVAKLADRLDGQFQSAVDLILACEGRTVVCGMGKSGLIGKKMVATFASTGTPSFFLHPAEAFHGDLGMLKPVDVLVLISYSGETEELIKLIPSLKSFGNKFIAMTGSGNSTLAKHADIWLDISVDREVCPNNLAPTTSTLATMAMGDALAVALITANQFKPMDFARYHPGGSLGRKLLTRVADVMHSPAPIVSPASSFQDCLLMMTQSRLGLAMVMDGNELVGIVTDGDLRRALLKNNQVIHASVTEFMTLNPHTIPADCRVSVAEAYMLENKIRALAVVDDCGAIVGVVEIFDGNPVA

SEQ ID NO: 23386 - protein, 559 aa, Pseudomonas putida KT2440
MTQETGGFAALDLNPNIVAAVVATGYEEPSAIQQQSIPIILAGHDMIGQAQTGTGKTAAFALPILNKIDVSKREPQALILAPTRELALQVATAFETYAKQMPGVNVVAVYGGAPMGPQLRAIRNGAQIVVATPGRLCDHLRRDEKVLSTVQYLVLDEADEMLKLGFMDDLEVIFDAIPATRQTVLFSATLPSSIRSIAERHLREPKHVKIQTKTQTVTAIEQAHLMVHADQKIPAVLRLLEVEEFDALIAFVRTKQATLDLAAALEAKGYKAAALNGDIAQNQRERVIDSLKDGRLDIVVATDVAARGLDVPRITHVFNVDMPYDPESYVHRIGRTGRAGRDGRALLLVTPRERRMLQVIERVTGQKVAEARLPNAQAVLDARIKKLTSSLAPLVAEAEATHGELFDRLTTDLGCSARALASALLRKATNGQALDLAAVEREQPLVPSFAPRGERTERGERGERPDRGDRERRAPLPLAEGRVRCRTALGARDGIAAKNLLGAILNEGGLARDAIGRIQVRDSFSLVELPEDGLEKLLSKLKDTRVAGKQLKLRRYRED

SEQ ID NO: 23387 - protein, 403 aa, Pseudomonas putida KT2440
MQFSKSNKLANVCYDIRGPVLKHAKRLEEEGHRILKLNIGNPAPFGFEAPDEILQDVIRNLPTAQGYSDSKGLFSARKAVMQYCQQKDIEGVTIEDIYLGNGVSELIVMSMQALLNNGDEVLIPAPDYPLWTAAVSLAGGKPVHYLCDEQADWFPDLEDIKAKITPNTKALVIINPNNPTGAVYSKELLLGMLELARQHNLVVFSDEIYDKILYDEAVHISTASLAPDLLCLTFNGLSKSYRVAGFRSGWLIISGPKHHAHSYIEGIDMLANMRLCANVPAQHAIQTALGGYQSINDLVLPPGRLLEQRNRTYELLNDIPGVSCVKPMGALYAFPRIDPKVCPILNDEKFALDLLLSEKLLIVQGTAFNWPWPDHFRVVTLPRVDDLEAAIGRIGNFLKGYSQ

SEQ ID NO: 23388 - protein, 394 aa, Pseudomonas putida KT2440
MKDAVIVATARTPIGKAMRGAFNDLKTPSMTAVAIRAAVERAGIEPAQVDDLVLGTAMQSGTAAINPGRLSALAAGLPQSVSGQTVDRQCASGLMAIATAAKQIMVDGMQVTIGAGQEQISLVQQVHNQLASEAYDPAVLRMSEHAYMPMLQTAERVARRYGISREAQDVYALQSQQRTAAAQAAGLFAAEIVPVIARKKVVDKLTGVVSHEEVRLTQDEGNRPATTLADLQGLKPVVEGGCVTAGNASQLSDGASACVLMEGALAARSGIAALGLYRGIAVAGLAPEEMGIGPVLAVPKLLRQQGLTVDDIGLWELNEAFACQVLYCAQQLQIDPAKLNVNGGAIAIGHPYGMSGARMVGHALLEGKRRKVKYVVVTMCVGGGMGAAGLFEVL

SEQ ID NO: 23389 - protein, 404 aa, Pseudomonas putida KT2440
MNTVPRATPLAWVNGSDAPEKTSLNIGYMALTDCASVVVAATQGFAQQHGLTLNLQRQGSWAGLRDKLVSGELDAAHCLYGLVYAVHLGIGGVPASDMAVLMGLNQNAQAINLSPALQRKGVTNPEALARLVHQHGARLTFAQTFPTGTHAMWLYYWLASQGIHPLRDVDSVVVPPAQMAAHLQAGRIDGFCVGEPWAADAVAKGQGFTLATSQSIWPDHPEKVLACARVFAEQYPNSARALIKAILTASRFIEQSPENRRSTAQLLSASAYLDTPLDSIAPRLLGHYEDGLGNQWQDPHALRLFDQGRANLPYLSDGMWFMTQFRRWGLLREDPDYLGVARQVQQLQLYSEAAQSLGIACPGQPMRSSLLIDGSRWDGSDPFGYARSFSLHALGELPDARVGA

SEQ ID NO: 23390 - protein, 402 aa, Pseudomonas putida KT2440
MENMHSAMDSLVHGSNTLFILMGAILVLAMHAGFAFLEVGTVRHKNQVNALSKILSDFAISALVYFFIGYWIAYGVNFFQPATTLAVDHGYALVKCFFLLTFAAAIPAIISGGIAERARFVPQLCATALIVAFVYPFFEGVVWNGNLGLQAWLQARFGAPFHDFAGSVVVHAMGGWLALAAVLLLGARRGRYRDGRLVAFAPSSIPFLALGSWILIIGWFGFNVMSAQTLQGVSGLVAINSLMAMVGGTLSALLAGRNDPGFLHNGPLAGLVAICAGSDLMHPVGALATGLVAGALFVWTFTAAQNRWKIDDVLGVWPLHGLCGVWGGIACGVFGQVALGGMGGVSLVSQLLGSLMGVLVALAGGFAVYGAIRALHGLRLSHEQEFQGADLSLHRIGATSQD

SEQ ID NO: 23391 - protein, 587 aa, Pseudomonas putida KT2440
MPESVSLRQRRALRLAWQFVRPYRRQVLLALLALVVTAAITLSMGQGIRLLVDQGFMTRSAHQLNQTIGLFLLLVLALAVGTFSRFYLVSWIGERCVADIRRAVFDHLIGLHPGFFEDNRSSEIQSRLTADTTLLQSVIGSSLSMFLRNALMVIGGVVLLFITNPKLTSIVVVTLPLVLAPILLFGRRVRSLSRQSQDRVADVGSYVAETLGQIKTVQAYNHQAHDRELFADTVEAAFTVARKRITQRAWLITLVIVLVLGAVGVMLWVGGMDVIAGRISAGELAAFVFYSLIVGSAFGTLSEVIGELQRAAGAAERIAELLAARSAILPPDVAQVLPQPRASGHIELQQVVFAYPSRPTVAAVDGLSLTIEPGQTVALVGPSGAGKSTLFDLLLRFYDPQQGRILLDGQPVTDFDPDQLRRQFALVAQNPSLFRGTVEANIRYGRPEATLAEVEAAARGAHADEFIRQLPQGYQTPLGEGGIGLSGGQRQRLAIARALLVDAPILLLDEATSALDAQSEYLIQQALPSLMAGRTTLVIAHRLATVQHAERIAVIDQGRLVAVGTHRQLIEDSPLYARLAALQFTTG

SEQ ID NO: 23392 - protein, 391 aa, Pseudomonas putida KT2440
MSLNPRDVVIVDFGRTPMGRSKGGMHRNTRAEDMSAHLISKLLERNGKVDPKEVEDVIWGCVNQTLEQGWNIARMASLMTPIPHTSAAQTVSRLCGSSMSALHTAAQAIMTGNGDVFVVGGVEHMGHVSMMHGVDPNPHLSLHAAKASGMMGLTAEMLGKMHGITREQQDLFGLRSHQLAHKATVEGKFKDEIIPMQGYDENGFLKVFDFDETIRPETTLEGLASLKPAFNPKGGTVTAGTSSQITDGASCMIVMSGQRAMDLGIQPLAVIRSMAVAGVDPAIMGYGPVPSTQKALKRAGLTMADIDFIELNEAFAAQALPVLKDLKVLDKMDEKVNLHGGAIALGHPFGCSGARISGTLLNVMKQNGGTLGVATMCVGLGQGITTVFERV

SEQ ID NO: 23393 - protein, 397 aa, Pseudomonas putida KT2440
MTLANDPIVIVSAVRTPMGGLQGDLKSLTAPQLGSAAIRAAVERAGIDAAGVEQVLFGCVLPAGQGQAPARQAALGAGLDKHTTCTTLNKMCGSGMQAAIMAHDLLLAGTADVVVAGGMESMTNAPYLLDKARGGYRMGHGKIIDHMFMDGLEDAYDKGRLMGTFAEDCAQANAFSREAQDQFAIASLTRAQEAISSGRFAAEIVPVEVTEGKEKRVIKDDEQPPKARLDKIAQLKPAFREGGTVTAANASSISDGAAALVLMRRSEADKRGLKPLAVIHGHAAFADTPALFPTAPIGAIDKLMKRTGWNLAEVDLFEINEAFAVVTLAAMKHLDLPHDKVNIHGGACALGHPIGASGARILVTLLSALRQNNLRRGVAAICIGGGEATAMAVECLY

SEQ ID NO: 23394 - protein, 550 aa, Pseudomonas putida KT2440
MYVYDEYDQRIIEDRVKQFRDQTRRYLAGELSEEEFRPLRLQNGLYIQRFAPMLRVAVPYGQLNANQVRTLAKIARDYDKGYAHISTRQNVQFNWPALEDIPDILAELATVQMHAIQTSGNCLRNTTTDQFAGVAADEIVDPRPWCEIVRQWTTFHPEFAYLPRKFKIAINGSQEDRAAIEVHDIGLEPVRNAAGELGFRVLVGGGLGRTPVVGSFINEFLPWQDLISYLDAILRVYNRYGRRDNKYKARIKILVKALTPEVFAEKVEAEMVHLRGGTTTLTEAEVQRVSRHFVDPEYLALDNVDYTALDAEHPGFARWRSRNTRAHKRPGYVAVTLSLKPTGVAPGDVTDKQLDAVADLAERYSFGFLRTSHEQNIILADVEQRQLHALWLELRESGFATPNIGLLTDIICCPGGDYCSLANAKSIPIAESIQRRFDDLDYLFDIGEIDLNISGCMNACGHHHVGHIGILGVDKKGEEFYQVSLGGNAARGASLGKILGPSFAQDDMADVIEKLIAVYVEQRTEEERFIDTYQRIGIDPFKERVYAANH

SEQ ID NO: 23395 - protein, 405 aa, Pseudomonas putida KT2440
MAGTLTSMIADFTATDTDLPSMPSAPLYFDYAATTPVDDRVIETMLACLGNQANFGNPASSGHAFGQAARHAVEQARQQVAECVGAHAEQLVWTSGATESNNLALKGIAQGIGQPGHLITSQLEHKAVLDTVAELERQGWAVTRLAADADGLIQPASVQAALRADTRLVSLMAVNNELGTVTDFAAIGEQVRAHGALLHVDAAQAVGKLAIDLRTMAVDLMSFSAHKVYGPKGIGALYVGPRARVLMRAQMHGGGHEQGLRSGTLATHQIAGMGSAFALAGQPGDSEHQRLEQLARRLRTGLLAMPGVTLNGCAKQRIPHTLNLCIDSKGFNSTALAGELALSTTSACNSASNAASHVLLALGLDERQARNSVRLSIGRFSTEADVDKALDVFGRVLAAASAALW

SEQ ID NO: 23396 - protein, 70 aa, Pseudomonas putida KT2440
MSNRQQGTVKWFNDEKGYGFITPAGGGDDLFVHFKAIESDGFKSLKEGQTVSFVAERGQKGMQAAQVRPE

SEQ ID NO: 23397 - protein, 470 aa, Pseudomonas putida KT2440
MSCIPFQELAMHTTTSTAHSPAPHAPSQPGTSTGRFRKSMSMTALVLFGLAYMVPLAVFTTYGLVTQMTKGHLPTAYLLTLAAMLLTAYSYGRMVQAHPYSGSVYTYTRKAFGSHIGFITGWTLLLDYIFLPLLSYLLIGIYMSEYFPTIHAWVWVAGSIALVTFLNLIGIESITRVNWILVVVQLVFIIVFVALSILKLSGQAEPVSLLAPLHHDGFSVPLIMTGAAVLCLSFLGFDAVSTMAEETSNPTYRIPVAILAVSLIGGLLFLVVSYCAQMVFPDWGSFADPDSASVDVMRRVGGELLVTAFTATYVAGCFASAMVSQASVSRVLFAMGRDGALPRAFGQLVTKKRVPATAILVVSLLSLIALVITLDTVANMISFGALFAFSAVNLAVVKHYLVDQKLRGCRNCLLYGAIPGLGFLSTLWLWSSLTSLSFTIGLCWMGLGLLVLLGLTRALRVKLPELQMAE

SEQ ID NO: 23398 - protein, 516 aa, Pseudomonas putida KT2440
MKNPTTLQADGQAMGLPMARDIDWPLFLISGGFLGAFLLAALIDIDTVSALVNTLFAWSTKAFGLYWQVLMLATFAVSLFIGFSRCGRVRLGGVTQRPDISTFNWIAVIMCALLAGGGAFWAAAEPLMHFASPPPFFAGLQPHSEAAATAALAQSFVHWGFLAWAVLGSLLAIVLMHLHYDKGLPLAPRTLLYPLFGKRALKGPIGTLADAASIIAVVAGTIGPIGFLGLQISSAMHAVWELPNTIVTQSLTIVLVTAMYTVSCLVGLKGIRFVSEINVWLMIGLALFMVVFGPTLFILGGFPAAFALHVEHFIPLTMFRADPKWLDWWTVFYWGWFIGYAPMVALYVARISRGRTIREIIMTLSIIAPLVTMFWFTVVGGTGIGLELQTPGSVTAHGAKPEDLLLGVTQNLPLGGLVSALFLFLSFISVATNGDAMAFTVALAMSSDDKPKKWLRGFWAIGMGLAAVVLITIGAGGVTALQSFIVITAVPVSLVILPALWDAVRIARHMAREQGV

SEQ ID NO: 23399 - protein, 443 aa, Pseudomonas putida KT2440
MSQSTSGASLRRSLGPFSVLLFGLAFLAPLIVFGTYGVITQASGNTTAMAYLVAATGVVFTALSYGRLVRVFPVAGSAYTYTRKMLNANLGFMVGWAALLDYFFIPMLIWLLGASYLNMAFPEVPQWVWITGFIVSTSLLNVLGIQVANRFNVLLMVVQLVIIAVFIGLCVHYIVAANGPGGLLSAKPFFNQDVPFATSMAGAAIAAYSFLGFDALSTLSEETRDPGRTLPRAILLVALIGGSVYVGSSYFMYLAHPSPTFELVDGAAFEIARMIGGDLFFAVVLTGIIVAHFAAGMSFQASVGRLLYALGRDNQLPRRLFGALHPRYKTPAFNILLCGVFGTAGFGLTIATATSLVNFGAFLAFTAVNLCALRLTFDARVKDGAGLLRGVLFPLIGLVTAGWMLVSLDKDALIMGGCWLGLGLVYLACRTSLFRNPVPDALV

SEQ ID NO: 23400 - protein, 567 aa, Pseudomonas putida KT2440
MSKPTADNAPNAAAKGAPAVPANFLRPIIQADLDSGKHSSIVTRFPPEPNGYLHIGHAKSICVNFGLAKEFGGVCHLRFDDTNPAKEDQEYIDAIQSDVKWLGFEWGGDVRYASDYFDQLHDWAVELIKRGKAYVCDLTPEQAKEYRGNLKEPGKNSPFRERSVEENLDLFARMKAGEFKDGERVLRAKIDMASPNMNLRDPILYRIRHAHHHQTGDKWCIYPNYDFTHGQSDAIEGITHSICTLEFEGHRPLYDWFLDNLPVPAHPRQYEFSRLNLNYTITSKRKLKQLVDEKHVDAWDDPRMSTLSGFRRRGYTPASIRNFCEMIGTNRSDGVVDMSMLEFSIRDDLDRTAPRAMCVLRPLKVVITNYPEGQVEQLELPRHPKEDMGVRVLPFSRELYIDRDDFMEEPPKGYKRLEPAGEVRLRGSYVIRADEAIKDADGNIVELRCSYDPDTLGKNPEGRKVKGVIHWVPAEGSVECEVRLYDRLFRSPNPEKTEEGGSFLDNINPASLQVLSGCRAEPSLAQAQPEDRFQFEREGYFCADLKDSQPGRPVFNRTVTLRDSWGS

SEQ ID NO: 23401 - protein, 336 aa, Pseudomonas putida KT2440
MSYQIALNFEDGVTRFIEATGQETVADAAYRQGMNIPLDCRDGACGTCKCKAESGRYDLGDNFIEDALSEDEIAEGYVLTCQMRAESDCVIRIPASSQLCKTEQATFEAAISDVRQLSVSTIALSIKGEALSRLAFLPGQYVNLKVPGSEQSRAYSFSSLQKDGEVSFLIRNVPGGLMSSFLTNLAKAGDSLSLAGPLGSFYLRPIQRPLLLLAGGTGLAPFTAMLEKIAEQGSEHPLHLIYGVTNDFDLVELDRLQALAARIPNFTYSACVANPDSQYPQKGYVTQHIEPRHLNDGDVDVYLCGPPPMVEAVSQYVREQGITPANFYYEKFAAAA

SEQ ID NO: 23402 - protein, 314 aa, Pseudomonas putida KT2440
MSWTPLQVRALRLEADDVLGVELAPPGPAPLPFDWAPGAHVDLRLGNGAVRQYSVVSLPEDGHVYLGIKREKASRGGSQWLHEHLRLGARVEVGLPRNLFSLQPGTGQVVLVAAGIGITPLLAMYRQCQAQGRSVRLLFFTRDAEQVPFIQYLDANTEVHAGLRAPMITGYLEEHLPAWDGSASLYCCGPAGFMACVERVALASGWPTTALHREHFQASEPTLHVERHCTLVLQRSRLQVEVQPGESLVQAASRAGVELPVSCGMGICGACVSRVIEGAPDHRDEYLSDAQRNSGEWITPCVSGCHSARLVLDV

SEQ ID NO: 23403 - protein, 358 aa, Pseudomonas putida KT2440
MSQFHSLTIKQVRNETRDAVSIAFDVPEHLQGQFRFTQGQYLVMRTQLDNEEVRRSYSICSAVQDGELRVAVKRVPGGRFSAFANEVLKAGQQLEVMPPSGSFFVPLDPARQGNYLGVAAGSGITPILSIIATTLASEPHSRFTLLYGNRSSSGALFRDKLEDLKNRYLDRLNLIFVFSREQQDVDLYNGRIDADKCGQLFSRWLDVAGLDAAFICGPQAMTETVRDSLQANGMAKERIHFELFAAAGSEARREAREAARQVDSALSHITVISDGRALSFDLPRNTQNVLDAGNAIGAELPYSCKAGVCSTCKCRVIEGEVEMDSNHALEDYEVAAGYVLSCQTYPVSDKVVLDFDQL

SEQ ID NO: 23404 - protein, 406 aa, Pseudomonas putida KT2440
MNEPTHADALIIDAVRTPIGRYAGALSSVRADDLAAIPLKALIQRHPELDWKAIDDVIFGCANQAGEDNRNVAHMASLLAGLPLEVPGTTINRLCGSGLDAIGNAARALRCGEAGLMLAGGVESMSRAPFVMGKSEQAFGRAAELFDTTIGWRFVNPLMKAAYGIDSMPETAENVAEQFGISRADQDAFALRSQHKAAAAQARGRLAREIVPVEIPQRKGPAKVVEHDEHPRGDTTLEQLARLGTPFREGGSVTAGNASGVNDGACALLLASSAAARRHGLKARGRIVGMAVAGVEPRLMGIGPVPATRKVLALTGLALADLDVIELNEAFAAQGLAVLRELGLADDDPRVNRNGGAIALGHPLGMSGARLVTTALHELEETAGRYALCTMCIGVGQGIAMIIERL

SEQ ID NO: 23405 - protein, 320 aa, Pseudomonas putida KT2440
MKKRIVLYKRLSDDLMARLQDRVEVTWVDTTQPDALARLRDALPGAHGLLGASLRLDASLLDLAPQLEVVSSVSVGVDNYDIAELSRRGVMLTNTPDVLTETTADTGFALILATARRVVELANWVRDGRWQANLGPAHFGSDVHGKTLGIVGMGRIGEALARRAAAGFGMRVLYHSQRAKPEVEARYAACQCSLDELLQQADFVCLTVPLSASTEGLIGARELALMKPDAILVNISRGRVVDEQALIEALRARRIRGAGLDVFVHEPLPIDSPLLQLDNVVATPHIGSATEETRQAMARCAVDNLLSALAGERPVNLVNG

SEQ ID NO: 23406 - protein, 581 aa, Pseudomonas putida KT2440
MAKEHIPETLDLGVTDPSKTAEARQDRHFEGKLDWIVFGFTSLLAIAFVLWGFLNQASLASSASSAQSWVILNFGWFFVLTSSLFVVFVLWLAASRYGRVPLGRDGEQPEFRTVSWVAMMFSAGMGIGLMFFGVAEPLSHYISPPPGSASGQTSEAMQVAMATTLFHWTLHPWAMYAIVGLVIAYGTFRRGRSQLISAAFRPLIGKHANGPLGRLIDMMAIFATLFGSAASLGLGALQIAGGLEYNGWIESPGKLFYISIITLLTIAFVTSAVSGIGKGIQWLSNTNMVLALVLAVFVFMVGPTLLMLNLLPTSLGIYIKMLPEMMARTNASGGEQMNSWLAGWTVFYWAWWISWTPFVGMFIARISRGRTIRQFVTGVLLVPSLVSLVWFTIFGGAAIEAVREGAFQLANGAVNSNHALYQLLDSYPLASATSVLVMILVGIFFVSGADAASLVMGTLSEHGTTAPSRRTVIFWGTLTGTVAAIMLAIGDPGNPGEALTGLQNLTIVVALPFVVVMVLLCLALYRDLRKDPMMLRHLRGNELIEKAVLYGAVKHGEEFYIVVQEKKASAKTAAEAEVTRN

SEQ ID NO: 23407 - protein, 401 aa, Pseudomonas putida KT2440
MCMDDCCSSSSRRDFLKLGAMLTAAGALPLLSSLQARAAAEPDAPVRIGYLPITDATPLLVAHNNGLFEAEGIKAERPVLLRSWAQVIEAFISGQVNVIHLLSPMTVWARYGSKVPAKVVAWNHVGGSGLTVAPDISAVKQLGGKTVAIPFWYSIHNVVLQQLLNDNGLTPVSKPANAQLAANEVNLLVLPPSDMPPALASKRIAGYIVAEPFNALAENLKVGRVQRFTGDVWRNHACCVVFMHEHDLNNRPEWSQKVVNAIVKAQQWTRDHRTEAAALLSRAGPNKYTPHEPAVLTKVLAPAAEDRAGYIASGAIRHQQWDEKRIDFQPYPFPSYTEELVKRLKTTLIEGDNTFLSGLDPAYAARDLVDDRFVRNAIATVGGPSVFGIADNFERSEEFAV

SEQ ID NO: 23408 - protein, 396 aa, Pseudomonas putida KT2440
MRYAKLTQRIAGDGAAAWDIHYRALALQAEDKDILLLSVGDPDFDTPAPIVEAAIDSLRAGHTHYADVRGKLALRQAIANRHRQRSGQAVSADQVTVLAGAQCALYCVAQCILDPGDEVIVAEPMYVTYEAVFGACGAKVVPVPVKPENGFRVCPRDVAERITPRTRALALNSPHNPSGASLPRATWEALAELCVAHDLWLISDEVYSELLYEGEHVSPGSLPGMAERTATLNSLSKSHAMTGWRMGWVVGSTALATHLENLALCMLYGLPDFVQDAAVVALEHPLPELDAMREAYRQRRDLVCEQLAGCPGLKALKPDGGMFVMLDIRETGVSAQAFADYLLDSQGVSVLAGEAFGPSAAGHIRLGLVLGNEALVDACQRIARCAGELMRGQTDA

SEQ ID NO: 23409 - protein, 468 aa, Pseudomonas putida KT2440
MTDSVEKIQLTRALKSRHIFMLSLGGVIGTGLFMGSGVTINQGGPVGAILAYLVAGLLMYLVMVCLGELSVQMPVSGSFQAHATKYIGPATGFMIGWVYWMSWATTVGLEFTAAGMLMTRWFPEVPIWYWSALFVVVLFGLNALATRAFGEAEYWFSGIKVATILGFIVIGLLVIFGAIPLSSGAPAPMLNNLVGESLFPHGLSAVFAVMMTVVYAFQGCEIMGVAAGETEHPEKSIPRAVRNVVFRVLIFYVLAIAVLSAIVPHEQAGLMESPFVQVFDMVGIPYAADLMNFVILTAILSVGNSGLYASTRILWAMSKTGMAPKSLSPLSKRGVPLRALSITLCFALISLMTSFVAADTLFMVLMAVSGMSGTVTWIVIALAQYRFRKAWLRDGGQLQDLKYKAPLYPLVPLLCITLCSSLFVFLALDETQRPSLYWGFGFIALCYAAYFFVNRRRQGAFAPSTPGV

SEQ ID NO: 23410 - protein, 316 aa, Pseudomonas putida KT2440
MIDAVVVSRNDEAQGICSFELAAADGSLLPAFSAGAHIDVHLPDGLVRQYSLCNHPEERHRYLIGVLNDPASRGGSRSLHEQVQAGARLRISAPRNLFPLAEGAQRSLLFAGGIGITPILCMAEQLSDSGQAFELHYCARSSERAAFVERIRSAPFADRLFVHFDEQPETALDIAQVLGNPQDDVHLYVCGPGGFMQHVLDSAKGLGWQEANLHREYFAAAPVDASNDGSFAVQVGSTGQVFEVPADRTVVQVLEENGIEIAMSCEQGICGTCLTRVLQGTPDHRDLFLTEEEQALNDQFTPCCSRSKTPLLVLDI

SEQ ID NO: 23411 - protein, 394 aa, Pseudomonas putida KT2440
MSSAEIYVVSAVRSAIGGFGGSLKDLPLADLASAVTRAAIERSGLAAEQVGHMVMGTVIPTEPRDAYLARVAAMNAGIPKETPAFNVNRLCGSGLQAIVSAAQGLLLGDTDVAVAAGAESMSRGPYLLPQARWGARMGDLQGIDYTVGVLQDPFQHFHMGITAENVSAKYGITREMQDELALTSQRRAARAIAEGRFASQIVALELKTRKGSVQFSVDEHVRADVTAEQLAGMKPVFKKDGTVTAGNASGINDGAAGLVLATGDAVRRLGLKPLARLVGYAHAGVEPELMGLGPIPATRKVLEKTGLNLQDLDVIESNEAFAAQACAVARELGFDPEKVNPNGSGISLGHPVGATGAIIATKAIHELQRIQGRYALATMCIGGGQGIAVVFERV

SEQ ID NO: 23412 - protein, 382 aa, Pseudomonas putida KT2440
MRGRQKIAIVGAGLGGAAAATLLQQAGFDVEVFEQAPAFTRLGAGIHIGPNVMKIFRRMGLEQKLELMGSHPDFWFSRDGNTGDYLSRIPLGEFARREYGAAYITIHRGDLHALQIEAIQPGTVHFGKRLEKIVDEGDQVRLDFADGTHTVADIVIGADGIHSKIREELLGAEAPIYSGWVAHRALIRGVNLAQHADVFEPCVKWWSEDRHMMVYYTTGKRDEYYFVTGVPHEAWDFQGAFVDSSQEEMRAAFEGYHPTVQKLIDATESITKWPLRNRNPLPLWSRGRLVLLGDACHPMKPHMAQGACMAIEDAAMLTRCLQETGLSDHRTAFALYEANRKERASQVQSVSNANTWLYSQEDPAWVYGYDLYGQQLESGEAA

SEQ ID NO: 23413 - protein, 657 aa, Pseudomonas putida KT2440
MTAAPKPRSTLNPPVFYTSAILVFLLVLYATAFQEHAQTLFEQVQRWIITNASWFYILVVALVLISVVFLAVSRYGDIKLGPDHSEPDYRKSSWFAMLFSAGMGIGLMFFGVAEPVMHFSTPPVGDPGTVAAAREAMKITFFHWGLHAWAIYAIVALILAYFSFRNGLPLTLRSALYPLIGERIYGPIGHAVDVFAILGTVFGVATSLGYGVLQINSGFHHVFGLPVNTTVQVILITATCALATLSVASGLDKGIRILSELNLSLAVILMLFVLLLGPTVFLLQTYVQNTGAYLSDIVNKTFNLYAYEPTDWIGGWTLLYWGWWLSWSPFVGLFIARISRGRTIREFVCGVLFVPAGFTLLWMTVFGDSAIHMILNDGVKDLAAVVSEDSSLALFAFLEHFPFSSIISLVAVLMVVVFFVTSADSGALVVDMLASSGQGHSPLWQRIFWSVCIGAVAIALLLANGLKALQTATIASALPFAVILLVAIWGLFKALSLDATRRGLRNQALPGPRHTRHPHGGWQRRLRNIALMPRRVHVTRFIAEVVRPACEEVAQELRKQGYEVSVNERDDGRVSLELSHAGEGRFLYEVRPRAFNTPSFVMRDTEDGADSRKYFRAEVHLREGGQDYDIMGWSRDDVIGDILDQYERHLHYLHVVG

SEQ ID NO: 23414 - protein, 88 aa, Pseudomonas putida KT2440
MASGKVKWFNNAKGYGFINEEGKSDDLFAHYSAIQMDGYKTLKAGQAVVFNIVQGPKGLHAVEIKDAAAAAAEAARALGEPQSETAKA

SEQ ID NO: 23415 - protein, 297 aa, Pseudomonas putida KT2440
MAKIGFIGTGIMGKPMAQNLQKAGHSLFISTHHDAAPADLIAAGAVALANPKEVAQEAEFIIVMVPDTPQVESVLFGENGVAEGVGPNKVVIDMSSISPTATKAFAEKIKATGAAYLDAPVSGGEVGAKAATLSIMVGGCPNAFERTLPLFEAMGKNITRVGGNGDGQTAKVANQIIVALNIQAVAEALLFAAKNGADPAKVREALMGGFASSKILEVHAERMIKGTFDPGFRINLHQKDLNLALQGAKELGINLPNTSNAQQVFNTCQALGGGNWDHSALIKGLEHMANFSIRDDK

SEQ ID NO: 23416 - protein, 312 aa, Pseudomonas putida KT2440
MSKTVLVLVETVDDYLPMLEQAGYHLIRAPSPQLRADAIHRHAEEIDAVLTRGPLGLSATEIDALPRLQIICVIGAGYEQVDLAAAAARGITVTNGAGANAAAVADHTLALLLALLRDIPRADASTRRGEWNRVISPSVSGKRLGILGLGAVGLAIAKRAHLGFDMHVSYHSRTARQDVPYAWYDSPRHLAEAVDILVVATPGGANTRHLVDAHVLQALGVEGYLVNIARASVVDTQALIAALQRGQLAGAALDVFDDEPTVPDALKALPNTVLTPHVAGQSPEAARDTVDLVLRNLQAFFAGEPVLTPVRP

SEQ ID NO: 23417 - protein, 387 aa, Pseudomonas putida KT2440
MQPDSVIYLDAAATTPCADDVIKEMAKYDNINYGNPSSAHILGRLARSAVFESASHISELLGCTPAEIVFTSGATESNNIAILGSATTARSNIIICPIDHKSSILAAEELEKRNIEIRRMKIDSDGRVNLTHLNSLLDENTSLLSISYVNSEIGTFQNLLEIKKALENSNALFHVDAAQALGKLPINVKELGVDCASISAHKIEGPKGIGALYVSSSSFSRLRPLTFGGGQSSLRSGTLPTQLIAGFGAAARRLKNKDYPASWSAAKQLRNAILETLNKHDIAFLINSPDAVSTPHILNISILGMRSETLISSLRNVCISSGSACNSNNLSPSYVITGIGHSAMRANSAIRLSFTSDMDIKTVRAGAESLSQKVLQLIHLNHRGQMK

SEQ ID NO: 23418 - protein, 451 aa, Pseudomonas putida KT2440
MAIKVLLVEDDRVLRQALGDTLEIGGFAYQAVGSAEEALEAVLEDAFSLVVSDVNMPGMDGHQLLSQLRRQQPQLPVLLMTAHAAVERAVEAMRQGAADYLVKPFEPKALLNLVERHAAGRVTGEEGPVACEPASRQLLELAARVARSDSTVLISGESGTGKEVLARYIHQQSPRAAQPFVAINCAAIPDNMLEATLFGHEKGAFTGAIAAQAGKFEQAEGGTLLLDEISEMPMALQAKLLRVLQEREVERVGGRKPISLDIRVLATTNRDLAGEVAAGRFREDLYYRLSVFPLAWRPLRERPGDILQLAERLLARHVAKMKHASVRLSPAARACLQAYAWPGNVRELDNALQRALILQQGGVIEAADFCLAGAIPLSAGTEPSLEVVADAGGLGDDMRRHEYQMIIDTLRAERGRRKEAAERLGISPRTLRYKLAQMRDAGFDVEASLFG

SEQ ID NO: 23419 - protein, 460 aa, Pseudomonas putida KT2440
MQSHGLKQSLKQRHITMIALGGVIGAGLFMGSGSLIASAGPAAILSYFIGGLVVTLVMFMLGEMACRNPDAGSFSTYANTYLGDWAGFAVGWLYWFKSMMTITLEAVLLGAILHDFLPWLPIWAGAFLMLVTLMASNAYSVRSFAEVEYWLAAMKVATILIFMLLGVSILLGLHSDIPAPGLINLTAHDGFMPNGLSPVMAGVIVVIFSLGGSEIAAVAAGESENPRQNVIRAIKSVILRVMLFYVGSVSILILCLPWTDKANLASPYVSLFSLAGFGGAAVAMKLVLFVSFMSVMNSFMFSNSRMLFSLSQRGHAPKLFSRTSAKGVPINALLLSLSICTMILTVHFVSGGDLFMTLAKSTGSLVMVVWIFIIIAHVAMRIKTRHEAVAPNAFRAWLFPYTNIIALFALLAVIGTQAFDPASRFQFWFTVLTVLLVVAGYFLMRQRLASSAVLAHERDA

SEQ ID NO: 23420 - protein, 411 aa, Pseudomonas putida KT2440
MALIVQKFGGTSVGSIERIEQVAEKVKKHREAGDDLVVVLSAMSGETNRLIDLAKQITDQPVPRELDVIVSTGEQVTIALLTMALIKRGVPAVSYTGNQVRILTDSSHNKARILQIDDQKIRADLKEGRVVVVAGFQGVDEHGSITTLGRGGSDTTGVALAAALKADECQIYTDVDGVYTTDPRVVPQARRLEKITFEEMLEMASLGSKVLQIRSVEFAGKYNVPLRVLHSFKEGPGTLITIDEEESMEQPIISGIAFNRDEAKLTIRGVPDTPGVAFKILGPISASNIEVDMIVQNVAHDNTTDFTFTVHRNEYEKAQSVLENTAREIGAREVIGDTKIAKVSIVGVGMRSHAGVASCMFEALAKESINIQMISTSEIKVSVVLEEKYLELAVRALHTAFDLDAPARQGE

SEQ ID NO: 23421 - protein, 320 aa, Pseudomonas putida KT2440
MRPTVDKTLHQPLGGNEMPRFGGIATMLRLPHLQSAKGLDAAFIGVPLDIGTSLRSGTRFGPRQIRAESVMIRPYNMATGAAPFDSLSVADIGDVAINTFNLLDAVRIIEEAYDEIVEHNVIPMTLGGDHTITLPILRALHKKHGKIGLVHIDAHADVNDHMFGEKIAHGTTFRRAVEEGLLDCDRVVQIGLRAQGYTADDFNWSRRQGFRVVQAEECWHKSLEPLMAEVREKVGGGPVYLSFDIDGIDPAWAPGTGTPEIGGLTTIQAMEIIRGCHGLDLIGCDLVEVSPPYDTTGNTSLLGANLLFEMLCVLPGVVRR

SEQ ID NO: 23422 - protein, 392 aa, Pseudomonas putida KT2440
MNDVVIVAATRTAIGSFQGALATVPAVDLGAAVIKQLLKQTGLDPAQVDEVILGQVLTAGAGQNPARQAAIKAGLPFSVPALTLNKVCGSGLKALHLAAQAIRCGDAEVVIAGGQENMSLAPYVMPSARTGQRMGHGQLIDSMITDGLWDAFNDYHMGITAENLVDKYGLSREQQDAFAAESQRKAVAAIEAGRFDAEITPIVLPQKKGEPKVFARDEQPRPDTTAESLAKLRPAFKKDGSVTAGNASSLNDGAAAVLLMSAAKAEALGLPVLAKIAAYASAGVDPAIMGIGPVSATQRCLDKAGWQLAELDLIEANEAFAAQALAVGNALAWDAARVNVNGGAIALGHPIGASGCRVLVTLLHEMIKRDVKKGLATLCIGGGQGVALAIER

SEQ ID NO: 23423 - protein, 574 aa, Pseudomonas putida KT2440
MELLSGAEMVVRFLRDEGVKHIYGYPGGALLHVYDALFKEPEVEHILVRHEQAATHMADGYARATGKAGVVLVTSGPGATNAITGIATAYMDSIPMVILSGQVPSTMVGTDAFQETDMIGISRPIVKHSFMIKNPTEIPEVLKKAFYLAQSGRPGPVVVDIPKDMTNPAEKFEYVYPKKVKLRSYSPAVRGHSGQIRKAAEMLLAAKRPVVYSGGGVILGGGSEALTEIAKSLNLPVTNTLMGLGGFPGTDRQFLGMLGMHGSYTANMAMHHADVIFAVGARFDDRVVNGPAKFCPNAKIIHIDIDPASISKMIKADVPIVGPVDSVLSEMLGILKEIGEQPDKAALDAWWKQIDEWRGNGELFPYDKGDGNVIKPQKVIETLCEVTNGDAFVTSDVGQHQMFAAQYYRFNKPNRWINSGGLGTMGFGFPAAMGVKLNFPDQDVACVTGEGSIQMNIQELSTCMQYGLPVKIVNLNNGVLGMVRQWQDMAYNGRHSHSYVESLPDFIKLAEAYGHVGIRITSLKDLKPKLEEAFAMKDRLVFIDIAVDRSEHVYPMQIKDGSMRDMWLSKTERT

SEQ ID NO: 23424 - protein, 390 aa, Pseudomonas putida KT2440
MAQPYSARSRAIEPFHVMALLARANELQAAGHDVIHLEIGEPDFTTAAPIVAAGQAALAAGHTRYTAARGLPALREAIAGFYGQRYGLNIDPERILITPGGSGALLLASSLLVDPGKHWLLADPGYPCNRHFLRLVEGGAQLVPVGPDVNYQLTADLVERYWDKDTVGALVASPANPTGTVLGREALACLARTTHERHGHLVVDEIYHGLTYGMDAPSVLEVDDSAFVLNSFSKYFGMTGWRLGWLVAPPGAVADLEKLAQNLYISAPSMAQHAALACFQPEALAIFEERRAEFARRRDYLLPALRELGFRIAVEPQGAFYLYADISAFGGDAFAFCRHFLETQHVAFTPGLDFGRHLAGHHVRFAYTQSLPRLEEAVQRIARGLQSWQG

SEQ ID NO: 23425 - protein, 641 aa, Pseudomonas putida KT2440
MGKIIGIDLGTTNSCVSILENGNVKVIENAEGARTTPSIVAYANDGEILVGQSAKRQAVTNPHNTLFAVKRLIGRRFEEDVVQKDIKLVPYKIVKANNGDAWVEAAGKEMAPPQISAEVLKKMKKTAEDYLGEPVTEAVITVPAYFNDSQRQATKDAGRIAGLDVKRIINEPTAAALAYGMDKAKGDHTVIVYDLGGGTFDVSVIEIAEVDGEHQFEVLATNGDTFLGGEDFDMRLIDYLVDEFKKESGMDLKNDPLALQRLKEAAEKAKIELSSAQSTDVNLPYITADATGPKHLNVKISRAKLESLVEDLVKRTIEPCRIALKDAGIDASKIDDVILVGGQTRMPLVQKEVADFFGKEARKDVNPDEAVAMGAAIQGAVLAGDVKDVLLLDVSPLTLGIETMGGVMTALIEKNTTIPTKKSQVFSTADDNQSAVTIHVLQGERKQAAQNKSLGKFDLADIPPAPRGVPQIEVTFDIDANGILHVGAKDKATGKTQSIVIKANSGLSDEEIERMVRDAEANAEEDRKFEELAAARNQGDALVHSTRKMVADAGDKVTAEEKTAIEAAVVALEAAVKGDDKAAIDAKVEELSKVSAPVAQKMYAEQSAEQPQGGAQQAEPEAKHDDVVDAEFEEVKDNNKQ

SEQ ID NO: 23426 - protein, 443 aa, Pseudomonas putida KT2440
MPDTPLTQAEAPTVIPRPSACPGLWRIVSARDGGICRIKLPGGLLLAEQAEAVAAAAERFAGGVIEATNRGNLQIRGIGSEHRALVEALLAAGLGPRDAAGDDVRNVMLSPLAGHDPLMLLDARPLAGQILDLLEGTPRFHQLSAKFAVQLDAGERLAMLEHPHDLWLSPLHLDQQTWLAFGLAGCPAEGQALGAVPLTQGLMLVRAVLERFLDLASPTQTRMRQLLDVYPTADFVAGLGLDIRRDAAVLTWRREQHRASWLGRLPQAQGVALGVAPPQGRLTPAMLRGAARIARELGDASMRLSPWQSLVLSNLQAQHIDQALAELSALGLLCHDREPLARISACTGASGCAKALAETKADAVVLAALLGPGVPASVHLSGCPRSCAVAHVAPATLLARSPGRYDLYLRDARQPGFGALRATDLTLNEAGAMLDLPTEHLDD

SEQ ID NO: 23427 - protein, 468 aa, Pseudomonas putida KT2440
MTQTSPIATDEPHLQRNLTNRHIQLIAIGGAIGTGLFMGSGKTISLAGPSIIFVYMIIGFMLFFVMRAMGELLLSNLNYKSFIDFSADLLGPWAGYFTGWTYWFCWVVTGIADVVAIAAYTQFWFPDLPQWIPALTCVGLLLSLNLVTVKMFGELEFWFALVKIVAILGLVATGLYMVITGFTSPSGRTAQLANLWNDGGMFPHGLMGFFAGFQIAVFAFVGIELVGTTAAEAKNPERTLPRAINSIPIRIIVFYVLALIAIMAVTPWRDVVPGKSPFVELFVLAGLPAAASIINFVVLTSAASSANSGVFSTSRMLYGLSQEGDAPKAFEKLSSRSVPANGLYFSCTCLLLGAVLIYLVPNVVEAFTLVTTVSAVLFMFVWTLILLSYLKYRKDRAALHQASNYKMPGGRFMCYVCLSFFAFILVLLSLEADTRSALVVTPIWFVVLAVTYQLVRSRRHPRTAVRNG

SEQ ID NO: 23428 - protein, 602 aa, Pseudomonas putida KT2440
MAETPRPAEHTSSLKIYFRLLSYVKPYVGIFLLSIVGFVIFASTQPMLAGILKYFVDGLSNPEAVLFPNVPYLRDLQLLQAVPLLIILIAAWQGLGSFLGNYFLAKVSLSLVHDLRVALFNKLLVLPNRYFDNHNSGHLISRITFNVTMVTGAATDAIKVVIREGLTVVFLFAYLLWMNWHLTLVMVAILPVIAVMVSIASKKFRKQSKKIQVAMGDVTHVASETIQGYRVVRSFGGEAYEQQRFGQASQSNTDKQLRMTKTGSLYTPMLQLVIYSAMAALMFLVLFLRGDSTAGDLVAYITAAGLLPKPIRQLSEVSSTIQKGLAGAESIFEQLDEAPEVDTGTVEKERVEGRLEVRNLSFTYPGTEREVLSDISFVAEPGQMIALVGRSGSGKSTLAALIPRFYHHDKGQILLDGVEIEHYRLRNLRRHVSQVTQHVTLFNDTVANNIAYGDLAGAPRADIEAAAADAYAKEFVDRLPKGFDTEVGENGVLLSGGQRQRLAIARALLKNAPLLILDEATSALDTESERHIQAALDHVMQGRTTLVIAHRLSTIEKADQILVMDQGRLVERGTHTELLAANGHYARLHAMGLDEPAKADIT

SEQ ID NO: 23429 - protein, 492 aa, Pseudomonas putida KT2440
MGNPLTITFVIYIAAMVLIGFAAYRATNNLSDYILGGRSLGSVVTALSAGASDMSGWLLMGLPGAIYFAGLSEAWIAIGLTVGAYLNWLFVAGRLRVQTEHNGDALTLPDYFSSRFEDNSGLLRIISAIVILVFFTIYCASGIVAGARLFESTFGMSYETALWAGAAATIAYTFVGGFLAVSWTDTVQASLMIFALILTPVIVLISTGGFDQTFAAIEAVNPANFDMLKGATFIGIISLMGWGLGYFGQPHILARFMAADSVKSIAKARRISMTWMILCLAGTCAVGFFGIAYFSAHPELAGPVSENHERVFIELAKILFNPWVAGVLLSAILAAVMSTLSCQLLVCSSALTEDFYKAFLRKNASQVELVWVGRLMVLAVALIAIAMAANPENRVLGLVAYAWAGFGAAFGPVVLISVLWKGMTRNGALAGIVVGALTVILWKNFDTLGLYEIIPGFLFASIAIVLVSKLGSPSQTMVKRFEAADAAYHADK

SEQ ID NO: 23430 - protein, 467 aa, Pseudomonas putida KT2440
MQQAQGLKRGLSARHIRFMALGSAIGTGLFYGSASAIQMAGPAVLLAYLIGGAAVFMVMRALGEMAVHNPVAGSFGHYATTYLGPMAGFILGWTYAFEMVIVAIADVTAFGIYMGFWFPEVARWIWVLGIVFLIGGLNLCNVKVFGEMEFWLSLLKVGAIVAMILAGLGIMAFGFSQVGTGHAVGMSNLFDHGGFMPNGVGGLIASFAVVMFAFGGIEIIGVTAGEAKDPQRVIPKAINAVPLRILLFYVLTLFVLMCLYPWPQIGSQGSPFVQIFSNLGIGSAAAVLNVVVISAAISAINSDIFGAGRMMYGLAQQGHAPRGFSKLSKHGVPWMTVVVMGAALLIGVLLNYLIPENVFLLIASIATFATVWVWLMILLTQVAMRRSMSREQVAQLKFPVPFWPYGPAMAIAFMVFIFGVLGYFPDTQAALIVGVIWVVFLVASYLLWCKPRAGQGQPVAEPAELHR

SEQ ID NO: 23431 - protein, 667 aa, Pseudomonas putida KT2440
MSSASLTKPPAERVRVNRVVFFTSALMILVLTALLIAVPETAGQVLGVAQKWLTRTFGWYYMLVICGYLLFVVYLAFSDYGSLKLGGKDDQPDFSYGAWAGMLFSSGIGISLLYFGASEPLDHYFNPPEGTPASLEAARQGLQLTFLHWGLHGWAIYALVGLAVGYFAYRHNQPLALRSALYPLVGERWVKGAAGNAVDIFGMFVTLLGLVTNLGIGAMQVSSGLEYLFGMDHSKTNLLVVILVMAGVATVAAVSGVENGIRRLSNLNIMLFSGLLIFVLLGGETLHLLNGFVQNVGDYLNGIVLKTFDLYVYEGEAGKSERWLGLWTVFYWAWWISWGPFVGMFIARISKGRTVRQLVMGVLLIPLGFTLAWLSIFGNTALDLVINQGAVELGKTALEQPSMSIYQLLEHFPAAKIVIGVAVFVGFVLFLTPADSGAVMMANLSCTGGKVDEDAPHWMVVFWSVVITLVTIGLLFAGNFEAMQTMVVLAGLPFSVVLVLFMFGLYKAMKQDVVIEQERAELAARGRRGFSERLTQLELQPTQAVVQRFMDKQVSPALKEAAAQLQTQGFEVETRVGQSRNLMGLRVMMEEGNPFVYEVSLDGYMAAPSEAPVEGEPELRQRFYRAEVYLHDGSQEYDLMGFAPDQIVRDVLDQFESHRQVLGRVYS

SEQ ID NO: 23432 - protein, 1481 aa, Pseudomonas putida KT2440
MKTGLYHPEEFKDNCGFGLIAHMTGEPSHHLLQTAMQALTCMTHRGGINADGKTGDGCGLLMQKPDQFLRAMAQEHFAVELPKQYAVGMVFFNQDPVKAEAARANMDREILAAGLKLVGWRKVPIDTSVLGRLALERLPQIEQVFIGGEGLSDQEFAIKLFSARRRSSVANAHDADHYICSFSHKTIIYKGLMMPRDLAAFYPDLGDERLQTAICVFHQRFSTNTLPKWPLAQPFRFLAHNGEINTITGNRNWAVARRTKFANDQIPDLEELGPLVNRVGSDSSSMDNMLELMVTGGIDLFRGVRMLVPPAWQNVETMDADLRAFYEYNSMHMEPWDGPAGIVMTEGRHAVCLLDRNGLRPARWVTTTNGYITIASEIGVWGYQPEEVLAKGRVGPGQILAVDTETGQILDTDAIDNRLKSRHPYKRWLRQHATRIQATLTDDQGVASYDADQLKQYMKMFQVTFEERDQVLRPLGEQGQEAVGSMGDDTPMAVLSQRVRSPYDFFRQQFAQVTNPPIDPLREAIVMSLEICLGAERNIFQESPEHASRVILSSPVISPAKWRSLMNLEREGFDRQLIDLNYEQSVGLEAAIRNIADQAEEAVRGGKTQLVLSDRYIAPGKLPVHASLAVGAVHHRLTEQGLRCDSNILVETATARDPHHFAVLLGFGASAVYPYLAYEVLADLIRTGEVLGDLDEVFKYYRKGISKGLLKILSKMGISTIASYRGAQLFEAIGLAEEVVGLSFKGVSSRIKGARFEDLENDQKLLAAEAWSARKPIQQGGLLKFVHGGEYHAYNPDVVNTLQAAVQQGDYAKFKEYTTLVDQRPVSMIRDLLKVKVADQPLALEQVEPLEAILKRFDSAGISLGALSPEAHEALAEAMNRLGARSNSGEGGEDPSRYGTIKSSKIKQVATGRFGVTPEYLVNAEVLQIKVAQGAKPGEGGQLPGGKVNGLIAKLRYAVPGVTLISPPPHHDIYSIEDLAQLIYDLKQVNPQALVSVKLVAEAGVGTIAAGVAKAYADLITISGYDGGTGASPLTSIKYAGAPWELGLAETHQTLRGNDLRGKVRVQTDGGLKTGLDVIKAAILGAESFGFGTAPMIALGCKYLRICHLNNCATGVATQNDKLRKDHYIGTVDMVINFFTFVAEETREWLAKLGVRSLGELIGRTDLLEVLPGDTERQQYLDLSPLLGSSHIPADKPQFCEVDKNPPFDLGELAEKMVDMAMPAIRDQAGGEFSLDICNCDRSIGARVSGEIARLHGNQGMAAAPITFRFKGTAGQSFGVWNAGGLNLHLEGDANDYVGKGMTGGKVTIVPPAGSPFETQHSAIVGNTCLYGATGGKLFAAGTAGERFAVRNSGAHAVVEGTGDHCCEYMTGGFVCVLGKTGYNFGSGMTGGFAYVLDMDNSFVDKLNHELVEIQRISGEAMEAYRSHLARVLAEYVDETGSEWGRELSENLDDYVRRFWLVKPKAANLKQLLSSTRANPQ

SEQ ID NO: 23433 - protein, 567 aa, Pseudomonas putida KT2440
MRAESGLLKGLNPTVTIWSLLAVVAFVLFCALFAEHAAAVFQRASDFILQNFKWFYLISVTGVLGLLIYLMCSKFGSMKLGRDDDKPEFSFGSWIAMLFSGGMGIGLIFWSVAEPMWHYAGNPFATGLTDEAATTAMRITLFHWGLHPWAIFTIVGLGLAYFAYRKGLPLSMRSILYPLIGERIYGPIGHVVDILAVVITAFGVSQSLGLGVVQMNTGLSQVFDLPISLGVQITLIVLITLVTTVSVMAGVSRGMKRLSEWNMLLSVVLVVLILLLGPTRYIINLMLESTGDYASHVVGLSFWSDTQKDSGWQNWWTAFYWPWWMTWGPFVGLFIARISKGRSIRELIAGALLVPTLVTIIWMSVFGGTALKAEQLDRQQHAELVASGELQGDKAKYEGGTVLLATKQETTAAMFTLLHKIDAGTLGKVLSVLVCILLATYFITSADSGTQVLCTLNSMGSANPPQSIRLLWCILEGAIAMALLMAGGLKAIQMASIAAGLPIAGFILLISYTLMRSLRQEMADGLLDTPPGGRLPIPGIHPQGITPVAGPLACEGLDMGLTAKKAS

SEQ ID NO: 23434 - protein, 384 aa, Rhodospirillum rubrum
  misc_feature (1)..(1): Xaa can be any naturally occurring amino acid
  unsure (1)..(384): unsure at all Xaa locations
XKIAIPKERRPGEDRVAISPEVVKKLVGLGFEVIVEQGAGVGASITDDALTAAGATIASTAAQALSQADVVWKVQRPMTAEEGTDEVALIKEGAVLMCHLGALTNRPVVEALTKRKITAYAMELMPRISRAQSMDILSSQSNLAGYRAVIDGAYEFARAFPMMMTAAGTVPPARVLVFGVGVAGLQAIATAKRLGAVVMATDVRAATKEQVESLGGKFITVDDEAMKTAETAGGYAKEMGEEFRKKQAEAVLKELVKTDIAITTALIPGKPAPVLITEEMVTKMKPGSVIIDLAVEAGGNCPLSEPGKIVVKHGVKIVGHTNVPSRVAADASPLFAKNLLNFLTPHVDKDTKTLVMKLEDETVSGTCVTRDGAIVHPALTGQGA

SEQ ID NO: 23435 - protein, 392 aa, Zoogloea ramigera
STPSIVIASAARTAVGSFNGAFANTPAHELGATVISAVLERAGVAAGEVNEVILGQVLPAGEGQNPARQAAMKAGVPQEATAWGMNQLAGSGLRAVALGMQQIATGDASIIVAGGMESMSMAPHCAHLRGGVKMGDFKMIDTMIKDGLTDAFYGYHMGTTAENVAKQWQLSRDEQDAFAVASQNKAEAAQKDGRFKDEIVPFIVKGRKGDITVDADEYIRHGATLDSMAKLRPAFDKEGTVTAGNASGLNDGAAAALLMSEAEASRRGIQPLGRIVSWATVGVDPKVMGTGPIPASRKALERAGWKIGDLDLVEANEAFAAQACAVNKDLGWDPSIVNVNGGAIAIGHPIGASGARILNTLLFEMKRRGARKGLATLCIGGGMGVAMCIESL

SEQ ID NO: 23436 - protein, 392 aa, Zoogloea ramigera
STPSIVIASAARTAVGSFNGAFANTPAHELGATVISAVLERAGVAAGEVNEVILGQVLPAGEGANPARQAAMKAGVPQEATAWGMNQLCGSGLRAVALGMQQIATGDASIIVAGGMESMSMAPHCAHLRGGVKMGDFKMIDTMIKDGLTDAFYGYHMGTTAENVAKQWQLSRDEQDAFAVASQNKAEAAQKDGRFKDEIVPFIVKGRKGDITVDADEYIRHGATLDSMAKLRPAFDKEGTVTAGNASGLNDGAAAALLMSEAEASRRGIQPLGRIVSWATVGVDPKVMGTGPIPASRKALERAGWKIGDLDLVEANEAFAAQACAVNKDLGWDPSIVNVNGGAIAIGHPIGASGARILNTLLFEMKRRGARKGLATLCIGGGMGVAMCIESL

SEQ ID NO: 23437 - protein, 392 aa, Zoogloea ramigera
  misc_feature (89)..(89): Xaa can be any naturally occurring amino acid
  unsure (1)..(392): unsure at all Xaa locations
STPSIVIASAARTAVGSFNGAFANTPAHELGATVISAVLERAGVAAGEVNEVILGQVLPAGEGQNPARQAAMKAGVPQEATAWGMNQLXGSGLRAVALGMQQIATGDASIIVAGGMESMSMAPHCAHLRGGVKMGDFKMIDTMIKDGLTDAFYGYHMGTTAENVAKQWQLSRDEQDAFAVASQNKAEAAQKDGRFKDEIVPFIVKGRKGDITVDADEYIRHGATLDSMAKLRPAFDKEGTVTAGNASGLNDGAAAALLMSEAEASRRGIQPLGRIVSWATVGVDPKVMGTGPIPASRKALERAGWKIGDLDLVEANEAFAAQACAVNKDLGWDPSIVNVNGGAIAIGHPIGASGARILNTLLFEMKRRGARKGLATLCIGGGMGVAMCIESL

SEQ ID NO: 23438 - protein, 104 aa, Fritillaria agrestis
MALAKAKDLVASNPVVVFSKSYCPYCIRVKELLVKLKATYKVIELDLESDGSAIQAALAEWTGQRTVPNVFIGGKHIGGCDKTMELYNSGKLQPLLVEAGALAA

SEQ ID NO: 23439 - protein, 152 aa, Solanum tuberosum
MSSFSEEQEALVVKSWGSMKKDAGEWGLKFFLKIFEIAPSAKKMFSFLKDSNVPLDQNPKLKVHAKSILVMTCEAAVQLRKAGKVVVRDSTLKKIGATHFKYGVADEHFEVTKYALLETIKEASPEMWSVEMKNAWGEAYDQLVSAIKTEMK

SEQ ID NO: 23440 - protein, 341 aa, Pseudomonas resinovorans
MSHKVAFSFADGKTLFFPVQSHEILLDAALRNGINIPLDCREGVCGTCQGRCESGQYSQDYVDDEALSAEDLRQRKMLTCQTRVSSDAAFYFDFASSLCNAPGPGRLKGIVRAVEQVSPNTAILHLDAGADGQQLDFLPGQYARLQIPGTHGQRSYSFANRPNSGNQLQFLIRLLPDGLMSNYIRERSLIGDEILLEAPLGAFYLRHVDKPLVFVAGGTGLSAFLGMLDEIAERGGCGHPVHLYYGVRNAADLCETQRIAAYAERIPGFRFTPVISDPSPDWHGKRGYITEHFDLAEFRDQALDMYLCGPPPMVESIKQWLDTQALDQTRLYYEKFTQSNT

SEQ ID NO: 23441 - protein, 314 aa, Pseudomonas resinovorans
MPSLSLRIERIDPLTPRIRRLILVADAQQPLPGFTPGAHIEIQIAGSKPQWRAYSLVNLPGHAHYEIAVQLEEQSSGGSRWIHQLQVGQPLQVRAPKNHFPLVTQASDYLLIAGGIGITPMLGMARALAAGQQPFTLHYAGREAQGMAYLEEVRALGSAHCWISGGDPARRLPLASLLATPHNGRQLYVCGPKALIASVLHSARELGWDDSHVHSELFTGSLDAAGDASFEVELRSSGITLQVPAGKSVLEAMLDADLDPLFDCRRGDCGVCVAQVLEGSAEHRDICLSARERSDGRFCTCVSRASSARLVLDL

SEQ ID NO: 23442 - protein, 378 aa, Wolbachia endosymbiont of Tunga penetrans
MSDLAKRMSLIKPSPTIAVTDKANRLKSEGKKICVLAAGEPDFDTPGHVKKAAIQAINEGKTKYTAVDGTLELKEAIINKLKKDNSLKYTPSQICVGAGAKQVLFNLFMATVNPGDEAIIPAPYWVSYVDMVSLFGGLPVVVECKQSFKLTPELLKSKITKKTKWLILNSPNNPAGVIYTYDELKGIAQILLEYPHVNVVTDDIYEHIIYDEKFFTIAQVEPKLYDRIFVVNGVSKAYAMTGWRIGYIAGRSDVIKAISTLQSQSTSNPNSIAQAAAVEALNGDHDFLKERTKIFKSRRDFVVEKLNSVPGLSASTPQGAFYLFVSCEGLLGKSTRSGKVINNDLDFAEYLLEDHLVAVVPGIAFGLKNFVRISYATS

SEQ ID NO: 23443 - protein, 443 aa, Heliobacillus mobilis
MFYDQAKIFVKGGDGGNGVASFRREKYVPEGGPNGGDGGSGGNVIFIGDEGLRTLVDFRYQRHYKAERGEHGMGKNMHGRNGEDMTVKVPIGTVVKDAETNALIADITSHNQKVIVAKGGRGGRGNAKFVSSVNRAPTISENGEPGAERWLELELKVLADVGLVGFPNVGKSTIISAVSAAKPKIANYHFTTLEPNLGVVRLGEGQSFVMADIPGLIEGAHAGAGLGHDFLRHTERTRFLIHVLDISGSEGRDPLEDFDGINKELALYKPDLAEKPMVVAANKMDLPGAEGNLERLREKLGEEYLIFPVSAATTEGLEPLLWHVYHGLEAMGPVVFETVTAEKHMDVRVTGKKAERFHIDRDEEGTFVVSGAEVERHVAMTNFENEESVTRLQRILDRMGVDQALRDAGAKHGDQVRIRELEFDFVEFGGDYAPDPDDADNEE

SEQ ID NO: 23444 - protein, 215 aa, Heliobacillus mobilis
MRFFLDSANIDEIREANALGVISGVTTNPSLIAKEGRNFRQVVEEIVAIVDGPISAEVISTDAEGMVAEARELAQIHKNIVIKIPMCAEGLKATSRLSREKIRTNVTLIFSANQGLLAANAGATFVSPFVGRLDDVGHDGLDVIREMVEIFDIHGLATEIIAASVRHPLHVTAAARAGAPIATIPYKVLMQMVKHPLTDKGIEQFLKDWETVKNK

SEQ ID NO: 23445 - protein, 595 aa, Heliobacillus mobilis
  misc_feature (60)..(60): Xaa can be any naturally occurring amino acid
  unsure (1)..(595): unsure at all Xaa locations
MGKISIHRVVWPDIRMEKLRKDLVAGITVGMVAIPLALAFAIASGATPEQGIYTAVIAGXLIAIFGGSHVQIGGPTGAFVPLLFSIMMTYGYDNLLIAGMLAGLFLIFMGLTGMGALIKFIPRPVTVGFTAGIAVIIFFGQVDTFLGLQGVVKHKDFIDNVIELSKHVDTVQWSSITVALVCLVCLLFSHKLVPAVPGPLVGIVVSTIFAHVVFGGNVETIGSKFGQLSGGLPSFHWPSVTLDQIQNMVGPALTIAALGSIESLLSCVVADGMTGKRHDSNRELIGQGIANMVTPLFGGIPATGAIARTATNIRSGGATPVAALVHSLTVFLLILVFAPFVAQVPLVSMSPILMRVAWNMSDRKEFVHLLRTTRSDMAVLIVTFALTVIFDLTIAVGIGMIIAAALFINGMSESLAIRKVLPEGPDEKLAPEAVTPIHDCPQIAIYTIDGALFFGAAAIFEKTLTESIQSKPKVLILRMGHVPMMDATGEMVLEDIVHNFRKRGGRILISGIMPQPEELLRKSGLYESIGEEHFFKRTGAAITSALNHIDRHRCVGCPHNAFYECSQLSRVGSIHIKGSIPTEQPANPSLVQEKA

SEQ ID NO: 23446 - protein, 403 aa, Arabidopsis thaliana
MASLGLSFPPAAKTPTYLASSSSTFFSNSSLSVRTSQFRSRNSVFACVKCDMPESLNVGNGNPSIPIINERTLPKFLESARMEKSVNRTNTRLKLFSGTANPALAQEIAWYMGLDLGKVNIKRFADGEIYVQLQESVRGCDVYLVQPTCTPTNENLMELLIMVDACRRASAKKVTAVIPYFGYARADRKTQGRKSIAAKLVANLITEAGADRVLACDLHSGQSMGYFDIPVDHVYCQPVILDYLASKSIPSEDLVVVSPDVGGVARARAFAKKLSDAPLAIVDKRRSGHNVAEVMNLIGDVRGKVAIMVDDMIDTAGTIVKGAALLHQEGAREVYACCTHAVFSPPAIERLSGGLLQEVIVTNTLPVAEKNYFPQLTILSVANLLGETIWRVHDDSSVSSIFL

SEQ ID NO: 23447 - protein, 645 aa, Leptospira interrogans
MSKEKIIGIDLGTTNSVVSVMEGGDPVVIQNSEGARTTPSIVAFTAKGETLIGQFAKNQAITNAVNTIRSAKRFIGRRLNECESEMKHVSYKVIRSGNEGVKFETSAGEFTPQEISARVLMKMKQTAEDYLGQKVTKAVITVPAYFNDEQRQATKDAGRIAGLEVERIINEPTAAALAYGFDKKNVNSKIAVYDLGGGTFDISILELADGVFEVKSTNGDTHLGGDDFDMAIMEWMISEFKNQTGIDISADKNTVQRLKEAAEKAKIELSGTMSTQINLPFITADASGPKHLDMTLTRAKFDQLTKSLVDRTRIPCENALRDAGLKASDINEVILVGGSIRIPAVQELVKQVFGKEPNKSVNPDEVVAIGAAIQGGVLAGEVSDVLLLDVTPLSLGIETLGGVMTKLIERNTTIPTKKSQVFSTAADNQSAVSIHVLQGEREMASANRTLGRFDLIGIPPAPRGVPQIEVTFDIDANGIVHVSAKDLGTGKEQKIRIESSSGLSEDEIQKMVKDAEAHAAADKAQREVIEAKNELDTLTYSLEKTVNEAGDKIGANEKQLATDEIKRAREAIESNDKARIESAKASISKIATDIASKVYSQSAPGAEQAAAGGPNGAGSNDQGNSTNNGEKVVDADYTVVDDEKK

SEQ ID NO: 23448 - protein, 593 aa, Vibrio vulnificus CMCP6
MTDKLGFLYLGLGLAAFFFMVYIIFSDIGQIKLGDADEKPEFATGSWAAMLFCGGIGASILYWGTIEWAYYYQNPPFQLEAGSEEAIRWAATYGIFHWGPIAWSIYLIPALPIAYFFYVRKQPVLKISAALMPVIGEARSYGKLGKVIDVLFIFGLLGGAATTLGLAAPLINEGISYLFGIPSTTLSQIGVLLLCTALFAYSSYKGMDGGIKVLSNINFWGALALLAFILVTGPTLFMLETGLDSIGRMLSNFFVMATWAEPFGGYGPFEDTHFPQDWTIFYWAWWLVFAPSMGLFVARISRGRTIKQMVSGSIFFGSMGCALYFMVLGNFGLSLQLSGQLDVVAILNQHGATRAIFAILEQLPLSTVVIAVFTILCIIFTATTFDSISFILASVVQNNVTEDPLRWNRLFWAFTLSLMPSILLFMGGLATLQTAAIVGGLPLLGIAIMLMISGIKAASLDLAHQEGYEDPVINIEEFPDVDPWSREGMALAKFERLKDEAVEAAEQEREALAAIWKLKKVIRSEALSRGESGLELGEAPEEQLTEIQRLTNAAMEAKEHKLQASEAAQAARIEFNELIKEKELQSLQSESLS

SEQ ID NO: 23449 - protein, 430 aa, Vibrio vulnificus CMCP6
MSRCSAIIENNPETRLVVSSACSGVTNLLVELANGVQSQERRAELLAQLAEIHDAILNQLEDATEAAAEVYAILDTITSLAEAASIQASNKLTDHLVACGELMSTHILAQLMRERGVNAVRFDIREVLRTDDNFGRAEPDVAKIAELAQEKLLPLCRDYVVVTQGFIGSDEEGNTTTLGRGGSDYSAALIAEGVKASGLEIWTDVPGIYTTDPRIAAKAAPIPEISFAEASEMANFGAKILHPSTLVPALRHDIPVFVGSSKEPEKGGTWIRHEAQSSPLFRALALRCNQTMVTLRSAKMFHAYGFLAKVFEILAKHKISVDLITTSEISVSLTLDKTDTSGGAPELPQAAREELEELCTVEVEHNLCLVALIGNHMETKGYAKEVFSTLGDFNLRMICYGASDHNLCFLVDAHDSKSVIQKLHQDLFER

SEQ ID NO: 23450 - protein, 554 aa, Vibrio vulnificus CMCP6
MCSVFGILDIKSDAAALRPIALEMSKKLRHRGPDWSGIYASDRAILAHERLAIVGLNSGAQPLYSPDKKLILAVNGEIYNHKEIRARYEGKYDFQTDSDCEVILALYQEMGADLLEELNGIFAFVLYDEEKDQYLIGRDHIGIIPLYQGYDEHGNYYVASEMKALVPVCKTISEFPPGSYYSSTDAGPQRYYIRDWNEYAAVQGNTSSKEELTAALEAAVKRQLMTDVPYGVLLSGGLDSSITSAVAKRYAAMRIEDDEQTEAWWPQLHSFAIGLDGAPDLKAAREVAAKIGTVHHEMTYTIQEGLDAIRDVIYHIETYDVTTIRASTPMYLMGRKIKAMGIKMVLSGEGADEIFGGYLYFHKAPNAQEFHEETVRKLLALNMFDCARANKSLAAWGVEGRVPFLDKEFIDVAMRLNPADKMCGNGKMEKHILRECFEHYLPDSIAWRQKEQFSDGVGYGWIDTLKAVAEEKVTDQQMEAAKFRFPYNTPTTKEGYVYREIFEELFPLTSAAECVPGGPSVACSSAKAIEWDESFKNCIDPSGRAVKAVHNEAY

SEQ ID NO: 23451 - protein, 311 aa, Vibrio vulnificus CMCP6
MKLFAGNATPELAQRIADRLYISLGDATVSRFSDGEVAVQINENVRGSDVFIIQSTCAPTNDNLMELVVMIDAMRRASAGRITAVIPYFGYARQDRRVRSARVPITAKVVADFLSNVGVDRVLTIDLHAEQIQGFFDVPVDNIFGTPVLLEDMHARGLEDPVVVSPDLGGVVRARATAKALGDIDIAIVDKRRPRANVSEVMNLIGDVEGRDCVIVDDMIDTGGTLCKAAEALKERGAKRVFAYATHAVFSGNAAKNIKNSVLDQVIVTDSITLSKEMAATGKVTQLTLSGMLAEAIRRISNEESISAMFN

SEQ ID NO: 23452 - protein, 194 aa, Vibrio vulnificus CMCP6
MTETDTLAKPAVFLDRDGVINVDHGYVHDEHDFEYIEGVFEATKALKDMGYLLVLVTNQSGIARGKFSEDRFLSLTQWMDWNFADNGVEFDGIYYCPHHAEHGVGDYKQDCDCRKPKPGMFISARDFLKIDMARSVMVGDKAEDMMAAEAAGVATKILVRTGKPVTQEGDQLATVVLDSIRDVPLYVKEQVGGR

SEQ ID NO: 23453 - protein, 636 aa, Vibrio vulnificus CMCP6
MGKIIGIDLGTTNSCVAVLDGDKPRVIENAEGERTTPSVIAYTDGETLVGQPAKRQAVTNPENTLFAIKRLIGRRFEDEEVQRDIEIMPYKIVKADNGDAWVEAKGQKMAAPQVSAEVLKKMKKTAEDFLGEEVTGAVITVPAYFNDAQRQATKDAGRIAGLEVKRIINEPTAAALAYGLDKQGGDRTIAVYDLGGGTFDISIIEIDEVEGEKTFEVLATNGDTHLGGEDFDNRLINYLVAEFKKDQGIDLKNDPLAMQRVKEAAEKAKIELSSTNQTDVNLPYITADATGPKHMNIKVTRAKLESLVEDLVQRSLEPLKVALADADLSVGDITDVILVGGQTRMPMVQAKVTEFFGKEPRRDVNPDEAVAVGAAVQGGVLAGDVKDVLLLDVTPLSLGIETMGGVMTKLVEKNTTIPTKANQVFSTAEDNQSAVTIHVLQGERKQAMYNKSLGQFNLEGINPAPRGMPQIEVTFDLDADGILHVSAKDKQTGKEQKITIQASGGLSDAEIEKMVQEAEANKEADKKFEELATARNQADQIIHGTRKQVEEAGEALPADEKAKIETAISELEEARKGEDKEAIEAKIQALMAAAQKLMEIAQQQAQAQQGSAEAGAQSQEDDVVDAEFEEVKDDKK

SEQ ID NO: 23454 - protein, 404 aa, Vibrio vulnificus CMCP6
MKLPIYLDYSATCPVDPRVAEKMVQYMTMDGTFGNPASRSHRYGWQAEEAVDTAREQIAELLNADPREIVFTSGATESDNLAIKGAAHFYSKQGKHVITSKTEHKAVLDTCRQLEREGFEVTYLEPESNGLISLSKLEAAMRDDTVLVSIMHVNNEIGVIQDIEAIGELCRSRKIIFHVDAAQSAGKVAIDVQKLKVDLISLSAHKIYGPKGIGALYVRRKPRIRLEAQMHGGGHERGFRSGTLPTHQIVGMGEAFRIAKLDMEKDYQHALALRNRLLDGVKDMEAVTINGDLDQRVPHNLNISFAFVEGESLLMSLKDLAVSSGSACTSASLEPSYVLRALGLNDELAHSSIRFSFGRFTTEEEIDYAIEQIRVAVEKLRDMSPLWDMYKDGIDLNTVEWAHH

SEQ ID NO: 23455 - protein, 857 aa, Vibrio vulnificus CMCP6
MRLDRFTSKFQIAISDAQSLALGRDHQYIEPVHLMVALLDQNGSPIRPLLTILNVDVTHLRSKLSEMLDRLPKVSGIGGDVQLSSAMGAMFNLCDKIAQKRQDAYISSEIFLLAAIEDRGPLGQLFKELGLTEQKVSQAIEQIRGGQKVNDQNAEELRQALEKFTIDLTERAEQGKLDPVIGRDDEIRRTIQVLQRRTKNNPVIIGEPGVGKTAIVEGLAQRIINNEVPEGLRGRRVLSLDMGALVAGAKYRGEFEERLKSVLNELSKEEGNIILFIDELHTMVGAGKGEGSMDAGNMLKPALARGELHCVGATTLDEYRQYIEKDPALERRFQKVLVDEPTVEDTIAILRGLKERYELHHHVEITDPAIVAAASLSHRYVSDRQLPDKAIDLIDEAASSIRMQIDSKPEALDKLERKIIQLKIEQQALSNEHDEASEKRLRSLNEELNEKEREFAELEEIWNAEKAALSGTQHIKAALEQARMDMEFARRAGDLSRMSELQYGRIPELEKQLDLATQAEMQEMTLLKNKVTDNEIAEVLSKQTGIPVSKMLEAEKEKLLRMEEVLHKRVIGQKEAVEVVANAIRRSRAGLSDPNKPIGSFLFLGPTGVGKTELCKTLANFMFDSEDAMVRIDMSEFMEKHSVARLVGAPPGYVGYEEGGYLTEAVRRKPYSVILLDEVEKAHPDVFNILLQVLDDGRLTDGQGRTVDFRNTVVIMTSNLGSSRIQENFAMLDYQGIKEQVMEVVTKHFRPEFLNRVDETVVFHPLGQDHIKSIAAIQLNRLANRMEEHGYPLEVSDKALELIAQVGFDPVYGARPLKRAIQQSIENPLAKSILAGSVLPDKKIQLIVNNDQIVAHQ

SEQ ID NO: 23456 - protein, 389 aa, Vibrio vulnificus CMCP6
MKFVDEAVIKVQAGDGGNGVVSFWREKFVTKGGPDGGDGGDGGDVYIQADENLNTLIDYRFQRFYEAERGQNGSGGNCTGKRGKDITLRVPVGTRAVDIHTNEIVAEVAEHGKKVMVAKGGWHGLGNTRFKSSVNRAPRQKTMGTKGEIRELRLELLLLADVGMLGLPNAGKSTFIRAVFAAKPKVADYPFTTLIPSLGVVSVVPEKSFVVADIPGLIEGAADGAGLGIRFLKHLERCRVLLHMIDIFPIDQSDPVQNALTIIDELEQYSEKLANKPRWLVFNKVDLVSEEQADEIIQEVIDALGWEEQYFKISAVNRQGTKELCYKLADFMEQLPREEQEVSEEEKVNFMWDYHPDANQGEVITEDDDDDWDDWDDEEDDGHVIYVRE

SEQ ID NO: 23457 - protein, 323 aa, Vibrio vulnificus CMCP6
MTLSFDYRAVAKQVLATEIRGLEQLSQYFDEQFEQACELILNNAGKVVVMGMGKSGHIGKKIAASLASTGTSSFFVHPGEASHGDLGMIERGDIVLAISNSGESSEILALFPVLKRLGIRIISMTGKPSSTMAKLADYHLQITVPEEACPLGLAPTTSTTATLVMGDAIAVALLQARGFTAEDFALSHPGGALGRKLLLKLNDIMHTGEQLPRVSPNALVRDALLEISQKGLGMTAIVDHDNLLLGIFTDGDLRRILDKRVDIHSAQIGEVMTKHPTVANPSMLAVEGLNLMQQKKINGLMLCQDGKLVGALNMHDLLKAGVM

SEQ ID NO: 23458 - protein, 387 aa, Vibrio vulnificus CMCP6
MKNVVIVDCLRTPMGRSKGGAFRHTRAEDLSAHLMKGILARNPQVNPSEIEDIYWGCVQQTLEQGFNVARNAALLAGLPIEIGAVTVNRLCGSSMQALHDGARAIMTGDAEICLIGGVEHMGHVPMNHGVDFHPGMSKHVAKAAGMMGLTAEMLGKLHGISREQQDEFAARSHARAHAATMEGRFKNEILPTEGHAADGTLFTLDHDEVIRPETTVEGLSQLRPVFDPANGTVTAGTSSALSDGASAMLIMSEEKANELGVTIRARIKGMAIAGCDPSIMGYGPVPATQKALKRAGLSIEDMDVIELNEAFAAQSLPCAKDLGLLDVMDEKVNLNGGAIALGHPLGCSGARISTTLINLMEAKDAKYGLATMCIGLGQGIATVFERP

SEQ ID NO: 23459 - protein, 539 aa, Vibrio vulnificus CMCP6
MDSQRTLLVLLLALVSFLLFQQWQVAKNPAPQAVEQAQTSSTLPAPSFADELDPAPAQQASAKLITVTTDVLTLSIDTVGGDVVAADLNQYSAELNSANAFELLRDTQGHQFIAQSGLVGPQGIDLSSNNRPSYQVSADSFTLADDQNELRIPMTYQANGLEYTKTFILKRGSYAIDVEFDVINKSGNNATLGMYAHLRQNLMDAGGSITMPTYRGGAYSTEDTRYKKYSFEDMQDRNLSLTLTNGQGWAAMIQHYFAAAWIPRNEPGANLYTRVIGNMGDIGVRMPNKTIADGDSAHFTATLWAGPKLQDQMAEVAPNLDLVVDYGWLWFIAKPLHWLLSVIQSFVGNWGVAIICLTFIVRGAMYPLTKAQYTSMAKMRMLQPKLQAMRERIGDDRQRMSQEMMELYKKEKVNPLGGCLPLILQMPIFIALYWALMESVELRHSPFILWIHDLSAQDPYFILPLLMGGSMFLIQKMSPTTVTDPMQQKIMTFMPVMFTFFFLWFPSGLVLYWLVSNIVTLIQQSLIYKALEKKGLHTK

SEQ ID NO: 23460 - protein, 394 aa, Vibrio vulnificus CMCP6
MLSENTINIVKSTAPLLAETGPKLTAHFYQRMFEHNPELKDIFNMSNQRNGDQREALFNAICAYASNIDNLPALLGAVEKIAHKHSSFLITADQYQIVGGHLLATIDELFSPGQAVLDAWAEAYGVLANVFIQREEQIYQDNQSQTGGWRGLREFELVEKQYESAHICSFVFKPVDGGSVVSFKPGQYLGIYINDEQFENQEIRQYSLSSSVRPDCYRISVKREEGGRVSNYLHDHLDVGSKVKLAAPAGDFFLDAAPTAPVVLISAGVGLTPTLSMLESLTEHQAPVTWIHATENGQQHAFKQHVKQLVETHPHFNSLVWYNQPNSDDKIGDDFQFSGWVNLHEIETVLKQADVQVYFCGPVGFMQFIAKQLLEMGVPEQQFHYECFGPHKVV

SEQ ID NO: 23461 - protein, 803 aa, Vibrio vulnificus CMCP6
MSQVRQLHKFGGSSLADPDCYRRVVNILKEYSGDNDLVVVSAAGKTTNRLIEFSEALEKDGRLAHEALQALRQYQTGLVEALIASNQRSELLDQLADEFSTLAEFSAPLTTAQKAAILGHGEVWSSRLLASLLNQHDLAAVAQDARAFLRAETGTQPEVDRARSYPLIKEVLAQHSHRRVVITGFMAQNQAGETVLLGRNGSDYSATVIGALAEVAKVTIWSDVAGVYSADPRLVSDACLLPLLRLDEASELARLAAPVLHSRTLQPVAQSATELNLRCSYTPESGSTRIERVLASGRGAKIITSLDDVMLVQLNFSAGHDFERQQQEVLRALKRAQLEPLAFEAQKDQFKLRLAYTTEIAGGALAHLQELGLAAEIKLKEGFSLVAAVGAGVTNNASHCFGFYQQLKHSPVEFISEAESGLSLVAVMRRVDLPVLVKAIHTQLFQAQKRVALALCGKGNIGSSWLSLFAQQKSELEKRHGMNFELVAVVDSQTYLFNEQGLDAAAVHAHFDDDSVPNDGANWLQRLSSIQDYDEVVVLDVTASRELAAQYLDIAHQGMHLISANKIAGSASSDYYYQVQDAFSKIGRHWLYNATVGAGLPINHTVRDLRESGDEIVALSGIFSGTLSWLFQQFDGSVPFAELVDLAWQQGLTEPDPRSDLDGSDVMRKLVILARESGLDIEPENVKVESLVPEELKELSLDDFFDQAHLLSERLQERLTKAQRQDQVLRYVARLEKNGKARVSVEALQREHALANLLPCDNIFAIESKWYRDNPLVIRGPGAGREVTAGAIQSDLNRLAGLF

SEQ ID NO: 23462 - protein, 405 aa, Vibrio vulnificus CMCP6
MEMSKLNVNKVVVAYSGGLDTSVIIPWLKENYDCEVVAFVADVGQGEEELVGIEEKAKASGASECYVVDLKEELVADYIYPTLKTGAYYEGKYLLGTSMARPVIAKAQVEIARKVGADALCHGCTGKGNDQVRFEGAFAALAPDLKVIAPWREWDLVSREQCLDYLAERNIPCAASLTKIYSRDANAWHISTEGGVLESTWNAPNEDCWVWTVDPEQAPNEAEYVTLQVEKGEVVAVDGEQMTPYNALVYLNEKGAKHGVGRIDIVENRLVGMKSRGCYETPGGTIMMEALRAVEQLVLDKTSFEFREELGLKASHLVYDGRWFTPLRKSIMAAADELAQDVNGEVVVKLYKGMATVTQKRSENSLYSEAFATFGEDEVYDQSHAGGFIRLYSLSSRIRALNSQK

SEQ ID NO: 23463 - protein, 275 aa, Vibrio vulnificus CMCP6
MKKQRAFLKWAGGKYGLVEDIQKHLPPARKLVEPFVGAGSVFLNTDYEHYLLADINPDLINLYNLLKEQPELYISEAKRWFTQENNRKDAYLSIRSEFNKTDDVMFRSLAFLYMNRFGFNGLCRYNKKGGFNVPFGSYKQPYFPEAELEFFAEKAQKATFVCEGYQETFRRARKGCVVYCDPPYAPLSNTANFTSYAGNGFTLDDQAALADIAEKTASERGIPVLISNHDTKLTRRLYHGAELNVVKVKRTISRNGGGRNKVDELMALFHKPDIS

SEQ ID NO: 23464 - protein, 320 aa, Vibrio vulnificus CMCP6
MSLPVVVFLDRATIPAHITLPTLAFEHRWVEYDFTSPEQVIERLQAADIVITNKVLLDQALLAQLPNLRMIAVAATGFNNVDVDFCAEKGIAVANVRGYATRSVPEHVIAMLFALRRNLFGYHQDIAAGVWQQDKQFCFFTHPIGDVAGSTLGIIGSGALGQATAQLAQALGVKVLFAERKGQSDCRQGYHRFEEVLAQADAISLHCPLSAQTHHLIGAAELASMKSNAILINTGRGGLVDEQALVEALKKGDIAAAGVDVFSTEPADETNPLLANMHLPNLLLTPHVAWGSDSAITQLCEILLENINAYWRGETLNRLV

SEQ ID NO: 23465 - protein, 409 aa, Vibrio vulnificus CMCP6
MAKVSLEKEKIKILLLEGLHPSSVEVLQAAGYTNIEYHKGSLSDDALLEAVKDAHFIGIRSRTNLTEEVINAAQKLVAIGCFCIGTNQVDLNAASKRGIPVFNAPFSNTRSVAELVLGQILLLLRGIPEKNALAHRGIWKKSADNSYEARGKRLGIIGYGHIGTQLGIIAENLGMRVYFYDIENKLSLGNATQIPTMSELLNKCDVISLHVPETPETKNMMGAEEFARMKPGSIFINAARGTVVDIEALCHSLESGHIAGAAIDVFPVEPATNAEPFESPLQKFDNVILTPHVGGSTQEAQENIGVEVAGKLAKYSDNGSTLSSVNFPEVSLPEHRSCSRLLHIHQNRPGILTQINTIFAEEGINIAGQYLQTSADIGYVVIDVETERSEEALVKLKEIEGTIRARILH

SEQ ID NO: 23466 - protein, 320 aa, Vibrio vulnificus CMCP6
MADNEFDIDAFFSTEKKSTSSENQHCGFIAIVGRPNVGKSTLLNKILGQKISITSRKPQTTRHRIMGVDTDGDYQAIYVDTPGLHIEEKRAINRLMNRAANSSLSDVNLVFFLVDGTHWTNDDEMVLNKLQKANFPVVLCVNKVDNVQDRNEVMQHMMEMSKKMNFVDVVPISAKQGKNIDVLRKHVRDHLPKAVHHFPEEYVTDRSQRFMASEIVREKLMRFTGDELPYSVTVEIERFDYNPETDGFHINALILVERSGQKKMVIGKGGEKIKTIGREARLDMEELFGRKVYLETWVKVKSGWADDERALRSLGYIDDL

SEQ ID NO: 23467 - protein, 409 aa, Vibrio vulnificus CMCP6
MELTTTVSELRYALDTFFFLISGALVMWMAAGFAMLEAGLVRSKNTTEILTKNFCLYAIACTTYLVVGYNIMYVDNSEGGWLPSIGALIGSQAEGADHSLESDFFFQVVFVATAMSVVSGAVAERMKLWSFLLFSAILTAFIYPVEGYWTWGGGFLSAAGFSDFAGSGIVHMAGAAAALAGVLLLGARKGKYGKNGEVYPIPGSNMPLATLGTFILWFGWFGFNGGSQLMVSDFENATAVGQIFLNTNAAAAAGAITALLVCKTTWGKADLTMILNGALAGLVAITADPLSPSPLYAVAIGAVAGALVVFSIVGLDKLKIDDPVGAISVHGVCGFFGLMVVPISNGDASFLSQLFGAAVIFAWVFGASLAVWAVLKATIGIRVSEDEEMEGMDMHDCGVGAYPEFVTVK

SEQ ID NO: 23468 - protein, 583 aa, Vibrio vulnificus CMCP6
MSINTDESTWRTFKRLWTFIRLYKSGLAVAVVALIINAVSDTYMVSLLKPLLDEGFGSAESDFLRTLPLLVFGLMFIRGISSFVSTYCLSWVSGNVVMQVRRMVFNHYMQMPVSYFDKEKSGSLLSRITYDSEQVSAATSQALVSIVREGTSIIGLLVLMFYNSWQLSLVLILVAPVVAWAIGFVSKRFRKISKNMQTTMGIVTSSAEQMLKGHKVVLSYGGQEVEKSRFDVVSNQMRQQSMKLITAQAAANPIIQMIASIAIVVVLYLASVDTIKDQLTPGTFTVVFSAMFGLMRPLKALTNVTSQFQRGMAAAQTLFALVDLEPEKNTGTYSVERAKGEVNVKDISFTYEGAEKPALSHVSFDIPRGKTVALVGRSGSGKSTIANLFTRFYDVDSGEIQLDGVDVRDYELKNLRTQFALVSQNVHLFNDTIANNIAYAAGDKYSREDIERAAELAHAMEFISKMENGLDTMVGENGASLSGGQRQRVAIARALLRDAPVLILDEATSALDTESERAIQSALDELQKNKTVLVIAHRLSTIEKADQILVIDDGSVVERGSHSELIEKDGAYAQLHRIQFGEG

SEQ ID NO: 23469 - protein, 76 aa, Vibrio vulnificus CMCP6
MYSMATGTVKWFNNAKGFGFICSDQEEGDIFAHYSTIQMDGYRTLKAGQQVTYEIEKGPKGCHASSVVPLEVQATK

SEQ ID NO: 23470 - protein, 587 aa, Vibrio vulnificus CMCP6
MAKIILSQWFPGLVQLKHYQKEWLADDVRAAFSVVAVALPVAIAYAQLTGVSAIVGLYSCVLPMLVYALMGTSRQLIVGPDAATCAVIAAVVTPLAAGDATKHWQLVMTMTAMTGMWCVLASRLKLGILADFLSRPILLGLLNGVALTIIVGQFAKVVGWKYEQRYLLERLWEAPQRLADLHWPTLALSVATVAVYLITKRFRPSWPAAMLAILITTASVWLLRLQEVGVSVVGLTQGGFPNFQTPEFELGVTRELVVPALNLAMVSFVSMMLTARSFAAKNGYDIDADKEFRALGFANIASAFSQGFAISGADSRTAVNDANGGKSQLVSIIAAITIAVIAVFIYQPLQFIPIASLGVVLIIASLSLLDLKGIWILRKRDKDAFYLASITFVSVLVIGVIPGITLAVLLGLFQFLRIVMRPSDQLLGLDEEGTIRTVDGTGKATPIPGMVIYRFNSPLTYFNAPYFKRRLLEHAEHTKDVGCVVVDAVSSFTHLDLSVMATLADVHETLKKRGIRLILAGRKRRLRQWCELTGISTSEGGILLRADMYLAIKLSGCYLSAVGEGQVPTVQKEPDLEEPPKAIPEVA

SEQ ID NO: 23471 - protein, 709 aa, Vibrio vulnificus CMCP6
MLIPASAGVGLTSVSMGVLRAMERKGVKVSFYKPIAQPRSGGDLPDLTTTIVGANSDMKIGEPLLMSVAENLIGNDNMDELLETVVERYNQINKDADVTLIEGLVPTRKHPFANQVNAEIAATLGAEIVLVATPGTDNPAQLKERIEVACSNFGGTKNKNISGVIINKLNAPVDEAGRTRPDLSEIFDDADSAKQNQLEVMQIFNSSPIRVLGCVPWSINLIATRAIDMAKHLKAEVINEGDINTRRIKSITFCARSLPHMIEHFKPGSLLVTSADRPDVIVAASLAAMNGVEIGAVLLTGGYDIPTEIENLCKPAFESGLPIFKAQGNTWQTSLNLQSFSLEVPADDKERIEFINDHVAGHIDGNWIESMTEGTERSRRLSPPAFRYQLTELARKAGKRIVLPEGDEPRTVKAAAICAERGIAECVLLGNPEEIKRVAAQQGVELGAGVKIIDADAIRENYVARLVELRGSKGMTEVVAREKLQDSVFLGTMMLENDEVDGLVSGAVHTTANTIVPPFQIIKTAPNASIVSSVFFMLLPDQVLVYGDCAINPDPTAEQLAEIAIQSADSAAAFGIDPRVAMISYSTGESGKGADVDKVREATKLAQEKRPDLIIDGPLQYDAAIMENVAASKAPNSPVAGKATVFVFPDLNTGNTTYKAVQRSADLVSIGPMLQGMRKPVNDLSRGALVDDIVYTIALTAIQATQDQK

SEQ ID NO: 23472 - protein, 398 aa, Vibrio vulnificus CMCP6
MSKLVLVLNCGSSSLKFAVVDAENGAEHLSGLAECLHLPEARIKWKLDGKHEAQLGNGAAHEEALAFMVETILASKPELSENLAAIGHRVVHGGEQFTQSALITDEVLKGIEDCATLAPLHNPAHIIGIKAAQKSFPALKNVAVFDTAFHQTMPEEAYLYALPYNLYKEHGIRRYGMHGTSHLFITREVASLLNKPVEEVNIINCHLGNGASVCAVKNGQSVDTSMGLTPLEGLVMGTRCGDIDPAIIFHLHDTLGYSVEKINTMLTKESGLAGLTEVTSDCRFVEDNYGQKEEATRAMDVFCHRLAKYVAGYTATLEGRLDAITFTGGIGENSAPIREMVLNRLGIFGIEVDSEANLKARFGGEGVITTANSRIPAMVISTNEELVIAEDTARLAGL

SEQ ID NO: 23473 - protein, 523 aa, Vibrio vulnificus CMCP6
MTKGIDKYSIDSTDYTVGQDNVQRWGFDVHNPVFGISAGLVGLFLVAALVLDAHTMKTALDGIKWQIIGAFDWLFIWSGNIFVIFCLALIVSPLGKIRLGGRDAVADYSFLSWIAMLFAAGMGIGLMFWSVAEPVAYFTGWYETPLNVTPNSPEAAKLAMGATMFHWGLHPWAIYGVVALSLAFFTYNKGLPLSMRSIFYPLLGDRAWGWAGHLVDILAVVATLFGLATSLGLGAQQAASGIHHVFGVEAGLGLQIAVITVVTLLAVVSVVRGIDGGVKVISNINMLVAFALLALVGLIGWAVSVGSVSTTLSAYIENIIPLSNPIGREDEAWFQGWTVFYWAWWISWSPFVGMFIARVSKGRTVREFMTAVLIVPTVVTLLWMSVFGGMAIDQVINGIGELGAKGLTDVPLAMFQMFDQLPYGTLLSVIAVVLVLVFFITSSDSGSLVIDSITAGGKVDAPVLQRVFWAFMEGAIAVALLWVGGTEAIQALQAGAISTALPFTFILLAMCVSLLMGMRTEKQ

SEQ ID NO: 23474 - protein, 208 aa, Vibrio vulnificus CMCP6
MTGRGNTLFELNKNQLLQSFQFNLPRGYHAESTARVAHLKGSKLRDAAVLIGFVEREQGLNVILTKRASHLKHHPGQISFPGGKYEESDCSLQATALRETREEIGIAPDAISIFGQMPELVTVSRFKVTPILAFVEPNYQIVIDKNEVDEVFEVPANHLLDTQKLKSAQFRVNQSHHRVFAIPYQHHFIWGMTAQIIQAMQQQIMKRG

SEQ ID NO: 23475 - protein, 311 aa, Vibrio vulnificus CMCP6
MNDLFTKTDYSLYSNSMSFVRRPYVKDPVAADADLVVFGAPLDMATSGRPGARMGPDAIRRASVNLAWEGKKFPWDFNLFKKVKVIDGGDLVFDCGDAEDFTYRMEAATSAILKSGKTMLGLGGDHFITLPILRAYAKHYGEMALIHFDAHTDTYANGSSYDHGTMFYHAPKEGLISPKHSVQVGIRTEYKQEGHGFNVINAMQANDMSVEEILADIRRIVADKPVYVTFDIDCLDPAFAPGTGTPVCGGLNSDKILKIIRGLKDVNIVGMDVVEVSPPYDQSDLTALAGATIALELMYAWAANKEFESEF

SEQ ID NO: 23476 - protein, 406 aa, Vibrio vulnificus CMCP6
MSDTASQVHGAVQTLTQSSDTLFLLLGAIMVFLMHAGFAFLEVGTVRHKNQVNALVKILADFGISTLAYFFIGYWVAYGAHFFADAETLAQGNGYELVKFFFLLTFAAAIPAIVSGGIAERARFYPVLIATFFTVGIVYPLFEGIIWNGNFGIQAWFEATFGVGFHDFAGSVVVHGVGGWIALVAVIFLGMRRGRVRAGKHTNFAPSNIPFLALGAWILCVGWFGFNVMSAQTLNGISGLVAMNSLMAMAGGIVAALIAGKNDPGFIHNGPLAGLVAVCAGSDLMHPLGALVTGSVAGVLFVYLFTYLQNKTKIDDVLGVWPLHGVCGAWGGIAAGIFGQSSLGGLGGVSFTVQLLGTLLGISVALIGAGIVYGAINRLSGLRLSQEDEFNGADLAIHKISSVNAE

SEQ ID NO: 23477 - protein, 70 aa, Vibrio vulnificus CMCP6
MSGKMTGTVKWFNETKGFGFISQDNGGKDVFVHFRAIVSEGFKTLAEGQKVSFNVEEGQKGPQASNVTVI

SEQ ID NO: 23478 - protein, 347 aa, Vibrio vulnificus CMCP6
MFFEWQGNEPATLQCVDKFFETDDTVSIRLADLTESLLFQFKPGQFVNLGVEIDGKMEFRAYSISSLAGEEYLQFTIKRVEGGKVSNFIIDSLLIGDTVQALAPAGEFNCVDHPPRELDGQGKALLISAGCGVTPVFAMAKHWLNNEMNVDIEFLHIARSAQETIYFDHLSTCQSAYAHFHLKLLLKDAQGTTHPQGRFNAQWLQDLVPDFATRTIYLCGPNQFMQDTQDYLQALGFDMNHFYHESFTPEKVEAMEASDEEVCISVPDFAQTINAKKGQLLADVLENAGLPLIVACRSGICGSCKCKVANGQVRSISQETLTTEEIAQGYVLACSSHIESDLEVCLH

SEQ ID NO: 23479 - protein, 280 aa, Vibrio vulnificus CMCP6
MNFNQFDSLLPPQAAERAAEIGEGKATKDPVKSFLLAISAGIHIGIAFVFYTTVTTGGADLPWGITRLIGGLAFSLGLILVVVTGGELFTSSVLTLVARASGKISWRVLIKNWFVVYVGNLVGAILLVVCMLITKQYMFDHGQVGLNAMAISQHKMHHSFFSAVALGIMCNVLVCIAVWMTFSGRTLTDKIAVMILPVAMFVSAGFEHCIANMFQVPMAIGIKNFAPAEFWQMTGANIADYADLNMMDFLLNNLLPVTLGNIIGGGVFVGMWYWLIYLRD

SEQ ID NO: 23480 - protein, 357 aa, Vibrio vulnificus CMCP6
MSKQQKILFIDRDGTLIVEPPVDFQVDRLDKLKLEPFVIPSLLSLQDAGYRLVMVTNQDGLGTDSYPQEDFDAPHNMMMEIFESQGVKFDDVLICPHFEKDNCSCRKPKLGLVKEYLQAGKVDFQNSFVIGDRQTDLQLAENMAIRGIQYNPEIMGWKRILKDLTVKARVAEVVRTTKETDIKVFVNLDEQGGNAISTGLGFFDHMLDQIATHGGFQMVCKVEGDLHIDDHHTVEDTALALGQALKEALGDKRGIGRFGFSLPMDECLAQCALDLSGRPYLKFDAQFSREQVGDLSTEMVVHFFRSLTDTLACTLHLSSAGNNDHHIIESLFKAFGRTLRQAIKVEGTELPSSKGVL

SEQ ID NO: 23481 - protein, 374 aa, Vibrio vulnificus CMCP6
MIIGVPKEIKNHEYRVGMIPASVRELISHGHQVFVETNAGAGIGFSDDDYIAVGASILPTAADVFAKAEMIVKVKEPQAVERAMLKEGQILFTYLHLAPDFPQTEELIKSKAVCIAYETVTDHMGRLPLLAPMSEVAGRMSIQAGAQTLEKSHGGRGLLLGGVPGVEPAKVVVIGGGVVGANAARMAVGLRADVTILDRNVDTLRKLDEEFQGRAKVVYSTEDAIEKHVLEADLVIGAVLIPGAAAPKLVTKEHIAKMKPGAAVVDVAIDQGGCFETSHATTHAEPTYIVDDVVHYCVANMPGAVARTSTFALNNATLPYIVKLANKGYREALSADKGFLLGLNVIHGKVTCKEVAESFNLEYVDPAEAIRMFS

SEQ ID NO: 23482 - protein, 112 aa, Vibrio vulnificus CMCP6
METIDKIKQQIAENPILLYMKGSPKLPSCGFSSQAAQALMACGEKFAYVDILQNPDIRAELPKYAEWPTFPQLWVEGELIGGCDIVIEMFQKGELQPLIKEAAARAAGSDAE

SEQ ID NO: 23483 - protein, 404 aa, Vibrio vulnificus CMCP6
MQNIGMSSKLDNVCYDIRGPVLKHAKRMEEEGHKILKLNIGNPAPFGFDAPDEILVDVIRNLPTSQGYCDSKGIYSARKAVVQHYQRKGIRSLDVEDVYVGNGVSELIVMAMQALLNNGDEMLVPAPDYPLWTAAVALSGGKAVHYLCDEQADWYPDLDDMRKKITPKTRGIVLINPNNPTGAVYSRDFLLEVIEIARQHKLMIFADEIYDKVLYDGAVHTSVATLTDDVLVMTFNGLSKAYRVCGFRGGWMFMTGPKHLAQGYVNGLDMLASMRLCANVPMQHAIQTALGGYQSINELILPGGRLLEQRDRAWELINQIPGVSCVKPKGAMYLFPKIDTKKYSIKDDQKMVFDFLVQEKVLLVQGSGFNWPKPDHFRIVTLPHIEDLETAIGRFERFLHGYSQ

SEQ ID NO: 23484 - protein, 641 aa, Vibrio vulnificus CMCP6
MQDSVIQFSDLELNDAILSALDGMGFVSPTPIQAAAIPHLLQGVDALGKAQTGTGKTAAFSLPLLNKLDLAQRKPQAIVLAPTRELAIQVAAEMKNLGQNIRGLKVLEIYGGASIVDQMRALKNGAHVIVGTPGRVQDLINRERLDLGEVHTFVLDEADEMLNMGFVDDVTEIMEHAPSSAQRVLFSATMPPMLKNIVERFLRDPVTVDVAGKNHTVDKVAQQFWVVKGVEKDEAMSRLLETEETDASIVFVRTRQDTERLADWLCARGFKAAALHGDIPQSLRERTVDHIKQGVIDILVATDVVARGLDVPRITHVFNYDIPFDVESYIHRIGRTGRAGRQGKAILLVRTNQIRMLRTIERVTKSSMEEIQLPLRDKVAAARLDKLAAELQADIEHKALDKFAELIEKLEERLEIDSSVLAAILLKRQQGKRPLFYIGEDPMIEAIERDKQNRRERRENRDNGGRRESFNSNQDWDTYQLQVGREQGVQVKDIVGALANELGLGKGSIGAIKLAQEHTFVQLPKAMSTQAASKLRKLRIRQKEVGAVVCDFNDFNENRGRRDGARREGGFREGGRREGGYRGNREGGREGGYRGNREGGREGGFRGNRDGERRFDRNRGGDHRGNHRGERGHGRPRRNED

SEQ ID NO: 23485 - protein, 397 aa, Vibrio vulnificus CMCP6
MSNSFVLVINSGSSSLKFAVINSVTGEAVLSGLGECFGLEDARMGWKYSGEKTEIAIEGEDNHHKIAIGKLVGLTEELGLTKDIVAVGHRIVHGGEKFTSTVRINEEVTAEIEKLADLAPLHNPAGAIGIRAAMEAFPALPQFAVFDTAFHQTMPKRAFTGAIANELYTDFGIRRYGFHGTSHYFVSREAAKMLNKPIEESSFISVHLGNGASVCAINNGESVDTSMGFTPLSGLMMGTRCGDLDPGIIEYLLKKGWSQEKVFNSLNKASGFLGVSGLTSDARGILEAMEQGHEGATLAFQVFTYRVAKYIASYLAALDSFDGIIFTGGIGENSLPIRREILKNLKLLGFVEDEKGNEDARFGNAGVIATSALLNAVAMVIPTNEEFVIAQQSVELL

SEQ ID NO: 23486 - protein, 586 aa, Vibrio vulnificus CMCP6
MSSKNNKNLGILLKLSTFVSPYRWRVAAALVALVATASLTLSVGYGVRMLIDQGFAQQSLHELTNAIQFIVGVTLCIAIGTFFRFYLVSSVGERVSADIRLAVFNHVITLHPSYFETNSSGDIMSRLTTDTTLLQSIIGSSFSMAMRSALMCVGAIIMLFATNFKLTLIVLASVPFVLVPILVYGRRVRALSRQSQDSMADVGSYAGEAIEHIKTVQSFSSEQHEKAAFAVEVEKAYEIGRQRVKQRAILISGVIVIVFGAIAGMLWVGGSDVIHGKMSAGDLGAFVFYAIMVASSTATISEVLGELQRAAGATERLIEILQVESDIKAPSHQQSIPADIPAEVSFDSVNFNYPSRPNQPAIKGLNLTAEQGKVLALVGPSGAGKTTLFELLQRFYDPQQGHVLLGGIDIRQFDPNELRQQMALVPQQPALFSHDVFHNIRYGNPDATDEQVIEAAKKAHAHEFIEKLPEGYHSFLGERGVRLSGGQKQRIAIARAILKDPKILLLDEATSALDSESEHHVQQALEALMKGRTTLIIAHRLSTIQHADKIAVLDNGELVDIGNHHALMQSCELYQRLVALQFKHLN

SEQ ID NO: 23487 - protein, 483 aa, Vibrio vulnificus CMCP6
MSVATSENTQYFSPKEMMAEAEKFALSKANKTSAMTLGLAIMAGAFIGLAFLFYITVTTGSANAGWGLSRFAGGLAFSMGLILIVICGGELFTSSVLSSISWANKQISFTKMLSIWGKVYIGNFIGAMFLLLLVTGAGLYQMDGGQWGLNALNIAQHKLHHTTIQAFSLGVLCNLLVCLAIWLTFSSANAMTKAVMTMLPVAMFVSSGFEHCVANMFMVPLGIVIANFAPDAFWAQVGANASQYADLNVGHFITANLIPVTLGNIVGGAVLVGLANWCIYRRPELKAAKISTITQTTHITSVKEFTMKNAAVVRDIMDAQPVVLGVEMPIATALDTLLDNHIISAPVVDIEGRLVGFLSAHDVMVDLWCQDYLPSTGQKVVDLMSRDVVAIDVNDRLVDVVEFLCIDKEQLYPTSSMGIATRMTSLSLEERAKSMKVNKPHVLPVLENGKFAGVVSRQEVLNALRPIYGERLNLVETRQLETA

SEQ ID NO: 23488 - protein, 518 aa, Vibrio vulnificus CMCP6
MQIGVPRELLAGETRVAASPSSVEQLIKLGFDVVVETQAGALASFDDSAYESAGAKMVSKEEAWNSELILKVNAPIIDEEKSIDEIALIKEGATLVSFIWPAQNPQLMEQLSSKNINVLAMDAVPRISRAQALDALSSMANIAGYRAVVEAAHEFGRFFTGQITAAGKVPPAKVFVAGAGVAGLAAIGAAGSLGAIVRAFDVRPEVKEQVESMGAEFLSVDYQEAAGSGDGYAKEMSDDFNKKAAELYAAQAKDVDIIITTALIPGKPAPKLITKEMVDSMKAGSVIVDLAAANGGNCEYTIANQVITTANGVKVIGYTDMVGRLPTQSSQLYATNLVNLFKLLCKEKDGNINIDFEDVVLRGVTVVKDGEITWPAPPIQVSAQPQAKPKAVEKPALKVQEPVSPVKKLAGLAVGVGAFAWIASVAPAAFLAHFTVFVLACVVGYYMVWNVTHALHTPLMSVTNAISGIIVVGALLQIGQGNGAVTFLAFIAVLIASINIFGGFTVTKRMLEMFRTDK

SEQ ID NO: 23489 - protein, 285 aa, Vibrio vulnificus CMCP6
MSDLRPAEFVQTMIDVGEAKVKTSTRDLVLRGMMAGIILSLAVVVAITTITQTGIGIVGALVFPVGFCILSLMGYDLVTGVFGLAPLAKFENRPGITWGRILRCWGLVGLGNLIGSLLVAFLIALSLTMNFSVEPNAVGQTFIKAATARTVGFENLGADGWITCFVRGILCNLMVCLGVIGNLSARTVAGKIAAMWLPIFIFFALVFEHAVVNMFLFPLGMMLGADFGIATWLNFNLIPTILGNIVGGLLFTCIPLYLTHAKTAPAIDVTEKQTEINAEPALSIK

SEQ ID NO: 23490 - protein, 487 aa, Vibrio vulnificus CMCP6
MLNGESQLSTAVIAEKATALRLLGVVALFFWRKSMKKRWTVGVLTSWLAFASPVVLAEVGEAEKEDLKFGFIKLTDMAPLAIAYEKGFFEDEGLYVTLEAQANWKVLLDRVIDGELDGAHMLAGQPLGATIGIGTQAKVITAFSMDLNGNAITVSNDVWQQMKPNLVKDSDGKPVHPIKADALKPVVTSYRDQGKAFNMGMVFPVSTHNYELRYWLAAGGIHPGFYAPHKGDNSGQINADVLLSVTPPPQMPATMEAGTIKGYCVGEPWNQQAVFKGIGVPVVTDYEIWKNNPEKVFGVAQDWAEKYPNTHIRVVKALIRAAHWLDENDNRNRAEAVKLLSRSEYVGADAEVIANSMTGTFEYEKGDKRQVPDFNVFFRYNATYPYYSDAIWYLTQMRRWGQIEHQKPDSWYMDIAKQVYRPEIYQRAAEALIEEGTLSASDFPDFAKESGFRPPQTHFIDQIRYDGRSPNAYLQQFAIGLKGSESL

SEQ ID NO: 23491 - protein, 854 aa, Vibrio vulnificus CMCP6
MASLSLSALVDKLTPEAKRALEQAAALASSRTHHSIEMTHWLLTLVQSAGPEEIELYRSFKVDLNQLQTDLTLQLEKYKTGCQTVPGLSSHTVTILQNAWMTATIAFEAEKIAAVHLLHAFLSDDTLFALSSTVSKELSKIQPSALIEYAQTHVEMANQIPNHRASTQALDQFTIDLTEQAELGQIDPVIGRDDEIRLMTDILLRRRQNNPILTGEAGVGKTAVVEGLALKIAEGDVPPALKAVRIKSLDLALLQAGAGMKGEFENRLKNVVKEVKESAVPIVLFIDEAHGLIGGGAQAGQGDAANILKPALARGELRTIAATTWAEYKKYVEKDAALTRRFQVVKIEEPSPELAIEMLRGLVPVMEKHHGVHITTEALKAAVFLSSRYISGRQLPDKAVSVLDTACSRVALSQNSIPGLLDQKYKKRQMIEAQQLQLTNELAFGHSHQTALDELESKLSLLQNEIHQLETTWRDEEGAVKQAKALRDSILAEPSAEKANQLQSIEQQLSSNPMPLVFSHVNEALIAEIIAGWTGIPLGKLKSDEIKAILDLQQHLQERVVGQDHALSKMAEVIKTARAQLNEESKPNGIFFLVGPSGVGKTESALAIAEQVYGSEENITVINMSEFKEEHKVSLLLGSPPGYVGYGEGGVLTEAVRRKPYSVILLDEMEKAHPGVQDIFYQVFDKGMIKDGEGRDIDFKNTIIIMTSNSGTETTMELFQDPELAPDPEALKEALRDDLLQDFKPAFLGRVNVIPYIPLHRDVLEKITALKLSKIQKRIKTNYKAEAVINDRLINSIVDSCNETGSGARALQNVIENKVLPKISESVLNAILNDIRINKIEIEGEVDDLSISIV

SEQ ID NO: 23492 - protein, 405 aa, Vibrio vulnificus CMCP6
MAKSIWIVAAKRTPIGRFQGVLAALSAPQLGAAAIHAAMDAVSLSAQQVDEVYMGCVLPAGCGQAPARQAALKAELGYSTPCTTVNKVCGSGMKAVMLAYDQLKAGDKCCMIAGGMESMTNAPYLLKESRSGMRMGHKTTFDHMFLDGLQDAYEGHLMGVYAQQIADKLNYTREQMDTWAIQSAQRATQAQHEAQFKEEITPIFLEGRSSMTLDHDEHPTTIQLDKIPKLKPAFADNGTVTAANSSAIADGAAALILADGDWAEKQGLTPLAIIRGHASHARLPAEFTVAPVYAIEQLLSQLDWGIDEVDLWEINEAFAVVTQIAIQQLGLAADKVNIKGGACALGHPIGASGARILVTLIHSLRQLQALGTNGDTKCRRSVKGVAALCIGGGEATAIGIEIPVF

SEQ ID NO: 23493 - protein, 70 aa, Vibrio vulnificus CMCP6
MSNKVTGSVKWFNETKGFGFISQDNGGNDVFVHFNSIVSTGFKTLAEGQRVTFEVEQGKKGPQAANVTAL

SEQ ID NO: 23494 - protein, 69 aa, Vibrio vulnificus CMCP6
MSNTVTGTVKWFNETKGFGFIKQENGPDVFAHFSAIKGDGFRTLAEGQKVSFVISQGQKGPQAEEITLL

SEQ ID NO: 23495 - protein, 492 aa, Vibrio vulnificus CMCP6
MLFLIWLGWFVSRNQKSGEDFLLGGRGLPLFLVLGTTVATMVGTGSSMGAVGFGYANGWAGALYGIGGAVGILLLALWFAPVRKLNFMTMSEELAYYVGANRIVKNVVGLLIFIASIGWLGAHILGGGMYLAWIADIELSTAKIVIAAAFTIYVVIGGYTAVVWTDTIQAVILFVGFILMAVLSVQHIGGLDNLYSAMDPAAVSFLAIDKLGLIPAISLSVVIGVGVLATPSFRQRIYSGKDVSTIRRSFVGSGVLYLFFSIIPAIIGMAAHAINPELTNSNYAFPYVAATVLPVGVGMIVLIAGLSATMSSASSDAIAGVSILLRDVYVMFTGRVPNKESMLNYSRLALVVVIGFALLFALTSNDIISYITKMISTVMSGMFVCGMLGRFWSRYNWQGALATLAGASAASVTVMMSPSLTTFWGNPVIPSCLVALTAGVVVSLLTPANQVSAEMARAILDDERALMEMELSDKGELDRDESLANRQAAREL

SEQ ID NO: 23496 - protein, 402 aa, Vibrio vulnificus CMCP6
MEKVFIVAAKRTPIGAFGGSLKTVAAGELASVAIKGAIEQAKVDASLIDEVIVGNVVSAAQGMGIGRQAAILAGIPAEVPAYTLNMVCGSGMKTVMDGVSHIRSGDAKVVVAAGVEVMSQIPFTVPANVRDGNKMGHMALQDLLIADGLTDVFNQYHMGVTAENVAKEVGITRDQQDEYALASQQKAVAAIEAGKFKDEIVPVEVTVRRQTVTFDTDEYPKANATLEALKGLRPAFDKEGTVTAGNASGINDGASAVILASEQAVKEYGLQPIAEVVSYAQSGLDPKIMGLGPVEAVSKALEKAQLNTADIDVYELNEAFAAQALGVIHQLADKHQVPVTSIQDKANPNGGAIALGHPLGASGNRILVTLIHELQKQNGQYGVASLCVGGGMGTAVIVKAVK

SEQ ID NO: 23497 - protein, 541 aa, Vibrio vulnificus CMCP6
MRAVKHRQLSLLFPFLKWLPSVNAQSLQADFWAGLTGAIIVLPQGIAYAMIAGLPAEFGLYTAIIPAILASLFGSSHHLISGPTAALSVIVFTTVSQFAEPSTPLYIQLCFTLTLCAGVIQLLFGLLRFGAVVNFVSHSVVLGFTAGAAIVIGVSQLKHVLGLQYNSGETAIENLLLLGSHAVHFNAKELSVGMVTILVCIMCKRIWPKLPHMLLATLASMAFALWMNQAGYPVLMVSEVSSSSLSLSSPFAGLSHVEPMLGGIVAVAMLGLVEAISISRSVALKSRQSLDSNQEFVGQGLSNIVGSFFSCYVSSGSFTRSGVNYSSGAKTPLAAVFAALLLLVIMLLLAPYAAYIPIAGMGGLLLVVAWYLVDVHHITTIVKHDKKEAVVLVATCLAALFLHLELSIYVGVGASLFFYLRKTSRPAIERLSHDELNLEQQDDIAVIRINGSIFFGCVQYLHQEMQNVSAKHLIILGRGINFIDHLGVQMLDDYVSTSGRHVYFCRFKASAKASLLNGATSVREEHFSERLTPLLTLICKG

SEQ ID NO: 23498 - protein, 479 aa, Vibrio vulnificus CMCP6
MVAIGVYAYKKTSSSSDYFLGGRSLGPWPAALSAGASDMSGWLLLGLPGYAYAAGIESFWLAGGLLVGTWANWLVSAKRLRTYSIQTDALTLPEFLSRRFDDKSKLIQTISAFFILLFFLFYTSSGLVAGGKLFETVFGLDYSTAVIIGTLCVVSYTLFGGFLAVSWTDLVQGLLMAAALMIVPIAVMEGGFGQLATDMHNINPELLTLWNDAKGEPLSAIAIISLVAWGLGYFGQPHILARFKASRTNRELGTARRIAVGWTALSMAGAILVGLVGLVWVNGHPGTELADGEKIFMLLVNTVFHPVIAGILLAAILAAVMSTADSQLLVSSSALAEDFYKQVIKPDASSQEIVMVGRIGVVVISIIALILAMTPDSSVLGLVSYAWAGFGAAFGPAVVLSLYWKGMNRNGALAGILIGGITIVVWKQLTGGWFDVYEIVPGIIFSTIAIVGVSKLTGGADNTVLEQHREFEKKLVELE

SEQ ID NO: 23499 - protein, 408 aa, Vibrio vulnificus CMCP6
MNHLITVGALESFLVAISVLFLGHFINAKLPILRKFNIPEPIVGGLIVACIITILHFRGIDLEFNLPLQNTFMLMFFSTVGLAANYTQLLKGGAKVFLFLAVASVYIVIQNGVGVSLASMLGLDPLMGLIAGSITLSGGHGTGAAWSQTFADNYGMSNTLEIAMASATFGLIIGGLIGSPVAQRLVDKHNVESEYGRGSKTHEKFPELVTYNEYEEDKVTAKKVIEKLFFLIICVTGAKYVEQWVSTYEIKWLMIPDFVYALFIGVIITNFLEVTKIRKLDAETVDMLGTVSLSLFLAMALMSLKLWNIFDLAIPFLVILAVQSVVLALFTYYVTFKVMGSNYDAAVIAGGHCGFGLGATPTAVMNMGSIVNRFGPSPQAFMVVPIVGAFFIDIVNLIVLQGFISFMG

SEQ ID NO: 23500 - protein, 408 aa, Vibrio vulnificus CMCP6
MNSVVSVGPQESFLIAVGVLFLGHFINGQIPILKRFNIPEPIVGGLVVALVITLAHFNGITFDFDLPLQKTFMLMFFATVGLAANYKQLLKGGVKVLLFLLIASIYIVVQNGIGVSLASMLGLDPLLGLIAGSITLSGGHGTGAAWSHTFTQNYGLENALEIAMASATFGLVMGGILGSPVAQRLVDKHQLESEYGRELQAHQRFADLVTYNENEEDKVTAKKVIESLALMFLCVIGARYLSQWVNQLDIAWLMIPDFVYALLLGVFVTNFLELTKVRKLDLETVDMLGTVSLSLFLAMALMSLKLWNIFDLALPFLFILSIQSLVMVLFSYFVTFKVMGRNYDSAVIASGHCGFGLGATPTAVMNMGSIVNRFGPSPQAFLVVPIVGAFFIDLVNMLILQGFIAFLG

SEQ ID NO: 23501 - protein, 404 aa, Vibrio vulnificus CMCP6
MKKIRSIEDVQNVASQAKHVLTLFSGGLDSSYLLEILKNSRAKVTAVAIDLGDDIEESKLKLITDHYGFDLNILDAKQEFVEHSLFSAIQAQALYLGDYPVSSSLSRPIIVKKAVELAQILSCDAIIHTANQSQNSLRRLNGAIERSGYQGFYGSPYEYSAISREEKAQTLFHSGLVGFKSRNVSGDSNLWCREFESGILDDPENFTLADSLFTWSRWQPEHHLEGDSIKIGFKQGYPVTLNDKPITLLELIAFINNHVGAYEIGRYVGFDHLDQDEKVLEVREAPAAMLLMKAYKLLETATLPTDVLKAKAWHNETWTQEAVEGRFGSLLQNASYAFIAHTAEHVSGSVLFKLSRGNAIATSIVADNARYLRDRDNWEINVAHARSMRSVQLEPTSDKQHQVA

SEQ ID NO: 23502 - protein, 606 aa, Vibrio vulnificus CMCP6
MSSATLQQINVYPVKSVGGIALTSAWVEKQGLAFDRRFMVATALGDMVTARKYPQMVTIRSALVADGIVFTYPDKPALMLKYQDFKRQETPAQVWKDNFTAYTTTDEADDWFSDILGIRVELLFSGEQSNRVREKIGHNVSFADGYPLLVISDASLKELNRRSPETHSMDQFRTNLVVSNCDAFAEDGWKKIRIGEVIFEAVKPCERCILTTVDVEKGQFRANKEPLNTLLTFRANEQGGVFFGQNLVALNEGMIQVGDRVEVLEVKEKEVYPDSACHDIRLTCVEKETIARDFVTFWLEPEHGQLPAYLPGQHLPVEITVDGDTISRRYTLSSSPSRPGRYAISVKRIDGGRVSNWLIDHLEVGDELFAQSPQGQFHIQEDKHQPLLLLSAGSGVTPMLSMLRYLADHDLVEDVVFYHQCRSVEDIPCKEELDALKSRYPGLTVKISLTQAPIDWFGLKGRLSLSHLKQIKAVESRQVFVCGPEGFMQKAKNLLLKKGLPESHYHQEAFGVSTSPNSERKTVELEFNGETFTADNQQTLLEHVENHGLTIAHSCRAGFCGACKVNVISGQVHQPDVPALTEQEKREGKALACCCVPLTDVRFQSL

SEQ ID NO: 23503 - protein, 291 aa, Vibrio vulnificus CMCP6
MDVKKVAFIGLGVMGYPMAGYLSKAGYETRVYNRTFAKAQKWAEQYQGAAFETPREAALGCDVVFVCVGNDDDVRSVVYGEDGVLAGLEPGAILVDHTTTSAELAVELADACQKVSNAFIDAPVSGGQAGAENGVLTIMCGGDESVFAQVSPVMDAYAKQATLLGENGQGQRCKMVNQICIAGVLQGLSEAILLAQKSGLDVAQVVDTLKHGAAGSWQMENRATTMAQDKFDFGFAIDWMRKDLGFCLKEAQRVGLELPLTKQVDQQYAQLQQDGLGRMDTSVLIKAVAKH

SEQ ID NO: 23504 - protein, 77 aa, Bradyrhizobium japonicum USDA 110
MFFLFGANDVALGTVKWFNPTKGYGFIAPDDGGNDVFVHISAVEKAGYTSLVEGAKVSYELVMNRSGKQAAENLRLG

SEQ ID NO: 23505 - protein, 329 aa, Bradyrhizobium japonicum USDA 110
MTAGSISSEKIDLLIYGPVRPILENGFSDHFVVHKAETRGDLERLTPAIREKIRGVAVTYHTVRADRDSLSQLPKIEMVASFGVGYDHVDAKYAAEHNIIVTNTPDVLTEEVADVAMGLLISTVREFIKADRYVRSGLWQTQNYPLSVGSLRDRKVGIVGMGRIGQAIARRLDASLVPVVYHSRNPSKDVSYKHYPDLIEMAKAVDTLMVIVPGGASTNKMINAEVLKALGPRGVLINVARGSVVDEPALVQALKSGTILAAGLDVFAAEPSVPDELKSMQNVVLLPHIGSASVVTRNAMDQLVVDNLKAWFAGKAPLTPVAETPFKGR

SEQ ID NO: 23506 - protein, 308 aa, Bradyrhizobium japonicum USDA 110
MGQTLTRSVIGGCLWLAASLLATTALAQTGSEGLSPTLSAIKKAHVVRLGYRESSPPFSFLDQSGRPIGYSLELCEAIVEEIGVEVDDPNLKIDYVKVTSDDRIDAVLQNKIDLECGSTTANAERAKRVAFSPLMFVAGTKLMVPKASSVQSLTDLKGKTIVVTKGTTNEQAIQAADKKSSLGLTIAVGADHEQSFQMLADGKADAFATDDILLSGLIARHKAQDKYRVTGDYLSYDPYGIMFRKGEPQLSAVVERTFRKLGSNRDLVPLYNKWFTARLPTGERLNVPISLQLEEAFKAMDDSASANN

SEQ ID NO: 23507 - protein, 418 aa, Bradyrhizobium japonicum USDA 110
MSRLVMKFGGTSVANIERIRNVARHVKREVDAGHEVAVVVSAMSGKTNELVAWCTEASPMHDAREYDAVVASGEQVTSGLLAIVLQSMGIQARSWQGWQIPIKTSDAHASARIEDIDGSEIIKRFRDRKEVAVIAGFQGINPETNRITTLGRGGSDTSAVAVAAAVKADRCDIYTDVDGVYTTDPRIVPKAKRLGKIAFEDMLELASQGAKVLQVRSVELGMVHNMPIFVRSSFDKPEDIDPHANQPPGTLICSEEEIMESHVVTGIAFSKDEAQISVRQIEDKPGVAASIFGPLADANINVDMIVQGVSEDGKTTDLTFTVPAADFTRARDTITAAKGKIGYARLDTATDVAKISVIGSGMRSHAGVAAQAFSALAGRNINIRAITTSEIKFSVLIDTAYTELAVRTLHTLYGLDQA

SEQ ID NO: 23508 - protein, 394 aa, Bradyrhizobium japonicum USDA 110
MPMSDDVVIVSAARTPVGSFNGAFATLPAHDLGAVAIKAALERGGIEPGRVSEVIMGQILTAAQGQNPARQASIAAGIPVESPAWGVNQLCGSGLRTVALGYQALLNGDSEIVVAGGQESMSMAPHAQYLRGGVKMGALEFIDTMIKDGLWDAFNGYHMGNTAENVARQWQITRAQQDEFAVASQQKAEAAQKAGKFNDEIVPVTIKTRKGDVVVSADEYPRHGATLDAMAKLRPAFEKDGTVTAGSASGINDGAAAVVLMTAKQAAKEGKKPLARIVSWAQAGVDPKIMGSGPIPASRAALKKAGWNVGDLDLIEANEAFAAQACAVNKDLGWDTSKVNVNGGAIAIGHPVGASGARVLVTLLHEMQKRDSKKGLATLCIGGGMGIAMCLARD

SEQ ID NO: 23509 - protein, 494 aa, Bradyrhizobium japonicum USDA 110
MNRRGRPVNLVVVSNRVARGKPNEPMTGGLAAALLPVVEHSGAIWVGSSGRVRDGHQKEPFAEIEALGSGAIATLDLPAAHYGGYYEGFANSALWPALHSRSDLIRVSREDYVSYREVNAFMARALMRFRKPRTAFWVQDYHFLALGAELRDLGVDDPIGFFLHTPWPVAAVTQGVPNHRELITAMLAYDLIGFQTEEDRQNFLGYVAGELGLVIDDGVVLSQHGRTRCEVFPIGIDAEKFAQYAAKSASHPDVSRLRRSLNGERLAIGVDRLDYSKGLVNRISAFDRLWTEQPQFLRSISLLQIANPSRGAIEAYGNLQNEVARLVTDVNGRHGEVDWTPIRYLNKGFSQAVLAGLYRTAQIGVVTPLHDGMNLVAKEYVAAQNPADPGVLVLSKFAGAANELDTALLVNPHDIDAMARAIAIAAAMPLTERKMRWDAMMKKLRGHTIQQWSADFVAELEKCRIEKAAVAPLAAQPPQALRWLKSAISGVRLI

SEQ ID NO: 23510 - protein, 129 aa, Bradyrhizobium japonicum USDA 110
MFAVIKTGGRQYRVAPDDVLEVGKIEGEVGSIVQLNEVLVVGGDTPILGLPTVAGASVAVEVLDHKRGPKVIAFKKRRRKNSRRKRGYRDEITVLRVSEILTDNAKPTKGPRPKKEKVAKEATKEDAAA

SEQ ID NO: 23511 - protein, 346 aa, Bradyrhizobium japonicum USDA 110
MKFLDEAKVYIRSGDGGNGCVAFRREKFIEFGGPSGGNGGRGGNVIIEVADGLNTLIDYRYQQHFKAQKGENGAGSDRHGANGKNIVLKVPMGTQIFDEDRETLIHDFTNVGEKFVLAEGGNGGFGNAHFKSSTNRAPRNANPGQPGEERWIWLRLKLIADAGLVGLPNAGKSTFLSKVSAAKPKIADYPFTTLHPQLGVVNADGREFVLADIPGLIEGAHEGAGLGDRFLGHVERCRVLLHLVDATCEHAGKAYKTVRTELDAYGGLLTDKIEIVALNKIDAVEPDELKKQKDRLKRAAKKTPLLLSAATGEGVKEALRALVAVIGEAPVSAKAKSAAEAEPWSA

SEQ ID NO: 23512 - protein, 445 aa, Bradyrhizobium japonicum USDA 110
MTTILKSLPKGEKVGIAFSGGLDTSAALLWMKQKGARCYAYTANLGQPDEADYNEIPRKAQEFGAEKAVLVDCRTQLVHEGIAAIQSGAFHISTGGITYFNTTPLGRAVTGTMLVAAMKEDGVNIWGDGSTFKGNDIERFYRYGLLTNPSLRIYKPWLDQQFIDELGGRAEMSAFMTAQGFAYKMSAEKAYSTDSNLLGATHEAKDLESLDSGIKIVNPIMGVPFWREDCNVKAEKVVVRFEEGQPTALNGQTFTDPVALFLEANAIGGRHGLGMSDQIENRIIEAKSRGIYEAPGMALLHIAYERLVTGIHNEDTIEQYRISGMRLGRLLYQGRWFDSQALMLRETAQRWVARAVTGEVTLELRRGNDYSILNTESPNLTYAPERLSMEKVEDAAFTPADRIGQLTMRNLDIADTRTKLKLYTDTGLLSGSEGSQIFRLENDKG

SEQ ID NO: 23513 - protein, 633 aa, Bradyrhizobium japonicum USDA 110
MGKVIGIDLGTTNSCVAVMDGKNAKVIENSEGMRTTPSIVAVTDDGERLVGQPAKRQAVTNPERTFFAVKRLIGRRYDDPMVEKDKKLVPYKIVKASNGDAWVEADGQTYSPSQVSAFILQKMKETAEAHLGQKVDQAVITVPAYFNDAQRQATKDAGKIAGLEVLRIINEPTAAALAYGLDKTKTGTIAVYDLGGGTFDISILEIGDGVFEVKSTNGDTFLGGEDFDMRLVGYLADEFQKEQGINLRNDKLALQRLKEAAEKAKIELSSTTQTEINLPFITADQTGPKHLTMKLTRAKFEALVDDLIQKTVEPCRKALKDAGVTAGEIGEVVLVGGMSRMPKVQEVVKQLFGKEPHKGVNPDEVVAIGAAIQAGVLQGDVKDVLLLDVTPLSLGIETLGGVFTRIIDRNTTIPTKKSQVFSTAEDNQNAVTIRVFQGEREMAADNKMLGQFDLMGIPPAPRGMPQIEVTFDIDANGIVNVSAKDKATGKEQQIRIQASGGLSEADIEKMVKDAEANAEADKKRREAVTAKNEADGLVHSTEKALAEHGSKVAETERRAIEDAVSDLKEALKGDDAEAIKAKTQTLAQASMKLGEAMYKQQAEADAKKDAAKDDVVDAEFTEVDDDKNNKKSA

SEQ ID NO: 23514 - protein, 333 aa, Bradyrhizobium japonicum USDA 110
MSVKKKPLVVVTRKLPDSIETRMRELFDARINLDDTPMSADQIAEAARTADVLVPTVTDHITADIVNQPDCKLRLIANFGNGVDNIDVEAAHARGITVTNTPKVLTEDTADMTMALILAVPRRMIEGASILTEGKPWPGWSPTWMLGHRIGGKRLGIIGMGRIGQAVARRARAFGLQIHYHNRRPVAPKIAEELGATYWESLDQMLARMDILSVNCPHTPATYHLLSARRLKLIRKDAYIVNTARGEVTDEDTLIKLIEGGEIGGAGLDVYEHEPAVNPKLVRLAKAGKVTLLPHMGSATIEGRVEMGEKVIINIRTFLDAHKPPDRVLPSML

SEQ ID NO: 23515 - protein, 402 aa, Bradyrhizobium japonicum USDA 110
MRDVFICDAVRTPIGRFGGSLAKVRADDLAAAPIKALMAKHPNLDWAQVDEVFFGCANQAGEDNRNVARMALLLAGLPDSVPGQTLNRLCASGLDAVGAAGRAIRSGEIELAIAGGVESMTRAPFVMGKAQEAFSRSAEIFDTTIGWRFINPLLKAQYGVDAMPETGENVAEEFQVSRADQDAFAIRSQQRAGAAIAAGYFAEEITPISIPGGKTGPITVDKDEHPRPETTLEGLAKLKPIVRNPGTVTAGNASGVNDGAAAMILASEAAVKKHGLTPRARILGLASAGVPPRIMGIGPVPATRKLMERLGKKISDFDLIELNEAFASQGIACMRQLGVADDADFVNPHGGAIALGHPLGMSGARLALTAVHGMEKRGGKLALATMCVGVGQGVAVAIEKLN

SEQ ID NO: 23516 - protein, 70 aa, Bradyrhizobium japonicum USDA 110
MSMGTVKWFNATKGFGFIQPDDGGKDVFVHISAVERAGLGTLREGQKISYEIVADRRSGKSAADNLRSAG

SEQ ID NO: 23517 - protein, 530 aa, Bradyrhizobium japonicum USDA 110
MRRAPAFDMERTHLLTSFQDFGLAEPIARALSEENYVTPTPIQAQTIPTALTGRDVVGIAQTGTGKTASFALPILHRLLEHRIKPQPKTTRVLVLSPTRELSGQILDSFNAYGRHIRLSSTLAIGGVPMGRQVRSLMQGVEVLVATPGRLLDLVQSNGLKLGSVEFLVLDEADRMLDMGFINDIRKIVAKLPIKRQTLFFSATMPKDIAELADSMLRDPARVAVTPVSSTAERINQRILQVDFSAKPAFLTKLLKDEPINRALVFTRTKHGADKVVKTLEKAGIAASAIHGNKSQNHRERTLAQFRSGDIRTLVATDIAARGIDVDGITHVINFDLPNVPETYVHRIGRTARAGAEGTAISLVAGGEELSYLRDIERLIKVALPREDLRTDAGRRDAGPPPSQQRQGRPGRPGQRPQGARHGERHGDGRRTDERHGDGRHHSAGKQGDGRPGEGRHGDARHVDGRPGSGPKASKGSRRRRSGGKMHSSQTDRPEQRSAHSAGTPDGIQGVAFLRRDSRPMGQPTRKPYSH

SEQ ID NO: 23518 - protein, 551 aa, Bradyrhizobium japonicum USDA 110
MYAYDEIDRTLVNERVSEFRDQVQRRLSGELTEDEFKMLRLQNGVYLQLHAYMFRVAIPYGTLASNQLRALAHVARKYDRGYGHFTTRQNIQFNWIKLSDLPDALADLAEVGIHAMQTSGNNMRNVTSDQWAGVAPGEIEDPRIWSELIRQHTTLHPEFSFLPRKFKIAITASDHDRAAIKVHDIGLRLIKNEKGETGFEVLVGGGLGRTPFIGKTIKHFVHGRDLLSYIEAILRVYNQYGRRDNIYKARIKILVHELGIEKFSREVEEEWQHIRNSSLQIDDEVIEDIRSRFIYPAYEKLPHMPDELRQAAADPEFEAWRKNSVAPHKNPGYSIVTISLKPIGAPPGDATAEQMDALADLADRYSFGEIRVGHEQNLALPHVAKRDLPALWKALDKLGLATPNVNLITDIIACPGLDYCSLANARSIPIAQELTRRFANHELANLIGRLHINISGCINACGHHHVGHIGILGVEKNGEEVYQITIGGRADEGAALGNLIGPGVKFDEVADVVEDIVEAYLALRARPEELFIDTVKRLGVEPFKERVYATR

SEQ ID NO: 23519 - protein, 627 aa, Bradyrhizobium japonicum USDA 110
MEHICLPGSDLMSAVERLDDQYRDERDAAPPEAPSIEAELIEQPAKGRAKLRPLLALAPYVARYRGRAALAFVALTIAALTTLLVPVAVRRMIDFGLTPEGIELINSYFSVMIAVVAVLALASAARYYLVMTIGERIVADLRRDVFAHLLSLSPAFFDSARSGELISRLTADTTQLKSAVGASVSIALRNLMMFFGAVAMMVITSPKLSGFVLLAIPLIVLPLVAFGRWVRRLSRNAQDTLAEASAYAGELVGAIRTVQAYTSEGLAAKRFGGEVEQAYEAARTSTQARAVLTAIIIFIVFASVVAILWIGSHDVLTGAISPGRLGQFVLYAAFAAAGLGQLSEVWGEVSAASGAAERLFEILHVQPDIKAPASPRALPVPARGEVGFDQVSFAYPARLDVKVLDAVSFTVRPGEKVAIVGPSGAGKSTIFHLLLRFYDPRSGAISLDGVPVRSADPRDFRSRIALVPQESNVFAASARENIRFGRPDATDAEVERAAELAHAAEFVRRLPEGFDTPLGERGVTLSGGQRQRIAIARAILRDAPLLLLDEATSALDAESETLVQTALEELMKHRTTLVIAHRLATVLSCDRILVMDQGKIVEQGTHAELVAANGLYARLARLQFEGA

SEQ ID NO: 23520 - protein, 370 aa, Bradyrhizobium japonicum USDA 110
MKVGVPKEIKAHEYRVGLTPGAAREYVAAGHRVMIETNAGAGIGATDGDYRNAGATILTSAAEVFASSEMIVKVKEPQPAEWSQLREDQILFTYLHLAPDPEQAAGLLKSGCIAIAYETVTDAHGGLPLLAPMSEVAGRLSIEAAGSALKRSTGGRGLLIGGVPGVQPARIVVIGGGVVGTHAARMAAGLGAEVTIIDRSIIRLRELDELFEGRVRTRFSTIESVEEEVFAADVVIGAVLVPGASAPKLVRRSMLSSMRKRAVLVDVAIDQGGCFETSRPTTHADPTYEVDGIIHYCVANMPGAVPLTSSQALNNATLPFGLALANKGFSAVLENPHLRAGLNVHRGRLTYKAVAESLGLPFSPIEQAAA

SEQ ID NO: 23521 - protein, 393 aa, Bradyrhizobium japonicum USDA 110
MSENRAPIYLDNNATTRTDPSVVQTMLPFFTEQFGNASSAHAFGNEAAIAVRQARRSLSGLLGSAYDHEIVFTSGGTEANNAAILSALATQEGRDEVVTTSVEHSAVLALTEQLAARGVKTRIIAVDACGRLDIEAFRCALGPRTAIASVMWANNETGTIFPVKCLAGWTREAGALFHTDAVQAIGKVRLNLKDSTIDMLSLSAHKLHGPKGVGALYLRKGTKFQPLICGGSQERGRRAGTENIPGIVGLGKAAELAAERLEPERIRIGALRDRLEQGILRNGECVVLGDIRNRLANTTNIAFDHLEGEAIAHRLNRAGIAVSLGSACRSGSMQPSHVLRAMQVPAWRMHGAVRFSLSRETSLAEVDEAVCAVSDIVTRMRASSRATVREQTS

SEQ ID NO: 23522 - protein, 120 aa, Bradyrhizobium japonicum USDA 110
MLELRTTITWGLLSKTCDRARQRIPFHFAQRLAAGSLIDLDEKVVFLFGANDVALGTVKWFNPTKGYGFVAPDDGGKDVFVHISAVEKAGYTSLVEGAKVGYELVTNRSGKQAAENLRLG

SEQ ID NO: 23523 - protein, 117 aa, Bradyrhizobium japonicum USDA 110
MQITLMKGKIHRASVTEADLHYEGSISIDRTLLEAAGMVINERVEIYNVETGTRFATYVIEAPPMSGTMSLNGAAARLVMPGDKIIIVAYASFDEAEAKKFKPHVVRVDRDNRILAS

SEQ ID NO: 23524 - protein, 68 aa, Bradyrhizobium japonicum USDA 110
MATGIVKWFSATKGYGFIKPDDGEADVFVHIRSVEKAGYTSLAEGARISFERKTGSSGKVSADNLRIG

SEQ ID NO: 23525 - protein, 173 aa, Bradyrhizobium japonicum USDA 110
MLEIVAREQPVRPAAVLIAVVDHPEPTVLLTQRSAHLNDHAGQIAFPGGKIDATDTSPLDAALREAEEEVGLSRDFVEPIGYLDLYGTAFGFRILPTVARVRPGFALTINHSEVDDAFEVPLSFLMNPANHQVHSKEFRGMERFYYAMPFAERYIWGATAGMLRVLYERIYSS

SEQ ID NO: 23526 - protein, 398 aa, Bradyrhizobium japonicum USDA 110
MPAPEAVLVLNSGSSSIKFGLFEISAAEPALLCKGLLDEHEARPRLVVKGPAGEDLFEKRRDEADADGGHLFADALAFIDDRFGQDSLRAVGHRIVHGGPDHSGPVELTDDITAKLEALTPLAPLHQPRCLAPVRTLSAIRRALTQIACFDTAFHHGLAPPASRFAIPRRYEERGVRRYGFHGLSFEYVAGRLAGIAPQLVAKRTVIAHLGNGASLCALRNGRSVDTTMGLTPLDGLVMGTRSGTIDPGVLLYLQQHEGMSVEDVQHLLYHESGLLGVSGMSADMRTLLASREAAARDAIDLFTFRAAQEIAMMATTLQGLDCLVFTGGIGEHASEIRSAIGERLAWLGVRIDAAANSEGRERIGTGDSAVDIFIIPTNEEIAIARHCAALLRERHAA

SEQ ID NO: 23527 - protein, 300 aa, Bradyrhizobium japonicum USDA 110
MTDASRNVAFIGIGKMGLPMSVLVAKAGYAVTAFDRSAARTNEARAQGISIAASPDDAVSGKEAVITSLPDDTALRGALLGPAGVIAAMAPGAVLIETSTVSVEASTEVAASAQARGVLYLRAPVSGNASIVHTGALTCFVSGPKDAFDNAKPLFAAFTRARTYLGPAEEARYAKLAVNLMIAVSAAMMAESLALARKGGIAWQDILKVLDDSAVASPMVKYKTAPLRTRDFESTFSCKQMAKDLDLILGAGHAVGVPLQLAAQVRETYGSLVAQGDGEADFIATVKHLERLSGLGEPKL

SEQ ID NO: 23528 - protein, 300 aa, Bradyrhizobium japonicum USDA 110
MFSRALFGGVSISLTKQKEPLMSYLAPSEFVTKMVDAGESKIFMSTRDTIIRAYMAGAILALAAWFAVTINVNTGQPLVGALLFPVGFVMLYLLGFDLLTGVFVLSPLALIDKRPAVTFGGVLRNWGLVFVGNFAGAFTVAFMMAFVTTFGFTQDPDKIGTAIGNIGEGRTLGYAAHGAAGMATLFLRGMLCNWMVSTGVVGAMISTSVPGKVIAMWMPILVFFYMVFEHSVVNMFLFPSGLMLHAKFSIMDYLIWNEIPTVLGNLVGGLAFTGMTLYATHVMTQPKRQAGKTTPSRVAA

SEQ ID NO: 23529 - protein, 439 aa, Bradyrhizobium japonicum USDA 110
MTKRIRRPSDTGLSRRQLLKATGSTAALLAAAKLNFPAGAFAQDAGPEVKGAKLGFIALSDAGPLFVAKDKGLFAKYGMPDVDVQKQASWGTTRDNLVLGSEGNGIDGAHILTPMPYLISAGKVTQNNQPTPMYILARLNLDAQCISVAKEYADLKVGADASVLKAAFEKKKAEGKSAKVAMTFPGGTHDLWVRYWLAAGGIDPDKDVETITVPPPQMVANMKVGTMDAFCVGEPWPGQLVHQGIGYTAVNTGEIWSKHPEKSLGMRAAWVDKNPKAAKAILMAIMEAQQWADKMENKEELATIMGKRQWINCPVEDIADRAKGKFDYGNAGKVVENSPHIMKYWRDHASYPFQSHDLWFMTEDIRWGKYEAGFDSKALIAKVNREDLWKDAAKTLGVASSDIPASTSRGKETFFDGKVFDPENPAAYLKSLAIKRVEV

SEQ ID NO: 23530 - protein, 142 aa, Bradyrhizobium japonicum USDA 110
MTPEQITLIQQSFAKVAPISETAAVLFYDRLFEVAPSVRAMFPEDMTEQRKKLMGMLAAVVGGLSNLDSILPAASALAKRHVAYGAKAEHYPVVGATLLWTLEKGLGEAWTPELATAWTDAYGVLSGYMISEAYGAQAQAAE

SEQ ID NO: 23531 - protein, 573 aa, Bradyrhizobium japonicum USDA 110
MKHWIDWLPAIETLRRYEAAWLPRDIFAGLVLATMLVPVGIAYATASGLPGIAGLYATIVPLLVYALFGPSRILVLGPDSALAAVILGVVVPLSGGDPLRAATLAAMMAIVSGTVCILAGIARLGFVTELLSKPIRYGYMNGIALTVLISQLPKLFGFSIESEGPLRSLWAIADAILEGKTNWIAFGIGLGTLTVILLLRNSKRLPGILIAVVGATAIVGVLDLGTRYGVAVLGPLPQGLPGFAIPWITYGDIVPVLVGGCAIALVSFADTSVLSRAYAARLGTHVDPNQEMVGLGAANLATGFFQGFPISSSASRTPVAEAAGARTQLTSVVGALAIAILLLVAPNLLQHLPTAALAAVVIAAAIGLFEVTDLKRIYRIQQWEFWLSMVCFVGVAVLGVIPGIGLAIAIAIAEFLWDGWRPHSAVLGRAHGVKGYHDITRYPDARQIPGLVLFRWDAPLFFANAEFFKERVLDAVAKSPTPVRWLVVAAEPVTSVDVSAGDTIAELDEALHAQGIEFCFAELKDPVKDKLKRFGLFSQLGEQYFFPTIGAAVSSYLEINGVEWEDWEDQAKR

SEQ ID NO: 23532 - protein, 378 aa, Bradyrhizobium japonicum USDA 110
MALQGLPRTLRLLQVSLIMSAAAPRFHRLAVNDLRREASDAISVTFAIPSELASDYAFTPGQYLTLRTMLDGEEVRRSYSICSGPDDGEIRIAVKKVDGGAFSSWAADELKCGDELDVMTPTGRFGAVAPADTGRIHVGFAAGSGITPILSIVKGVLAREPDSRFFLFYGNRTTDNIMFLEALEELKDRFIDRLSIFHVISGEEQDIPILHGRLDGDKVRVLLRSLVPAGSVDHVFICGPSGMSEDIEATCRDLGIAEERIHVERFVSEFGGKPRPKKAVAPDAPPKAIASLIIDGKRRDVPVAEDEAILDAALRAGVDLPFACKGGMCSTCRAKLVEGEAPMDINYSLEPWELKAGFVLTCQAKPSSERVVVDYDHV

SEQ ID NO: 23533 - protein, 337 aa, Bradyrhizobium japonicum USDA 110
MMRKVVIAAGVLAASAVAAQAATLDTVKSRGTLVCGVSAGFAGFSAPDSQGNYKGLDVDYCRALAAGVLGDASKVRYVSLTAQNRFTALQSGEIDVLYRNSTQTYLRGVTLGLRQGPINFYDGQGFVVKKDLGVKDIKDLKGATVCVAQGTTHEVTLGDYGRANGIDWKPLVFDRVDTMYQTFFGGRCDAMTQDASALAGAVTTAAPNPADYVVLPQTISKEPLGPFTRNGDEVWSDIITWLHYGLIEAEELGVTQANVDEMAKSQTPAIQRLLGASGDLGSRLGLDNKWLVTAIKATGNYGEIYERNVGKASPLKLDRGLNGLWSKGGLMYAVPFK

SEQ ID NO: 23534 - protein, 69 aa, Bradyrhizobium japonicum USDA 110
MPTGTVKWFNGQKGFGFIQPDDGGNDVFVHVSAVERAGLSGLAEGQKVNFEAKTDKMRGKVSAENLSLA

SEQ ID NO: 23535 - protein, 295 aa, Bradyrhizobium japonicum USDA 110
MIDIGFIGLGTMGRPMAGHLLAAGHRVLLHDVAPVSPELIAAGGIACKSGREVAEEADAVIIMVPDTPHVEAVLFGKDGVASGISKGKIVVDMSSISPLATKEFAKKIEALGADYLDAPVSGGEVGAKAASLTIMVGGPERAFGTMKPIFDRMGKNITHVGANGDGQTTKVANQIIVALTIEAVSEALLFASKAGANPALVRKALMGGFASSRILEVHGERMVKRNFDPGFRIELHQKDLNLALEGARSLGLSLPSTAVAQQLFSSCTAHGGKGWDHSAMVRALELMAGHEIAAA

SEQ ID NO: 23536 - protein, 371 aa, Bradyrhizobium japonicum USDA 110
MRVGVPKEIKVQEYRVGLTPGAVREYVAAGHQVTVETGAGSGIGASDEVYRRAGAEIAGSARDVFASSDMIVKVKEPQKSEWTQLRESQILFTYLHLAPDPEQAKGLLASGCTAIAYETVTDAAGRLPLLAPMSEVAGRLAIEAAGAALKRSAGGRGLLLGGVPGVQPARVVVLGGGVVGTQAARMAAGLGAEVTVIDRSIPRLRELDDVFLGRVRTRFSTIEAVEEEVFAADVVIGAVLVPGASAPKLVTRAMLKSMRPGAVLVDVAIDQGGCFETSHATTHTDPTYEVDGVVHYCVANMPGAVPVTSSQALNNATLPFGLMLANKGFAAVLENPHLRNGLNVHRGRITNKAVAESLGLEFAPVETGLAA

SEQ ID NO: 23537 - protein, 258 aa, Bradyrhizobium japonicum USDA 110
MMLQAANVVRGAVPPAVRPAGSSSLLLTENQQWIGGPPALMDKLTPRERELVLKQGRRKVLNRGQTLFSQGGKHDGIWLIESGRIRVFYTSPLGREITLAYWHVGNFVGGPEVFEGTVHQWSGVASSNCSVVHLPGKELRSLAAEIPNLAIGLIEGLTFKGKCYSALAQMLGTRSITQRLAHLLLHLVELYGVDDADGRVIAAAFTHADIAHMVGATRQWVTISLKRMQEKGIVVTKRSQIVVCRTDVLEEMRGQASD

SEQ ID NO: 23538 - protein, 320 aa, Bradyrhizobium japonicum USDA 110
MSTEGRQTQSPSKYDRLIAAAKAVPPVPTVVVHPCDETSLRGAVESAEAGIIRPILVGPASKIGDLARRCGLDISGFEIVNAAHSEEAAAKGVELIHAAKGEMLMKGSLHTDELMRAVTAKVGGLRTERRISHVFVMDVPAYAETLLVTDAAINIFPDLDAKRDIIQNAIDLYNEAGFGKTPRVAILSAVETVTSKIPSTIEAAALCKMADRGQITGGVLDGPLAFDNAIDPEAARIKGIKSEVAGRAQILVVPDLESGNMLAKNLAYFAKADGAGIVLGARVPVVLTSRADSPRARMASCAVASLYANARRQHAPTVAA

SEQ ID NO: 23539 - protein, 404 aa, Bradyrhizobium japonicum USDA 110
MDTILVVNAGSSSVKFQVFSVEGEGRLRRQLKGQMDGIGSRPRLRASGANGDPLADRAYPIETVPDVPAAMGVAGEWLRDELRIHPIAVGHRVVHGGPEYDRPVLIDHGVVARLERFVSLAPLHQPHNLSPIRSILAGFPTLPQVACFDTAFHRTHSAVADHYAIPHQLHAEGVRRYGFHGLSYEYIAKTLPQTAPGVAKGRVIVAHLGSGASMCALKGGQSVESTMGFTALDGLPMGTRPGQIDPGVVLYLISERGMSASNVQNFLYRDCGLKGLSGVSNDMRELEASQDAKAKLAIDYFVYRIGLNAGMLAAALQGLDAFVFTAGIGENSASIRARVGEQLGWFGVKLDPTENSRNARLISRPDSLIPVYVVPTDEELMIAQHTLALLVNTPSTNPRQERVS

SEQ ID NO: 23540 - protein, 563 aa, Bradyrhizobium japonicum USDA 110
MSAPSGLQGSWLRYFPPSSWLATYRRSWLPSDAVAGVTLAAYAIPVSLAYAALAGLPPQVGIYGYMLGGFGYALLGSSRQLAVGPTSAISLMIVGTVGPLAAGDPVRYGQIASLAAFAVAVLCLIAWLCKLSVLVRLVSDSILVGFKAGAGLTIIMSQLPSLFGVAGGGHDFFERGIELAGQLGDVNPLVLAVGLVAFLLLLTGERLLPGRPVGIAVVALAIAVATALGLPALGVPVTGRIPQGLPVPGLPTFGLLEFDDLFPLAAGCVLLAYIEGVSAARSFAAKHGDSLDVRQEFLGLGAANLATALGHGYPVAGGLSQSAVNDSAGARTPLALVICSGTLALCLLFFTGLLTNLPKAVLAAIVFAAVYRLVDIRTLARMWRVSRIDFYAAVIALVSVLLLGILQGVLLASIASIFLLLARASQPNVAFLGRLPGSGRYSDSARHEDVEPLVGIIAFRPEASLLYINAEMILEVVLNALQRSSDVRLVACDLSASPYIDLAGAHMLRNLHDELASRHVAFCIAGAHAQLRDLLRAEGLAERTDSGQWLRSLDNVLGDNQAR

SEQ ID NO: 23541 - protein, 402 aa, Bradyrhizobium japonicum USDA 110
MTIFVPAARVSRIKISPTTAASARVRELKAAGRDIVDMAIGEPDFDTPDHVKTAAHEAIDRGETKYTAVNGTVALRKAIIADYKRRLGLDYADNEICVGGGAKQILFLALMASVEEGAEVIVPAPYWVSYPDMVIANDGKPVIVRCSENQGFKLTAEALEAAITPKTRWLILNAPSNPTGAAYSRADLKAIGDVLLRHPDVLVLSDDIYDQIWYRDEPATTLAAAVPELKDRVLLANGVSKTYAMTGWRIGYAAGPAPLVAAINKLQSQMSSCPSSISQAAAAHALTSDQSFVRDSVKLYKERRDYACARLNAIPGLSCLVPDGAFYLYPGCAGVIGKTTPGGKVIESDLDFVLYLLDDVGVAAVQGAAYGLSPYFRLSIATSMEAIKAACDRIEKACRALR

SEQ ID NO: 23542 - protein, 400 aa, Bradyrhizobium japonicum USDA 110
MPELANRLKTVKVSASAAMTDKARELRDAGVKIVGLSSGEPDFPTPPHAIEAAHRAALAGDTKYPAQPGTVALRTAVQRKFKRENNLDYALDEILIANGGKQIIFNALFATCNPGDEVVIPAPGWITYADIVLLAEATPVAVPCPENNQFKLRPTDLDAAITPRTKWLILNFPNNPTGAACTRDEMCAIADVMLKYPDVWILTDDIYEHLTYDGFEFCTIAEVEPRLKNRVVTVNGASKAYAMTGWRVGYCGGPKDLIAAMNNVHGQATGGICTLSQAAAVAVLDGPQEFLKERADIYRDRRDLVVKLLNQIPGITCHKPEGAFYVFPNIAGCIGKTTKGGRRLDTDADFISALLEEQHVAAVPGGAYGMSPYFRISYATDTESLKEGCRRIANFCESLR

SEQ ID NO: 23543 - protein, 873 aa, Bradyrhizobium japonicum USDA 110
MVGRSHVHPDGRHSPRPPARTVRRTLGEIRVKSLALLRHPAFVAALVLTALTAAWALLGAPISLITQIAIYTLYGAGVNLLVGYTGLVPFGASVFFGCASYAAAFFILGRYGNDLVSLLLATVFSALLALVVGAIILRRRGLYFSLLTLAFSQIAFEIAFKWTGVTGGENGLQGVYRTSFAGPWSFHVFVVAVTVICIWLMWRIAHSPFGRVLQAVRDNEQRASSLGYNVHRFRHGALILTGTFVGFGGGLLTLMLEGVYANNLSWQHAGDSLLMTVLGGVHHVLGPLWGAIAFILLEDRLSAITENWWLVFAPILMLFALTSPEGMQGLWQRLFGRQRWTLVRLDIPPRPAAIVPFASSAAKVDRGKPLLQTIGLSKNFGSLVTAKSIDIEVHSGVLHSIIGPNGAGKTTFFNMLSGALKPSGGRILFDGSDVTRTPMHVRARLGIGRSFQILSIFQNLTVFENVRVAVQAQRTGSAKMLADAYAMEEVNAKTWSILDAVGLADVAAEPCINLPHGAKRLLEIGITLAIDSKLLLLDEPLAGLAEADRVVVADLIGKLAQTHGVLLIEHDIDRVLAISDRISVLHQGRIIADGKPADVAANPDVVAAYLGAAKDGTQSPPSSVERMAHAKAPVLLAANAVSAGYGGSTVLEAVDLAVHAGEAVALLGRNGVGKTTLLRGLSGTLAISNGSIAFEDKPLARLKPYEINRLGISLVPEGRRLFPNLTVVENLQLATRPGGIALDEVFELFPRLRERRAAKAESLSGGERQMVAIARALVVPSKLILLDEPFEGLAPAVVKEVMDALVKLRGKVAMVIVEHHAETVLPIVDRAYVLVNGQIAFAGDAAILERDHDLQARLLGVVQAEAAQARGAA

SEQ ID NO: 23544 - protein, 390 aa, Bradyrhizobium japonicum USDA 110
MTDVVIVSAARTPVGSFNGAFGALSAHELGAVAIKGALDRAKVSPEDVDEVILGQVLSGGEGQNPARQAAMAAGIPQEKTAWGMNQLCGSGLRSVALGLQQIANGDARIIVAGGMESMSMAPHLSHLRNGTKMGDVKFVDSMLKDGLMDAFRGYHMGVTAENIAARWQITREEQDAFATSSQNKAEDAQKGGRFKDEIVPVTVKTRKGDVVVDQDEYIRPGTTQESLAKLKPAFNKEGSVTAGNASGLNDGAAALVLMSADEASKRGLAPLARIVSWATAGVDPAVMGSGPIPASRKALEKAGWRVKDLDLVEANEAFAAQAIAVNKDMGWDPSIVNVNGGAIAIGHPIGASGARVLTTLLFEMQKRGAKKGLATLCIGGGMGVALTVER

SEQ ID NO: 23545 - protein, 758 aa, Bradyrhizobium japonicum USDA 110
MDQDLKEAALEYHRLPTPGKISVVPTKAMATQRDLALAYSPGVAEPCLVIAEDPLQADVLTARSNLVAVVTNGTAVLGLGNIGALAGKPVMEGKACLFKKFAGIDVFDIELAEENPDALVETIARMEPTFGGINLEDIKAPECFYIEKKLRERMKIPVFHDDQHGTAIIAAAAILNGLKLVKKDIADVKLVCSGAGAAALACLDLIVSLGLRRERIIVTDAKGVVYAGRAESMDDNKARYAVKTEARKLDDIIQDADIFLGLSAGKVLTPEMVKKMTRDPLIFAMANPIPEIMPEDALAVRPDAIIGTGRSDYPNQINNVLCFPFIFRGALDCGATTINEEMKLATVRALADLAMAEVPEVVATAYKGEELRFGRNYLIPKPFDPRLIEMIAPAVAKAAADTGVARRPIVDMDAYRQKLSRFVYQSGNAMQPVFSVAKGSGKSLVLAEGEDERVLRAAQVIADERIAKPLLLGRPATIEQHIKAFGLRLRPGQDCEIIDPHDAQVYSKCADVYHARRKRDGVSAALALSETRSNATVLASILLERGIGDAMLCGVIGRTADHLAAIKNVIGTRDDVRTLAVMQMLILPQHQLFICDTHCNLNPTAEQVADIALLAAAEVKRFGITPRVALLSHSSFGSSAVPEAHKMREARTIIRERSPDLAVEGEMRGDAALSQSVRDHEFPESGFAGPANVLVMPNLDAANISYNLLRMAAGQGLTVGGILLGAAKPAHILTPSSTVRRIVNMAAVAAADAVSERA

SEQ ID NO: 23546 - protein, 587 aa, Bradyrhizobium japonicum USDA 110
MMARLLSVNVGLPRDVAWQGKTVHTGIWKAPVEGPRRVRRLNIDGDGQGDTAGHGGEQRAVFVYQDESYRYWQEHLGRPDLVHGQFGENFTVEGLADTNVCIGDRYRIGSALFEVTQPRVTCYRLGIRMDEPDMPALLVRHGRPGFYFRVIEEGDVEAGDEITLLANGPESMSVFEINALLYLPPHPRDRLERALRIPALSRGWNRSFASLLEQQRTSKIAAGNAGLGPAASPPPAWRGFRPFRVSRKIAESGTVTSLILEPTDGHRAAPALPGQFVVVRLGPSEAQAMTRSYSLSSRSDAPPYRISIKREAHGAASLYIADSLRVGDVVEVGAPRGSFTLRQDARPVVLLSAGIGVTPVLAMLHALVAEGSTRDVWWLHGARNGREHAFAAETRGLLAGLAHYHSHVCFSAPDPADRPGADFDSAGHLDQHLIERLNMPRDGDFYLCGPAAFMSDLTAGLAALGVAPDRIHTELFGARPSLTPGIAASPRTPAHAPVGAPGPGPMVSFARSGLNVRWGPSYASLLELAEACDVPVRWSCRTGVCHNCESGLVAGEVSYAPDPLDPPADGNVLICCSQPKADVVIDL

SEQ ID NO: 23547 - protein, 392 aa, Bradyrhizobium japonicum USDA 110
MSKSSSLNKVFADLPVTIFEAMSQAARDNAAINLGQGFPDDPGPEDIRRAAADASLNGYNQYPSMMGLPELRQAIATHYGHWHGLKLDPMSEVMVTSGGTEALTSAILAVVQPGDEVVCFQPVYDSYLPIIRQAGGIPRLVRLEPPHWRLNEDMLKSVFNSKTKAVLFNNPLNPSAVVYPREDLELLARYCQEFDVIAICDEVWEHVTFDEHKHIPLITIPGMRERTIKVGSAGKIFSLTGWKIGFVCAAPPLLRVAAKVHQFLTFTTAPNLQAAVAYGLGKSDDYFLSMRKDLTRSRDRLTKGLESLGFPVLKSQGTYFLTVDLSPLGLNESDTEFCWRIVKDYKVAAIPVSAFYEQDPVTSVVRFCFAKKDQTLDTALERLSDAVRGRKR

SEQ ID NO: 23548 - protein, 398 aa, Bradyrhizobium japonicum USDA 110
MAEAADPVVIVSAARTPLGRFMGELSPLAAHKLGSHVIGAALERAKLAPEKVDEVFMGCVLPAGQGQAPARQAARAAGLPDATGATTVNKVCGSGMKATMLAHDIIRAGSAEIVVSGGMESMSNAPYLLAKARGGYRVGHDRIIDHMMMDGLEDAYETGRSMGDFGEATAEAYQFTRKDQDAYAMETLSRARRAVEGGAFKAEIAPITLTEKAGPRVIANDEHPLKVDPAKIPGLKPAFRANGTITPAASSANADGAAALVLTKRSLADRGGLPALAVIKGHATHSQEPQWFTTAPIPAIRKLLDKIGWSAGDVDLFEINEAFAVVAMAAQRDLGIPRDKLNINGGACALGHPIGATGARLIVTLLHSLEAQNLKRGVAALCIGGGEATAIAVERLTH

SEQ ID NO: 23549 - protein, 265 aa, Bradyrhizobium japonicum USDA 110
MRQLKSLFAIAATALAVLAAPNLAHADKLQDVLGSGKLRVGILTDAAPWGFKDDKGEIAGLDADLARLIAADMGVKLELVPVTGAARIPSLLSDKIDMLIAGLGATPERAQQVMFSQPYAVVNLGVYGAKSLPSATSKKPDNLDGRSVAVAKGSTLDVWLTDNAPKVKLVRFEDTPAALAAFLAGQADTFAENSAIALKVQDQNPTKEVELKFLIRQSPAHVGVRQGEQNLLNWINTDIFFNKLNGKLGALQLKWFREEQSLPTL

SEQ ID NO: 23550 - protein, 69 aa, Bradyrhizobium japonicum USDA 110
MAMGTVKWFNTQKGYGFIQPDDGQKDVFVHISAVERAGLSSLNEGQKVSFDIVADRRSGKSSADNLRVG

SEQ ID NO: 23551 - protein, 68 aa, Bradyrhizobium japonicum USDA 110
MPQKGTVKWFNPTKGYGFIKPNGSDKDVFVHISAVERAGLSTLNENQVVEYDLVENRGKSSAENLKVS

SEQ ID NO: 23552 - protein, 769 aa, Bradyrhizobium japonicum USDA 110
MSSYSDDLHQAALAYHRLPRPGKLEIQATKPLANQRDLALAYSPGVAAACTEIAKNPAEAATLTTRANLVAVVSNGTAVLGLGNIGPLASKPVMEGKAVLFKKFAGIDVFDIEIAADTIDRVVETVAALEPTFGGINLEDIRGPECFEIEARLKERMKIPVFHDDQHGTAIIVAAAITNGLRLNGKKLSDVKIVASGAGAAAIATLNLLVSMGAQRKNIWVCDIDGLVHEGRNTSMDRWKAVYAQKTDKRTLADVIGGADIFIGLSAPGVLKPEMAKAMSDKPLIMALANPTPEIMPEEARKVRPDAMICTGRSDYPNQVNNVLCFPFIFRGALDVGASAINEEMKHAAVEAIAQLAREAPSDAVAQGVDTGEMGGFGPGSLIPSPFDPRLILRVAPAVAKAAIESGVATRPITNFDEYAAQLMRFAFRSGLVMKPMFAKAKTQPVRVIYAEGEDERVLRATQVVLEEKLATPILVGRPSVVEARIKRFGLSIKAGKDFDLVNPEDDPRYRSYVQSYVEVAGRRGVTPDAARTVVRTNNTVIAALAVTRGEADAMLCGVEGRYMSHLRHVREIVGFSAGISDYAALALLITSKGAFFIADTQVRPNPSAEELAEIASLAAVHVQRFNIKPKIAFVSHSDFGSYDTESSRKMRRATQLLKEKHPEIEADGEMQGDTALSAAARKMVLPHSNLEGEANIMIMPTLDTANVAYQMIKSLADALPVGPILIGPARPAHILTPSVTARGILNMTAVAVVEAQERAARQQPTLFT

SEQ ID NO: 23553 - protein, 344 aa, Bradyrhizobium japonicum USDA 110
MTKYKLEYIWLDGYTPTPNLRGKTQIKEFASFPTLEQLPLWGFDGSSTQQAEGHSSDCVLKPVAVFPDAARTNGVLVMCEVMMPDGKTPHASNKRATILDDAGAWFGFEQEYFFYKDGRPLGFPTSGYPAPQGPYYTGVGFSNVGDVARKIVEEHLDLCLAAGINHEGINAEVAKGQWEFQIFGKGSKKAADEMWMARYLMLRLTEKYGIDIEFHCKPLGDTDWNGSGMHANFSTEYMRTVGGKEYFEALMAAFDKNLMDHIAVYGPDNDKRLTGKHETAPWNKFSYGVADRGASIRVPHSFVNNGYKGYLEDRRPNSQGDPYQIASQILKTISSVPTEKKAVA

SEQ ID NO: 23554 - protein, 395 aa, Bradyrhizobium japonicum USDA 110
MHDATLRNRLGQWLEPSRRSDVPPFMVMDVMAAAARIEAAGGHVIHMEVGQPAAGAPKTAIAAAHAALEAGRIDYTSALGIPSLRERIARHYRDAHGCDVSAERIVVTTGSSGGFILAFLSMFEPGDRVAVTVPGYPPYRHILTALGCEPVLIETTNETRHALTGEALLAAHRKAPLKGVLVGSPANPTGTMMSREALSGLIAAAEDAKIRFISDEIYHGLDYAFPAVTAAALSDHALVINSFSKYFCMTGWRVGWMVVPELLVRPIERLQQNLSISVPSLSQIAAEAAFDGTAEMGEIKHGYQENRRILIEGLPKAGLTRFLPADGAFYLYADVSDFTSDSFEFAKQMLEQAHVAATPGLDFDPIHGRSFIRFSYARSAAEMREAVDRIAHWLK

SEQ ID NO: 23555 - protein, 293 aa, Bradyrhizobium japonicum USDA 110
MPRVAFIGLGRMGHGMAGRYLDAGFTVTLWNRSKTKAEDLIARGAHWATSPEDAAIDADAVVTMVADDEASRAVWLGPKGAAKTAKAGTIAIECSTVSYDHAREMGRELNARGLIYIDCPVTGLPDAAAAGKLTLLVGADAADLERARPYLEPIGSTIRHFGAVGSGTVYKLINNLMGAIQIAGLAEGLAIAEQAGLDMTLVLESIQAGVAASPQVQRHSKRMVARDFSGATFTSALRHKDAAYAVKLAESLLADKPLVARAAVESYARAKAAMPDDDEGKMIELVSRPKKPS

SEQ ID NO: 23556 - protein, 379 aa, Bradyrhizobium japonicum USDA 110
MPSRVYLDWNATTPLRPEARAAMVAAFDLIGNPSSVHAEGRQARRLVEEARVTLAAAVGALPRNVIFTSAGTEANALALSPGLRGPSGGPVERLLVSAVEHASVLAGGRFPADKVGHIRVTRAGVVDLDHLRALLKDGPPALVSIMAANNETGALQPVAEAARIVHEAGGLLHIDAIQALGKIPFNINAVGADLATFSAHKIGGPKGIGALVVAEGLAGLEPVLRGGGQELNRRAGTENVAGIAGFGAAVKVALQAFPEDAKRMASLRDRLENGIRAIAGATIFSDDTERLPNTILFTAPGLKAETAVIGFDLEGIAVSSGSACSSGKVQPSHVLSAMGFDPAVAQGAVRLSLGWSTEPDDINRALEAWRKLGNTLLRD

SEQ ID NO: 23557 - protein, 259 aa, Bradyrhizobium japonicum USDA 110
MHHLNRLDTKMALLEVKDLQVRVEEREILHGLTLTVNEGEVHAIMGPNGSGKSTLSHVIAGKPGYEVTGGQILFKGEDLLEMAPDERAAKGVFLAFQYPVEIPGVATMTFLRTALNAQRKARGESEYSTPDFLKKVREVSKSLNIPQDMLKRGVNVGFSGGEKKRNEVLQMALFEPSLCILDEMDSGLDIDALRIAADGVNALRAPKRAMVVITHYQRLLNYIVPDFVHVMSKGRVVKSGGKELALELEDSGYAQFEDA

SEQ ID NO: 23558 - protein, 338 aa, Bradyrhizobium japonicum USDA 110
MKRVTLALTLALAAGLTAQAADAQTLKTVKDRGTLSCGVSQGLPGFSAPDDKGNWTGLDVDVCRAIAAAIFNDPTKVKFVPTSAKDRFTALQSGEIDVLSRNTTWTISRDTSLGANFTGVTYYDGQGFMVKKSLKVNSALELNSASVCVQTGTTTEQNLADYFKANNMKYEVIAFGTNDETVKAYEAGRCDVFTTDQSGLYANRLKLANPNDHMVLPEIISKEPLGPMVRHGDDQWFDIVKWTLFALVTTEELGVTSKNVDEKAKLESPELKRVLGSDGNFGEQLGLTKDWVVRIVKAVGNYGEVFDRNVGAGSPLAINRGLNNLWNKGGLQYAPPIR

SEQ ID NO: 23559 - protein, 329 aa, Bradyrhizobium japonicum USDA 110
MATNKKKIFVTQTLSQGARTLLTQRDDIELVEFANLISAKDFQALLKSHAPVHGVALGATAFGETELEASKDMKVVTRIGVGYDAVDVPALSRRKVPLMVAGSANSPSVAEQALFMMLTLAKRAQEMHSCVKDGKWADRLGMLPFDLYGKTVLIIGFGRIGTRTAKRCLAMEMRVQVYDPYKPAAEIKAAGYEPVADLDAALPHADFVTIHCPKTPETVGLFDAARIGRMKPKSYLINTARGGIVKEAALYDALTSGKLAGAGIDVFEVEPPPVSNALFALPNVIMAPHVAGVTVEAVSRMSEQTARNILSVLDGDPIRQNIINQDVLG

SEQ ID NO: 23560 - protein, 625 aa, Bradyrhizobium japonicum USDA 110
MQSRLLSQPSASRVAQFSVDTTPVAAGASLLTMKLETVSVDFTDEQKRYLEGFTTGLQISRVGRGLGGGSGKANAEPTGPDAVHIKAQDKVIASGKKLADQEKFKRDEHPFDAYPRLRQQALDNAPPSPADNFRWRYYGIFYVAPTQDSYMCRLRIPNGIMKHWQLSGLADLADDLCGPYSHVTTRANLQLREIPPKHAVKLIEGIQDLGLCSRGSGADNIRNVTGTPTAGIDPQEIIDTRPFAREWHYHILNDRSLYGLPRKFNVAFDGAGRIAVLEETNDIAFTAFEVKDGFGVEPGVWFRLGLGGITGHKDFAKYSGIIVKPEQATAVADAIVRVFIDHGDRTNRNKARLKYVLDAMGHDGFLKLVEERLKTPFTRVPEEAFAPRPAADRMAHIGVHKQKQDGLNWIGVSLTLGKLTCDQMRSLAKVARDLGDGEIRLTVWQNLLIPGVRDENVELAIAAIKQIGLAVEASHIRAGLIACTGNAGCRFAASNTKRHAAEIGDWCEPRVEMDKPVNIHVTGCHHSCAQHYISDIGLIGARVPVNEDDTVEGYHLFTGGGFGPDADVGQEVYHDLKAEDAPKTVEALLKAYIAHRASPDETFLSFARRHDGETLRKLADAQVSA

SEQ ID NO: 23561 - protein, 75 aa, Bradyrhizobium japonicum USDA 110
MLKDDPMNTGTVKWFNGQKGFGFIQPDQGGQDVFVHISAVERAGMSTLNEGQKVSFEIVADRRTGKSAAENLRAV

SEQ ID NO: 23562 - protein, 649 aa, Bradyrhizobium japonicum USDA 110
MFGLPLRCRAGLSALVVLTSQLVANAALASDFGLGRAHPTGQVAQGWELAQAEDDHAAHHPAASGSAGGAAGAPPGGATPGMMGGMDGMMGRPRKEFYPALMEMPSLSAEQRSNLEIQARERISAETDRLAGAEMDLRHAIAGSDIVAADQAARRLRESLNAVQSGVVALRSLHEGKPPQQIAQAWFKSQMNLLPQRGAMDADDGTPGVSWFHVTTMALLVLFSLAMLAVYLARMRRANALVDRLTRAAVAPAAAAPLVSPPAAGVPNDKPEATSSQETDRHPRRVEASRSWKGKLRICAIYQETPNVKTFRLQAPDGGAIPFAFLPGQFLTYAIEIDGQAVRRSYTIASSAAQTAYVETTIKREDGGLLSDYMHGHLKEGDLVEVAGPSGAFTFTGVEADSVVLIGGGVGITPLMAAIRYLSDIAWPGQIYLVYGAQTTEQFIFRDELEYLQRRMSNLHVAATMVRAAGTSWMGSEGQITAEFLTQAVPDLARRRVHLCGPPGMMDALRKTLIGLGVPREQIKTEAFGPARGAVPPPGKVAAEAQMPAAEASNRGAATVGPATATIRFATSDKVVALPPDKSVLEVAESAGVSIDYSCRVGVCGVCKTHLLQGNVTMEVQDALTADDKANGLILACQARSVGDLVVEA

SEQ ID NO: 23563 - protein, 558 aa, Bradyrhizobium japonicum USDA 110
MTEPVAAEVGRDFIRDIIQADLDQAKYREIVTRFPPEPNGYLHIGHAKSIALNFGIAQEFPGRCHLRFDDTNPVKEEQEYIDSIQADVHWLGFDWGKNLFFASDYFDRLYEWAETLIRDGLAYVDDQTQEEIRTSRGTLTEPGKNSPFRDRSVDENLDLFRRMKAGEFPNGARVLRAKIDMAAGNINLRDPVLYRILHAHHPRTGNAWCIYPSYDYAHGQSDAIEGITHSICTLEFEDHRPLYDWFIEKLPVPSKPHQYEFARLNLTYTLLSKRVLTQLVREGHVAGWDDPRMPTMAGMRRRGVPPAALREFVKRIGVAKANSVVDVGMLEFCIREELNRTAQRRMAVLKPLKVVIENYPEGQTEELEAINHPDDPSAGTRKITFGRELYIEQDDFMENPPKKFFRLSPGNEVRLRYAYFVKCTGVIKNESGEVVELRCTYDPATRGGNAPDGRKVKATMHWLSAAASKPAEIRIYNQLFANPSPDASNFAADLNPQSLEILSNARVEASVAESNSTEPMQFERQGYFVRDKDSTPGKPVFSRTIGLRDTFAKEVAKG

SEQ ID NO: 23564 - protein, 398 aa, Bradyrhizobium japonicum USDA 110
MSNRPRKALIIGAGIAGPVAAILLRRAGIESAIYEAWPYSKGIGGGLQIAPNGMHVMDEIGLSNELISRGSVAEAFDFYSQEGRKLGSINRDMQRRFGQPAVNVCRATLNEMLIDKAWCACVSLYFEKRLIKIEDRGDQPIIAYFADGTTAEGDFLIGADGVHSITRRQVVPDGPRPFDTGLIGFGGFVPHAVLDGRPIGRHVETTFGQSGFFGYGYCSPDPNDGVMWWSTQPAHGMDAAMFRALDAATLKQHLRGFHRGWHDPIPDIIEAAENIVVTDTLDVATLPTWSRKRSLLIGDAAHATSPHAGQGASLALEDAMRLARLMQDGQELGTTFQAFEAERRPRTEKTVAMARRNGNSKREFSATGAWMRNQMLKWLLPLGSKSMEFMYAYDARAV

SEQ ID NO: 23565 - protein, 308 aa, Bradyrhizobium japonicum USDA 110
MTVEASGEAPAATRCGFVALIGAPNVGKSTLVNALVGAKVTIVSRKVQTTRALIRGIVIENNAQIILVDTPGIFSPKRRLDRAMVSTAWSGAHDADLVCVLLDAKTGIDEEAEAILAKAASVNHDKILVINKVDLVQREKLLALAQAANERMPFAKTFMIAAISGDGVDDLRSTLAEMVPPGPFLYPEDQMSDAPMRHLAAEITREKIYRKLHQELPYQSTVETDKWEERKDKSVRIEQTIFVERESQRKIVLGKGGATIKSIGADSRKEISEILGVPVHLFLFVKVRENWGDDPDRYREMGLEFPKE

SEQ ID NO: 23566 - protein, 348 aa, Bradyrhizobium japonicum USDA 110
MTWNAGLPDSPARRLRETMRSGFKPPIVPAAFFGIVLGLAGLGNAWRAAHQVWHLPAIVGEILLALASIVWALLLVLFILRWILARAESLSEAHHPVQCCFIGLAGVSTMLIAIAAEPYSHLAAEILFGLGAAFTLGFALWRTGLLWRGNRDHTATTPVLYLPTVAGGFVTAAVSSVLGYPDWGQLAFGIALFSWLAIESVLLHRLYTVATLPVALRPTLGIQLAPPAVGAVAYLAINGGVPDMVAHVLVGYGLMMALLLLRLLPWIMEQPFSVSYWGFTFGATALAIAPIRMAGHGDTGAIALLAPWLFGAANIVVGLIALGTLRLILQGRLLPPVAAPPPTQAAPA

SEQ ID NO: 23567 - protein, 317 aa, Bradyrhizobium japonicum USDA 110
MADKVLIYSRFPKTMMARFAERFEMLDTGGKPVREVFSADELGGIRAMLTGGGTPLGAEAMDLFPNLGAIVCYGTGYDGVDLKAAAARDIAVGHSPGANAASVADIAMTLMLATTRRILVADQYVRSGDWAASKPSPMMRPQAGMPGRRIGVYGMGEIGRKIAARCAAFESEVGYFSRSKYDLAYQYFPTLEALADWCSVLMIAVRAGTETQHVVNADILGRLGADGYVVNISRGSVIDEKALVAALTDKTIAGAGLDVFEQEPHTPDALTALPNVVFAPHIGGHTLDSHVAMQNCVLANLTAFFAGKPLPYAVKSA

SEQ ID NO: 23568 - protein, 489 aa, Bradyrhizobium japonicum USDA 110
MGALLPRGQASRPRTRHGRSPQNDRRQEARDVTGRHLAMVQRPGKMARWVLCCECLRRPMDLTLRLATALLTASLLLPLRPAQAQLAGHGGPVRAIAVSSDGKTVLSGSFDTAAIRWSLATESAEQVLRFHSGAVNAAAFLGDGRMATAGADGQIAIWTAGGLQPDQVLEGHTGPIVGLVVSPDTSKLASASWDHTVRISSLSDGGTRVLQGHSQSVNGVAFAPDGKSLVSVGYDLTVRIWPLAGGSPEIVVMPAPLNAVAISPDGEIVTGAADGKLRMMTADGKENGEVMAGARPIVALAISQDGALIATGAIDGTVAIVDRKARSVMRTLAGLGAPVWSVAFLPDGATLLTGGADGKIRRWNALTGAAIGSNVLGTPADPLAAYVGDHGAEMFRACVACHTLSENEVQRAGPTLAGLFGRKIASLPGYRFTDALKAMDIVWTPETVSKLFEIGPNAYTPGTKMPEQRIGSAEDRRALTDFLARATSK

SEQ ID NO: 23569 - protein, 455 aa, Bradyrhizobium japonicum USDA 110
MTASDAGTAPWTGRLTGRGAGVSVLVATAIVVADMIGVGVFTSLGFQVKDIPSGFSILLLWSVGGIVALCGVFSYSELGAMFPRSSGEYNFLGRAYHPAFGFLAGWVSATVGFAAPVALAAMAFGEYAKSVVPDLPPIPLAIGVVWLVSLVQLTGVRHSSTFQLISTILKVVLIVAFLVAGFIIGVPQPIAFTPQPGDLAHIVSAPFAIGLVFVMYSFSGWNAATYIIGEMNMPQQNLPRALLAGTLIVLVLYVALNAVFLYSTPVGALAGQLDVASVAGSAIFGSLGGRIVGAMICVGLISSISAMMWIGPRVMMTMGEDIPALRVFSRKSTSGAPAYAILFQLAVATLLLFTRSFEAVLDFIQFALLFCSFFTVAGVIKLRITDPDLPRPYRAWGYPFTPLVFLLVTAFMMYYLLTERPVQSLSGMFVMLSGLLIYAVFRRRPVAAGTSHNRE

SEQ ID NO: 23570 - protein, 650 aa, Bradyrhizobium japonicum USDA 110
MSFPTMSPPLARALAERNYDRPTPVQLAVLTEEAAGRDLLVSAQTGSGKTLAYGLALAKDLLDGIERFERAGAPLALIVAPTRELALQVQRELAWLYEHADGRVVSCVGGMDPRREQRELAAGAHIVVGTPGRLCDHLRRGRLDISELKAVVLDEADEMLNLGFREDMEFILETTPETRRTLLFSATFPRGIVALAKQYQQQAFRIEVAGDEGGHADIEYRAIRIAPADVEHAVVNVLRFFEAPSALVFCSTRDAVRHLQAALLERGFSVVALSGELTQNERTLALQSLRDGRARVCVATDVAARGIDLPSLDLVIQADLPNDAEVMQHRSGRTGRAGRKGTSVLLVPPARRRRAELLLNLSGIDAVWGTAPQADEIRKLDHERMKDVLFTEETTADDLVLAQALLAERSPEDIAAALARLYRARLPSPEDIIDPGERAGRPRDDRGRDNVRAQGGDDRPERARPKSGKSSSKHGMAEGSVWFRANIGRRKNAEARWLLPMICRRGGIDKGDIGAIKIMDTTTEFEISERVADSFAAKIKRPDKEDNIRLEPMADAPQRQAPSEERSKPPRRESGDSDHRERRDDRPREAGFKPRSKAFGERGPKFDDASAFGKKKKHKNKPGHAGQPPAVTAWPVKGAPGKKAKKKHRG

SEQ ID NO: 23571 - protein, 400 aa, Bradyrhizobium japonicum USDA 110
MALSRTIVIAGAGIGGLTAALALAARGFRIVVLEKAERLEEVGAGLQLSPNASRVLVGLGLTERLKLRAVVPEAVSIMSARAGGELLRMPLGEAASVRAGAPYWVVHRADLQSALAGAVSDHPDIDLKLGATFEDVAPHAKGLTVVHRSGTIRRSDLASALIGADGIWSTVRQHLFPEVQPRFSGLIAWRGTLDATQLPKDYTARRVQLWMGPNAHLVAYPIAGGRQINVVAVLPGTWNRPGWSTPGDPREVMDAFAAPRWPSQARMMLAAVDGWRKWALFGVPDGCPWSKGPVALLGDAVHAMLPFAAQGAGMAIEDAAVLAQHLSPETAESTDGIVAALKQYGRARQARVRRVQRTARQQGRIYHFSGPLAIARDVAIRALGPERMLARQDWIYGWRP

SEQ ID NO: 23572 - protein, 110 aa, Bradyrhizobium japonicum USDA 110
MDMSIEEFIANEVKSNDVVLFMKGTPQFPQCGFSGQVVQILDHLGVGYKGLNVLESAELRNGIKTFSNWPTIPQLYVKGEFVGGCDIVREMFQAGELQQLLSEKGVAVAA

SEQ ID NO: 23573 - protein, 459 aa, Bradyrhizobium japonicum USDA 110
MSTFDNPFDPDRNLRAGCACGQHQSAAEHEQATAMRCAQIESEEKRYEGVVASAVMRAMFPQDVARRAFLKSVGASTALAALSQFFPLQTATEVFAQAGTPEKKDLKVGFIPITCATPIIMAAPMGFYAKHGLNVEVVKTAGWAVIRDKTINKEYDAAHMLAPMPIAISLGLGANAIPFAVPAIENINGQGIVLATKHKDKRDPKDWKGLKFAIPFDYSMHNYLLRYYLAEHGLDPDTDVQLRSVPPPEMVANLRADNIDGFLAPDNICQRAIYDGVGFMHLLSKEIWDGHPCCSFAASREFITTAPNSFAALTRAIVDATAYASKAENRKQIAEAIAPANYINAPVTVLEQVLTGTYADGLGGVKTDAKRVDFDPFPWQSFAVWMLTQMKRWGQIKGDVDYKAVAEQVYLATDTKKLMTEMGLSPPATAYKSFAVMGKTFDPAKPEDYLASFKIRKAL

SEQ ID NO: 23574 - protein, 250 aa, Bradyrhizobium japonicum USDA 110
MPGLTVEPAMHRANSAIAAGVMLAESDNLVRPLPGLLDGLSRADCNRLRAIGREKALEAGQLVWSQGDTQAGIYLISEGRIRSYYAAPSGREVTLAYWFPGNFVGGPDIFGTGPHMWTSVAAERSRLTFMPGPALRRLALESPTIAVALLDALAFKARCYSAMAQMLGTRSVTERLHSLLIFLSHVYGMKRGGEIVVGMPFTHGDLANLIGSTRQWVTVQLARLQEEGVIRYDRSVISILDLSTLGQGME

SEQ ID NO: 23575 - protein, 496 aa, Bradyrhizobium japonicum USDA 110
MLTNVDSAAFAVFLALFVLVTGMGFVAARWRKPETLAHLDEWGLGGRKFGTWITWFLVGGDFYTAYTVIAVPALVYAVGAYGFFALPYTIIVYPFVFAVMPVLWKVAKERGYVTAGDVVRGAYGSRGLELAVAATGVLATMPYIALQLIGMEVAIKALGLSGEVPLVVAFLVLALYTYSSGLRAPALIAFVKDIMIYIVVIAAIAIVPSKLGGYGAIFTAADAAFAAKGSGGILLSPAQIMPYASLALGSALAAFMYPHTLTGIFASSGGNTIRKNAMLLPAYTLLLGLLALLGYMGHAAGLKLASNNDVVPALFKTLFPSWFAGFAFAAIAIGALVPAAVMSIGAANLFTRNFWKVWIDPKVTPSGEAKVAKITSMLVKVGALLAILLMPTQFALDLQLLGGLWILQTLPALVFGLYLNWFSSTALLAGWAVGLAGGSWLAWSDGLKPLHGIDLGAGPVAIYTGLLALALNIVVAVVVNLVLKRMPQERLSREAA

SEQ ID NO: 23576 - protein, 407 aa, Bradyrhizobium japonicum USDA 110
MLPEEHLMLRQAVILVGGLGTRLGERTKARPKPMLEIGGRPFLDTLIDELDRYQIFDEILLLAGHKAEIVETHYAGATRGRAKIVVSRETEPLGTGGALVHAAPLLDQHFLLLNGDSLFDFNLLDLIARAQGGRVHMALRDGVVGDRYGRVVLDGDIVRDFIAPGAGATGPVNAGIYVVDKSIIAEIAKLPASLEQDVFPGLVRSGELRGTAYRGYFIDIGIPDDFARADRELREKLQRPAVFFDRDGVLNHDSGYTFETHKLEWIEGAREAVKAVNDAGYFAFVITNQSGVARGYYEEHHVLALHRWMADQMALIGAHIDAFEYCPDHPDGTVARYCRISDRRKPAPGMITDLAQRFSVDMTRSMVVGDKDSDMAAAQAAGLAGHMFEGGNLEAFVKQRLKPADKG

SEQ ID NO: 23577 - protein, 612 aa, Bradyrhizobium japonicum USDA 110
MCGIAGIVNLRGSAVEPDDISRLTGLIAHRGPFGQGTWFSADRSLAFGHRRLAIIDPGEGGYQPMRSADGRHVIVFNGEIYNFLELRRELEAQGVVFRSQSDTEVILAAWQAWREDMLPRFNGMWALAIFDTATGELFLARDRFGIKPLLYAVSPERFIFASEQRALVRSGLIDASVDVEVARRLLLDAFGIEGSERTLFRQVRRLQGGHCMWLRQGKVSVRRWWRTVDHLPPVPGTEAEQVARFRELFQDAVALRMRSDVPIGTCLSGGFDSSAVICTMAAHEKAGMGPRDSTAWRHAFVATFPGALNDERPMAEEAAAWAEVAPTFLEIGQADALIDLDQILDDLDDVYIALPSAIWLIYRQLRRQDVTVSLDGHGADELMGGYLQQGQALAFRIRNAAEDFASRSALARRSVDVLRMLALKRRGVYFLRGGLRDLPASLPLVAEDDVLPREWGGLNRRLYRMFHSTVLPTILRNFDRLSMAHGVEVRMPFMDWRLVTYTMALPESSKSSEGYTKAVARRAMANLMPESIRTARRKVGFNSPMPEWLNGPLAGWTADLLDRKVPAFAELVDEAALRTTVSRLTASKSWDWEAVGRIWPYLNMKWMLARYA

SEQ ID NO: 23578 - protein, 242 aa, Bradyrhizobium japonicum USDA 110
MPQDKTGDPRQSAANKLSVLRKHPIFADLEPDALDQLCRYAKHTTVKRGATIAAKGDPGNNLFAVISGTVKISSSSPDGRNAILNLIGPGEIFGEIAVLDGAPRSADATANTNCELYIIDRRDFLPFVKSQPALAMKFIELLCARLRWTSQQVEQVILQNLPGRLASALLGLTEERKFDSGSGTLAITQQEISEMVGMTRESINKQLRAWAGRNWVRLEHGAIVVLDTDALRELAESGLGGE

SEQ ID NO: 23579 - protein, 313 aa, Bradyrhizobium japonicum USDA 110
MTLCCDRRRQPMADASKANPQRDERFGYLGLGLMGTPMTRRLLKAGYQVSVWNRSEGKVVPIVEAGARHGASPRDVMAGSDIVFMCVTDAAAVEEVIFGAEGLSTAPGAGKLVVDFSSIHPDAARDLATRLKAANGAGWIDAPVSGGTKGAEEGTLAIMAGGDASDIERVRPYVLTMARRFTHMGPTGAGQTAKLCNQVIVGCAMAVLAEATRLAVNAGIDANRLPEALAGGFADSIPLQLFVPRMVQGIHSPPLGHIATMLKDLDTVADVAQTTSTPVPMATLAGQLFRLAKAARGADADALEIYKLSATEY

SEQ ID NO: 23580 - protein, 492 aa, Bradyrhizobium japonicum USDA 110
MPGAALLIAPSIPTAPVTPAILDRLRAIVGDKGLILDEQDKRPFVTDWRGELTGQAAAVVRPANTAEVSAVVKLCYDNGIAIVPQGGNTGLMGGATPWPAHRGIVLSLGRMNHVLNVDPVGYAMTVEAGCILQTLQDTAARHDRFFPLSLGAQGSCMIGGNLSTNAGGVQVLRYGNARNLVLGLEVVLANGDVWDGLRALKKDNTGYDLKHLFMGAEGTLGIITKAVLKLWPAPKDLCTAWLAIRDPRAAIELLSEAHAASDDNVGSCELMSRACTDMVLRHIPGTQDPLKAETEWYLLLEWSSARPRQDGGTGMPDRMEQFLADQLEAGRVLDAVIAQTEAQSRNMWRIRESVADASRAEGPGLSYDVSVAISRIPEFIDRGLKAVLDILPTIRPYPLGHIGDGNVHFSFMGPKGMDRDMLNQYSAAITRVVNDLITSMAGSISAEHGIGIEKLDELQHYRSRTELDIMRTIKRALDPKNIMNPGKMLRLG

SEQ ID NO: 23581 - protein, 625 aa, Bradyrhizobium japonicum USDA 110
MCGIFGWVLAAAKHQNRDTLIGLTDLMSHRGPDASGYWLHQTSDERYQIGFGHRRLSIIDIGGGAQPMATEDGRFNLVFNGEIYNYLELRKELVALGHHFRTDSDTEVLIEAYRAWQLDAVRRLRGMFAFALWDDAEQRLVLARDAFGKKPLFLAEAQGAVLFGSEIEPLVQFPGFSRALDSDAIGHYLLNRYVPGPSTFFQSVKKLQPGHCAVWQNGMLKSTRYYTPPFATTVPDVKDFNSAIRLFEGAFDEAVRIRMRSDAPYGAYLSGGIDSSAVVATMVKHSTEPVRTFSVGFRETGYSELDHARVIAGQFGTIHNDLIVEPSAFMDHWSTAALRRGAPVSEASDIPIFMLSEMASRSVKMVLTGEGADELMGGYPKYRAERWIGLYQWLIPHLLHERLIHPLVRSLPYGMRRAKIVALAAGERDLANRMRVWFGGLSVGESEAMLGRLLSATPPDLFPYSSQIGSSLRRTLFFDQTSWLPDNLLERGDRMMMAGSIEGRMPFMDTVLAGVVARFPDDFLTGGKGGKRVLRAAMDKILPSEIIRRKKIGFRVPIGEWFRGPYREFLRDMLVSETSAVAQMVRGDRLRQLVTEHLDARQNHERLLWSFVNLEIFVRAFRVAS

SEQ ID NO: 23582 - protein, 591 aa, Bradyrhizobium japonicum USDA 110
MSDKSHDPNQMTGAAMIVRALIDHGVTDIFGYPGGAVLPIYDEIFQQSEVQHILVRHEQGAGHAAEGYARSTGKPGVALVTSGPGATNMVTPLTDALMDSIPLVCISGQVPTHLIGNDAFQECDTVGITRPCTKHNWLVRDVNDLAKVLHEAFYVATTGRPGPVLVDVPKDVQFATGTYHPPRKSDVHRSYAPRVKGDATQIRKAVSLLANAKRPVIYSGGGVINSGPEATKLLRELVEVTGFPITSTLMGLGAYPASGKNWLGMLGMHGTYEANMTMHDCDVMLCVGARFDDRITGRVDAFSPGSKKIHIDIDPSSINKNIRVDVPIIGDCGNILGDILQVFKAEAKKPDVKAWWQQIAQWRARNSLYYKKSNDIILPQHAIQSLFEATRGRDTYITTEVGQHQMWAAQFYGFEEPHRWMTSGGLGTMGYGLPAAVGVQVAHPDSLVIDIAGDASVQMTIQEMSTAVQYELPIKIFILNNQYMGMVRQWQQLLHGNRLSHSYSEALPDFVKLAEAYGGVGIQVHKPSDLDGAIQEMISVKRPVLFDCRVAALENCFPMIPSGKAHNEMLLPEQANDEATAKAFAGGKALV

SEQ ID NO: 23583 - protein, 557 aa, Bradyrhizobium japonicum USDA 110
MPHDSHAKHAWPLFRSLASYSLPGDLMAGLTLAAIAIPEQMATARLGGFAPQIGFFAFMAGSLGFALLGGNRFLSCGADSTITPIFAGGLAALAAVGSPQYQGYAVALALMVGMMMLAGGAFRLGGIANLLSVPVMVGFLAGISVHIIVSQLPGVLGLKSPSGPTLDRIGVLAGELSRSNPFTLCIGLGVLATVFVSEKISAKIPGALIGLVAATLATIGLGLEGEGVSVVGSVPGTLPRLTLPELAPEHWVHLVSLAFVITVVVMVQTAATTRSFPSDPDKPADVDRDFLGAGAGSVLSGLFGAFPVNASPPRTGIVAETGGQSQLAGLAAAAIVLALLAFGTGLLQHVPDAALGGILLFVALRIIRVKQIVTIYRQSFSEFLLIAATAALIIVLPIQQGAFLGIMLSLLHGIWSTTRARLVEFERVPGTTIWWPAHPHIAGERIEGVAVIGLQAPLSFLNAPGFRSDVTKVLGAATPQLLVLEASGMVEIDFTAAQILLDVFKACSEQGVTVALARLESVRAQNAFERFRLFDALPREHVFHSVDEAVRKLAKVQ

SEQ ID NO: 23584 - protein, 553 aa, Bradyrhizobium japonicum USDA 110
MTIRNTRTGGQILIDQLVAQGVERVTCVPGESYLAALDALHDSPIDVMICRAEGGAAMMAEAYGKLTGRPGVCFVTRGPGATNASHGVHIAMQDSTPMILFVGQVDTGMREREAFQELDYKAVFGTMAKWAVEIDRPDRIPELVARAFRVAMQGRPGPVVISLPENMLTETAAVADAMRIEPAVSWPAPADIERVGAMLASAKAPLVILGGSRWTDEATKSIARFAERFDLPVATSFRRASLIDADHSHYAGDLGIGPSAGLKARIDGADVVLLIGGRMSEMPSSSYTLLDIPTPQQKLIHVHPGSEELGRVYQPALAIQATPAAFAAAVETLKPSGAVAWKGEAAKAHADYLAWTEKARELPGTFQYGQVMTWLRDRLPKDAIVCNGAGNYAGWIHRHHRFHSFASQLAPTSGSMGYGVPAAVLAKRQYPDRTVVAFAGDGCFLMNGQEFATAVQYDAPLVVIVVDNSQYGTIRMHQERDYPGRVVGTQLKNPDFAMYAKAFGGHGERVERTEEFAPAFERALASGKPSILHCIIDPRAISVGKDFVPSVKA

SEQ ID NO: 23585 - protein, 296 aa, Bradyrhizobium japonicum USDA 110
MTRATTDNRTRTEEGMMTNARTTGLNRRRLLALGAATIAAPFVLTRAAYAVTPSEIKARGKVLIGIQGDNPPWGFVDATGKQDGYDAEISALFARELGVPAEFTQLAVANRIPALTSGRVDILFATMAMLPERAKAVQFSKPYGANIITFIAPKEFEIKSPADMGKYVIGVARGSVQDSDVTKAAPSGTTIRRFDGDAPTMQALLSGQVQAVGGNIFYVPRLDESKPGYYENKLEFTKLYNGACTRLGEKEINAFANDFIEKIRANGELAKIYQKWMNNPLPAFPDTIPGIPFNVS

SEQ ID NO: 23586 - protein, 387 aa, Bradyrhizobium japonicum USDA 110
MVKPATGDCTHAPRFRVKDAKARREGRAATRTDKPNREQEMPKYRVVTPKGASFTVAGSDYSYEREALDPIDAEIIEAPANEAEFIAAAKNADAIYAKGIPITKSIIDALESCKVITLGSVGVDSVDVKAATARGIPVTNIPDTFIEEVADHAMMLLLAGFRRLVEQDRMVRSGRWAEGRPALLKIPRLMGQTLGFISFGRVARAVAKRAAPFGLRMMAYDPFIQETLMYDHGVIPATLNEVLSQSDFVSMHAPARPEVHHMLTEKHFRQMKKGSIFINTGRGATVDEESLIKALQEGWIAHAALDVLEKEPPSHNNPILSMENVTLTAHVASASARFDEARKRRVGYELSLVLQGMWPVSCVNPSVLQSTALRRWQPVSMDRGPNS

SEQ ID NO: 23587 - protein, 236 aa, Bradyrhizobium japonicum USDA 110
MAKVDTSLVAHLPLFAGVTPEALDEILREARSARYPKNSAIFEQGADAQSFFLLLHGHVRAAKTTPTGEQIVVRYVAPGETFGLAMAIGAGRYPATAMAVDDSVVLIWPTSAWPRLVERFPALAANTLQTVGTRLQESHTRILEMSTQQVEQRIAHALLRLAKQSGKKLDHGIEIDFPISRQDIAQMTGTTLHTVSRILSGWEQQGLVESGRQRIILREPHRIVVLAERSPDSGAP

SEQ ID NO: 23588 - protein, 386 aa, Bradyrhizobium japonicum USDA 110
MRAFSRAAGGPMKIAVAKEIDPSEPRVAASPDTVKKFKALGAEIAVEPGAGLKSGLPDSEFTAVGATVSTDALKDADIIIKVKRPEASELAQYKRGALVIAIMDPYGNDAALKAMADAGVSAFAMELMPRITRAQVMDVLSSQANLAGYRAVIEGAEAFGRAFPMMMTAAGTVPAAKVFVMGVGVAGLQAIATARRLGAIVTATDVRPATKEQVESLGAKFLAVEDEEFKNAQTAGGYAKEMSKEYQAKQAALTAEHIKKQDIVITTALIPGRPAPKLVSGEMVKSMKPGSVLVDLAVERGGNVEGAKPGEVVDLDGIKIVGYTNVAGRVAASASSLYARNLFSFIETMVDKKEKKLAVNWDDELVKATALTKDGAVIHPNFQPKV

SEQ ID NO: 23589 - protein, 640 aa, Bradyrhizobium japonicum USDA 110
MNANLRNFALWVIIVLLLLALFTLFQNPGQRASSQDIAFSQLLSEVDRGNVRDVVIQGPDIHGTFTNGSSFQTYAPNDPTLVKRLYDSKVQITAKPPGDNVPWFVSLLVSWLPFIALIGVWIFLSRQMQGGAGKAMGFGKSRAKMLTEAHGRVTFEDVAGVDEAKQDLQEIVEFLRDPGKFQRLGGRIPRGVLLVGPPGTGKTLIARAVAGEANVPFFTISGSDFVEMFVGVGASRVRDMFEQAKKNAPCIIFIDEIDAVGRHRGAGLGGGNDEREQTLNQLLVEMDGFEANEGVILIAATNRPDVLDPALLRPGRFDRQVVVPNPDVVGREQILKVHVRKVPLAPDINLKTIARGTPGFSGADLMNLVNEAALTAARRNKRMVTQAEFEEAKDKVMMGAERKSLVMTEEEKLLTAYHEGGHAIVGLNVPATDPIHKATIIPRGRALGMVMQLPERDKLSMSLEQMTSRLAIMMGGRVAEELIFGREKVTSGAASDIEQATRLARMMVTRWGLSEELGTVSYGENQDEVFLGMSVSRTQNASEATVQKIDSEIRRLVEEGYKEATRILTEKHGDLEALAKGLLEFETLSGDEIVDLLKGKKPNRESVLEPTTPRASAVPPAGKSRPRPDPDPGLEPQPQA

SEQ ID NO: 23590 - protein, 67 aa, Bradyrhizobium japonicum USDA 110
MMAKGTVKWFNPTKGYGFIQPASGGKDVFVHISAVQKAGLSTLNEGQTVEYEEIANRGKTSAENLKV

SEQ ID NO: 23591 - protein, 529 aa, Bradyrhizobium japonicum USDA 110
MTKPKVLISDALSPAAVQIFKDRGIEVDFQPNLGKDKDKLAEIIGNYDGLAIRSATKATAKILEKATNLKVIGRAGIGVDNVEIPAATAKGIIVMNTPFGNSITTAEHAITLMLALAREIPQADASTQAGKWEKNRFMGVEITGKVLGVVGCGNIGSIVADRALGLRMKVVAFDPFLSPERAKDIGVEKVDLDDLLKRADFITLHTPLTEKTKNIIDAAAIAKMKKGVRLINCARGGLVDEQAVVDALNSKHIAGAAFDVFVEEPANTNVLFGHPNVICTPHLGASTTEAQENVALQVAEQMSDYLLTGAISNAVNFPSITAEEAPKLKPFIALAEKLGSFAGQLTESGILKVEITYEGHVAEMKIKAITSAVLSGLLRPMLGEVNVVSAPVVAKERGMVVDEIVRAAQSDYESLITVTVATERQERSVSGTVYHDGKPRLVDVKGIRVDAEFGKSMIYVTNEDKPGFIGAFASLLGAAKLNIATFHLGRVKLGGDAIALVEVDGAVPADVLAKVQALPQVKQAKALTF

SEQ ID NO: 23592 - protein, 410 aa, Bradyrhizobium japonicum USDA 110
MGHDACQEMTMSFLAAALDRVKPSATIAVTDKARALKAAGRNVIGLGAGEPDFDTPANIKLAAIHAIEAGKTKYTAVDGIPELKEAIIAKFQRENGVVYKPNQVIVGTGGKQVLYNALMATINPGDEVIIPAPYWVSYPEMVALAGGEPVPVVCTAATGFKLGAEALERAITPKTKWVILCSPSNPTGAAYTRAELKALTDVLVKHPHVWVMTDDMYEHLVYDDFQFTTVAQVEPSLYDRTLTVNGVSKAYCMTGWRIGYAGGPAQLIKAMATIQSQSTSNPCSIAQWASVEALNGPQDFIPANNKVFKERRDLVVSMLNQANGIECPRPEGAFYVYPSCAGTIGKKAPSGNVISNDEQFVTELLETEGVAVVQGSAFGLGPAFRISYATKTSDLEDACKRIQRFCGNLR

SEQ ID NO: 23593 - protein, 331 aa, Bradyrhizobium japonicum USDA 110
MLNVLSSKAREEASMSAKNGSIKLVAGNSNPALAQAIAQGLHLPLTKAVVRRFADMEIFVEIQENVRGSDAFIIQSTSFPANDHLMELLIITDALRRSSARRITAVLPYFGYARQDRKSGSRTPISAKLVANLITQAGVDRVMTLDLHAGQIQGFFDIPTDNLYAAPLMVRDIKDKFDLSKTMVISPDVGGVARARGLAKRINTPLAIVDKRRERPGESEVMNVIGDVAGYTCILVDDIVDSGGTLVNAADALIAKGAKDVYAYITHGVLSGGAAARITNSKLKELVITDSILPTDAVSKAPNIRTLPIASLISDAIARTAAEESVSSLFD

SEQ ID NO: 23594 - protein, 71 aa, Bradyrhizobium japonicum USDA 110
MAMTGTVKFFNGERGYGFIKPDDGGRDVFVHITAVERAGLKDLAEGQRITFEVEPDKKGKGPKAVNLVILS

SEQ ID NO: 23595 - protein, 334 aa, Bradyrhizobium japonicum USDA 110
MTSNPWLTLLGLINGFQVTQAIHVASTLRIADHLKGDSRSAEELAPLTQSHPGALYRLLRALAAVGVFEEDEDRRFALTPMGDCLRTDSATPIGAWAECVGSPYVWSTWGHLLHSIRTGENAFQSLNGKDIWNYRAERPEESAVFDRAMTEFSRGGAEAVIGAYDFSAFHHVVDVGGGRGLMLAAILTAHPRMQGTLFDQPGVIAGAEAVLEAHGVVDRCRMVSGSFFESVPEGGDAYVMRVVIHDWDDDEAIAILKACRRAMRETAKLVLIERIIAPANEVPATKFMDLHMLALPGGRERTRDEFSDLLAKSGFELTRVVPAGRINVIEARPY

SEQ ID NO: 23596 - protein, 370 aa, Bradyrhizobium japonicum USDA 110
MVNDPLRVGAAASPHTPRRAKQAPTGHRPSSLDLNMPSSKPLMTQSSGPIPASVESALRTLETESGGINALAAALRGPLGATFAKAVDMIRQAKGRVIVTGLGKSGHMGRKIAATLASTGTPAFFVHTAEAAHGDLGMITADDVIMALSWSGEQPEMKTLVNYSARFAIPMIAVTSNAASSLGQAADLVIELPKAREACPHNLAPTTSTLMQAAIGDALAIALLEGRGFTALEFAHFHPGGKLGAMLKFVRDYMRTGAEIPVKPEGTKMSEAVVEMSAKGLGCVCIVNDANEAVGIITDGDLRRHMRPDLLTVSVDDIMTRQPKSVPPSMLATEMIEVLNTRKITTLLVTEAGKVVGIVHLHDLLRAGVA

SEQ ID NO: 23597 - protein, 390 aa, Bradyrhizobium japonicum USDA 110
MAEAYIVAAARTAGGRKGGRLAGWHPADLAAKVLDELVDRAKIDPALVEDVIMGCVMQVGEQSNNVARNAIMASKLPESVPGTSIDRQCGSSQQALHFAAQAVMSGTMDVVIAAGVESMTRVPMGLSSQLPAKNGFGNYKSPGIEARYPNIVFSQFTGAEMMAEKYGLSKNELDEYSFNSHQRAIAATQAGHFKKEIVPLEITRADGSKDTHHIDEGIRFDATLEGIKGVKLIAENGKLSAASASQICDGASGVMVVNERGLKQLGVKPLARIHHMTMMGGDPVIMLDAPLHATKRALEKAGMTIGDIDLFEVNEAFASVPTAWLKTTGADPERLNVNGGAIALGHPLGGSGTKLMTTLIHALHQRGKRYGLQTMCEGGGMANVTIVERL

SEQ ID NO: 23598 - protein, 375 aa, Bradyrhizobium japonicum USDA 110
MLNATEGATLLGHAIGEAVARAKVDPKEVEDVVMGAALQQGATGGNIARKALLRAGLPVTVAGTTIDRQCASGLQAIALAARSVIFDGVEIAVGGGGESISLVQNDKMNGFHAQDPALLKIKGEVYMPMIDTAEIVAKRYGISREKQDEYSLESQRRTAAAQQGGKFKDELAPITTQMAVTDKATGAVSFKEVTLSQDEGPRPETTAEGLAGLKPVRGEGFSVTAGNASQLSDGASATVIMSDKEASKRGLKPLGIFRGFVSAGCEPDEMGIGPVFAVPRLLKRHGLTVDDIGLWELNEAFAVQVLYCRDKLGIDPEKINVNGGAIAVGHPYGMSGARLTGHALIEGRRRKAKYAVVTMCVGGGMGAAGLFEVLQ

SEQ ID NO: 23599 - protein, 498 aa, Bradyrhizobium japonicum USDA 110
MSDIMLSLRKATKLYAGVPAIDGVDFDLRRGEIHALVGENGAGKSTLTKVMAGVVTLTSGAMTVDGADVAPRTPLEARNLGIAMVFQENSLVPTMTVAQNLFLGQEKFYNRLRGIYIAAQQFLQSLNFDVTPTATVSGLGAAKKQMVEIARAVLHRAKVIIFDEPTASLTPEEKKYFFDLVRDLRKRGVSIVFISHALEEALLLADRITVLRDGKHVVTDDAAKFDRAAIVQAMVGRDLSNTLYGARKRSVRPAGPRVLTVQNLKMAPMVKNNSLSVFAGQITGVFGLVGAGRTETFKIVSGVLKRDFFHGGEILLHDKPVRYRVPAPAVKAGIAYVTEDRKVEGFFETSSIARNIYLGLLSKFPKGRMMLSRRETETIGKTWIEKLRVRAIGDHGKVVELSGGNQQKVVIAKSLVQEPDLIIFDEPTRGVDVGAIVEIHELINQLADEGKAVVVISSYLPEIMALSDRILVSRQGKVVEEFSALDATEERIMYAAIH

SEQ ID NO: 23600 - protein, 432 aa, Bradyrhizobium japonicum USDA 110
MHRPRFMSCGKAAILGDSMPAPGQSPERSAKALLLEGVNDSAVDLFRSAGFANVERLTKALDGEALRQALKGVSLLGIRSRTQITDDVLAAADQLLAVGCFSVGTNQVDLLAARKRGIPVFNAPFSNTRSVAELVIGEIVMLLRQIFPRSVSAHDGGWDKSATGSREVRGRTLGIIGYGNIGSQLSTLAEAMGMRVIYYDRTDKLRHGNTEPVEKLEELLAQSDVVSLHVPETPETSGMIGEKELRAMKPGSFLINNSRGTVVDLDALARALRDGHIAGAAIDVFPVEPSSNSDRFKSPVQGLGNVILTPHIGGSTEEAQERIGGEVARKLVDYFITGSTMGAVNFPEVQLHLRPSGARFSHVHRNVPGMLRRLNEVFLQRDINIAAQYLETAGDLGYVVLDADLGGQDSGELLQQIRALDGTVGARLVFEH

SEQ ID NO: 23601 - protein, 616 aa, Bradyrhizobium japonicum USDA 110
MMTDNRNTILAVILSGLVLIAWQYFYNVPAMEKQRAQQQAQAELQKTTPQPTASATPGATPQSGGAAQPSTPAAGQQAQPVVARDAAIAASPRVKIDTPRIAGSISLKGGRIDDVALVQYRETVDPKSPPIVLYSPSGTAEPYYAEFGWVPATGVTAKLPDAQTLWQQDGSGSLTPTTPAVLKWDNGEGLTFRRTISVDDHYLFTIKDEVSNVGNAPVTLYPFALISRHGTPQVSGYYILHEGLIGYLDGLQEYAYKKIDEAKSVNFKATNGWLGMTDKYWASALLPDTSAQLQARFSSNPVGNVHTYQTDYLLDPVTVAIGGSATANARLFAGAKEAGVVGINFPLAGHGGYNKELNLNHFDLLIDWGWFYFITKPMFLGLDFFYRFFGNFGISILLVTVIVKLLFFPLANKSYASMAKMKSIQPQLQALKERYPDDKVKQQQEMMEIYRKEKINPVAGCLPVVIQIPVFFSLYKVLFVTIEMRQAPFYGWIKDLSAPDPTNLFNLFGLIPLDPTTIPVFGHYLALGIWPIIMGITMWFQMKLNPTPPDPTQQMIFNWMPLIFTFMLAGFPAGLVIYWAWNNTLSVLQQSFIMRRNGVKVELFDNLKATFARKAT

SEQ ID NO: 23602 - protein, 67 aa, Bradyrhizobium japonicum USDA 110
MAIGTVKWFNPTKGYGFIQPDSGGNDVFVHISAVEKAGFTSLAEGAKVSFDIVKNRGKESAENLRIE

SEQ ID NO: 23603 - protein, 150 aa, Agrostis stolonifera var. palustris
MSIVRWSNVFDPFSLDLWADPFDAFRSILPAASGNHDTAAFVNARMDWKETPEAHVFKADLPGVKKEEVKVEVEGGNVLVVSGERKGEGGQERQVATLERSSGKFVRRFRLPENAKVEEVKAGLENGVLTVTVPKAEVKKPEVKAIEISG

SEQ ID NO: 23604 - protein, 233 aa, Agrostis stolonifera var. palustris
MAAANAPFALVSRLSSPATRLPARAWRAATQRRGAGRTRPLTTASASQENRDNSVDVQVSQNGGNQQGNAVQRRPRVPDLTSLRSGWWTRCHPCEPCGRCWTRWTGCSTTPWGSPRQPFSGDGERAPRMPWDIMEDDKEVKMRFDMPGLSRDEVKVMVEDDTLVIRGEHKKEVGEGQGDGWWKERSVSSYDMRLSLPDECDKSQVRAELKNGVLLVTVPKTETERKVIDVQVQ

SEQ ID NO: 23605 - protein, 396 aa, Salmonella enterica subsp. enterica serovar Typhimurium
MLDAQTIATVKATIPLLVETGPKLTAHFYDRMFTHNPELKEIFNMSNQRNGDQREALFNAIAAYASNIENLPALLPAVEKIAQKHTSFQIKPEQYNIVGTHLLATLDEMFNPGQEVLDAWGKAYGVLANVFIHREAEIYHENASKDGGWEGTRPFRIVAKTPRSALITSFEFEPVDGGTVAEYRPGQYLGVWLKPEGFAHQVFRQYSLTRKPDGKGYRIAVKREDGGQVSNWLHHHASVGDVVHLAAPAGDFFMNVAADTPVSLISAGVGQTPMLAMLDTLAKEQHTAQVNWFHAAENGDVHAFADEVSELGRTLPRFTAHTWYREPTEADRAQRLFDSEGLMDLSKLEAAISDPAMQFYLCGPVGFMQFAAKQLVSLGVNNENIHYECFGPHKVL

SEQ ID NO: 23606 - protein, 314 aa, Bacillus coagulans
MNILLMVRTPFIEAVPDFVKNLNRLGNVTILDTDNGIEKEKLKQAVREVEVIITAVVQIDKEIIDAAPNLKYIMKFGAGYDNIDFKYAREKGIPVTNTPGQNADAVADLAIGLMLATARNIPAKNEELRNGNWELSMGIEIFQKKLGIIGFGAIGQAIAQRATGFQMEVLAYGTFQDQTIADRLNVEFVDLNKLLNESDIVVVSTTLRKDNYQLINAKTLNEMKKDALFINVSRGALVDEDALYKALTNGKIKGAGLDVFVEEPSHHPLLTLPNTTVTPHIGAATNEAIKRTGSVALENVQRLKNDLPLLYVVN

SEQ ID NO: 23607 - protein, 260 aa, Lupinus albus
HFHDCFVNGCDGSILLDDTSSFRGEKTAPPNNNSVRGFEVIDAIKSKVEEACPGVVSCADIVAIAARDSTAILGGPYWNVKVGRRDSKTASFSDASSGVIPPPFSTLSNLISRFQAQGLSIKDMVALSGAHTIGKARCSSYRDRIYDDTNIDKLFAKSRQRNCPRKSSGTVKDNNVAVLDFKTPTHFDNLYYKNLINKKGLLHSDQELFNGGSTDSLVTTYSNNEKAFNSDFVTAMIKMGNIKPLTGSNGQIRKHCRRAN

SEQ ID NO: 23608 - protein, 552 aa, Methanosarcina barkeri
MSEHESASLVKTLRPFHVWALGVGIVLVGEYMGWNFTVAKGGVLGSLLAMLVAGTMYVIISLCASELGSATKLAGGPYDWARLFIGPGAAASVGLAVYMEYIALEAADAIVVASISQSIFPELQVYPVTLLVIALLTFINYRGVVAALTLNFVLTMIAFIAILAFFFSTAFGIGDIHPEYLLQGALPNGMIGLFAALQFGPWFYLGIEGAAMCAEECKHPSRAVPLGQQAGMITLLIGAAMTLYLCSVLIPADLLGVSVYPLFEAAQNSGVFIFVALLGLGTFLTCVASANGCVCDSSRLLVCSLKRQLRVIRFSAVHPKYNTPYRAVIFTVPVAIGFAFSGYLDQVITFSIVSGLLCYVLIPFSLIRFRKLFPETTSKVRPFVGPLQPYIAYFAIAIAITILSTLFWGYKYNLIFAFVSTVLRTSISATNTRNQTLKITGLKWAGPYPKAREIERSRRRQLALETNDQALESKYHSKLTGDTALVVGMLALLICVEGFIAYKILSETWEIASGFFYLYVIFIGLIVLIETIGCLKVRESIKTHMFEFKYYD

SEQ ID NO: 23609 - protein, 367 aa, Staphylococcus epidermidis ATCC 12228
MSKFIYQSPGRYVQGKGIVSSIAEETERLGSHALIIADEVVWNITEEKIKESFSANNNVDFEYEVFKGESSEEEIQRIVKQYKEKNIDVVIGLGGGKALDTGKAVAFELKASVIDFASTASMDAPTAAVSVIYNEDGSFSGYEFYPKNPDTVIVDSEIVAQAPVRLFASGMSDGLATLIEVESTLRRQGQNMFHGKPTLASLAIAQKCEEVIFEYGYSAYTSVEKHIVTPQVDAVIEANTLLSGLGFENGGLAGAHAIHNGFTALEGDIHHLTHGEKVAYGILVQLVLENAPTEKFMKYKTFFDNINMPTTLEGLHIENTSYEELVQVGERALTPNDTFANLSDKITADEIADAILTVNDLSKSQFN

SEQ ID NO: 23610 - protein, 530 aa, Staphylococcus epidermidis ATCC 12228
MKNKRKINNTLVYTISVLIIVVITLIAGIFPKAFGMYAQSVYDWITNWFGWLFLIIVFILDVFLIFLAFSRYGRFKLGSDEEEPEFSMLSWIGMLFSAGLGVGIVFWGVAEPLTHYLHSPFPGKIADHSEESARVAMGYTFFHWGISQWSIFAISGLIVAYFQFRKQRNGLISTAMEPVFGEAYKRPFRNIIDILAIIATVMGIATSIGLGIMQIGGGLNHLFDVPNNNFTKILITILMVAIFLGSSLTGLNHGVKWLSNLNILLGAILLIFILIFGDLKFILESYTLAISDYLQHFIEYSLRVNPYSGDDSWIQQWTVFYWAWVISWSPFIGGFVARVSRGRTIREFVVGVLIIPPLISFTWIAGFGGTAIKLALNHNDKLVHIVDKDYTVALFELLSHFPLSEVTSSLAIVLIFIFIVTSADSTTHIVAGMATGGSINPTLKHKVLWGLLIGAISVAMTIAGGLKSLQTASVITGLPFSIILLLMIFSLMRALKREPIHHFKMTSIDDEKDYSISLEEREKQDEQDNK

SEQ ID NO: 23611 - protein, 329 aa, Staphylococcus epidermidis ATCC 12228
MADLLSVLQDKLSGKNVKIVLPEGEDERVLIAATQLQKTDYVSPIVLGNEDNIKSLASKHALDLTQIEIIDPATSELKDELVDAFVERRKGKATKEQAVELLDNVNYFGTMLVYTGKAEGLVSGAAHSTGDTVRPALQIIKTKPGVSRTSGIFFMIKGDEQYIFGDCAINPELDAQGLAEIAVESAKSAQSFGMDPKVAMLSFSTKGSAKSDDVTKVQEALKLAQEKAEADQLDHVVIDGEFQFDAAIVPSVAEKKAPGAKIQGDANVFVFPSLEAGNIGYKIAQRLGGYDAVGPVLQGLNSPVNDLSRGCSTEDVYNLSIITAAQALQ

SEQ ID NO: 23612 - protein, 575 aa, Staphylococcus epidermidis ATCC 12228
MKEQNPLFFLFKRLSWPYGLIIAAVIITSLGSLSGLLVPLFTGRLVDKFSVSSINWGMIAIFGSIFLVNALLSGIGLYLLSKIGEKIIYAIRSLLWEHIIQLKMPFFDKNESGQLMSRLTDDTKVINEFISQKLPNLLPSVLTLIGSLVMLFIMDWKLTLLTFITIPVFILIIVPLGRVMQKISTNTQSEIANFSGLLGRVLTEMRLVKVSNTERLELDNAHTNLKKIYRLGLKQAKISAVVQPISGVVMLLTIAIILGFGALEIGTGAITPGTLIAMIFYVIQLSMPLINLSTLVTDYKKAVGASSRIYEIMQEPIEPTEALSESKDVTIIDGELVFEHVDFKYDVKKILEDVSFSIPQGEVSAFVGPSGSGKSTIFNLIERMYDIERGDIKYGNQSIFDIPLSKWRTKIGYVMQSNSMMSGTIRDNILYGINRKVDDEELIEYAKLANCHDFIIQFDEGYDTMVGERGLKLSGGQRQRIDIARSFVKNPDILLLDEATANLDSESELKIQEALETLMEGRTTVVIAHRLSTIKKAGQIVFIDKGEVTGKGTHHELMASHDKYRHFVTSQKLSD

SEQ ID NO: 23613 - protein, 381 aa, Staphylococcus epidermidis ATCC 12228
MLTEKEQDIIKQTVPLLQDKGTEITSIFYPKMFEANPELLNMFNQTNQKKGMQSAALAQAVLAAAMNINNLGAIKPAIMPVAHKHCALQVYPEHYPIVGENLLAAIQDVTGLESDDPVIQTWAKAYGEIADVFIKLEQEIYNHMLWKGFKPFKITNITQETSDIKSFTVESEEYDLSQFEPGQYITVDVSSEKLPYRAKRHYSIIDGDENHLVFGVKRDVTTEHEGEVSTILHDEISEGDMINLSAPVGGFSIENTERPQLFIGSGVGMTPLVSMFKKAASLNVPTQMIQAVVTEDERPFAQKLDSITDNYEQAQLHLHVKDKEGYLEAKELEQYLSEQPEIYICGGTKFLHSIINSLKELNYDMNHVHFETFIPRLSVQV

SEQ ID NO: 23614 - protein, 66 aa, Staphylococcus epidermidis ATCC 12228
MNNGTVKWFNAEKGFGFIERENGGDVFVHFSAIVEDGYKSLEEGQSVEFDIVEGERGEQAANVVKM

SEQ ID NO: 23615 - protein, 253 aa, Staphylococcus epidermidis ATCC 12228
MSSTLEIKDLHVSIEDKEILKGVNLTINTGEIHAIMGPNGTGKSTLSSAIMGHPSYEVTQGEVLLDGVNILELDVDERAKAGLFLAMQYPSEITGVTNADFMRSAINAKREEGQEINLMQFIKKLDKQMDFLDIDKDMAQRYLNEGFSGGEKKRNEILQLMMLEPKFAILDEIDSGLDIDALKVVSKGINQMRGEEFGALMITHYQRLLNYITPDKVHVMYGGKVVKSGGPELAKRLEEEGYEWVKEEFGAAE

SEQ ID NO: 23616 - protein, 323 aa, Staphylococcus epidermidis ATCC 12228
MNKILVTRQIPQHYVEQLKKIGQVVMWEHDLTPMSRESFLANVEDATACVITLSEHIDEEVFLRAQQLKVIANMAVGFDNIDISLAKKHGVVVTNTPHVLTETTAELGFTLMLTVARRIIEATSYIQEGKWKSWGPYLLSGKDVYGATVGIFGMGDIGKAFARRLQGFDARIIYHNRKRDLNAERDLNATYVTFKSLLEQSDFIICTAPLTKETENQFDARAFNKMKNDAVFINIGRGAIVDEEALLEALKNHEIQACGLDVMRQEPIQPNHPILKLPNAVVLPHIGSASQVTRNRMVQLCIDNIKAVLNNDAPITPVTSLHF

SEQ ID NO: 23617 - protein, 401 aa, Staphylococcus epidermidis ATCC 12228
MKDKIVLAYSGGLDTSVAVQWLIDKGYDVVACCLDVGEGKDLDVVYQKALDMGAVECHIIDATKEFSDDYVSYAIKGNLMYENAYPLVSALSRPLIAKKLVEIAEKTNSIGIAHGCTGKGNDQVRFEVAIKALNPKLKAFAPVREWAWSREEEIDYAIKHNIPVSINYDSPYSIDQNLWGRANECGILEDPYAAPPEDAFDLTTPLEETPDNADEIILTFKQGIPVQVDGKDYQLDDLILYLNQLAGKHGIGRIDHVENRMVGIKSREIYETPGAEVILKAHKALETITLTKDVAHFKPVIEKQFSEQIYNGLWFSPLTDSLKLFIDSTQQYVEGDVRIKLFKGNAIVNGRQSPYTLYDEKLATYTKEDAFNQESAVGFIDIYGLPTQVNALLHGGYSNEQ

SEQ ID NO: 23618 - protein, 869 aa, Staphylococcus epidermidis ATCC 12228
MDINQMTYAVQGALQKAVAYSKEYELQNIEVEALLKAAMNENDSLFKSILERANIDVDQLIKAYDNQLSHYPTVQGDNVQYGQYISAKTNELLDKAEKYMKSYEDEFISMEHILRAAIDTDETTQKWVGNKVEVIKEIITKVRGGNHVTSQNPEVNYEALEKYGRDLVEEVRQGKMDPVIGRDEEIRNTIRILSRKTKNNPVLIGEPGVGKTAIVEGLAQRIVRKDVPESLLDKTIFELDLSALVAGAKYRGEFEERLKAVLKEVKESEGRIILFIDEIHMLVGAGKTDGAMDAGNMLKPMLARGELHCIGATTLNEYREYIEKDSALERRFQKVGVSEPDVEDTISILRGLKERYEVYHGVRIQDRALVAAAELSDRYITDRFLPDKAIDLVDQACATIRTEMGSNPTELDQVNRRVMQLEIEESALKNESDNASKHRLEELQEELSNEKEKQSSLKSRVEQEKEKIAKVQEKRAELDSSRQALEDAQTEGNLEKAAELQYGTIPQLEKELQEFEEAFQDETGEDSERMIREVVSDEEIGDIVSQWTGIPVSKLVETEREKLLSLSDILHKRVVGQDKAVDLVSDAVVRARAGIKDPNRPIGSFLFLGPTGVGKTELAKSLASSLFDSEKHMIRIDMSEYMEKHAVSRLIGAPPGYVGHDEGGQLTEAVRRNPYSVILLDEVEKAHSDVFNVLLQILDEGRLTDSKGRSVDFKNTIIIMTSNIGSQVLLENVKDAGEISDDTEKAVMDSLHAYFKPEILNRMDDIVLFKPLSVNDMSMIVDKILTQLNMRLLDQHISIEVTEEAKKWLGEEAYEPQFGARPLKRFVQRQIETPIARMMIKESLPEGTIIKVDLNDNKELDFKVVKPTS

SEQ ID NO: 23619 - protein, 394 aa, Staphylococcus epidermidis ATCC 12228
MKLSLNSSSKFLRAPSIRQFSNRIKAIDDCVNLTIGQPDFPMPDVVKNAYIKAIKNDKTSYSHNKGLFETREAISQYFKRKYNFLYSEEEIIVTNGASEALDTSLRSIIEPGDDILIPGPIYAGYIPLVETLGGNPVYIDTTQSDFKVTPELIESHLTHKTKAILLNYPTNPTGVILERSEVKNIVDTLVNKHIFIISDEIYAENTFKEQHTSFAEFPEIRDQLLLIGGLSKSHSATGIRIGFLLGPEYLIEKLTFMHAYNCICANVPAQIACTTALNEGINAPLYMNRDYIERRNYLKEKLESLGFELTAQPEGAFYIFPSIKRFTENDFEFCVDVLEKAHLAMVPGSSFTDIGKGYIRISYAYDMETLKKGMHRLENYLQQHYPEQMTTPTK

SEQ ID NO: 23620 - protein, 458 aa, Staphylococcus epidermidis ATCC 12228
MKVAKFGGSSVSTAEQIKKVLTIVNEDPERKIIIVSAPGKRHNDDIKTTDLLIRLYEKVLNKLNYESKKQEIIQRYADIVEELGIGNDILITINDTLEEYIKHLSDKPNRLYDALLSCGENFNAQLIAQYNNSQGIPTRYISPKEAGLTVTDLPQQAQILDSAYNEIYKLRDYDEKLIIPGFFGVSKQNYIVTFPRGGSDITGAIIARGVRASLYENFTDVSGIYKANPNIINNPELIEEITYREMRELSYAGFGVFHDEALQPLYKDRIPVVIKNTNRPNDKGTYILHDREIDSKNVISGISCDKGFTVINIKKYLMNRLVGFTRKILGVLEEFNISFDHMPSGIDNISIIMRTNQIQGKESQVLNAIRKRCEVDELSIDHDLAVLMIVGEGMNQVVGTASKITHALSESNINLIMINQGASEISMMFGIHEADAEKAVLSTYEFCYNGVCLKNLCK

SEQ ID NO: 23621 - protein, 546 aa, Staphylococcus epidermidis ATCC 12228
MNSSSQEKKNKKFSSVFIYSSIIAAIVVIIGAVWPEKFDSVTNTAKMWITNNLGWYYLILTTVIVFFCVFLIFSPIGKLKLGKPNDKPEFNTISWFAMLFSAGMGIGLVFYGAAEPMAHFAAPPTADPETTKAYTESLRSTFFHWGFHAWAIYGVVALALAYSQFRKGEPGLISRTLRPLLGDKVEGPIGTLIDVLSVFATLVGVAVSLGMGALQINGGLHYLFGVPNNTFVQGIIIVVVTILFIASAWSGLSKGIQYLSNLNIGLGTILMIVTLIVGPTVLILNMMTSSTGSLLNSFLFNSFDTAALNGQKRDWMSTWTLYYWGWWLSWSPFVGVFIARVSKGRSIREFISGVLLVPALVSFIWFSVFGVLGIEAGKKDSGLFKMSPETQLFGVFNHIPLGIVLSIIALLLIASFFVTSADSATFVLGMQTTFGSLNPSSLVKVTWGVAQALIAFVLLLAGGGDGSKALNAIQSAAIISAFPFSFVVIMMMISFYKDANKERKFLGLTLTPNKHRLQEYVKYQQEDYETDILEKREVRRNKEKEE

SEQ ID NO: 23622 - protein, 410 aa, Staphylococcus epidermidis ATCC 12228
MSPLIIGGLKLNRSVLKFGGSSVSDFKKIKNIAEMLKTRIEDGEELIVVVSAMGKTTDQLMNNVSSLTPTPKDQELALLLTTGEQQTVSYLSMVLNDIGVNAKAMTGYQAGIKTVGHHLKSKIAEINPNIFNEAFKNHDILVVAGFQGINEDFELTTLGRGGSDTTAVALAASNQTPCEIYTDVDGVYATDPRILNEAKRLEYVSYEEMMEMSALGAGVLETRSVELAKNYDIPLYLGRTLSNVKGTWIMSKSDLLEKKAVTGVALDTHMMHVTISYPLPDNQLLTQLFTALEEESVNVDMISQIVNLEGLQLSFSIKDSDAHQISSILENLSTHFSALDYKINEAYVKISLIGSGMRDMSGVASKAFTTLINSDIPFYQTTTSEISISYVIDEENGEKAVEELYHAFEI

SEQ ID NO: 23623 - protein, 66 aa, Staphylococcus epidermidis ATCC 12228
MKQGTVKWFNAEKGFGFIEVEGENDVFVHFSAINQEGYKSLEEGQSVEFEVVEGDRGPQAANVVKL

SEQ ID NO: 23624 - protein, 299 aa, Staphylococcus epidermidis ATCC 12228
MTEHKSGFVSIIGRPNVGKSTFVNRVIGHKIAIMSDKAQTTRNKIQGVMTRDDAQIIFIDTPGIHKPKHKLGDYMMRVAKNTLSEIDAIMFMVNVNEDIGRGDEYIMEMLKNVKTPIFLVLNKIDLVHPDTLMPKIEQYQSYMDFTDIIPISALEGLNVDHFIDVLKSFLPEGPKYYPDNQISDHPEQFVVSEIIREKILHLTSEEIPHAIGVNVDRMIKEDEDRVRIEATIYVERDSQKGIVIGKGGKKLKEVGKRARRDIEMLLGSKVYLELWVKVQRDWRNKVNFIRQIGYVEDQD

SEQ ID NO: 23625 - protein, 609 aa, Staphylococcus epidermidis ATCC 12228
MGKVIGIDLGTTNSCVSILEGDEPKVIQNPEGARTTPSVVAFKNGETQVGEVAKRQAITNPNTVQSIKRHMGTDYKVDIEGKSYTPQELSAMILQNLKSTAENYLGDTVDKAVITVPAYFNDGERQATKDAGKIAGLEVERIINEPTAAALAYGLDKTETDQKVLVFDLGGGTFDVSILELGDGVFEVLSTAGDNKLGGDDFDQVIIDYLVSEFKKENGVDLSQDKMALQRLKDAAEKAKKDLSGVSQTQISLPFISAGENGPLHLEISLTRSKFEELADSLIKKTMEPTRQALKDAGLSTSEIDEVILVGGSTRIPAVQEAVKKEIGKEPHKGVNPDEVVAMGAAIQAGVITGDVKDVVLLDVTPLSLGIEIMGGRMNTLIERNTTIPTSKSQVYSTAADNQPAVDIHVLQGERPMASDNKTLGRFQLTDIPPAPRGVPQIEVTFDIDKNGIVNVTAKDLGTNKEQNITIQSSSSLSDEEIDRMVKDAEENAEADKKRREEVDLRNEADSLVFQVEKTVKDLGENISDEDKKNAEEKKDALKTALEGEDIDDIKAKKEELEKVIQELSAKVYEQAQQAQQQAQEEQGSQDSTVEDADFKEVKDDEDKK

SEQ ID NO: 23626 - protein, 366 aa, Staphylococcus epidermidis ATCC 12228
MNEILKCIGCGAPLQSENKDAPGYVPEHNMFREDVICRRCFRLKNYNEVQDVGMESEDFLNLLTGLSEKKGIIVNVVDVFDFEGSFINAIQRIVGNKKIILVANKIDLLPKQINHRRVKEWLRKSARKYGLEAEDVVLISANKGWGIDELLQSINHVRNKDDVYIVGTTNVGKSTLINKLIEQSVGEKDVVTTSRFPGTTLDMIDIPLDEKSFMFDTPGIIQSHQMTNYVSENELKIIIPKNEIKQRVYQLNEKQTLFFGGLARIDYVSGGKRPLVCFFSNDLNIHRTKTEKANDLWKSQLGALLSPPQDAQQFNLNDVKAVRLETGKTKRDIMISGLGFITIDAGAKVIVRVPKHVDVILRNSIL

SEQ ID NO: 23627 - protein, 380 aa, Staphylococcus epidermidis ATCC 12228
MEVYADYAATTPVKPEVIDAMMEIYQSHFGNPSSIHSIGRDARKYLDQSRRTVAQLLGANPNEVIFTSGATESNNTAIKGLVKANEQLGNHIITTKIEHHSVLHVYEQLEKEGYDVTYLDVDDTGAVDLDQLKETINDRTILVSIMFVNNEIGTVQNIYDIEDIIGDTHALFHVDAVQAIGHLDLDFHNFKIDTMSISAHKFGGPKGVGLLLVKEHTPIAYNQLGGEQETKRRAGTENLPQIVGLTKALELAITNQDVNNVHLMNLKELFLVQLQERAIPFELNGSMTDSTGHILNIYFPFIDVETMLTLLDLAHVYVSSGSACTAGSTTPSHVLAAMFEDEERAKHSVRFSFNEQTTTQEIKYIVAEIHKIYHKFKEES

SEQ ID NO: 23628 - protein, 430 aa, Staphylococcus epidermidis ATCC 12228
MFVDQVKISLKAGDGGNGITAYRREKYVPFGGPAGGDGGKGASVVFEVDEGLRTLLDFRYQRHFKAKKGENGQSSNMHGRNAEDLVLKVPPGTIIKSVESEEVLADLVEDGQRAIVARGGRGGRGNSRFATPRNPAPDFSENGEPGEELEVTLELKLLADVGLVGFPSVGKSTLLSIVSKAKPKIGAYHFTTIKPNLGVVSTPDHRSFVMADLPGLIEGASDGVGLGHQFLRHVERTKVIVHMIDMSGSEGRNPLDDYKIINQELINYKQRLEDRPQIIVANKMDLPDSQGNLSHFKEQLDNDVTVVPVSTITRDNIDQLLYQIADKLEEVKDVDFSVEEDENLGVNRVLYKHTPSADKFTISRDDDGAYVVSGNAIERMFKMTDFNSDPAVRRFARQMRSMGIDDALRERGCSNGDIVRILGGEFEFVE

SEQ ID NO: 23629 - protein, 102 aa, Staphylococcus epidermidis ATCC 12228
MFAIIETGGKQIKVEEGQEIYVEKLNANEGDSFTFDKVLFVGGDSVKVGAPTVEGASVTATVNKQGRGKKITVFTYKRRKDSKRKKGHRQPYTKLTIDKINA

SEQ ID NO: 23630 - protein, 452 aa, Staphylococcus epidermidis ATCC 12228
MAENLQRELSNRHVQLIAIGGAIGTGLFLGAGQTIAMTGPSILLTYIIIGFMLFMFMRGLGEIIIQNTNFKSFADVTNTYIGPFAGFVTGWTYWLCWIITGMAEVTAVAKYISFWFPDIPNWISALFCVLILMSFNLLSAKLFGELEFWFAIIKIVTIIALIVIGVIMILFAFKTPFGNTSLTHLYQHGIFPKGASGFFMSFQMALFSFVGIEMIGVTAGETKDPEKTIPKAINSVPIRILIFYVGALAVIMSIIPWDKVDPDNSPFVRLFALIGIPFAAGIINFVVLTAAASSCNSGIFSNSRMLYGLSNQNQAPPTFASTNKHGVPHKAIIASSALLLIAALLNYIFPDATLVFTYVTTISTVLFVVVWALIIIAYINYSRKNPELHKKATYKLPGGQYMGYLILIFFVFVFALLFINVDTRRAIYCTPIWFILLGLMYLRYKKADKESR

SEQ ID NO: 23631 - protein, 371 aa, Staphylococcus epidermidis ATCC 12228
MKIGIPKEIKNNENRVGLSPSGVHALVDQGHEVLVETNAGLGSYFEDGDYQEAGAKIVDEQSKAWDVDMVIKVKEPLESEYKFFKEELILFTYLHLANEQKLTQALVDNKVISIAYETVQLPDGSLPLLTPMSEVAGRMSTQVGAEFLQRFNGGMGILLGGIPGVPKGKVTIIGGGQAGTNAAKIALGLGAEVTILDVNPKRLEELEDLFDGRVRTIMSNPLNIEMYVKESDLVIGAVLIPGAKAPNLVTEDMIKEMKDGSVIVDIAIDQGGIFETTDKITTHDNPTYTKHGVVHYAVANMPGAVPRTSTIGLNNATLPYAQLLANKGYREAFKVNHPLSLGLNTFNGHVTNKNVADTFNFEYTSIEDALK

SEQ ID NO: 23632 - protein, 417 aa, Staphylococcus epidermidis ATCC 12228
MSKLILAVNAGSSSLKFQLIKMPEEKLVTKGVIERIGLSDSIFTIHVNGEKLTDIRDIHNHEEAVNIMLDSFKEHEMIKDITDIQGTGHRVVHGGETFPKSVVVTDEVESQIEELSELAPLHNPANLMGIRAFRKLLPEIPHVAVFDTSFHQTMPEQAYLYSLPYHYYEDYGIRKYGFHGTSHKYVSRRAAQIVGRPIEDLRIISCHIGNGASIAAIDGGESIDTSMGFTPLAGVTMGTRSGNLDPALIPFIMEKTGKTADEVLEILNKESGLLGLTGTSSDLRDLTEEAKHGRQRSRVALDLFASKIHKYIGSYAARMHGVDVIVFTAGIGENSHIIRGKVLEGLEFMGVYWDPKKNESLHGEEGYINYPHSPVKVLVVPTDEEVMISRDVIKYGKLNDNTPKKEEFDTNESIEVN

SEQ ID NO: 23633 - protein, 382 aa, Staphylococcus epidermidis ATCC 12228
MLSVIYLDNAATTKADQDVVDSFVKVNQTLYFNPNSPHHAGVQAEQLLLKAKSEINRILNLNNQFDIIFTSGATESNNILLKGIAYMKKETANEIITSVLEHPSVLEVMRYLEREKGFKLKYVDVTKEGKLDTEHLKSLMTDKVGLVTCMYVNNIMGQIQPIEEIANIVKNYPRAHFHVDAVQALGKVPMQINHIDSLSLSGHKFNGLKGQGLLLLKNIQNIEPIVHGGGQEYGLRSGTINLPMAISMVRAIKNAVDQTKELNLRLSNYKNKLLSFLAEYKNVFINSPQNASPHIINIGFPGVKGEVLVNAFSKQNVMVSTTSACSSKMNKLNEVLLAMEIAESKIEGSIRISLGAHTTENDILSFMNAFESVYKEIKELLK

SEQ ID NO: 23634 - protein, 531 aa, Staphylococcus epidermidis ATCC 12228
MSHKILVSDPISEDGLQSILKHPEFDVDIQTDLSENDLVNMISTYDALIVRSQTQVTERIINAATNLKVIARAGVGVDNINIEAATLKGILVINAPDGNTISATEHSVAMLLAMARNIPQAHQSLRNKEWNRKAFRGVELYGKTLGVIGAGRIGLGVAKRAQSFGMKILAFDPYLTEDKAKSLDIQIATVDEIAEKSDFVTVHTPLTPKTRGIVGSSFFNKAKQNLQIINVARGGIIDETALIEALDNNLIDRAAIDVFEHEPPTDSPLIQHDKIIVTPHLGASTVEAQEKVAVSVSEEIIEILTKGNVEHAVNAPKMDLSKVDKTTQSFIGLSTTIGEFAIQLLDGAPSEIKVKYAGDLAQNDTSLITRTIITNILKEDLGNEVNIINALAILNQQGVTYNIEKQKKHSGFSSYIELELVNDQDKIKIGATVFAGFGPRIVRINDYSLDFKPNQYQLVTCHKDKPGIVGQTGNLLGSHGINIASMTLGRNDAGGDALMILSIDQQASEEVIKILNETSGFNKIISTKLTI

SEQ ID NO: 23635 - protein, 485 aa, Staphylococcus epidermidis ATCC 12228
MKCLFKMLSIIIIMLSTFTLFISPSTYANEDENWTKIKNRGELRVGLSADYAPLEFEKTIHGKTEYAGVDIELAKKIAKDNHLKLKIVNMQFDSLLGALKTGKIDIIISGMTTTPERKKEVDFTKPYMITNNVMMIKKDDAKRYQNIKDFEGKTIAAQKGTDQEKIAQTEIEDSKISSLNRLPEAILSLKSGKVAGVVVEKPVGEAYLKQNSELTFSKIKFNEEKKQTCIAVPKNSPVLLDKLNQTIDNVKEKNLIDQYMTKAAEDMQDDGNFISKYGSFFIKGIKNTILISLVGVVLGSILGSFIALLKISKIRPLQWIASIYIEFLRGTPMLVQVFIVFFGTTAALGLDISALICGTIALVINSSAYIAEIIRAGINAVDKGQTEAARSLGLNYRQTMQSVVMPQAIKKILPALGNEFVTLIKESSIVSTIGVSEIMFNAQVVQGISFDPFTPLLVAALLYFLLTFALTRVMNFIEGRMSASD

SEQ ID NO: 23636 - protein, 578 aa, Staphylococcus epidermidis ATCC 12228
MIKRYLKFVKPYRYRIIATIIVGIIKFGIPMLIPLLIKYAIDGVINNHSLTNQEKFSHLGVAIGIALFIFLIVRPPIEFIRQYLAQWTSNKILYDIRKQLYNHLQALSARFYANNQVGQVISRVINDVEQTKDFILTGLMNIWLDCITIIIALSIMFFLDVKLTFAAIFIFPFYILTVYFFFGRLRKLTRVRSQALAEVQGFLHERVQGMSVIKSFAIEDNEAKNFDNHNKNFLQRAFQHTRWNAYSFAAINTVTDLGPIIVIGVGSYLAITGSITVGTLAAFVGYLEQLFGPLRRLVSSFTTLTQSFASMDRVFQLIDEDYDIKNGIGAQPIKISKGQIDLKHVSFKYNENEKEVLHDINLTINKGETVAFVGMSGGGKSTLINLIPRFYDVTQGEILIDYHNVKDFLTGSLRNQIGLVQQDNILFSDTVKENILLGRPDATDDEVVEAAKMANAHDFISNLPNGYDTEVGERGVKLSGGQKQRLSIARIFLNNPPVLILDEATSALDLESEAIIQEALDVLSKDRTTLIVAHRLSTITHADRIVVMENGRIVETGTHQQLINKRGAYEHLYSIQNL

SEQ ID NO: 23637 - protein, 511 aa, Staphylococcus epidermidis ATCC 12228
MFTLGTALSNQIDANWQTYVMIIVYFIILLIIGFYGYRQATGNLSEFMLGGRSIGPYITALSAGASDMSGWMIMGLPGSVYSTGLSAIWITIGLTLGAYINYFVVAPRLRVFTEIAGDAITLPDFFKNRLDDKKNIIKIISGLIIVVFFTLYTHSGFVSGGKLFESAFGLNYHAGLLIVAIIVIFYTFFGGYLAVSITDFFQGVIMLIAMVMVPIVALLKLNGWDTFHDIAQMKPTNLDLFRGTTVLGIVSLFSWGLGYFGQPHIIVRFMSIKSHKLLPKARRLGISWMAVGLLGAIGVGLTGISFISERHIKSEDPETLFIVMSQILFHPLVGGFLLAAILAAIMSTISSQLLVTSSSLTEDFYKLIRGSDKASSHQKEFVLIGRLSVLLVAIVAITIAWHPNDTILNLVGNAWAGFGAAFSPLVLYSLYWKDLTRAGAISGMVAGAVVVIVWISWIKPLATINAFFGMYEIIPGFIISVLITYIVSKLTKKPDDYVIENLNKVKHIVKE

SEQ ID NO: 23638 - protein, 509 aa, Staphylococcus epidermidis ATCC 12228
MQNFKELGISDKTVQTLEAMGFKEPTPIQKDSIPYALEGDDILGQAQTGTGKTGAFGIPLIEKVVGQQGVQSLILAPTRELAMQVAEQLREFSKGQKVQVVTVFGGMPIERQIKVLKRGPQIVVGTPGRVIDHLNRRTLKTQGIHTLILDEADEMMNMGFIDDMRFIMDKIPAEQRQTMLFSATMPKAIQELVQQFMKAPKIIKTMNNEMSDPQIDEYYTIVKELEKFDTFTNFLDVHQPELAIVFGRTKRRVDELTSALLSKGYKAEGLHGDITQAKRLEVLKKFKNDQIDILVATDVAARGLDISGVSHVYNFDIPQDTESYTHRIGRTGRAGKEGIAVTFVNPIEMDYIRQIEDVNNRRMKALRPPHRKEVLKAREDDIKDRVQNWMSRENEPRLQRISSELLKEYDSTELVASLLQELVEANDEVEVQLTFEKPLARKNRSSKGGSRRSNHKRGNGKFDNKNRRSKGSKGQSSKKKNQKKFDRRDKQQKSGNQSLKGRTFADHQK

SEQ ID NO: 23639 - protein, 317 aa, Staphylococcus epidermidis ATCC 12228
MTKVYIAGAIPEVGLNLLKEHFEVDMYDGEGLIDKETLKKGVEHADALVSLLSTSVDKDIIDSANNLKIIANYGAGFNNIDVEYARQQNIDVTNTPHASTNATADLTIGLILSVARRIVEGDHLSRTTGFDGWAPLFFRGREVSGKTIGIIGLGEIGGAVAKRARAFDMDVLYTGPHRKEEKERDIGAKYVDLDTLLKNADFITINAAYNPSLHHMIDTEQFNKMKSTAYLINAGRGPIVNEQSLVEALDNKVIEGAALDVYEFEPEITDALKSFKNVVLTPHIGNATFEARDMMAKIVANDTIKKLNGDEPQFIVN

SEQ ID NO: 23640 - protein, 374 aa, Staphylococcus epidermidis ATCC 12228
MKIAIVGAGIGGLTAAALLEEQGHQVKVFEKNTSINELSAGIGIGDNVLKKLGHHDLAKGIKNAGQNLTAMNIYDEQGTPLMSAKLKSHSLNVALSRQTLIEIIQSYVEESSIHTGFKVTKIEQTSCKVTLHFTKQESESFDLCIGADGLHSVVRESVGARTKIRYNGYTCFRGMVEDVQFNDQHVANEYWGVKGRVGIVPLINQRAYWFITVHAKEGDPKYQSFGKPHLQAYFNHFPDEVRKVLERQSETGILLHDIYDLKPLKTFVYGRTILMGDAAHATTPNMGQGASQAMEDAIVLVNCLEKYDFNKAIERYDKLRVKHTAKVIRRSKKIGKMAQKHHKLTVKLRNTAMKLIPNALASAQTKFLYKSKEK

SEQ ID NO: 23641 - protein, 458 aa, Staphylococcus epidermidis ATCC 12228
MENNELQRGLNARQMQMIALGGTIGVGLFMGATSTIKWTGPSVILAYLIAGIFLFLIMRAMGEMIYINPTTGSFATFASDYIHPAAGYMTAWSNVFQWVVVGMSEVIAVGEYMNYWFPSLPNWIPGVIAVLFLMAANLVSVKAFGEFEFWFALIKVVTIVLMIIAGLGLILFGIGNGGNPIGISNLWSHGGFMPNGFIGFFFALSIVIGSYQGVELIGISAGETKNPQTNIVKAVNGVIWRILIFYIGAIFVIVSVYPWNQLGSIGSPFVATFAKVGITFAAGLINFVVLTAALSGCNSGIFSASRMIYTLAKKGQMPKVFTKVMKNGVPFYTVFAVSMGILIGALLNVILPLIIDGADSIFVYVYSASILPGMIPWFMILFSHLRFRRLHPEKVHNHPFKMPGGAIANYLTIMFLLLVLVGMLLNKETVVSVVIGIVFLTAVTLYYLIRYHKKERQI

SEQ ID NO: 23642 - protein, 402 aa, Staphylococcus epidermidis ATCC 12228
MIEFDAITTLCLACVLYLIGQTIINHVSILRRICIPAPVIGGLLFAILVAILDSFNIVKIKLDSAFIQNFFMLAFFTTIGLGASLKLFKIGGKVMLIYFTFCGIMAICQNIIGVSLAKLLNIKPLLGLTAGSMSMEGGHGNAAAYGKTLQDMGVDSAVAAALAAATLGLVFGGLIGGPIVKYLIKRYDLKPEHRDDSFKNYGVVEYNQSLHTKYKPIQVFFIQFSILVFCMALGTYIGNTFTDLTGVNIPMYVGSMFVAVIIRNATDFIGWDIVDLKMSEQIGDISLGIFLSLALMSIQLTQIYSLAIPLIIIVLVQVVFMVLFSIFILFKGLGKDYDAAVMVGGFIGHGLGATPNAMANLDVITKKFGNSPKAYLVVPIVGAFLIDLIGVIIVMSFIQLFS

SEQ ID NO: 23643 - protein, 458 aa, Staphylococcus epidermidis ATCC 12228
MAKQLQRELNNRHIQLIAIGGAIGTGLFLGSGQTISLTGPSLLFTYMLIGIVLFAFMRALGELLLSNSKFNSFVDIANEYLGPFGGFVIGWTYWVCWIVSSMSDLTAMGQYFAYWYPQVPHWLTVLFIVLLLISFNLLGARLFGELEFWFSIIKVVTIITMVIVGLVLIFLSFKTEYGHASFGNLIHHGGMFPHGAAGFLMSFQIAVYSFIGIELIGVTAGETKNPEKTIPKAINNVPIRILLFYIGGLLVIMSVIPWFKVDPDSSPFVKLFTLIGVPFAAGIVNFVVLTAAASATNSGIYSNSRILFGLAKQGLGPKVLTKTNSNGVPYLSMLVSSITLLIAALLNFIFPDAIKLFIYVTTLSTVLFLVVWGMIIVSYIAYVKKNPEQHQSSAFKLWGGKIIAYIVLSFFIFIFILLFFSKDTRVAIFISPLWFIFLFFYYKKYKNNAESLADRQRH

SEQ ID NO: 23644 - protein, 559 aa, Staphylococcus epidermidis ATCC 12228
MKNNSKSKSNKISLSQLVLLGLGSLIGSGWLFGAWEASSMAGPAAIISWVIGFLVIGTIAYNYIEIGTMFPQSGGMSNYAQYTHGSLLGFIAAWANWVSLVTIIPIEAVSAVQYMSSWPWDWAKPMGSLMKDGSISTYGLIAVYIIIAIFSLLNYWSVKLLTSFTSLISVFKLGVPILTIIMLLVSGFDTGNYGHSIGTFMPYGSAPIFAATTTSGIIFSFNAFQTIINMGSEIKNPEKNIARGIVISLTLSAILYIVLQSTFITSMPSSMLHEHGWSGINFNSPFADMAILLGLNWLAILLYMEAVVSPFGTGVSFVAVTGRVLRAMEENGHIPKFLGKINKKYNIPRVAIAFNAIISMVMVTLFRDWGTLAAVISTATLVAYLTGPTTVISLRKMAPKMTRPFKANILKFMAPLSFVLASLAIYWAMWPTTAEVILIIILGLPIYFFYEYKMNWKNTKKQIGGSLWIIIYLIVLAFLSFIGSKEFKGLNWIHYPWDFLVIVIVALIFYQLGTTSYFESIYFKRANKLNKKMGDKLRKTRKKARHKDWKERDRQEQNQ

SEQ ID NO: 23645 - protein, 525 aa, Staphylococcus epidermidis ATCC 12228
MSVLTVMQFIVNIIIMIVLLTIMILGVIWLFKDKGQNQHSVLRNFPVLGRIRYISEKIGPELRQYFFANDNEGKPFSRSDYKNIVLAGKYKSRMTSFGTGKDYLEGFYIQNTMFPLQATELHIDHTEFISTFLYHIENERLFSREEYRKSAQVDPFFLTDEHAVVLGSNLKHPFKIKRLVGQSGMSYGALGKNAITALSMGLAKAGTWMNTGEGGLSEYHLKGNGDIIYQIGPGLFGVRDHDGNFNRDMFINLAEHNNVRAFEIKLAQGAKTRGGHMEGNKVTEEIARIRNVKPYETINSPNRFDFIKNPTDLLNFVNHLQSIGQKPVGFKIVVSKVEEIEALVKTMIEIDTYPSFITVDGGEGGTGATFQELEDGVGLPLFTALPIVSSMLEKYGIRNKVKIFASGKLVTPDKIAIALGLGADLVNIARGMMISVGCIMSQQCHLNTCPVGVATTDPKKEKGLIVDEKQYRVTNYVTSLHEGLFNIAAAVGVHSPTEITSDHIIYRQLDGTTTSIQDYKLKLIS

SEQ ID NO: 23646 - protein, 459 aa, Staphylococcus epidermidis ATCC 12228
MADKLQRELSNRHIQLIAIGGAIGTGLFLGAGQSIHLAGPSILLTYIIVGFVLFMFMRAMGELLLSNLGFKSFGDIAHHHIGSMAGFMVGWTYWLTWIISGMAEVTAVAKYVSFWYPTIPNWLTAAATILVLVALNLFSAKLFGELEFWLSIIKVLTILALIAVGVVMIVFGMKTSYGPATVTNIWKDGGFFPNGAQGFFMSFQMAIFSFIGIELIGITAGETKDPHKTIPQAINNVPFRILLFYIGSLAVIMSVVPWQQLNPADSPYVKMFGLVGIPFAAGIINFVVLTAAASSCNSGIFANSRTMFGLAGRKQGPAFLHRTNKHGVPHYAILVTCGLLSISVVLNAIFKDATKVFVQITTFSTVLNIMIWTIIMIAYLGYLRHEPKQHKESNYKMWGGKYMAYSILGFFAFIFIILLINSATRYAVLSAPVWFVIMLLMYQKYKKESRKAKIKNEEE

SEQ ID NO: 23647 - protein, 131 aa, Staphylococcus epidermidis ATCC 12228
MTILIRTFMNSKIHRARVTESNLNYVGSITIDANILDAVDILPNEKVAIVNNNNGARFETYVIAGERGSGKMCLNGAASRLVEVGDVIIIMTYAQLNEDEMVDHSPKVAVLNENNEIIEMINEKENTISNV

SEQ ID NO: 23648 - protein, 483 aa, Staphylococcus epidermidis ATCC 12228
MGSFFNRMTRKENPTIYQSKDGHLKRTLRVRDFLALGVGTIVSTSIFTLPGVVAAEHAGPAVSLSFLLAAIVAGLVAFTYAEMASTMPFAGSAYSWINVLFGELFGWVAGWALLAEYFIAVAFVASGFSANLRGLIAPLGISLPKSLSNPFGSNGGVIDIIAAVVIILTALLLSRGMNEAARMENVLVILKVLAIILFVIVGLTAINFSNYIPFIPEHKVTETGDFGGWQGIYAGVSMIFLAYIGFDSIAANSAEAINPQKTMPRGILGSLIVAIVLFVAVALVLVGMFHYSQYADNAEPVGWALRESGHGIIAAIVQAISVIGMFTALIGMMLAGSRLLYSFGRDGLLPSWLSQLNHKHLPNRALVILTIIGVVIGSMFPFAFLAQLISAGTLVAFMFVSLAMYRLRKREGKDLPKPEFKLPLYPILPAITFILVLLVFWGLSFEAKLYTLIWFIVGIIIYLIYGIRHSKKNDEEAYQVPRK

SEQ ID NO: 23649 - protein, 540 aa, Staphylococcus epidermidis ATCC 12228
MKKEKVMDWTTFIGVVIVLLFAVIPMMVFPKASEIIITDINSAISNSIGSVYLFMGLAIFCFVLYIAFGKYGNVTLGKATDKPEFNNFTWAAMLFCAGIGSDILYWGVIEWAFYYQVPPNGAKSMSDQALQYATQYGMFHWGPIAWAIYVLPALPIGYLVFVKKKPVYKISQACRPILKGHTDKLLGKIVDILFIFGLLGGAATSLALGVPMISAGIERLTGLDGSNMILRSIILLTITVIFAISSYTGLKKGIQKLSDVNVWLSFLLLAFVFIVGPTVFIMETTVTGFGNMIKDFFHMATWMEPFGGIKGRKETNFPQDWTIFYWSWWLVYAPFIGLFIARISKGRTLKEVVLGTICYGTLGCVLFFGIFGNYAVYLQITEQFNVISYLNNYGTEATIIEIMHQLPFSTITIILFLISAFLFLATTFDSGSYILAAASQKKVIGEPLRANRLFWAFALCLLPFSLMLVGGERALEVLKTASLLASVPLIVIFTLMMISFLIILGRDRIKLERRADKHKEIERRSLRIVQVKDKPEDDNL

SEQ ID NO: 23650 - protein, 549 aa, Staphylococcus epidermidis ATCC 12228
MKQRVGQYLMDAVYSAGADKVFGVPGDFNLAFLDDIIAHNDIKWIGNTNELNASYAADGYARINGIGAMVTTFGVGELSAVNGIAGSYAERVPVIAITGAPTRAVEQEGKYVHHSLGEGTFDDYRKMFEPITTAQAYITPDNATTEIPRVINTALQQRRPVHIHLPIDVALTEIEISNPFKPEVEPQKNVQSYINMVQDKLESASQPVIITGHEINSFHLHKELEQFVNQTQIPVVQLSLGKGAFNEENPYYMGIFDGSIAEQDIQDYVNQSDAILNIGAKLTDSATAGFSYQFDINEVIMLNHNEFKINDTCIEAFSLPNILNGLNKYIHYKNTNDFPQYERPQSHNYELSDQPLTQETYFNMMQDFLQQDDILIAEQGTSFFGAYDLALYKDNTFIGQPLWGSIGYTLPATLGTQIANPYRRNILLIGDGSLQLTVQSLSTMIRQNLNPVIFVINNDGYTVERMIHGMKEPYNDIRMWDYKSLPSVFGGDNVLVHDVNTSEELMLTFENIKSNSDRMHFVEVKMAVEDAPVKLSNIAKAFASQNKSS

SEQ ID NO: 23651 - protein, 700 aa, Staphylococcus epidermidis ATCC 12228
MQKAFRNVLVIAIIGVIIFGLFSFLNGNGNMPKQLTYTQFVNKLNKGDLKTLEIQPEQNVYMVSGKTKKDEDYSSTILYNNEKDLQKITDTAKKQDNLKFTVKEEEKQSVFVSILTTLIPVLIIALLFIFFLSQAQGGGGGGRMMNFGKSKAKMYDSNKRRVRFSDVAGADEEKQELIEIVDFLKDNKKFKQMGSRIPKGVLLVGPPGTGKTLLARAVAGEAGAPFFSISGSDFVEMFVGVGASRVRDLFENAKKNAPCIIFIDEIDAVGRQRGAGVGGGHDEREQTLNQLLVEMDGFGENEGIIMIAATNRPDILDPALLRPGRFDRQIQVGRPDVKGREAILHVHAKNKPLDETVDLKAISQRTPGFSGADLENLLNEASLIAAREGKNKIDMRDIEEATDRVIAGPAKKSRVISEKERNIVAHHEAGHTIIGMVLDEAEIVHKVTIVPRGQAGGYAMMLPKQDRFLMTEPELLDKICGLLGGRVSEDINFGEVSTGASNDFERATQIARSMVTEYGMSKKLGPLQFSSNSGGQVFLGKDMQGEPNYSGQIAYEIDKEVQRIVKEQYERCKQILLEHEEQLKLIAKTLLSEETLVAEQIQSLFYDGVLPEVDYDSAKVVKNENSDYSDGKYGKSYNDIRKEQLEDDDKEDDDNHEKDEVNQDNTDREADNTSHTNEPGHQQSPNIDKPYNPNDPNHRQ

SEQ ID NO: 23652 - protein, 321 aa, Staphylococcus epidermidis ATCC 12228
MLNNEYKNSSMKIFSLKGNEPLAQEVADHVGIELGKCSVKRFSDGEIQINIEESIRGCDVFIVQPTSYPVNLHLMELLIMIDACKRASAANINIVVPYYGYARQDRKARSREPITAKLVANLIETAGANRMIALDLHAPQIQGFFDIPIDHLMGVPILAQHFENDPDINPEECVVVSPDHGGVTRARKLADILKTPIAIIDKRRPKPNVAEVMNIVGDIEGRTAIIIDDIIDTAGTITLAAQALKDKGAKEVYACCTHPVLSGPAKERIENSAIKQLIVTNSIQLEENRKPNNTKELSVAGLIAKAIIRVYERESVSVLFD

SEQ ID NO: 23653 - protein, 445 aa, Staphylococcus epidermidis ATCC 12228
MKRPIIQKLNHLIEKKAISMHVPGHKNMTIGYLNRLDLAMDMTEITGLDDMHYPEGIILESMENFRKHKNYDAFLLVNGTTSGILSVIQAFSTRKGKYLISRNVHKSVFHGLDITQQQATITKTDVSKKTNQYVNPKINQDKNQYYKLAICTYPNYYGETFDISQYIKQLHHRGIPILVDEAHGAHFGLDGFPESSMNFNADYVVQSYHKTLPALTMGSVIYIHKDAPLRQQVIDYLTYFQTSSPSYLIMSSLELANKFYKEYDSTLFDQRRKMLIDLLVNMGFTVIEPEDPLKLVVSFEGVEGYDVQKWFEDKEIYVELADMYQVLLVLPLWHEGDKFPFKLLIEKIREINVPKKCTRDIKPLNFMTGFSEYKTVHFQNTKEVSIKRAEGKVLAQHIVPYPPGIPVMFKGEVVTSHMIDLLNKYDKQNIKVEGLNHKKILVKDE

SEQ ID NO: 23654 - protein, 1498 aa, Staphylococcus epidermidis ATCC 12228
MYNEKFKKGLYDYREEHDACGIGFYANMDNKRSHDIIEKSLEMLRRLDHRGGVGADGITGDGAGIMTEIPYQLFEQLTEFKVPGEGYYAVGLFFSKEKVRDSIHEEMFNQYFESEGFKVIGYRDVPVDTRAIAQHVADTMPYIQQVFVDITGVKEVEKRLFLARKQIEKYSETQSIDLYFTSLSHRTIVYKGWLRSDQIKGLYLDLQNEAYQSKLGLVHSRFSTNTFPSWKRAHPNRMLMHNGEINTIKGNVNWMRARQNKLVETLFEDEKDKVHFIVDEDGSDSSIVDNALEFLSLAMEPEKAAMLLIPEPWLYNESNDKKVRSFYEFYSYLMEPWDGPTMISFCNGDKIGALTDRNGLRPGRYTITKDNFIVFSSEVGVIDVPEENVAFKGQLNPGKLLLVDFLQNKVVENNELKTNIANELPYEQWLKDYKNKNDLDNIYYQSSDWDDQTLFRLQKQFAYTKEDINKYMTDLVINKKDPIGAMGYDAPIAVLNDKPESLFNYFKQLFAQVTNPPIDAYREKIVTSELSYLGSEGNLLCPDESVLERIQLKKPVLNEAQLSSIDHSYFNVTYLSTLYTGDLESSLNELGNRAIQAVHEGAKILVLDDTSLTHENSYAMPILLALSHVHQLLIREGLRMETSLIAQSGETREVHHVACLLGYGANAVVPYLAQRTIEQLTRQGQLSGTVAENVATYTNVLSEGVIKVMAKMGISTVQSYQGAQIFEAVGLSNSVIEKYFTGTQSKLSGISIEQIDKENKARQSDDSDYLESGSVFQWRQQGQHHAFNPRTIFLLQHACRENDYELFKKFSKTVNLKRTDHIRHLLEFKTRQSIDISRVEPASEIVKRFNTGAMSYGSISAEAHETLAQAMNQIGGKSNSGEGGEDSSRYEIQKDGSNKISAIKQVASGRFGVTSDYLQHAKEIQIKVAQGAKPGEGGQLPGSKVYPWIAETRGSTPGIGLISPPPHHDIYSIEDLAQLIHDLKNANRRADIAVKLVSKTGVGTIASGVAKAFADKIVISGYDGGTGASPKTSIQHAGLPWEIGLAETHQTLKLNDLRSRVKLETDGKLLTGKDVAYACALGAEEFGFATAPLVVLGCIMMRVCHNDTCPVGVATQNKDLRALFRGKAQHVVNFMYFIAEELREILASLGLETVEELVGRTDLLQRSTQLKPNSKAASLQIEHLIEQFDGVNTKEISQNHHLDEGFDLNYLYPDARYSIENGHSFTGNYVVNNEQRDVGVITGSAIAKQYGEEGLPEDTILAYTEGHAGQSLAAYAPRGLTIHHTGDANDYVGKGLSGGTVIVNAPNSQRENEIIAGNVNFYGASRGKAFINGKAGERFCIRNSGADVVVEGIGDHGLEYMTGGHVIILGDVGKNFGQGMSGGVSYIFPSDVEKFKKVNALETLEFSSIRFDEEKSLIKDMLEAHFKHTRSNKARQLLDQFDNIEKLAIKVIPKDYKLMMQKIDLKKRQMEREDEATLAAFYDDRETIEQELQPAVIY

SEQ ID NO: 23655 - protein, 394 aa, Staphylococcus epidermidis ATCC 12228
MSRIVLAEAYRTPIGVFGGVFKDIPAYELGATVIRQILEHSQIDPNEINEVILGNVLQAGQGQNPARIAAIHGGVPEAVPSFTVNKVCGSGLKAIQLAYQSIVAGDNEIVIAGGMESMSQSPMLLKNSRFGFKMGNQTLEDSMIADGLTDKFNDYHMGITAENLVEQYQISRKEQDQFAFDSQQKASRAQQAGVFDAEIVPVEVPQRKGDPLIISQDEGIRPQTTIDKLAQLRPAFKKDGSVTAGNASGINDGAAAMLVMTEDKAKALGLQPIAVLDSFGASGVAPSIMGIGPVEAIHKALKRSNKVINDVDIFELNEAFAAQSIAVNRELQLPQDKVNVNGGAIALGHPIGASGARTLVSLLHQLSDAKPTGVASLCIGGGQGIATVVSKYEV

SEQ ID NO: 23656 - protein, 627 aa, Pseudomonas aeruginosa
MCGIAGFWNITGTLLGDNARVARQMAAAIHHRGPDESGIWYEAPRAPILVHARLAVLELSPAGSQPMHSDCGRYVLIYNGEIYNHLALRARLSEAGVTHSWRGGSDTETLLACFAQWGVESTLKLTVGMFALALWDRQEKTITLARDRMGEKPLYWGWQNGVLFFASELKALKEHPLFRGDIDRDALALFLRYGYVPAPYSIYKGIGKLRAGSYLVLSERSLNETCEPAAYWSANAAIEEALSNPFQGTDAEAVDLLESQLRTSISDQMVSDVPLGAFLSGGVDSSTVVALMQQQSSRPIRTFSIGFDEPGYDEAVYAKAVAEHIGTDHTELYVNSKDALDVIPSLPKIYCEPFGDSSQIPTLIVSGLARQQVTVALSGDGGDELFGGYNPYQFTPRVWRMLERFPHSMRRFASAFAQDLPLPDKLGKLRDVFASRTAEELFYRLNSHWRNHEYPVIGAKGHTALLDTPERWPRVDSFQHWMMAMDVQGYMPDDILVKVDRAAMANSLETRVPLIDHRVFELAWRMPLHMKIRNGKGKWLLREVLYRHVSRELIERPKKGFSVPVSDWLRGPLKEWAESLLDERRLQQEGYLDSRLIRRIWNDHLAGRRDHSRRLWSVLMFQAWLES

SEQ ID NO: 23657 - protein, 502 aa, Aspergillus fumigatus
MPTLGGLLKKRRTKDSHTLSKELESSSSPAAAQTQTSPNSADHDHHYQHYDQTHHHQHSASSNPSNNSATPSAAQPHRSSNDNPNRSSGTDQKSEGQTASMQFAVTQPHPSTHHNPRLHHLQQQQQQQQQQQQQQQQQQPQQQSHTSRLHNILHPSHHASSQASTEGHAHSQQANQTEARTTKGKYSLDDFTIQRTLGTGSFGRVHLVQSKHNHRFYAIKVLKKAQVVKMKQVEHTNDERRMLNRVRHPFLITLWGTWQDARNLYMVMDFVEGGELFSLLRKSQRFPNPVAKFYAAEVTLALEYLHSQQIIYRDLKPENLLLDRHGHLKITDFGFAKEVPDITWTLCGTPDYLAPEVVSSKGYNKSVDWWSLGILIFEMLCGFTPFWDSGSPVKIYENILRGRVKYPPYLHPDAVDLLSQLITADLTKRLGNLHGGSEDVKNHPWFAEVTWDRLARKDIDAPYVPPIRGGQGDASQYDRYPEETEQYGQQGEDVHGHLFPDF

SEQ ID NO: 23658 - protein, 326 aa, Leuconostoc mesenteroides
MELFEQLKNKITGQNKTIVFPEGEDPRIQGAAIRLAADNLIEPILLGDAQEISKTAQAHNFDLSNIETIDPASYDKNELAKLNATLVERRKGKTDAETAAKWLQNVNYFGTMLAYTGKADGMVSGAVHPTGDTVRPALQIIKTAPGSSRISGAFIMQKKAKERYVFADAAINIDIDSDTMAEIAIQSAHTAQVFDIKPKVAMLSFSTKGSAKSPLVDKVATATALAKKLAPELADSIDELQFDAAFVECSCCRKAPDSKVAGKANTFIFPSLEAGNIGYKIAQRLGGFEAIGPILQGLAKPVSDLSRGANEEDVYKVAIITRAQAL

SEQ ID NO: 23659 - protein, 419 aa, Leuconostoc mesenteroides subsp. cremoris
MAKTMAVNAGSSSLKFQLLEMPAEQVIAQGVIERIGMDDSIVTIKYGAEINAERLVGHSEDDEHITLSKDGKGKKYENVTAIKNHQQAINFMLQKLTDLGIIKDFNEITGVGHRVVAGGEWFNHSVVVTDEVLAKIDRLADYAPLHNPANAMGIRAFQKLLPDALSVAVFDTSFHQTMPDENFLYALPYEYYTRYGARKYGAHGTSHRYVASRAAELLGKDLKSLKLITLHLGAGASITAIKDGKSLDTSMGFSPLAGVAMATRSGDVDASLVYYIQEREGLSNEEMLNILNKKSGLLGISTISSDMRDLLDVQDTNEHADMAIRIFINRVVKYVGQYVAEMGGVDAIVFTAGIGENSVPVRKMIIDKLNYFGVKLDEEKNNVRGKEVEISTNDSKVKALLIPTNEELMIARDVESLKA

SEQ ID NO: 23660 - protein, 352 aa, Hordeum vulgare
MANEEALMFALQLASSVVLPMTLRTCIELGLLETLVGAGGKTLTPEEVAAKLPSKAESNPDAASMVDRLLRVLATYKVVSRLVDECADGSLSRRYGAEPVCKWLTPNEDGVSMAPFCLLAQNKLFMEAWCHMKDAVLEGGSAFTKAFRASWFDYAGTDDHFNHLFNEAMKDHSVIITKKPLELYTGFDGIDTLVDLAGGVGAVIHAITKKYPSIKGINFDLPHVISDAQPYPGVEHVGGDMFEMVPSGDAIPMKWILPCFSDDECAVLLKNCYDALPAHGKVINVECILPVNPDATNNAQGLICVDASLLAYSPGGKERNLRDFEKLAKAAGFTGVKASYIFANFWAMEYTK

SEQ ID NO: 23661 - protein, 58 aa, Metrosideros excelsa
LVMTDPDVPGPSDPYLREHLHWMVTDIPGTTDATFGKEVVEYEMPRPNIGIHRFESLV

SEQ ID NO: 23662 - protein, 336 aa, Pseudomonas sp. S-47
MTHKVALNFEDGVTRFIDANAGETVADAAYRQGINLPLDCRDGACGACKCFAESGRYSLGEEYIEDALSEAEAEQGYVLTCQMRAESDCVIRVPAASDVCKTQQASYQAAISNVRQLSESTIALSIKSASLNQLAFLPGQYVNLQVPGSDQTRAYSFSSLQKDGEVGFLIRNVPGGLMSSFLTSLAKVGDSVSLAGPLGAFYLREIKRPLLLLAGGTGLAPFTAMLEKIAEQGSEHPLHLIYGVTHDHDLVEMDKLEAFAARIPNFSYTACVASPDSAYPQKGYVTQYIEPKHLNGGEVDVYLCGPPPMVEAVSQYIRAQGIQPANFYYEKFAASA

SEQ ID NO: 23663 - protein, 516 aa, Pisum sativum
MAVVAAPKKNNSFNKKDNPNLLLGRFELGKLLGHGTFAKVHLAKNIKTGEAVAIKIISKDKILKSGLVSHIKREISILRRVRHPNIVQLFEVMATKTKIYFVMEYVRGGELFNKVAKGRLKEEVARKYFQQLICAVEFCHARGVFHRDIKPENLLLDENGNLKVSDFGLSAVSDEIKQDGLFHTFCGTPAYVAPEVLSRKGYDGGKVDIWSCGVVLFVLMAGYLPFHDPNNVMVMYKKIYKGDFRCPRWFSPELVNLLTRLLDTKPQTRISIPEIMENRWFKIGFKRIKFYVEDDVVCNLDSLGLDGNNGNDGNDDKKVLNIDEHRDEALESVSESEWDSEVVNRRKNRQLGSLPRPASLNAFDIISFSQGFDLSGLFEEKGDEARFVSGASVSKIMTKLEEVAQLVSFKVRKKDCRVSFEGSREGVKGPLSIAAEVFELTPSLVVVEVKKKGGDKVEYDRFLNTELKSALHSLTMEESAGSSCQNTPDETLQQRAFSDSAIDKHSDSIESLNLDT

SEQ ID NO: 23664 - protein, 71 aa, Photorhabdus luminescens
MSNAMTGSVKWFNNDKGFGFISPKDGSKDVFVHYSAIQSNNFKTLEEGQEVSFSIENGAKGPSAVNVIVLS

SEQ ID NO: 23665 - protein, 255 aa, Oryza sativa Japonica Group
MESRPGGTNLVEPRGQGALPSGIPIQQPWWTTSAGVGAVSPAVVAPGSGAGISLSGRDGGGDDAAEESSDDSRRSGETKDGSTDQEKHHATSQMTALASDYLTPFSQLELNQPIASAAYQYPDSYYMGMVGPYGPQAMTHFQLPGLTHSRMPLPLEISEEPVYVNAKQYHGILRRRQSRAKAELEKKVVKSRKPYLHESRHQHAMRRARGTGGRFLNTKKNEDGAPSEKAEPNKGEQNSGYRRIPPDLQLLQKET

SEQ ID NO: 23666 - protein, 565 aa, Oryza sativa Japonica Group
MAVALRFAAVARDSPAAAAPPRVGREQQYLACAAAARPGGRCSRRRGLVVRCQSGAAAVVLNKDDAASVAAAAASSATGFTVAMKFGGSSVASAERMREVADLILSFPEETPVVVLSAMGKTTNNLLLAGEKAVSCGAPKASEIPELAVIKELHVRTIDELGLDRSIVSGLLEELEQLLKGVAMMKELTPRTRDYLVSFGECMSTRIFAAYLNKLGKKARQYDAFDIGFITTDDFTNADILEATYPAVAKRLQGDWIDDPAIPIVTGFLGKGWKSCAVTTLGRGGSDLTATTIGKALGLREIQVWKDVDGVLTCDPNICANAIPVPYLTFEEAAELAYFGAQVLHPQSMRPAKEGDIPVRVKNSYNRRAPGTVITKTRDLSKSILTSIVLKSNITMLDIVSTRMLGQYGFLAKVFSIFEDLGISVDCVATSEVSISLTLDPSKLWCRELIQQELDHVVEELEKIAVVHLLQHRSIISLIGNVQRSSLILEKAFNVLRRNGVNVQMISQGASKVNISLVVHDSEAKQCIQALHSAFFENGFLSEVEEEDLQHNGSPVSPNGVIYGN

SEQ ID NO: 23667 - protein, 740 aa, Oryza sativa Japonica Group
MTIPMAHSSRPTLGFPLGTALLIFVIFSLSGIFSCCYHWDKLRAFLWSRHPDVILQEGQHTVISIASPSKTTSDHKNEKAEKECGLPVIMPGDRIPKFFARPCPHEKCLPAAEEEEAEPIPGVALMHTSYWWHLAILKYEPAIDGAYRGWRQFGWGFAVAMRADGCPLCWTAIRVQTVYDAYGPLTLYRDLVSQGKLQHDIYQENVATQLDNLLRRLEQYEMEMEDYHARLSMWENTREKQRRRLLVQEAEDKQRDGVWIDEKRGFLDKLVSRKRRGNIEPGVGKWVSYLNREKKLDTLVGQKPVAPIAPKGIYLYGNVGSGKTMLMDMFYGATEGLIKHRRRFHFHEAMLEIHDHMHDVWKRRDEDKSIESSAFSWISSLPFDGKIKEWLIGEEKYKQNTQQNHILLAVADKFLVDRQANKSGASILCFDEIQTIDVFAVVALSGILSRLLSTGTVLVSTSNKAPEDLNQDGMQREIFLDLLSKLDENCNKILVGTETDYRRLIPTDGLTQIHYFWPLTSDIRSMYEAMWHDITRQTGGNIISVTIPVMFGRYLEIPKSCNGVARFDFEYLCGRPVGAADYIAIARNYHTIFISDIPAMSMKIRDKARRFITLIDELYNHHCRLVCLAASSIDDLFQGTDEGPLFDLESFQFEGEAEGAKLRRDVLAEGNVGAAPSPTGLVAILSGQEEMFAFRRAISRLIEMQTSLYLERVERVHSSLQQQSSVLTKSSTVSQSAPSV

SEQ ID NO: 23668 - protein, 356 aa, Escherichia coli
MTTFHSLTVAKVEPETRDAVTITFAVPQPLQEAYRFRPGQHLTLKASFDGEELRRCYSICRSYLPGEISVAVKAIEGGRFSRYAREHIRQGMTLEVMVPQGHFGYQPQAERQGRYLAIAAGSGITPMLAIIATTLQTEPESQFTLIYGNRTSQSMMFRQALADLKDKYSQRLQLLCIFSQETLDSDLLHGRIDGEKLQSLGASLINFRLYDEAFICGPAAMMDETEAALKALGMPDKTIHLERFNTPGTRVKRSVNVQSDGQKVTVRQDGRDREIVLNADDESILDAALRQGADLPYACKGGVCATCKCKVLRGKVAMETNYSLEPDELAAGYVLSCQALPLTSDVVVDFDAKGMA

SEQ ID NO: 23669 - protein, 614 aa, Emericella nidulans
MSDEVYEGAIGIDLGTTYSCVANYEGTNVEIIANEQGSYTTPSFVSFTDKERLIGEAAKNQAAMNPQNTIFDIKRLIGRRYEDPIVKKDVESWPFKVVDQGGNPAVEVEYLGETKTFTPQEISSMVLMKMKEVAETKLGKKVEKAVITVPAYFNDNQRQATKDAGAIAGLNVLRIINEPTAAAIAYGLGSGKSEKERNVLIYDLGGGTFDVSLLNIQGGVFTVKATAGDTHLGGQDFDTNLLEHFKKEFQKKTGKDLSGDSRALRRLRTACERAKRTLSNATQTSVEIDSLFDGEDFNTSITRARFEDLNAKSFSGTLEPVQQVLKDSGLAKNQVDEIVLVGGSTRIPRIQKLLSDFFDGKKLEKSINPDEAVAYGAAVQAGILSGKATSAETQDLLLLDVVPLSLGVAMEGNIFAPVVPRGQTVPTIKKRTFTTVVDNQTTVQFPVYQGERTNCADNTSLGEFTLAPIPPMRAGEAALECVFEVDVNGILKVTATEKSSGRSANITISNAVGKLSTTEIEQMIDDAAKFKTSDEAFTKRFESRQQLESYISRVEEIISDPTMSMKLKRGNREKIESALSDAMAQLEIEDSTPEDLKKKELALKRLITKAMATR

SEQ ID NO: 23670 - protein, 384 aa, Brachylophon curtisii
DLEPVNPADVPVTAAGALKSYKLAAKAISRLQSLPSGNISMLCDVLVKEVRDLTGYDRVMVYKFHEDEHGEVVSECRRPDLEAYLGLHYPATDIPQASRFLFMKNKVRMICDCLAPPVKVIQDERLPQPLSLCGSTLRSPHGCHAQYMANMGTIASLVMSVTINEDDDMMDGDQRQMARKLWGLVVCHHTSARFVPFPLRYACEFLIQVFGVQINKEVELAAQVREKHILRIQTLLCDMLLRDAPVAIITQSPNVMDLVKCDGAALYYKKKFWLLGITPTEAQIRDIAEWLLEYHNGNTGLSTDSLMEAGYPGASVLGDAVCGMAAVSITSRDFLFWFRSHTAKEIKWGGAKHDPDDKDDGRKMHPRSSFKAFLEVVKWRSLPW

SEQ ID NO: 23671 - protein, 84 aa, Pisum sativum
MCGILAVLGCSDDSQAKRVRILELSRRLKHRGPDWSGLHQHGDNYLAHQRLAIVDPASGDQPLFNEDKSIIVTVNGEIYNHEEL

SEQ ID NO: 23672 - protein, 84 aa, Pisum sativum
MCGILAVLGCSDPSRAKRVRVLELSRRLKHRGPDWSGLHQHGDCFLAHQRLAIVDPASGDQPLFNEDNPSIVTVNGELYNHEDL

SEQ ID NO: 23673 - protein, 278 aa, Arthrobacter sp. BP2
MSKKIGFVGLGTMGLPMAVNLNRAGFEVIGYDAFEGSRQKAIAAGITMAETLKDVAEQADDAIVSMVRDYAQNVDVILGQDGLLSANPKNLTIIVMSTLDPDTMNELGQQVEEHGEVRLIAAAVSGGSTGAEAGTLSIMASGAEDVVTAASPYFDAVGSNTFYYGSKPGNSQAAKLVNNLVLGINMNAVAEGLKFGAQYNLPEAELLNLFKVSTGDSWVARNWDAVSEWTADTALAVLLKDLKAAHLKGLEHHVAMPFNALSSTQLFDSMGQNNLQTK

SEQ ID NO: 23674 - protein, 267 aa, Helianthus annuus
MENSEAIEHEHDFSCIDRSMSFQNEDSGDISPQRRIGKGKIEIKRIENTTNRQVTFCKRRNGLLKKAYELSVLCDAEVALIVFSSRGRLYEYANNSVRGTIDRYKKSCLDPPSTGSVAEANAQFYQQEATKLRQQIANLQNQNRQFYRNIMGESLADMPGKELKNLESKLEKAINRIRAKKNELLFAEIEYMQKRELELHNSNQFLRARISENERAQQQHMSLMPGSSGYNDLGPHQSFDGLNDLQTNELQLNNNYSCQDQTPLQLV

SEQ ID NO: 23675 - protein, 247 aa, Helianthus annuus
MSFPNESGEMSPQRKLGRGKIEIKRIENTTNRQVTFCKRRNGLLKKAYELSVLCDAEVALIVFSSRGRLYEYANNSVKGTIDRYKKACLDPPSSGSVAEANAQFYQQEAAKLRQQIANLQNQNRQFYRNIMGESLGNMPAKDLKNLEGKLEKGISRIRSKKNELLFAEIEYMPKRENELHNNNQFLRAKIAENERSQQQHMSLMPGSSDYDLVPPHQPFDGRNYLQVNDLQPNNSYSCQDQTPLQLV

SEQ ID NO: 23676 - protein, 251 aa, Helianthus annuus
MGRGKVQLRRIENKINRQVTFSKRRGGLLKKAHEISVLCDAEVALIVFSNKGKLFEFSTDSCMESILERYERYCYSERQLVATDATPRSWTLEYNKLKSRAELLQRNHRHYMGEDIESLSLKEIQNLEQQLDTGLKNIRARKNQLLHESINELQKKGKAIQEQNTTLTKQLKEKEKDKTIPQNTQWEQHNYVDHDTTFFLPQPHPALNIGGDYNQATTSAASGGEGADGRTSQLDLSLQPIYSHHLRCFPS

SEQ ID NO: 23677 - protein, 253 aa, Helianthus annuus
MGKGRLELKRIENKINRQVTFAKRRNGLLKKAYELSVLCDAEVALIIFSTRGKLYEFSSTSSMLKTLERYEKCSFGPPEQRKPAKEDLQEQSSYQEYMRLKERYDALKQLERNYYGEEIDSLTTNELESLERQLHCSLKQIRTIRTQSLIDKLYEQQKMEHQLYEYNKTLRLRLDEESQAEALQWDVHAHAHANGMVYGHHHQHQVSHPAHGAFYHPTGCETTLQIGYQTEQISGATSSSMSHHHHQMQGWPA

SEQ ID NO: 23678 - protein, 1023 aa, Glycine max
LFDYFKQRFAQVTNPAIDPLREGLVMSLEVNIGKRRNILETGPENASQVMLSSPVLNEGELESLLKDSYLKPQVLPTFFDISKGIEGSLEKALNKLCEAADEAVRNGSQLLILSDHSEALEPTHPAIPILLAVGTVHQHLIQNGLRMSASIVADTAQCFSTHQFACLIGYGASAVCPYLALETCRQWRLSNKTVNLMRNGKMPTVSIEQAQKNYCKAVKAGLLKILSKMGISLLSSYCGAQIFEVYGLGKEVVDLAFRGSVSKIGGLTFDEVARETLSFWVKAFSEDTAKRLENFGFIQFRPGGEYHANNPEMSKLLHKAVRQKSQSAFSVYQQYLANRPVNVLRDLLEFKSDRAPIPVGKVEPASSIVQRFCTGGMSLGAISRETHEAIAIAMNRIGGKSNSGEGGEDPVRWKPLTDVVDGYSPTLPHLKGLQNGDTATSAIKQVASGRFGVTPTFLANADQLEIKIAQGAKPGEGGQLPGKKVSMYIARLRNSKPGVPLISPPPHHDIYSIEDLAQLIFDLHQVNPKAKVSVKLVAEAGIGTVASGVAKGNADIIQISGHDGGTGASPISSIKHAGGPWELGLTESHQTLIENGLRERVILRVDGGFRSGVDVMMAAIMGADEYGFGSVAMIATGCVMARICHTNNCPVGVASQREELRARFPGVPGDLVNYFLYVAEEVRGILAQLGYEKLDDVIGRTDLFQPRDISLAKTQHLDLNYILSNVGLPKWSSTEIRNQEPHTNGPVLDDVLLADPEVADAIENEKVVNKTIKIYNIDRAVCGRIAGVIAKKYGDTGFAGQLNITFTGSAGQSFACFLTPGMNIRLVGEANDYVGKGIAGGELVITPVDKTGFEPEDAAIVGNTCLYGATGGQVFVRGRAGERFAVRNSLAEAVVEGAGDHCCEYMTGGCVVVLGKVGRNVAAGMTGGLAYILDEDDTFIPKVNREIVKIQQVSAPVGQMQLNTLIEAHVEKTGSTKGAAILKDWDKYLSLFWQLVPPSEEDTPEANAKYDTTTADQVTYQSA

SEQ ID NO: 23679 - protein, 223 aa, Pseudomonas sp. G-179
MPDEELDRLLQHASARRFAQGDAVFEQGGPADSFYLLLHGRLKVTQVTEDGQQIIVRVVHPGDLFGFARALQRTDYPGTATAVAESVTLAWPTELWPSFVEHNPRLAVTAMQTIGERLEEAHVRIREMSTEEVERRVAHTVIRLARKAGKQEKDGIRIDFLISRQDIAEMTGTTLHTVSRILSAWEQLGFVQGGRQKLFVKDISGLETIASGEFRKRQGTASQ

SEQ ID NO: 23680 - protein, 173 aa, Arabidopsis thaliana
MALRSVKTPTLITPVAVVSSSVTNKPHSIRFSLKPTSALVVHNHQLSFYGSNLKLKPTKFRCSASALTPQLKDTLEKLVNSEKVVLFMKGTRDFPMCGFSNTVVQILKNLNVPFEDVNILENEMLRQGLKEYSNWPTFPQLYIGGEFFGGCDITLEAFKTGELQEEVEKAMCS

SEQ ID NO: 23681 - protein, 113 aa, Arabidopsis lyrata subsp. petraea
STGKRSEREEDTDPQGSRGISDDEDGDNSRKKLRLSKDQSVILEETFKDHSTLNPKQKQALAKQLGLRARQVEVWFQNRRARTKLKQTEVDCEFLRRCCENLTEENRRLQKEV

SEQ ID NO: 23682 - protein, 131 aa, Arabidopsis thaliana
EDTDPQGSRGISDDEDGDNSRKKLRLSKDQSAILEETFKDHSTLNPKQKQALAKQLGLRARQVEVWFQNRRARTKLKQTEVDCEFLRRCCENLTEENRRLQKEVTELRALKLSPQFYMHMSPPTTLTMCPS

SEQ ID NO: 23683 - protein, 933 aa, Arabidopsis thaliana
MVRISLLLLCLLVSTCLFTSSSAQAPGFVSLDCGGAEPFTDELGLKWSPDNHLIYGETANISSVNETRTQYTTLRHFPADSRKYCYTLNVTSRNRYLIRATFLYGNFDNSNNVYPKFDISLGATHWATIVISETYIIETAELVFLASSPTVSVCLSNATTGQPFISTLELWQLSGSMYGSMLSEDRFYLSVAARINFGAESEASVRYPDDPYDRIWESDLQKKPNYLVDVAAGTVRVSTTLPIESRVDDRPPQKVMQTAVVGTNGSLTYRMNLDGFPGFGWAFTYFAEIEDLAEDESRKFRLVLPEQPEYSKSVVNIKENTQRPYRVYAPGYPNITLPFVLNFRFAKTADSSRGPILNAMEISKYLRKSDGSVDATVMANVASLYSSTEWAQEGGDPCSPSPWSWVQCNSDPQPRVVAIKLSSMNLTGNIPSDLVKLTGLVELWLDGNSFTGPIPDFSRCPNLEIIHLENNRLTGKIPSSLTKLPNLKELYLQNNVLTGTIPSDLAKDVISNFSGNLNLEKSGDKGKKLGVIIGASVGAFVLLIATIISCIVMCKSKKNNKLGKTSELTNRPLPIQRVSSTLSEAHGDAAHCFTLYEIEEATKKFEKRIGSGGFGIVYYGKTREGKEIAVKVLANNSYQGKREFANEVTLLSRIHHRNLVQFLGYCQEEGKNMLVYEFMHNGTLKEHLYGVVPRDRRISWIKRLEIAEDAARGIEYLHTGCVPAIIHRDLKTSNILLDKHMRAKVSDFGLSKFAVDGTSHVSSIVRGTVGYLDPEYYISQQLTEKSDVYSFGVILLELMSGQEAISNESFGVNCRNIVQWAKMHIDNGDIRGIIDPALAEDDYSLQSMWKIAEKALLCVKPHGNMRPSMSEVQKDIQDAIRIEKEALAARGGISDEFSRSSAHSSSLNMGMLDLAGSQSYVSIDESVLQPTAR

SEQ ID NO: 23684 - protein, 227 aa, Momordica charantia
MGRGKIEIKRIENTTNRQVTFCKRRNGLLKKAYELSVLCDAEVALIVFSSRGRLYEYSNNSIKTTIGRYKKACSDSSATSSVTELNTQYYQQESAKLRQQIQMLQNSNSNLVRHLMGDSLSALTVKELKQLENRLERGITRIRSKKHEMLLAEIEYLQKREIELENENVCIRTKIAEVERLQQANMVSGQELNAIQALASRNFFTPNMMEGGAVTFSHQDKKMLHLG

SEQ ID NO: 23685 - protein, 620 aa, Streptomyces viridifaciens
MTEQATGAHHPQPRPRSGGQQSAPVEYVTGAQSLIRSLEEVGADTVFGIPGGAILPAYDPLMDSTRVRHVLVRHEQGAGHAATGYAQATGKVGVCMATSGPGATNLVTPIADAHMDSVPLVAITGQVASKSIGTDAFQEADIVGITMPITKHNWLVTKAEDIPRVIAQAFHVASTGRPGPVLVDIAKDALQARTTFSWPPVMDLPGYRPVTKPHAKQIREAAKLITTARRPVLYVGGGVLKAQATAELKVLAELTGAPVTTTLMALGAFPDSHPLHVGMPGMHGSVAAVTALQKADLIVALGARFDDRVTGRLDSFAPYAKIVHADIDPAEIGKNRAADVPIVGDAREVIADLVQAVQKEHSEGHKGDYTAWWSDLNRWRETYPLGYDLPEDGSLSPQQVIERIGRLAPQGTIFAAGVGQHQMWSAHFIQYDRPATWLNSGGAGTMGYAVPAAMGAKAGRPEQTVWAIDGDGCFQMTNQELTTCALNNIPIKVAVINNGALGMVRQWQTLFYNQRYSNTQLRGEPSARAHGTRVPDFVKLSEAMGCVAMRCEDAADLDTVIAKANSINDQPVVVDFIVHEDAMVWPMVAAGASNDEIMAARDVRPLFDDAAEDFTAETPM

SEQ ID NO: 23686 - protein, 388 aa, Lupinus albus
MVDQVQRPTIMEKVSSQLHLRSGVSSDIQSYDAAFRRPAVYQRRSFGNYSNAALQYPVMPSCRATTDLSSVATASPVFAAAPAEKGHFLIDFLMGGVSAAVSKTAAAPIERVKLLIQNQDEMIKSGRLSEPYKGIGDCFKRTMADEGVVALWRGNTANVIRYFPTQALNFAFKDYFKRLFNFKKDRDGYWKWFAGNLASGGAAGASSLFFVYSLDYARTRLANDSKAAKKGGERQFNGLVDVYKKTLASDGVAGLYRGFNISCVGIIVYRGLYFGMYDSLKPVLLTGSLQDSFFASFGLGWLITNGAGLASYPIDTVRRRMMMTSGEAVKYKSSLDAFSQILKNEGAKSLFKGAGANILRAVAGAGVLAGYDKLQVIVFGKKYGSGGA

SEQ ID NO: 23687 - protein, 110 aa, Lolium perenne
MGRSPCCEKMGLKRGPWTAEEDKILVAHITSFGHGNWRALPKQAGLLRCGKSCRLRWINYLRPDIKRGNFSDEEEQSIIQLHQLLGNRWSAIAARLPGRTDNEIKNYWNT

SEQ ID NO: 23688 - protein, 820 aa, Podospora anserina
MSILQKTYDESYLTCSTAVYYESQGNEDEAMRCWRQALEQLYDPHANRILPNFNPRSETEKALVESLRQLELQCKERIDLLEALRLSRLSAPQHDSLSSSSRPSKSSSDSHDGGISGQQDGGWIGNGTIPAVNYTDLSRPNTLRRLSSQNRTSSSEQAVASSRGPQHGSMPPPLPARKPLPSTASIPSPERKPSRTSSPERHTMRTTLRTGTRDKTPKATLRRQPPKSSEVPVPSKAATLAWGTLGHRGSLDQPSGSSPISRPAPNTPTVPEQSRRSLELSKRLWDSNSRRLVTPRTRSPNKDTDSAPATDPRRSGEYPFPRASSISISAASTALNALALKESSDHRSPEREHITRLRTAPPETPRSRAQRDILNNDSNMSEGLPDKPLTRKTSLDSATVSRRSAGASLSAARIKSTPTRSGNKRKTPQLGNNSDRARPRRSSSPVLSESSSSSFETPARRPSGQHKRSTVERQREASLIVDSIIQPSESSEDDEPTKEVKSWKKRKAELLKKLPPGVDEHAAKQILNEIVIQGDEVHWSDIAGLEIAKNALRETVVYPFLRPDLFMGLREPARGMLLFGPPGTGKTMLARAVATESKSTFFSISASSLTSKYLGESEKLVRALFSLAKVLAPSIIFVDEIDSLLSQRSGSGEHEATRRIKTEFLIQWSDLQRAAAGREVGERDKERGDANRVLVLAATNLPWAIDEAARRRFVRRQYIPLPEAETRAVQLKTLLKQQTHTLSDEDINTLVAMTDALAKDAAMGPLRSLGDALLHMTENDIRPIGLSDFIASLATIRPSVSKAGLKEYEDWAREFGERGG

SEQ ID NO: 23689 - protein, 249 aa, Chrysanthemum x morifolium
MGRGRVELKRIENKINRQVTFAKRRNGLLKKAYELSVLCDAEVALIIFSNRGKLYEFCSSSSMLKTLERYQKCNYGAPETNVSAREALELSSQQEYLKLKARYEALQRSQRNLLGEDLGPLNCKELESLERQLDTSLKQIRSARTQFMLDTLTDLQKKEHALNDANRTLKQRLMEGHQVTSLHWNPHVQQEMGYDQQHEPQHQNGEAFFHPLDCGPTLQMGYPSDSLTAEAAASVAGPSCSNYMPGWYQ

SEQ ID NO: 23690 - protein, 216 aa, Chrysanthemum x morifolium
MVRGKTQMRRIENATSRQVTFSKRRNGLMKKAFELSVLRDAEVALIIFSPRGKLYEFANSSMQETIERYRSHVKDIQTDTSSVEDVQNLKHETAAMAKKVEALEVAKRKLLGEGLGTSTIDELVQIEQQLERSVRIIRARKMQVYNEQIEQLHAKEKMLAAENAILTEKCIIKTDKATEEMGVDLNVLESGENSDVETELFIGLPETRMKQLSWPK

SEQ ID NO: 23691 - protein, 109 aa, Brassica rapa subsp. pekinensis
GTESDEEIRRVPEFGGEATGKEISGSVTGQDQTQATVGGESQRKRGRTPAEKETKRLKRLLRNRVSAQQARERKKAYLGELENRVKDLENRNSELEERLSTLQNENQML

SEQ ID NO: 23692 - protein, 536 aa, Buchnera aphidicola str. Bp (Baizongia pistaciae)
MHLQRNFFILIFFFISFLLWKTWQQKEFSSDVHKIINKYENVNLVNNNINKLASNIIIKTDVLKIQVNLYGGDIEKAELLHFKSKLNSSQSLVLLDTNENFVYQAQCGITGKDGADNLQKHIRPLYIAKRKYYELSRHNKKIEVPLQWISKDGIIYKKIFVLKSGEYDVSVKYKINNITNKHLKVSMFGQLKQTINLPEDKNTYTNNFALQTFRGAAYSSDNDKYVKYSFDSIVNKEKKNIVVTHSGWVAMLQKYFATSWIPDNSYLNTMYIGSSGDNLAEIGYYSRPIDIFPHSTISLSSKLWIGPEIQNKMAVIASNLDLTVDYGWLWFLSQPLFKLLNFLYNICGNWGVSIILITFIIKGITFPLTKSQFKTMAKIRKLQPKINYIKKKFKNNNQKISEEIMSLYKTEKVNPLGGCFPLFIQMPIFLALYYMLISSVELRHAPFFLWIHDLSDQDPFYVLPILMGVTMFFIQRVTPSNVTDPVQKKIMNYIPILFTVFFLWFPSGLVLYYLISNLVTIIQQKIIIKALNKTLK

SEQ ID NO: 23693 - protein, 409 aa, Buchnera aphidicola str. Bp (Baizongia pistaciae)
MRNKNIKKVVLAYSGGLDTSAIIPWIKENYSSEVIAFVANVGQNQADLKDIEYKALKSGASQCIIKDLREEFIRDYVYPVLKSGALYEENYLLGTALARPIIAKSQVDLALKLKADGVCHGATGKGNDQVRFETAYVGLAPELKIIAPWREWSFKSRGELLSYLKEKNVKTTASIEKIYSKDENAWHVSTEGGVLEDLWNKPNQDCWTWTNDPKDAPNVPEIISIKIKNGSVIAVNNEFLSPFKCLEKLNLVGIKHGIGRIDVVENRLVGMKSRACYETPGGTILVNALRSLEQLVLDRDSYKWRQQIALEMSYVIYNGNWFSPFRKSLQAAATELATEIDGEVILELYKGTVTAIRKFSPNSLYSKEFATFDQDEVYRQSDADGFIKLYSLPSKIRAINKCMNKALMK

SEQ ID NO: 23694 - protein, 638 aa, Buchnera aphidicola str. Bp (Baizongia pistaciae)
MSKIIGIDLGTTNSCIAIMDGNKARVLENSEGDRTTPSIIAYTNDNEILIGKPAKRQSITNPKNTLFAIKRLIGRKFTDNEVQRDIKIMPYKIIQSENGDAWINIKNKKLAPPQISAEILKKMKKTAEDYLGESIQEAVITVPAYFNDAQRQATKDAGRIAGLKVKRIINEPTAAALAYGLDKGKGNKTIAVYDLGGGTFDISIIEIDDVDKEKTFEVLATNGDTHLGGEDFDNRLINYLVEDFKKDQGTDLRNDSLAMQRLKESAEKAKIELSSTQQTDVNLPYITADSTGPKHLNIKVTRSKLESLVEDLITRSIEPLKIALKDAKLSISDIDDVILVGGQTRMPMVQKKVAEFFKKEPRKDVNPDEAVAVGAAVQGGVLSGEVKDVLLLDVTPLSLGIETMGGVMTTLISKNTTIPTKHSQIFSTAEDNQTAVTIHVLQGERKRSIDNKSLGQFNLDGIQPAPRGMAQIEVTFDIDSDGILHVSAKDKNTGKEQKITIKASSGLNETEIKKMILDAEQNSESDQKFEELVKVRNQGDQISHSTKKQLKDLEKTINVNDQKEINEALNKLDTALKGENKTKIEEKIQEVLKISTKLIEKNKPKQTSESSNSNSPSSSKPEENVVDAEFEEVKDQKK

SEQ ID NO: 23695 - protein, 315 aa, Buchnera aphidicola str. Bp (Baizongia pistaciae)
MSDMKLFSGNSVPKLAESIANKLYVNLGNASVGKFSDGEINVQINENVRGSDVFIIQSTCFPTNDNLMELVVMVDALRRASAGRITAVIPYFGYARQDRRVRSSRVPITAKVVADFFSSVGIDRVLTVDLHAEQIQGFFDVPVDNVFGSLILFEDMLKIDLKNPIVVSPDIGGVIRARAIAKLLHDTDMAIIDKRRPHINFSQVMHVIGEVFNRDCILVDDMIDTGGTLCQAAEALKKRGARRVFAYATHPIFSGNAVKNLQNSNIDEVVVCDTIPLSKIIQELPNVRTLTLSSMLAEAIRRISNEESISAMFEH

SEQ ID NO: 23696 - protein, 400 aa, Buchnera aphidicola str. Bp (Baizongia pistaciae)
MFNKLVLILNCGSSSLKFSVVSSDNYTTKLSGIVEFLNLSQIRFFWKIKKKEYVRVINKSKSYDYALNYILTKILKEESKIFNNIACVGHRVVHGGVNLNKSVLITQEIIKLITDACSFAPLHNPINLLGIKASHAVLPHLKEKNVAVFDTSFHSSIPKFAYLYAIPYKFYKKFGIRKYGAHGISCQYSVCRSSELLQIELTSLNIIICHLGGGASVSVVKNGVCVDTSMGLTPLEGLIMGTRSGDIDPSVIFFMNKQLNLSISTINNILINKSGLLGLSGVSSDFRNLESEYNSNIRIKLAIDMFCYRLSKYISGYMSVVKGKLHGIVFTGGIGENSSLVRSIVISKLAFLNFKLNSDINMLMKSGKEGFINIKNTFPILVIPANEELIIAKESFSEIN

SEQ ID NO: 23697 - protein, 715 aa, Buchnera aphidicola str. Bp (Baizongia pistaciae)
MTRTIMLVPIGKNIGLTTISLSVISAMKRCKFNVKFLKSAIEYSNTNYNIDDTSLILKDTQSLSYINPLIVDFINQFSLKQIKQRIVDYILSKVYAKKEKYDIFLIEGFDTKSHTYVLSNDINYYISKSINVEIVFVCAVDRSSQLDINNIVYIINNVFKKNKNINIRGVIINELCQKVRNDYGNVNLFDMFKSSVKKINFGDVKYDFLFQKNGIEVLGCVPWIHKLMEPSVKILCDKYLGANIIYDRCMNSQYIKTFIIYDTNEDIKNAKKFHRSLLIIPAISNDKIKEICVQINKNKILISAILLTNFLNVHDKCTDFIDQLKIANCTICSTPNDVFTVVSLLHKFNFKLDNKNYQLNIIENDMSRHINLDWIRSLKHSYQYNSICLPSLFIYNLKHLAKKFMKNILLPEGCELRIIKAASICSKNDIAYCTLLGNPKKIKNIAESNNIVLNSNIEIIDPKLIRKNYVERLCHLRRHHGITLAHANELVKDNSILSTLILESKKVDGLVSGSIGTTSSIILPALQLIKTSPGSSLISSVFFMLLSDYVTLYADCAVNINPDATQLAEIAIQSSNTARLFGIFPKVAMLSYATGCSGFGDTVDKVKEATRIVQERSPNLIVDGPIQYDAAINRSVAKLKCPHSLVAGNATVFIFPDLNSGNITYKAVQRSANILSIGPILQGINQPVNDLSRGSSVQDIVYTIAVTVLQSSLSH

SEQ ID NO: 23698 - protein, 108 aa, Buchnera aphidicola str. Bp (Baizongia pistaciae)
MNDIIKKIQNQIQNNPIIIYMKGSPDAPSCGFSAQAVHAISSCGKKFAYIDVLKNPDIRLELPKYANWPTFPQLWVNGELIGGCNIILELFQKGELKKTISICDKLNS

SEQ ID NO: 23699 - protein, 816 aa, Buchnera aphidicola str. Bp (Baizongia pistaciae)
MKILKFGGTSLSNSELFFHVATIIENNLNNEQIAIVLSAPGNTTNLLEIAINQTINNKNIIPIVQKIEKNFLKLINDIYQVEQKLLYEKIKNNIENKLLELKNLLQGINLLRQCPDKIRAKIISSGEYLSISIMNSILISRGYNTTIIDPVKKLLTKEDTYLNATVNIKISKFRILSMKIPKHHIILMPGFTAGNKQGELVTLGRNGSDYSATILSVCLNSTMCEIWTDVNGVYTCDPKLVSDAKLLTSLSYREAIELSYLGAKILHPNTIYPIQKFKIPCTIKNTHNPSSIGTKISCNHVKNKNLITGVTYLENVHMFSISCLYSKNIETIIPKIFSCMSLSKIWIILTIQTSSQNTISFCILKTMTNTALHVLHKALYLELKHKLLKPIKVEKKLTLISVISSDILNNTKITEKVFSILKHVNINTLAISKGASKNSISIVVKHDDGILGVRALHKGIFNKNCTAEIFLIGIGRVGQTFLKQIIEQKNWLKSKNIDLKICGIANSKNFILNLDGINPKNWKRDLNLSKKSFNFKHLLNSIQNYYLINPIIVDCTSDKNIANQYISFINCGFHIVTPNKKANTTNWKYYEDIRLAAQKEKKKFFYETNVGAGLPVIENLKNLLRTGDTLIHFKGILSGSLSFIFGKLEDNISLSEATKQAQSLGFTEPNPKDDLSGIDVARKLLILAREVGYKLELKDIKIEPLLPKEFNNISNTTDFITKLKELDQIFCNRVKKARKLGKRLRFVGIINQKGNCQVKIDEVDHNDPLYNIKNGENALAFYSKYYQPIPLVLRGYGAGNNVTASGIFSDVLRILL

SEQ ID NO: 23700 - protein, 576 aa, Buchnera aphidicola str. Bp (Baizongia pistaciae)
MKMLSGSDMVIRSLIDQGIKYIFGYPGGAVLDIYDSLKQMHGIKHILVRHEQSATHMADGYARATGKIGVVLVTSGPGATNSITGIATAYMDSIPLVVISGQVASSLIGYDAFQECDMIGISRPIVKHSFLVKNTEDIPKIFKKAFWLASSGRPGPIVIDLPKDILNPLIKKPYIWPKLISIRSYSPVLQGHQGQIKKALHILIKAKQPIIYIGGGIITSNSHKELKLLAETLNIPVTTSLMALGALPQNHPQNLKMLGMHGTYEANMAIHNADVILAIGVRFDDRTTNNVDKYCPNATIIHIDIDPTSISKTISAHIPIVGHARNVLKQILNLLKNQFSKKNIYNLEHWWKQINCWKSKNSLEYDRKSKKIKPQNVIEIISALTNGNAFVTSDVGQHQMFTALYYSFNKPRRWVNSGGLGTMGYGLPAALGVKLALPKETVLCITGDGSIQMNIQELSTAMQYKLSILILNLNNRSLGMVKQWQDIIYSGRHSHSYMKSLPNFIKLAESYGHIGISIHNPEDLEKKLKLALLKLDQGNLVFVDITIDPEEHVYPMQIRSGGMNEMILRTTEHTSL

SEQ ID NO: 23701 - protein, 287 aa, Buchnera aphidicola str. Bp (Baizongia pistaciae)
MKQKYFSGTSVIIGKPNVGKSTIINKLINSKISIVSKKKHTTQSNITGIMNIGLQHQLIYIDTPGISKKYVYKNQNKTFRNTMALMHSIQFIFLILEKTSWTNEDEYILNIVKKYLKPIFAIINKIDKIKSKEHLLPHILTLSKKHMFQEIIPISGKTGENIHILSKVIQNKLKIVPKPTFPFDLKTNLDIKSIVSEIIREKLILYLGDELPYSIQVSTKNIIDRNIKTSYIEAVISVNNTQHKKIIIGCKGKKIKLCGSLARKALEKFFNKSIYLSLKVIKKNKTL

SEQ ID NO: 23702 - protein, 610 aa, Buchnera aphidicola str. Bp (Baizongia pistaciae)
MAKNLMLWLVIAVVLMSIFQNFSANNINNRKIDYSTFLSDVNQDQVREVHISGREMNIIRKDNGRYITYIPISDPKLLDNLLVKNVKIIGAAPEEQSFFTAIFISWFPMLLLIGVWVFFMRQMQVGGGKGAMSFGKSKARMLPEDQVKITFSDVAGCDEAKEEVQELVEYLKEPSRFQKLGGKIPKGILMVGPPGTGKTLLAKAIAGEAKVPFFTISGSDFVEMFVGVGASRVRDMFEHSRKVAPCIIFIDEIDAVGRQRGAGLGGGHDEREQTLNQMLVEMDGFDGNEGIILIAATNRPDVLDPALLRPGRFDRQIFVALPDIRGREKIIQVHMKKVPLGNNVDPMIIARGTPGFSGADLANLVNEAALFAARNNRDVVMMSDFESAKDKITMGSERRSMVMTEKQKESTAYHEAGHVIVGRLVPEHDPAHKVTIIPRGRALGVTFFLPKDDVLSINKNKLESQISTLYGGRLAEEIIYGVNNVSTGAHNDIKVATNLARNMVTQWGFSKKLGPLLYSEEEGEIFLGRTVTKSKHMSDETARIIDEEVKLLVEKNYNRAKKILEENLDILHAMKDALIKYETINSRQIDDLMKRKSIQSSNICTDDDNN

SEQ ID NO: 23703 - protein, 338 aa, Buchnera aphidicola str. Bp (Baizongia pistaciae)
MKFLDKAIIHVIAGNGGHGRTSFRREKYIPKGGPDGGDGGNGGNVWLQTVTNLNTLIDFKFTKIFKAQDGQQGFNKKKTGKKGSDIVIQIPIGTKIIDHNTNEIIEDMIQDKQLVLVAKGGWHGLGNTRFKSSTNRIPIKHTKGTQGEFRILRLELILIAHVGTLGLPNSGKSTLVRNISNAKTKIANYPFTTLKPVLGTVKINHKEFFVIADIPGLIQGASHGIGLGYQFLKHLERCHLLLHIIDISQINFKNTITNIHVILDELKTYNKILHNKPIWFVFNKIDLIDDIDINTKLKSILEKLGSIQQYFLISAIKKTGLKKIVKKIYDFLKNKNLL

SEQ ID NO: 23704 - protein, 550 aa, Buchnera aphidicola str. Bp (Baizongia pistaciae)
MKKQHSKISNFIQKIISEDIQNKKITHVKTRFPPEPNGYLHLGHAKSICLNFDLAQEFKGTCNLRFDDTNPKNEDTCYINSIIQDIKWLEYKWHNKIRYASLYFNKIYQYAIKLIKKGLAYVDQLSPEEIRTFRGTLTTSGIDSPYRTQSIEKNLNLFKKMKQGKMLEGTACLRAKIDMASNCITMRDPVLYRIIFSKHHQTNKKWCIYPTYDFTHCISDALEKITHSLCTLEFQDHRKLYEWILKKIDISCNTHQYEFSRLKLEYSVLSKRKLNLLVNNKVVNGWDDPRMPTLSGLRNRGYTPSSIKLFCKKIGITKQENTIQLSFLESCIRSDLNPIAPRYMAVIHPIKIQICNLSDNYEEILNIPNHPTKPNMGCHKSIFSNTLYIDQNDFYENKSELLKKLAIGKEIRLRYSYVIKAHKIKKDQNNNIKTIFCTYDKNTLGKNPKNRKILGVIHWISEKNVLPARFFLYDKLFTIQSPETVKNFLQYINTNSLVIKYGFVEKDILTNISTTAYQFEREGYFCINKNFSITKNLTFNRIVTLKDKIK

SEQ ID NO: 23705 - protein, 404 aa, Buchnera aphidicola str. Bp (Baizongia pistaciae)
MKFPIYLDYAATTPVEFEVMKEMMNYLTLEGEFGNPASRSHKFGWKAEEAVDIARNQIAELIHADSREIIFTSGATESNNLAIKGIAEFYKKKGNHIITCSTEHKATLDTCRYLENKGFDITYLNPLQNGTINIYELQEKIQKNTILVSIMHVNNEIGVIQDIHKISKICQSNNILFHVDAAQSIGKININLKQLKIDLMSFSAHKIYGPKGIGGLYIRRKPRVRLSAQIHGGGHEKGMRSGTLPVHQIVGMGIAYKIAKIKINSDFNYIKHLRNRLWNGIKNIEEIHLNSNFENTVPHILNVSFNYVEGESLIMALKNLAVSSGSACTSSSLEASYVLRSLGLKDELAHSSIRFSLGRFTTKEEIDYTIQLIHQSINRLRNLSPLWEMFKSGVDMNNVNWTHN

SEQ ID NO: 23706 - protein, 450 aa, Synechococcus sp.
MNEFQPVNRRQFLFTLGATAASAILLKGCGNPPSSSGGGTSSTTQPTAAGASDLEVKTIKLGYIPIFEAAPLIIGREKGFFAKYGLDVEVSKQASWAAARDNVILGSAGGGIDGGQWQIPMPALLTEGAISNGQKVPMYVLACLSTQGNGIAVSNQLKAQNLGLKLAPNRDFILNYPQTSGRKFKASYTFPNANQDFWIRYWFAAGGIDPDKDIELLTVPSAETLQNMRNGTIDCFSTGDPWPSRIAKDDIGYQAALTGQMWPYHPEEFLALRADWVDKHPKATLALLMGLMEAQQWCDQKANRAEMAKILSGRNFFNVPVSILQPILEGQIKVGADGKDLNNFDAGPLFWKSPRGSVSYPYKGLTLWFLVESIRWGFNKQVLPDIAAAQKLNDRVTREDLWQEAAKKLGVPAADIPTGSTRGTETFFDGITYNPDSPQAYLQSLKIKRA

SEQ ID NO: 23707 - protein, 425 aa, Xylella fastidiosa Temecula1
MMSNSPQTPLVTRQRLSEVRYEIRGELARRARELEAEGRKLIKLNIGNPGAFGFRAPEHLQRAIADDMGRTDPYTHQQGLPIAREAIAAAYARRHYPDVDADRVFVGNGVSELIDLSLRALLNPGDEVLVPSPDYPLWSAATILNDGRPVYYRCAPENGFQPDAVEIETLVSSRTRAIVLINPNNPSGANYSQELLERIVAISVKHHLLLLVDEIYDQILYDGAVFVPVAPLAGTHPCITFSGLSKVHRACGWRVGWALLSGSSIQVDNLRNAMDLLGALRLCANVPGQYAIDAAVNGPDTITPLCSPGGPLYETRRAVIDACAASEHLSLVVPAGALYAFPSVVGPAARHFDDYAFALELMNEEGVLVVPGSSFNVPYRDHFRVTLLPDAGLIREVFSRIDRALSRRAEVAEKVVPLKSRSAAA

SEQ ID NO: 23708 - protein, 681 aa, Petroselinum crispum
MGGESLATSLPATLLENRDLLMLLTTSIAVLIGCAVVLVWRRSSLRSVKSVEPPKLIVPKVEIEDEVDDGKKKVTVFFGTQTGTAEGFAKAFAEEAKARYEKAKFRVVDLDDYAAEDEEYEAKFKKESFAFFFLATYGDGEPTDNAARFYKWFSEGEEKGDWLNKLQYGVFGLGNRQYEHFNKIAKVVDDGLADQGAKRIVEVGMGDDDQCIEDDFTAWRELVWPELDKLLLDEDDTSAATPYTAAVLEYRVVVYDQLDTATLDRSLSTQNGHTVHDAQHPCRSSVAAKKELHKPASDRSCIHLEFDISHTGLAYETGDHVGVYCENLVEIVEEAEKLLGMQPNTYFSVHIDDEDGTPLTGGSLPPPFPPCTVRSALAKYADLLSSPKKSALLALAAHASDPTEADRLRLLASPAGKDEYAQWVVASHRSLLEVLAEFPSAKPPLGVFFASVAPRLQPRYYSISSSPRMVPSRIHVTCALVYEKTPTGRIHKGVCSTWMKNAVSLEESHDCSWAPIFVRQSNFKLPSDTKVPIIMIGPGTGLAPFRGFLQERQALKDAGAELGTAVLYFGCRNRNLDFIYEDELNKFVESGSISELIVAFSREGPTKEYVQHKMLQKASEIWNLISEGAYIYVCGDAKGMARDVHRMLHTIAQEQGALDSSKAESWVKNLQMTGRYLRDVW

SEQ ID NO: 23709 - protein, 699 aa, Petroselinum crispum
MQSESMEVSPVDLLASILKIDSVESMTLLLENRDVLMLLTTSFAVLIGLGLVMMWRRSTTMTKSAKKLEPAKIVIPKFEMEEEVDDGKKKVTIFYGTQTGTAEGFAKALAEEAKARYQDAIFKTIDLDDYAGDDDEYETKLKKESMVFFFLATYGDGEPTDNAARFYKWFCEGKERGEWLNNLQYGVFGLGNRQYEHFNKIAVVVDDGLVEQGAKRLVPVGMGDDDQCIEDDFTAWRELVWPELDQLLLDEESKAAATPYTAAVLEYRVQFYNQTDTSSPLVRSMSKLNGHAVYDAQHPCRANVAVRRELHTPASDRSCTHLEFDISSTGLAYETGDHVGVYTENLIEIVEEAERLIDISPDTYFSIHTENEDGTPLSGGSLPPPFPPCSFRTALTRYADLLSTPKKSALVALAAHASDPSEAERLRFLASPVGKDEYAQWLVASQRSLLEVLAAFPSAKPPLGVFFASVAPRLQPRYYSISSSPRMAPSRIHVTCALVHETTPAGRIHKGLCSTWMKNAVSLEDAHVSSWAPIFVRQSNFRLPTDSKVPIIMIGPGTGLAPFRGFMQERLALKESGAELGSAVLYFGCRNRKLDFIYEDELNHFVETGAISEMVVAFSREGPAKEYVQHKMSQKASEIWDMISHGAYIYVCGDAKGMARDVHRMLHTIAQEQGALDSSHAESLVKNLHMSGRYLRDVW

SEQ ID NO: 23710 - protein, 356 aa, Alnus glutinosa
MSLLSDLINLNLSDATDKVIAEYIWIGGSGTDLRSKARTLTGPVNHPSKLPKWNYDGSSTGQAPGEDSEVIYILRQFFKDPFRRGNNILVICDTYTPAGEPIPTNKRHGAAKIFSHPEVVAEVPWYGIEQEYTLLQKDVKWPLGWPVGGYPGPQGPYYCGIGADKAWGRDIVDAHYKACLYAGINISGINGEVMPGQWEFQVGPSVGISAGDEVWAARYILERITEIAGVVLSLDPKPIQGDWNGAGAHTNYSTKSMRNNGGYEIIKKAIEKLGLRHKEHIAAYGEGNERRLTGRHETADINTFKWGVANRGASIRVGRDTEKEGKGYFEDRRPASNMDPYVVTSMIAETTLLWKP

SEQ ID NO: 23711 - protein, 322 aa, Striga asiatica
MMNRPNSITYIFSVISLWLLFNIQCGAQLSSTFYESTCPNATTIIRNSIRGAIARERRMAASIIRLHFHDCFVQGCDASILLDETPSIQSEKTAFPNVNSLRGYDVIEAAKREVERVCPGVVSCADILTLAARDASAYVGGPSWNVRLGRRDSTTANRDQANTDLPSPFATLNNLISAFDTKGLNTRDMVALSGAHTIGQAQCFLFRARIYSNGTDIDAGFASTRTRRCPQTGRDANLAPLDLVTPNSFDNNYFKNFVQRKGLVQSDQVLFNGGSTATIVSQYSNNPRLFASDFASAMIKIGEIAMHGRPNGIYKVVCSAIN

SEQ ID NO: 23712 - protein, 321 aa, Striga asiatica
MATAKLVFFLFTLTILLTILTIPSQAQLSRTFYAGTCPNALRTIRASIWRAVARERRMAASIIRLHFHDCFVQGCDGSVLLDDAPTIQSEKSAFPNLNSARGFDVIEAAKRDVERLCPGVVSCADILAVAARDASVAVRGPSWNVRLGRRDSTTANRDAANRELPGPFSTLDGLITSFKNKGLSERDMVALSGSHTIGQAQCFLFRSRIYSNGTDIDPFKARLRRQSCPQTVGIGNLSPLDLVTPNRLDNNYFKNLRQRRGLLESDQVLFSGGSTDSLVFSYSINPHLFASDFANAMLKMSEIQPLLGSNGIIRRVCNATN

SEQ ID NO: 23713 - protein, 719 aa, Elaeis guineensis
EIPYNIGFLQVATLSLQGNRLTGKIPEVIGLMQALAVLDLSENELVGTIPPILGNLSYTGKLYLHGNKLTGPIPPELGNMTKLSYLQLNDNKLVGTIPAELGKLEELFELNLANNNLEGPIPQNISLCTALNKFNVHGNRLNGSIPLQFQKLESLTYLNFSSNNFKGKVPWELGRIINLDTLDLSNNHFSGPIPDSIGDLEHLLELNLSRNNLNGPLPTEFGNLRSGQTIDISYNKLSGPIPEELGQVQTIDTLILNNNDLYGEIPVQLTNCFSLSSLNLSFNNFSGDVPLSKNFSRFPQESFLGNPMLCGNWLGSSCGQDLHGSKVTISRAAVVCITLGCITLLSMMLVAIYKSSQPKQFIKGSNRTVQGPPKLVVLRMDMAIHTYEDIMRITENLSEKYIIGYGASSTVYKCVLKNSKPIAIKRLYSQYPHNLHEFETELETIGSIRHRNLVSLHGYSLSPHGNLLFYDYMENGSLWDLLHGPSKKVKLDWDTRLKIAVGAAQGLAYLHHDCNPRIIHRDVKSSNILLDENFEAHLSDFGIAKCIPAAKTHASTYVLGTIGYIDPEYARTSRLNEKSDVYSFGIVLLELLTGKKAVDNDSNLHQLILSKADDNTVMEAVDFEVRSPAWIWGCQKAFQLAICAQRSDRPTMHEVARVLVSLLPVPSLKPGLVPQKPMDYAHYLAAGPDVKIKRTHDDNSSSDGQWFLRFGEVISKNTL

SEQ ID NO: 23714 - protein, 499 aa, Hordeum vulgare
MARCRRRSGCTAGAALLLLLALALSGGGGAAPQGAEVTGLPGFDGALPSKHYAGYVTVDEGHGRNLFYYVVESERDPGKDPVVLWLNGGPGCSSFDGFVYEHGPFNFESGGSVKSLPKLHLNPYAWSKVSTMIYLDSPAGVGLSYSKNVSDYETGDLKTATDSHTFLLKWFQLYPEFLSNPFYIAGESYAGVYVPTLSHEVVKGIQGGAKPTINFKGYMVGNGVCDTIFDGNALVPFAHGMGLISDEIYQQASTSCHGNYWNATDGKCDTAISKIESLISGLNIYDILEPCYHSRSIKEVNLQNSKLPQSFKDLGTTNKPFPVRTRMLGRAWPLRAPVKAGRVPSWQEVASGVPCMSDEVATAWLDNAAVRSAIHAQSVSAIGPWLLCTDKLYFVHDAGSMIAYHKNLTSQGYRAIIFSGDHDMCVPFTGSEAWTKSLGYGVVDSWRPWITNGQVSGYTEGYEHGLTFATIKGAGHTVPEYKPQEAFAFYSRWLAGSKL

SEQ ID NO: 23715 - protein, 303 aa, Physcomitrella patens
MDQYEKVEKIGEGTYGVVYKARDRLTNETIALKKIRLEQEDEGVPSTAIREISLLKEMHHGNIVRLQDVVHSEKRLYLVFEYLDLDLKKHMDTCPDLAKDPRLIKTFLYQILRGIAYCHAHRVLHRDLKPQNLLIDRRTNALKLADFGLARAFGIPVRTFTHEVVTLWYRAPEILLGSRHYSTPVDVWSVGCIFAEMVNQRPLFPGDSEIDELFKIFRTLGTPNEEVWPGVTSLPDFKTAFPKWPPKPLSSVVPSLEPAGIDLLEVCDLSTPASEFCVVLFFFIISTFSLIVRLKQCMQSYAS

SEQ ID NO: 23716 - protein, 316 aa, Arabidopsis lyrata
SKEVAPDNEFEKRIRPEVIPANEIGVTFADIGSLDETKESLQELVMLPLRRPDLFKGGLLKPCRGILLFGPPGTGKTMMAKAIANEAGASFINVSMSTITSKWFGEDEKNVRALFTLAAKVSPTIIFVDEVDSMLGQRTRVGEHEAMRKIKNEFMTHWDGLMSNAGDRILVLAATNRPFDLDEAIIRRFERRIMVGLPSVESREKILRTLLSKEKTENLDFHELAQMTDGYSGSDLKNFCTTAAYRPVRELIKQECLKDQERKKKEEAEKSSEEGSETKEEVSEERVITLRPLSMEDMKVAKSQVAASFAAEGAGM

SEQ ID NO: 23717 - protein, 413 aa, Arabidopsis lyrata
SRRSFDFRLSSLHKGKAQGSSFREYSSSRDLLSPVIVQTSRWANLPPELLFDVIKRLEESESNWPARKHVVACASVCRSWRAMCQEIVLGPEICGKLTFPVSLKQPGPRDAMIQCFIKRDKSKLTFHLFLCLSPALLVENGKFLLSAKRTRRTTRTEYIISMDADNISRSSNSYLGKLRSNFLGTKFLVYDTQPPPNTSSSALITDRTSRSRFHSRRVSPKVPSGSYNIAQITYELNVLGTRGPRRMHCIMNSIPTSSLEPGGSVPNQPEKLVPAPYSLDDSFRSNISFSKSSFDHRSLDFSSSRFSEMGISCNDNEEETSFRPLILKNKQPRWHEQLQCWCLNFRGRVTVASVKNFQLVAARPSQPQGTGTAPATAPAHPEQDKVILQFGKVGKDMFTMDYRYPLSAFQAFA

SEQ ID NO: 23718 - protein, 121 aa, Arachis hypogaea
DGITHVGGDMFVSVPKADAIYMKWILHDWSDQHCIKILKNCRKAIPENGKVIIVDHVLQPEGNDLFDDTGFAFDMMLLAHNAGGKERTEENWKWLFAETGFPRYNIIKIKALPSIIEAFPN

SEQ ID NO: 23719 - protein, 397 aa, Xylella fastidiosa Temecula1
MSASFSPHTITLIKSTVPLLAEHGTTIIEAMYHRLFEDPQIEALFNQANQKNGTQIHALAGAILAYARNIDNPGVLASAIERISQKHVGYAIHPEHYPHVATALLGAIKQVLGDVATSEVLEAWGEAYWFIANLLKDREAVIREGIMTKNGGWIHWRRFVISKRIPESETITSFMLHPEDGGPVVPHQAGQYLTFRFDAAGMPGMKRNYSISCGPNSDHYRITVKREHGTGASAFLHDQAKVGTIIECTPPVGDFFLPSVIERPIVLLSGGVGLTPMVSMMEQIAEAYPDAQVWYVHGTQNRETHAMDAHIRALVSRHKHMKATTFYTQRSEADDAEAGFITIDWLRANTPFQKADFYLCGPRPFLRTFVRDLIGAGVPAAQVHYEFFGPMDEEMAA

SEQ ID NO: 23720 - protein, 563 aa, Xylella fastidiosa Temecula1
MCSIFGIFNLQPSDNLQILRHQALECSQRQRHRGPDWSGVYVDVGAILVHERLAIVDPAGGAQPLFSEDGTLALAVNGEIYNHAVLKGTLQQPYAFQTHSDCEVINALYREETPTSFLNRLNGIFAFALWDKTTGRGLIARDPMGVVPLYWGHDQDGRLRVASEMKALVEHCPDVAQFPPGHWYDTTTGTLVKYYERPWKNYSAVEGVQVSLQELREAFERAVHRQLMTDVPYGVLLSGGLDSSLVAAVAARYARHRIETNDQSEAWWPRLHSFAIGLKDSPDLSAANVAAEALNTVHHGFEYTFQEGLDVLPEVIRHIETYDVTTIRASTPMFLLARRIKAMGVKMVLSGEGSDEIFGGYLYFHKAPNAREFHEELVRKLNALYYYDCLRANKAMMAWGVEPRVPFLDREFLDVAMRMDAQHKMVDKTSNGPQRMEKGILRAAFDGYLPPSILWRQKEQFSDGVGYGWIDGLKAHAETQVSDHALATAETRFQVNPPQTKEAYYYRSIFERFFPSPAAAETVPGGKSIACSSPAAIAWDASFATMADPSGRAVSGVHQQALL

SEQ ID NO: 23721 - protein, 126 aa, Xylella fastidiosa Temecula1
MQLSLLKAKIHRATVSHSELNYEGSIAIDGLLLEAAGLYEFEKVHIWNVTNGARFTTYAIRAEHGSGIISVNGGAARYVQVGDLVIVAAFAQMSEDEAAVFRPNLVYVNAANAMTHTNHSIPTQVA

SEQ ID NO: 23722 - protein, 764 aa, Xylella fastidiosa Temecula1
MSNDTFKQAAIDYHRTQPAGKIKVVATKPMLTQRDLSLAYSPGVAFACQAIVENPQQASELTARGNLVAVISNGTAVLGLGNIGPLAGKPVMEGKGVLFQKFAGIDVFDIEIDESDPDKLVDIIASLEPTFGGVNLEDIKAPECFIVERKLRERMSIPVFHDDQHGTAIIVGAAVLNAMVITGKKIGEVKLATTGMGAAGVSCVNMLVSLGLNPDNILAYDREGVIHTGRTDLDPEKQRYARDTDKRTLAEIVEGADIFLGLSAAGILTPEMVATMAPDPVIFALANPIPEIMPEVVCAVRTDAIIGTGRSDYPNQINNVLCFPYLFRGALDVGATTINEEMKIACVKAIAALARCEASDLGAAYGGETPSFGREYLIPRPLDPRLLVELSSAVAQAAMDSGVATRPITDMSAYHDKLSQFVYRTSLMMKPVYDRARADKQRVVYAEGEEEVILRAVQNVIDEGLAFPILIGRPDVIESRIQRMGLRMKVGVDFEVTNIHDDPRFNDYWQYYHGVTERRGVTVSAAKELMRSRPTLIASVMVARGEADALLTGAVGRFHKRLGYARSVIPLEPRVSSTAAMTGVINQHGAFFFVDTHVQEDPSAEQITEATLQACYRLRLFGIEPSVALLSHSNFGSHDSRDALKMRQVRELLLKRSPRLNIDGEMQADTAWDEVLRERIMPNTTLKGRANLFVFPNLEAANIAYNLVRVFTDGVAIGPILMGISKAVHILTSSTTSRRVMNMTAIAAVDAQIRKQFEGGKRGG

SEQ ID NO: 23723 - protein, 401 aa, Xylella fastidiosa Temecula1
MSNKNIVLAFSGGLDTSFCIPYLKEQGYAVHTVFADTGGVDEDERDFIEKRAAELGVASHLTVDGGPAIWDGFVKQLVWAGEAYQGQYPLLVSDRYLIVDAVLQRADALGTCAVAHGCTGMGNDQVRFDLAIKAQGDYTIIAPIREIQKEHTQTRLYEQKYLEERGFGVRAKQKNYTINENLLGITLSGGEIDKWEAPGEGARGWCAPRSAWPTDPLTVAIKFVEGEAVAVDGKPLSGPQILMKLNKLFASYGVGRGIYTGDTVIGLKGRIVYEAPGLTALLTAHRALEDAVLTKQQNRFKPHIARKWVELVYEGFFHDPLKTDLETFLKSSQANVNGEIVLETRGGRVDAVAVRSPHILTSKGVTYAQTADWGIEEAEGFIKLFGMSSTLYAHVNRSLRS

SEQ ID NO: 23724 - protein, 868 aa, Xylella fastidiosa Temecula1
MSASPTAERWIVLKFGGTSVSRRHRWDTIAMVVRKRLEEHGTRVLIVVSALSGVTNELTAIAQGVVDSAKRVTALEQRHRDFLVELGLDAQAVLGTRFAMLSDLLQDARAVTRSLDWQAELLGQGELLSSTLGAAYLGASGIDIGWMDARDWLTALPPQPNQSEWSQRLSVSCQWKSDVEWRTRFDAQRAQVLITQGFISRHQDGGTAILGRGGSDTSAAYFGALLGAACVEIWTDVPGMFSANPKEVPDARLLTRLDYYEAQEIATTGAKVLHPRSIKPCRDTGVPMLILDTERPDVLGTRIDAEVEPVLGVKAISRRDGIVLVSMEGIGMWQQVGFLADVFTLFKKHGLSVDLIGSAETNVTVSLDPSENLVNTDVLTALSTDLSQICKVKIIVPCAAITLVGRGMRSLLHKLSEVWATFGKERVHMISQSSNDLNLTFVIDETDADGLLAVLHFKLIESGAMPVQDRAVFGSPWREIIGHVRTRVMPWWHSARMRLLAMRDEEGIGPCYVYHLPTVRERARQLNAVAAVDQCYYAIKANPHPAILRTLIEEGFGLECVSLGELRHVFEVVPHLVPSRVLFTPSFASRVEYEQAFLLGVNVTLDNVEALRLWPEVFRERTLWLRIDLGYGDGHHEKVTTGGKTSKFGLSVTRIDEFIDVAKTLNITVTGLHAHLGSGVESGNHWSRMYDELAGFASRIGSVSTLDIGGGLPIPYRPDDEPFDVGAWGASLAEVKALHPKFQLVIEPGRFLVAEAGVLLTRVTQVIEKDDILRVGLEAGMHTLIRPALYDAWHGVENLTRLDETPHVLCDVVGPICESSDVFGRRRHLPAATASGDLMLIADAGAYGFSMASTYNLRGLPAEVVLDA

SEQ ID NO: 23725 - protein, 580 aa, Xylella fastidiosa Temecula1
MSEITTTDAQAQPEKKDFIRQIIREDLAHGTHTHIHTRFPPEPNGYLHIGHAKAICLDFGVAAEFGGHCTLRMDDTNPSKEDPAFAAAIQEDVSWLGFHWNALRHTSDYFEVLYLAAEKLIADGKAYVCDLNSQQVREYRGTLTEAGRPSPWRERSPDENLELFRQMRAGTFPDGTRTLRAKIDMASGNINLRDPALYRIKHVEHQNTGNTWPIYPMYDFAHALSDAIEGITHSLCTLEFEDHRPLYDWCINHVDLPNNSHLLKPLLDKGFPQEPSQPRQIEFSRLNINYTVMSKRKLTALVDEKLVEGWDDPRMYTLQGLRRRGYTPAAMRLFVERIGISKQNSIIDFSVLENCLRENLDTIAPRRMATIAPMKLVLTNLAEDHEEQLIFPNHPKDDTQGTRTVPFSRELWIERDDFSEAPPKGWKRLIPGGEVRLRGAGIARIDEVVKNAEGHVIALHGWLDPTSRPGMEGAHRKVKGTIHWVSAPHAVAAEIRLYDRLFSIEKPDDNTDGKTYRDFLNPDSKRVVHGYIEPAAAQTAPEHAFQFERLGYFVTDRHDHDATHPVFNRSVTLRDTWQRD

SEQ ID NO: 23726 - protein, 333 aa, Xylella fastidiosa Temecula1
MAVSLLQHNHLSDTALIASARRVIEIEREALTLLNERIGAPFVAACRLILNSHGRVISTGMGKSGHIARKIAATLASTGTPAFFVHPGEAGHGDLGMITDSDVILALSYSGESDEVRMLLPVLKRQGNPIIAMTGRPQSTLAQAADVHLDVSVTTEACPLDLAPTSSTTTSLVIGDALAVALLDARGFTAEDFARSHPAGHLGRRLLLHITDVMHSGDDLPAVHEEATLSEALLEMTRKRLGMTAIVDNEGRLQGVFTDGDLRRALDSNIDVRNARINEVMTRHPKTINADQLAAEAARLMEANKINGLIVVDPQQRAVGALNIHDLLHAKIV

SEQ ID NO: 23727 - protein, 278 aa, Xylella fastidiosa Temecula1
MLKIDTLHASVAGKEILKGLSLDIAPGQVHAIMGPNGAGKSTLGHILAGRDGYDVTAGQVTFDNRPLLTLQPEERAAAGLFLAFQYPVEIPGVNNTYFLRSALNAQRKARGEEELDSIQFLKRVREKLAVLHLKDELLHRGVNEGFSGGEKKRNEIFQLAVLEPKLAILDETDSGLDIDALKTVADGVNALRSPERAFLVITHYQRLLDYIKPDVVHVLAEGRIVETGGPELALELEQHGYTWLKNRVIPTSETMPPSPHDPHTDTPRLKAPTPRENV

SEQ ID NO: 23728 - protein, 1058 aa, Xylella fastidiosa Temecula1
MLALGVSWLRGTRPLPHSLRELWRQWLLLAVLWAAGLTVVVLPALWPLAVLCNSGSLEGALVLSAAVSVSLLVLWRTWPLWPQIERGPCTFRSSWYVFPSHNLASWSGLGIAVLVLMIGSVAVALAWPGLLTLSLRWVLAVVAALLAPAVHVLLQRVQSRGLTARVEPPTPREPLPEVTATPETVPPIPSDRLVADLYEAARTGRVDRALQLLEAGADPHALPFENARDQRSLMVLAAILPDLRLLRELIVRRVDVNQRHRGMTALLAATRDSWHGRSEAVQTLLANGADPRVVDADRNTPLHHAARSSDPGVAALLRDAAAELDALNCDGLSPLAAACQVGNWRLAKFLLERGAQTEPIGGTPVLLAAAGTDEDDPTGVLLLLKHKARVDARDRLRRTALHEAAEAGHSEIVKALLEAAANLEVRDMAGRTPLLEAARQARIVVLECLLSHKADRLAVDSEGRNAVFLACLSERVTLPLIRGLLEIGVPVVADKHGHRPVDIAAKVGCWSIVSLLDPDYPLPVVVSEPVSVGGVLDRPPLTLLRDGLQLGSFGSLSELIELCSAEELGTLLHDPHFALNPDVVDWLLTHGASPTVPNSSGNVPMFSLLALGIEAVPVLKVFLRHGVSPAGAGGLGLWLASCMQCDAASRSLEQFACELLEHGADPLMPSPDGDSPLVLTVRLGWLRLQQALLEAGVNCEVRDSYGMTALHQATVLGREAALKLLVMHGANPDARTPDGQTSLGMALSSSRRDLATWLDWRIWPLPRRPLRHADVPDAAMRGDTEAVRRLLDLGLPVDAVDTQGCTALLRAAGGGHLQVVRLLLMRGADLQRAANNGATPLSAAVSMRQNEIIPALLDAGAPLEYRFPEEMTVLMLAAALGFPDIVMRLIAAGADVHASNVQGFAALHCAALYGFSARDKTRLLALLDALLLAGANPGQLADGKITPLLLLLGARAERGAVCDEQVVLAGVERLLEEGETLDVVDTRGFGPLHLAALHGLPLLVKCLLRAGADSERRDALNRSPREIAIMRGFIDVAGQFESEQLGVASMGRFLRDEC

SEQ ID NO: 23729 - protein, 483 aa, Xylella fastidiosa Temecula1
MLKKHLFIVKPIEPTNHTGTGKGGTQLKRSLTAGQLVMLGIGAVIGAGIFVLSGHAAAEYAGPAVVLSYILAGIACALAGLCYAEFAAMLPVSGSAYSYAYATLGEFTAWFIGWNLILEYMFSASTVAVGWSGYLNSFLSSFGYGLPASLSSAPLDVVDGRLIYSGGLINLPAVAIVAAISGLCYVGITQSAFVNSITVAIKVSVIVLFIAFAARYVNPDNWVPFVPDNVAPGKYGIEGVIRGAAVVFFSYIGFDAVSTTAGEAKNPQRDMPIGILGSLAICTVIYIAFSGVLTGLMHYSQLDTPKPVATALETYPTLSWLKHVVEIGAIAGLSSTMLMMLMAQPRIFYAMSQDGLLPKLLSKVHPKFQTPHVGTLIVGACACALAGLFPISLLGDLVSMGTLLAFATVCIGIVVLRRTRPDLPRPFRVPVYWVIAPTGAAACLYLFWQPFTEHWPLMVGWTVLGLVMYGLYGYQHSKLRHGG

SEQ ID NO: 23730 - protein, 477 aa, Xylella fastidiosa Temecula1
MFKQLWATKLSQPSQDSAEGLSMQRVLGVWGLTALGIGAVIGGGIFVITGQAAANHAGPAIMLSFALAAICCTFCALAYAEFAAMVPVSGSAYTYTYATFGELAAWFIGWMLVLEYGVSAAAVAVSWSGYFLSLLQHLGIHLPAALVNAPLDGTLHATGAIANLPAATIVLLLTWLCYFGIRKSSKINIAMVALKSGLILLIIGVGWKYVNPDYWQPFIPTNQGPGKYGWNGVLHGASMVFFAYIGFEAVSVAAQESHRPQRDLPISMMSALAICTVLYIMMAAVMTGLVPYTQLGTDEPVVTAVAAHPQLGWLRVVVEIGALVGLSSVVLVMLIGQPRIFMIMAGDGLLPPIFSTIHSKHRTPHINTVITGLGIALLAAVFPLDVLGELTSMGTLIAFTAVCAGVLILRCTRPDLPRPFRMPAAWLFCSAGVLSCITLLSAMTRHNWMLMSVWTVLGFSLYFSYGYRHSKLHQEST

SEQ ID NO: 23731 - protein, 298 aa, Xylella fastidiosa Temecula1
MTQTVPYRCGRIAVIGRPNVGKSTLTNALVGTKISIVSNRPQTTRHRLLGIATFPEGQIILVDTPGLHREQKHPMNRLMNRTARGSLEDVDAALLVTESTHWNEEDTLAYNLLNDTGIPVVLVINKIDRFKDKSALLPFLTHINENHTFATIHPVSALKRKGLKTLVSDLLALLPEGGPMFSEDEITDRSQRFLASELVREQVMRQLGKELPYATTVEIEYFTENTGLFRIGALIWVERESQKAIVIGKGGVRLKEIGVKARQQMERLFQTKVFLETWVRVRKDWSNNEAALKTFGYE

SEQ ID NO: 23732 - protein, 638 aa, Xylella fastidiosa Temecula1
MGKIIGIDLGTTNSCLAIIEGGKGRVIENSEGDRTTPSIVAYTKDGEVLVGAAAKRQAVTNPKNTFYAVKRLIGRKFGDAEVQKDLDLVPYKITQHDNGDAWVATADGKKLAPQEISAKVLEKMKKTAEDFLGEKVTEAVITVPAYFNDSQRQATKDAGRIAGLDVKRIINEPTAAALAYGLDKKGGDRKIAVYDLGGGTFDVSIIEIAEVDGEKQFEVLATNGDTFLGGEDFDKRVIDYLVDEFNKDQGIDLRKDPLALQRLKDAAERAKIELSSSQQTEVNLPYITADASGPKHLNIKLTRAKLEALVDDLVRKSIEPCRIALNDAGLRTSDVQEVILVGGQTRMPKVQQAVADFFGKEPRKDVNPDEAVALGAAIQGGVLAGDVKDVLLLDVTPLSLGIETMGGVFTKIIEKNTTIPTKASQVFSTAEDGQSAVTVHVLQGEREQARFNKSLAKFDLAGIEPAPRGQPQIEVSFDIDANGILHVSAKDKKTNKEQKVEVKAGSGLSDSEIQQMVADAEAHREEDKKFQELVQARNHADGLIHSTRSAIKEHGSKVGGELIGRVEASLAELEAAVKGDDKNQIEAKSKTLEEVAQSLHMAATAEQQSGSTGAGAGASAKVDDVVDAEFTEVKADKK

SEQ ID NO: 23733 - protein, 67 aa, Xylella fastidiosa Temecula1
MQSGTVKWFSDQKGFGFILPDDGTPEVFVHYSGINSKGFRSLHEGQRVTYDVTQGPKGPQASNITPI

SEQ ID NO: 23734 - protein, 308 aa, Xylella fastidiosa Temecula1
MSLDSALRSRIETLLHSNRVVLFMKGRPGMPQCGFSAKAAGILQALGVEYAHVNVLDDQEIREGIKRYGDWPTIPQLYIDGELIGGSDIVSQMYENGELSTLLGVAAPDLTPPSITITPTAVEMLKGTLANAPGSTLALSIDSRFQPTFELAPINTQAIAAEYNGLRVQFDLASARRAEGITIDWVDDIRGQGLVIDNPNAPQPIQELSPGDAAAQVDAGVLTLVDVRPADERAVASVAVPFRTMDGGERAVLEQLPKGTPLAFLCHHGGRSLQAAEHFRSLGFTSIYNIGGGIDAWSTQVDPGVPKY

SEQ ID NO: 23735 - protein, 357 aa, Xylella fastidiosa Temecula1
MKFVDEAEIQVIAGNGGDGCVSFRREKFIPLGGPDGGDGGDGGSVWLVADENLNTLVDFRHERIFKAQRGVNGMGQQMYGKAGQDKIISVPIGTVVINVQTDEVIGDMVRHGDRLLVAKGGTGGLGNMHFKSSINRAPRQARPGEQGEERTLKLELKLLADIGMLGFPNVGKSTFIRAVSAATPKVADYPFTTLYPNLGVVKIEAYSSFVIADVPGLIEGAADGVGLGMQFLRHLQRTKLLLHMVDISATADAYGNEKVGVGLLPIEQVRKLEIELERHDPALLDKPRWLVLNKADLMPQEEAQALAEALIAELRWTAPWYLVSAVSREGTWPIMKSAMTLFEHQREVAAEQRVSSR

SEQ ID NO: 23736 - protein, 382 aa, Xylella fastidiosa Temecula1
MQVTSKLPQVGTTIFSVMSQLADVYGAVNLGQGFPDFPVPLRLQEALAGAVREGHNQYPPMIGVAGLRQGIAAKVLRCYGAQVDADVEITVTSGATEAIFNAIHAVVGAGDEVIVLDPAYDCYEPGIVLAGARAVHVPLDAVSFKVDWERVGAAITSRTRLLIVNSPHNPSGALFSADDMRALAALLDGTDILLISDEVYEHIVFDGCGHESVLRWPQLRARAFVISSFGKTYHCTGWKIGYAIAPSALSAEFRKVHQYNTFTSFGPAQYAFAAMLHEEPGYVEQVGLFYQARRDCFREQLLTTKLVPLPVSGGYFQLVDYGAVSDLSDVEFSRWLAVEKGVASIPLSPFYETAPAGQRLVRLCFAKNDMTLGAAIERLQRL

SEQ ID NO: 23737 - protein, 480 aa, Xylella fastidiosa Temecula1
MSFLPSFLKRKSIDLITVHEEGRRLVPTLSWPHLIAFGIGAIVGTGIYTLIGVGAEKAGPAVLLSFVIAGVICACAALAYAEMATMMPVAGSTYTYSYVALGEGIAWIVGWSLILEYSLVVSTVAVGWSGYMTGFLKSVGVDMPLALTAGPYAGGIINLPAAVITCVVAGLLIVGTKESTTLNAVLVVVKIIALSVFVVIALPHFDMAHLKPFMPYGFIKSIDTGGVERGVMAAAAIIFFAFYGFDAISTAAEETKNPSRDLSIGIIGSMIGCTLIYVLVALAAIGAMHYTVFGPSTEPLALILRQLDQGNTARLIGAAAIIALPTVLLAFLYGQSRILFVMSRDGLLPRGLSTVNARTGTPIATTLFTAVLVATAAGLVPLGEIAALANAGTLTAFIAVALCLLVLRVREPQRVRAFRTPLAWVVGPIAIAGCLYLFWSLPKMTQYLFLLWNALGLCVYLVYGRHTSLLSKAVSIDTPR

SEQ ID NO: 23738 - protein, 861 aa, Xylella fastidiosa Temecula1
MRMDKLTSRFQNALADAQSLAVGRDHTIIEPVHVFSVLLDQQGGSTRPLLVQAGVNVPLLRERLTEILEALPKVSGQTVNVSPSNELSRLFHRTDKLAQQHGDQFMASEWFVLAVVDDSGGLGQALRAAGAEKKKIEAAIDKLRGGETVQTENAEEQRQALEKYTIDLTARAESGKLDPVIGRDEEIRRTIQVLQRRTKNNPVLIGEPGVGKTAIVEGLAQRIVNGEVPEGLRSKRLLSLDLGALIAGAKFRGEFEERLKGVLNDLAKNEGRVILFIDELHTMVGAGKAEGAMDAGNMLKPALARGELHCIGATTLDEYRKYIEKDAALERRFQKVFVGEPTVEDTIAILRGLKEKYALHHGVEITDPAIVAAATLSNRYITDRQLPDKAIDLMDEAASRIRMEIDSKPEELDRLERRLIQLKIQREMLKKEKDEASKQRLVDLERDIEVLDREFSDLEEVWRSEKAALQGATKIKESIEQAKLDLEAAQRRQDYAKMSEIQYGVLPALEKQLVAASQAEQHDFTLVQEKVTAEEIAEVVSRWTGIPVSKMLEGERDKLLRMEADLGRRVVGQDEAIKVVSDAVRRSRTGLSDPNRPSGSFLFLGPTGVGKTELCKALAEFLFDSQDAMVRIDMSEFMEKHSVARLIGAPPGYVGYEEGGYLTELVRRRPYSLILLDEVEKAHSDVFNILLQVLDDGRLTDGQGRTVDFRNTVIVMTSNLGSHQIQELSGDDSPEVYTQMKAAVMGVVQAHFRPEFINRLDDIVVFHPLDKAQIKQIARIQLRGLEKRLAESELKLDLDDRALELLGNVGFDPVYGARPLKRAIQSQLENALAQQILAGAFVSGDTVQVGVDGGKLVFSKV

SEQ ID NO: 23739 - protein, 624 aa, Xylella fastidiosa Temecula1
MRRYPPAHALPTGSAPYIENLAKQHHRPPATACRKLPPMPAPHIPNRLQRLNHLRILWPFMRRHLALFSGWLIALAVSSAATLTLPSAFKQMIDHGFSSEGQINRSFALLLLVAVILAVGTAARLFSVSLLGEKIITDLRSQLYAHLIGLDASFHDRNRSNELVSRLATDSELLRSIIGSTMSVATRSTVTAIGSLIMLFITSPRLASLSLVVIPFVILPIFLGAQHLQKAARTSQDRIADTNSFAAETLRALRTVQAYAREHYERTRFDRALETSLQAARQRIHIQTWVTAASIVLIFSAIVGVLWAGAHDVIAGRMSAGTLGEFVLYALISGGSIGSLAEVWNELQRAAGGMGRIFELLKEKNTLSVPATPTLPPHPLRGEIRFERVGFHYPQRPETPALDGIDLHIRPGETIAFVGPSGAGKSTLLSLLLRFYDPTHGRILIDGVDLRQTDPKVLRTHIALVQQQPTLFTASAMENIRYGRLDATTAEIEIAARSSEADGFIRALPQGYATELGEHGLSLSGGQQQRIAIARALLKEAPILLLDEATNALDAQNEQAVQQALERLMTGRTTLIIAHRLVTILKADRIVVMDQGRIVAQGTHSELIAAGGLYAKLARLQFIE

SEQ ID NO: 23740 - protein, 73 aa, Xylella fastidiosa Temecula1
MSDTSDDRQIGTVKWFNDNKGFGFITSNNGPDLFVHYRAIQGNGFKSLQEGQKVSFVAVQGQKGMQADQVQVL

SEQ ID NO: 23741 - protein, 322 aa, Xylella fastidiosa Temecula1
MPTIQDERNLMVFSGNANKPLTQSICKELGVRMGKSLVSRFSDGEEQVEIEESVRRQEVFVVQPTCAPSAENLMELLVIIDALKRASVSSVTAVIPYFGYSRQDRRMRSLRVPITAKVAAKMISAIGADRVLTIDLHADQIQGFFDVPVDNVYASPLLLADIWRAYGTDNIIVVSPDVGGVVRARAMAKRLGDTDLAIIDKRRPRANVATVMNIIGEVNGKTCVLVDDLVDTAGTLCAAAVALKQNGATKVVAYITHPVLSGPAMDNINNSELDELVVTDTIPLSDAARECRKIRQLSVAELLAETIRRIAFGESVSSLYVD

SEQ ID NO: 23742 - protein, 104 aa, Xylella fastidiosa Temecula1
MLVMERIQAEIEEHPLVLFMKGTLEFPMCGYSSRATQALLAAGARHLHIVNVLAEAEIRANLPRFSNWLTFPQLFIHGELIGGCEIILELFESGDLKRILSEAD

SEQ ID NO: 23743 - protein, 1489 aa, Xylella fastidiosa Temecula1
MVSSTRQRIEESMLYDASDERDACGFGMVAQLDDQPSRALLEIAIAALSRMTHRGGVAADGLTGDGCGLLIRKPDAFLRALAGEAGIALGPRYAVGMVFLPGERAAAAHCRQVLEAELQRVGVRLCGWREVLINRSVCGQLARDTLPHIEQVFVDIDPKHSEDAFGVALFLARRRAERQLCDYHDFYVATLSPYAISYKGMVLPDKLPVFYPDLQRSELSSSVIVFHQRFSTNTLPRWPLAHPFRLLAHNGEINTIEGNRRWAQARSKVWRSPRFDIAEFDPVISMKGSDSQSLDNMLELLIAGGMDLLQALRILVPPATRTLEFKDADLASFYEFYGLNTEPWDGPAGIVAYDGRYAACMLDRNGLRPARWMLTADRHFLVASEAGVWELPVERVIRKGKLGPGEMMAIDLKRGDLLDSDAIDRINRARAPYKQWLQQGVTYLQTELIDPSLVEEPFSDQTLCSYQKLFQLSTEEVEQVLRPLAETEQEAAGSMGDDTPMAVLSAQIRPLYDYFRQAFAQVTNPPIDPLRESIAMSLTTQLGRETNIFHAGPETVNHVILDSPVLSQRKLRQLLKMPQYLEKNRLIDLSYTVDEGLQAGLKRMCDEAEQAARDGIVMLLLSDRYPVPERPMAHALLATGAVHHHLCRVGLRCDVNLIIETGTARDPHHMACLLGFGATAVYPYLSYQMLFNLGRRGILKLQKAGEQSQIGRSYRKGIYKGLSKIISKMGICTIASYRGAQLFEIVGLDPDVVALCFPDTPARIGGVSLMQLHTEACELTARAWNDRIAPEVGGLLKYVHGGEYHMYNPDVVMTLQHATRTGDAADWRFYMDAVHTRPPSALRDLLQLKKAEIPTPLDQVAPATDVLCRFDTAAISLGALSPEAHEALAVAMNRLGGRSNSGEGGEDPARYGTERRSKIKQVASGRFGVTPEYLINAEVLQIKIAQGAKPGEGGQLPGHKVNDLIARLRYAKPGIGLISPPPHHDIYSIEDLAQLIYDLKQVNPQALVSVKLVSHVGVGTIAAGVVKAGADLITVSGHDGGTGASPISSIRYAGVPWELGVAEVHQALVANDLRERTTLQTDGGLKTGLDVVKAALLGADSFGFGTAPMIVLGCKYLRICHLNNCATGVATQDERLRANHFTGLPERVENFFRLLAEEVRQWLSYLGAMSLDDIIGRTDLLQQLEVSSREGVRVNLSRLLTNACYEGTHCAAQRLYESPDSLSVQIDSLLADAIANKTGGDYRFLIHNTDRSVGTRLSGAIARVHGNHGMEDAPLHLRFRGTAGQSFGAFNVGGLHLELEGEANDYVGKGMAGGCLVVRPPRGARFEARHTPILGNTCLYGATGGELFAAGRVGERFAVRNSGALAVIEGAGDHCCEYMTDGVVLVLGKVGLNFGAGFTGGLAYVLDIERDFVDRYNHELIDIHRVSVEGFENYRQHLRHLVVRHRALTGSIWAQQILDEFRDYIGRFWLVKPKAASIESLAESLRSAA

SEQ ID NO: 23744 - protein, 565 aa, Xylella fastidiosa Temecula1
MNQTRVLLIFSWLTVATLLWMDWSKNKNETLEISASHNLGVDSNLELEHAVPQIHAGAVPLQKDSQLIAAAPKVPVINVTTDVLQLKLDGFSILAADLLRFPQSKDRGAKPIKLLTDDPNYPYSATTGWVSQSNSPVPNLSTFLPEQPDVSYKLANDQNRLVVPFIWTAANGVSIRRTFTFERGRYAILIRDEIRNSGETPWNAYVFRKLSRVPIPNILNRAMTNPDSFSFNGAVWYSEKGGYERRAFKDYMNDGGLNREIGGGWIALLQHHFFTAWIPQKDQASLYLLAQNGSRDIAELRGPAFTVAPGQTTTTEARLWVGPKLVEQITKEHVKGLDRVVDYSRFQLMALIGQGLFWILSHLNSLLHNWGWAIVGLVVLLRIAMYPLSASQYKSAAKMRKFQPRLQQLKERYGEDRQKFQQAMMELYKKEKINPMGGCFPILIQMPIFFALYWVLVESVELRQAPWLGWIQDLTTRDPYFILPLLNIVIMWATQKLTPTPAGMDPIAGKMMQVMPLIFGVMMAFVPSGLALYWVINGGLNLLIQWWMIRQHADFSRKRSRENIK

SEQ ID NO: 23745 - protein, 177 aa, Solanum lycopersicum
MPRERDPLVVGRVVGDVLDPFTRTIGLRVIYRDREVNNGCELRPSQVINQPRVEVGGDDLRTFFTLVMVDPDAPSPSDPNLREYLHWLVTDIPATTGSSFGQEIVSYESPRPSMGIHRFVFVLFRQLGRQTVYAPGWRQNFNTRDFAELYNLGLPVAAVYFNCQRESGSGGRRRSAD

SEQ ID NO: 23746 - protein, 175 aa, Solanum lycopersicum
MPRDPLIVSGVVGDVVDPFTRCVDFGVVYNNRVVYNGCSLRPSQVVNQPRVDIDGDDLRTFYTLIMVDPDAPNPSNPNLREYLHWLVTDIPAATGATFGNEVVGYESPRPSMGIHRYIFVLYRQLGCDAIDAPDIIDSRQNFNTRDFARFHNLGLPVAAVYFNCNREGGTGGRRL

SEQ ID NO: 23747 - protein, 140 aa, Solanum lycopersicum
MPRVDPLIVGRVIGEVLDPFTRSVDLRVVYNNREVNNACVLKPSQVVMQPKVYIGGDDLRTFYTLIMVDPDAPSPSNPNLREYLHWLVTDIPATTDTRFGNEIVCYENPTPTMGIHRFVLVLFRQLGRETVYPPGWRQNF

SEQ ID NO: 23748 - protein, 226 aa, Clostridium tetani E88
MVIIDLLKGVVYMKFFIDTANVEEIKKVAKWGVLDGVTTNPTLIAREGRDLKEVIEEICSIVDGPISAEVISLESEKMVEEAKELIKIHKNIVIKVPMCEEGLKAVSELTKLGIKTNVTLIFSAQQALLAAKAGATYVSPFLGRIDDIGSFGIQLVEDIVTIFTNFGIESEIICASIRTPIHVLECARVGGDIATVPYKVFAQMLKHPLTDRGIEQFLEDYKSMNK

SEQ ID NO: 23749 - protein, 133 aa, Clostridium tetani E88
MAFVSRTEKVENIILCTLMASLDRGGVFIMYAVVVTGGKQYKVTEGDVLFVEKLDAEVDAAIELDNVLAISKDNGEFVVGKPVVEGAKVTAKVLKQGKAKKVVVFKYKPKKHYRKKQGHRQPYTKIQIEKINA

SEQ ID NO: 23750 - protein, 416 aa, Arabidopsis thaliana
MEAKPLASSSSEPNMISPSSNIKPKLKDEDYMELVCENGQILAKIRRPKNNGSFQKQRRQSLLDLYETEYSEGFKKNIKILGDTQVVPVSQSKPQQDKETNEQMNNNKKKLKSSKIEFERNVSKSNKCVESSTLIDVSAKGPKNVEVTTAPPDEQSAAVGRSTELYFASSSKFSRGTSRDLSCCSLKRKYGDIEEEESTYLSNNSDDESDDAKTQVHARTRKPVTKRKRSTEVHKLYERKRRDEFNKKMRALQDLLPNCYKDDKASLLDEAIKYMRTLQLQVQMMSMGNGLIRPPTMLPMGKYSPMGLGMHMGAAATPTSIPQFLPMNVQATGFPGMNNAPPQMLSFLNHPSGLIPNTPIFSPLENCSQPFVVPSCVSQTQATSFTQFPKSASASNLEDAMQYRGSNGFSYYRSPN

SEQ ID NO: 23751 - protein, 266 aa, Arabidopsis thaliana
MFSLSFPSSSSALLPSLVAFDSSRRLSLQPKKLNRLQSHLFSPQHLSFSQSNVSRYRAFCVSSSSPPEGTVSVVDFHEKDWSFLESMEIDSTEHTQKIERIIKAGELSESSRVLVSIGSETFVDRLVESSPSQLLLIVHDSLFTLACIKEKYDKVKCWQGEMIYVPEKWSPLDAVFLYFLPALPFDLDELFKTLSQRCSSGARVVISHPQGRLGLEQQRKEFSDVVVSDLPDESTLSNVAEKHSFELTQFVDEQGLYLAVLKSSKQ

SEQ ID NO: 23752 - protein, 204 aa, Arabidopsis thaliana
MFSLSFPSSSSALLPSLVAFDSSRRLSLQPKKLNRLQSHLFSPQHLSFSQSNVSRYRAFCVSSSSPPEGTVSVVDFHEKDWSFLESMEIDSTEHTQKIERIIKAGELSESSRVLVSISSETFVDRLVESSPSQLLLIVHDSLFTLACIKEKYDKVKCWQGEMIYVPEKWSPLDAVFLYFLPALPFDLDELFKTLSQRCSSGTMF

SEQ ID NO: 23753 - protein, 220 aa, Clostridium tetani E88
MSHLNNALVEFFVIIHKFISSIITNPNYSYGVAIIFVTLIIKLILLPLNIKSMRSTIRINEIQPEIQKIQKKYKNDPQRLQQEQMKLYKEYNINPFGSCLPLLLQWPILIALYYVFNNIQGISGVSFLWVKDLASPDIVLAVLAGATQYYSGLLMNPKGDNTQAKTASNMNLSMSIMMIFISSRLKAALVIYWVTGNLIQMGQTILTKKLEQKHSANKDA

SEQ ID NO: 23754 - protein, 252 aa, Clostridium tetani E88
MSKMEKDYEIHYYEVDYKKRALITSIINYLGDIATKQSEDMNVGLKYMEENKIAWVIYKWDINIKEFPVYGDIVKIKTSPKCFKKFYAYRDFEVINSKGEKIIEALSQWLLIDTDKRRLKKIPLELFKFYGVEDVECEDIEISKINELKKVDNEKIFNVRYSDIDTNGHVNNSKYISWIIETVPLEIVLNYSLKNLNMTYKKETVYGDMVRVLCEIENKDDMAICRHSIADKNNNELNIAETTWQKNKEAEN

SEQ ID NO: 23755 - protein, 320 aa, Clostridium tetani E88
MVMIHERKSLKIFAGNSNDKLAKDIADIVGVPLGSAEVGRFSDGEITVNINETVRGIDAFIIQSTSAPVNDNLMELLIMIDAFKRASAGRITAVIPYYGYARQDRKTKARDPITAKLVADILTAAGADRVLTMDLHASQIQGYFDIPLDHLLGVPILGKYFAENGFDQREDVVVVSPDLGSVTRARKFADRIHAPIAIIDKRRPKPNVSEVMHIIGDIKDKTCILIDDMIDTAGTITNGANALVERGAKDVYACCTHAVLSGPAMERIDNSVIKELITLNTIDISKIKPSDKIKVLSVAPVFAEAIRRIYEEISVSKLFD

SEQ ID NO: 23756 - protein, 246 aa, Clostridium tetani E88
MFIYDKLNIYVIVGGIKMINGKIAKILIVDDDQNICEVIKMYLESAGFDTRVCHDGKESQSIFIEYNPDLVLLDIMLPSMDGIDVLKWIRKEHETPVIMLTAKGETFDKVLGLELGADDYMVKPFEPKELLARVKAVLRRFNSDNVSKEALQFNGLTIDIDSYTVIYNGKEIKMPPKEFELLYYLASNKNRVFTREQLLCEVWGYDYPGDSRTVDVHIKRLREKLEEGSNWQIETVWGVGYKFEVK

SEQ ID NO: 23757 - protein, 603 aa, Clostridium tetani E88
MNNKKFSSATAWVIIFVFVIFASLYLARNNETATTITFNKFQKHWINNEIKSFEVKEDKMTVSGNLKDGSQYETIVPFERLNQFISAHDKNGEVIEKYALPAKTPMWLNWIPTALVILMFVIFWFMFMQQSQGGGGNRNVMNFGKSRAKMATPDKQKVTFNDVAGAEEEKEELAEIVDFLKQPKRYIEMGARIPKGVLLVGPPGTGKTLLAKAIAGEAGVPFFSISGSDFVEMFVGVGASRVRDLFDQAKKNSRCIIFIDEIDAVGRQRGAGLGGGHDEREQTLNQLLVEMDGFGVNEGIIMVAATNRPDILDPALLRPGRFDRQILVGAPDVRGREEILKVHSRNKPLSEEVKLDVLAKRTPGFTGADLENLMNESALLAVRKDKKQIDMEELEEAVTRVIAGPEKKSRVIDEEDRRLTAYHEAGHAVVMKLLPHADPVHQISIVPRGMAGGYTMHLPEKDRAYMSKSKLEEEIVGLLGGRVAEKLIIGDISTGAQNDIERATTIAKKMIMDYGMSEVLGPIAFGSGHDEVFLGRDFGKSKDFSEEVASKIDKEVKGIIDTAYDRAQNLLMENINKLHAVAKELLEKEKLEAEEFEEIFESN

SEQ ID NO: 23758 - protein, 471 aa, Clostridium tetani E88
MSKLPLVEGVLNYIKKKNIYFSMPGHKQGEGFLSTDIGKEIKEQILKLDITEVNGVDNLHNPTGIIKESQIKLSELYGSKKSYFLVNGSSSGNMIMIFSSFEEGDKIIIDRNCHKSIFNTIIIRKLKAIYVKNKIHKGFNLPLSVDSSHIIKTIKENKDAKGIIITYPNYYGICCDLEKIIIEAKKHNMKVLIDCAHGAHFVANEKLPKNPVKLGADMVVMSSHKTLPSLTQTAFLHVNNEELIDKVDFYFDTFISTSPSYLFLVSMDYSRYYLEEYGEETYEKLIKLLKIYKQKINSLKHLHIIDQVDIMSEYTLDKSRYILHIEEGYSANLLMDYLLKNNIQCEMNDTYNIVIIVSPFHVEKEIKYLYEVLLNCDFSKFKIKEMDILNHNIPKKKLEPFEVLNKGKKIVEVEESLDCVCAENIVPYPPGIPIIMMGEIMDEETIEVIKYYEDNGIEVIGLHENQINVVK

SEQ ID NO: 23759 - protein, 391 aa, Clostridium tetani E88
MKEVVIVSAVRTAMGKFGGTLKDVPAVELGATVIKEAINRAGIKPEIIDEVIMGNVIQAGLGQSPGRQAAVKAGIPVEVPAFTLNKVCGSGLRAVGLAAQMIKAGDADVVIAGGMENMSAAPYVLPNARWGQRMFDGKMVDTMVKDGLWESFNDYHMGMTAENIAEKWELTREMQDEFACASQNKAEKAIKEGKFKDEIVPVVIKTRKGEVVFDTDEFPRFGATVESLAKLKPAFKKDGTVTAGNASGINDGAAALVIMSAEKAEELGLKPLAKIASYGSKGLDPAYMGYGPVGATKVALEKAGWKVEDLDLIEANEAFASQSLAVAKDLGFDMEKVNVNGGAIALGHPVGCSGARILVTLLHEMQRRDSKKGLATLCIGGGMGTALLVER

SEQ ID NO: 23760 - protein, 328 aa, Clostridium tetani E88
MRSIGFLISPKENENRRALLPVDVEKIQNKESLYFQKGYGEVLGISDYEYLKAGANIASKDDILKKDIICDPKIGDAGYLSKLKENQILFGWIHAVQNLNITNILLRNKVKCIAWEDMYEEGRHVFWRNNEIAGEAAIMQAFQCYGKFPYETKAAILGRGNTAKGAYRILNGLGSEVTVYGSKLENLFKIEMHKYDVIINAVLWDVKRRDHIINKDDLKKLKNGALIIDISCDSNKAIETSISTTIQNPTYSIDGITHYVVDHTPSLFFKTATKSISKELTKYIDILVEEKEDENTVLSDAIIISNGNILDEKITRYQNRENVQTDIA

SEQ ID NO: 23761 - protein, 280 aa, Clostridium tetani E88
MKKNKIILAAPVLKWVGGKRQLMGEIKKVLPKTYTAYYEPFIGGGAVLFELQPNKAVINDVNGELINLYNIIKYDVESLIEDLRKHENTSEYFYRIREIDRSKEEYEKLTNVEKASRIIYLNKTCFNGLFRVNKAGEFNSPFGKYKNPNIVDEVTLRAVNKYFNKANIKILNGDFEQSLKRIRKGAFVYLDPPYDPVSSSANFTGYDKGGFNRAEQIRLKNLCDKLDKKGVKFLLSNSATDFIKELYKDYNIKVVKAKRTINSNGNSRGAVDEVLVRNYE

SEQ ID NO: 23762 - protein, 608 aa, Clostridium tetani E88
MMYIKKFTFLKVERRRKMSKRKNAFRSVKKAKDTKGTVKRIWQYLKKENKKALWTVVFLVLVTSVLGILGPYFIGVAIDKYIAVKNLKGTIYIIAILAIIYILTSIFTWIQTYIMVIVSQRTIKDIRGELFSKLQKLSLKFFDNNAHGDIMSRATNDIDNLNNALTQGVVEILTGIITIVGVIIAMFLLNPIMALSTLIIIPIMFFITKYLGKLTKKSFVERQQILGDLNGLIEETIGGQDIIALFNREEYVFNKFEEKNNMLKGKTTKAEILSGAMRPIMNFINNLGFALVVAIGGILTLKGMATIGIIASFVNYSRQFSRPLNQLASLYNTIQSAIAGGERVFEIIDEVPDIEDKDSAIEIESLKGEVDFINVNFEYKEDTPILKNINFQCNSGETIALVGPTGSGKTTIINLLTRFYDINNGDIKIDNLDIKEYNIKSLRNRVGVVLQDTYLFSGTIKDNIRYGRLDATDEEIIEAAKLANAHSFIKHLPKKYDTIVTSQGENLSHGQRQLLSIARVILSNPDILILDEATSNIDTRTELQIQKGLKNLMKGRTSFVIAHRLKTIEEADKILVIKNGEIIERGSHETLMQDQGFYHNLYVSQFKI

SEQ ID NO: 23763 - protein, 272 aa, Clostridium tetani E88
MKKTLSILVVFLVSMLLIIGCGNKNTSNKGNDKNNKSLSTLEKIKKDGVLKMGLNDTYPPMEFRDESHNLVGFDVDLGKEIAKKLGVKLEIITNDWSGIVLSLKSKKYDMILSTMSITEERKKEMNFSEPYIVGGQKLVVKKDEKDIKKVEDLKGKVIGCQMGTTGEVSANKIEGIKELKKYDGVTQAFNDLSVGRINAVIADGQVAGYYLKKRSGDLVLLDTKLTSEPVGIGFRKEDTDIRDEVQKTLDELKKEGTLSKLSEKWFGYDIYK

SEQ ID NO: 23764 - protein, 398 aa, Clostridium tetani E88
MTKEKVVLAYSGGLDTSIIIPWLKENYDLDVIAVCIDVGQDDDMEEVKKKAIKTGAVKVYVEDAKEEFVKDYVFKALKANALYEEKYMLGTSLARPLMAKKLVEIAHKEGAKYICHGCTGKGNDQVRFEVGIASFDPSIKIIAPWRIWDIKSREDAIDYAKEKGVEVPVTKKKIYSVDKNILHTSHEGGELEDPKNAHNKEMYSMVTPPEKAKDEPTYVDIYFNKGVPEKINGKEISPVELLNTLNKIGGENGVGVVDIVENRLVGMKSRGVYETPGGTILYEAHKDLESLTLDKLTLHCKQELAQKYGEIAYDGLWFTTLRESLDAFVDVTQENVTGTVKLKLYKGNIMNAGIDTKNALYDEGISSFGASELYSHKDAEGFIKLFSLPSKIKALKNK

SEQ ID NO: 23765 - protein, 366 aa, Clostridium tetani E88
MLKVMRTPSRYVQGSDSILDIYTHTSFLGDSYFIIADNIVMEMTKGKIEKAFENKNCNIVFENFNGQCTRKEINRLLDKIKENNCTIIVGVGGGRTLDTAKAIGHFGNLPIVIIPTVAATDAPCTALSVLYTEEGNFEEYLFYEKNPDVVLVDTTVIAKAPVRFMIAGMGDALATYFEARACLNSNSLNLVSGSISLAAYSLSKLCYETLLDYGYKAKLSVEDKVVTPSVEKIIEATTYLSGVGAENGGLAAAHSVYNAFTLLEECEKYMHGEIVAFGTLVQLVLEDSPMEEINEVASFCVTVNLPLTLAEIGINEINEEKLMKVAKAACAPGETIHNMLGGVTPEQLYNAILVANKLGLQYKNLC

SEQ ID NO: 23766 - protein, 533 aa, Clostridium tetani E88
MDKAKILIVDKIDTKGIELLESEPNFEVDIKMGLEREKLLNIIENYDGLIIRSDTNIDIELMNMAKKLKVVGRAGNGVDNIDIPEATKRGIIVANTPDSNTISACELTIGLLLAQSRNIAKTDRFLKEGNWDRDSFMGTELFNKTLGIIGLGRIGSLVATRMNAFDMKVIAYDPYISDERFKRFNVEKKDTLEDLLKESDFITIHTPRTEETINIISEKELELMKDGVRIVNAARGKLISEKALCKGLKKGKIASVGIDVHEHEPRYSADLYEYENVVVTPHIGATTIEAQQNVGVTIAKQVINGIKGDIVPNAVNLPTIHRDELKEIKPYIDLAEKLGKIYYQLNKGAIKLVDITYWGDIGCQDTEMVTIAFIKGLLEPVMADKINYINAMIKAEEGGIGVNSKKICNHHNNYSNLITIKITNNTGDTSFTLSGTISNRNEGKLVEIMEYEVDVKPTECMVFLQNYDVPGVIGHVGTFLGTNGVNVATMQVGRKLKGDKALMLLNVDDKVTQDTLLGLQKHDDILWAKFVQL

SEQ ID NO: 23767 - protein, 244 aa, Clostridium tetani E88
MLEIQNVGLKVEENGEKITILDDINLKLEEGKIYVITGPNGGGKTTLSKLLMGIRKPTSGKIIFYEEDITNLDINERAKLGMGYAFQQPARFKGIKVKELLEIATKVDGEKDLDLCKVLLDVGLCPQDYLNREINNSLSGGELKRIEIATILVRDLKLAVFDEPEAGIDLWSFQKLVETFKNLNEEKRLTLVIISHQERIIQLADEVIIISDGKIENKTSQDEILSKVTFGSECGCNAVCERRN

SEQ ID NO: 23768 - protein, 341 aa, Clostridium tetani E88
MEIKCSERLIIPKEYKTELDLKETAIAIKEVKDCFERALAKQLNLIRVSAPLFVRCDKGLNDNLNGVERPVKFTVKDDNEAAVEIVHSLAKWKRMALYRYNFNADEGLYTDMNAIRRDEELDNTHSIYVDQWDWERIIKKEDRNEEYLKDIVRKIFKAFKETEEHINKLYPFLGEVLPEEVFFMTTQELEDMFPDLTAKEREDAITKEKKAVFLMKIGKTLESGEKHDGRAPDYDDWELNGDILFWNPVLNKAFELSSMGIRVDEESLLKQLKLANCEERKELQFHKMLLEKKLPYTIGGGIGQSRMCMLFLKKAHIGEVQSSIWPEEMIKFCEEKGMTIL

SEQ ID NO: 23769 - protein, 357 aa, Clostridium tetani E88
MKYYNTTYIIILGEINYNVCYKWNIYPLGYITALYKEGIFMKIVVLEPLGVSEEKIKNIALKLMDKDHELILHNEKSEDIEVLKKRVETADVLILANMPLKKEVIEAATNLKMISVAFTGIDHINMETCRKNNIMVCNSAGYSTSSVVELTFGLILSLLRNIVPLNDEVRNGNTKQGYSQYDLAGKTLGVIGAGDIGTEVIRIGKAFGCNVLVYNRSEKQHIKELGATQTTLDEVLKNSDIVTLHIPSNNETKGLINSEKLAMMKKDALLINTARGPVVDNKALAEALNKGELGGAGIDVFDMEPPVPEEYELLKTNNSVLTPHIGFATKEAMERRAEIVFRNIEKWIEGNPENIVE

SEQ ID NO: 23770 - protein, 501 aa, Clostridium tetani E88
MESNIVLSMEDITKSFPGVKALKNANLELRKGEVHVLLGENGAGKSTLMKILGGVYTKDSGKIYLEGEETEIVSVNEAKAKGISIIFQELNLIDHLTVAENIFIGNENLKNKKLKIVDYKTMNSKTESILRELDIEVKPNELVKNLSIGQKQMIEIAKSVSFDARIIVMDEPTSSLTDKECEKLFQIVNKLKKQGVAIVYISHKFEEFKYIADRITIMRDGEYVKTVEFKNTSEDELVKLMIGRELGNRFSDEYIKKGEIIFKAENIVTNKINNVSFEVRAGEIVGLYGLMGSGRTETAMAIFGYDKIKSGKLYIENKEVKIKHPKDAVRAGIAYVSEDRRNLGVVVGFSVGENISLSSMDKVSSSGVISEKEEKEVANKFIESLKIKTPSALQKVKNLSGGNQQKVAIAKWLQRNSKIYIFDEPTRGIDIGSKAEIYKLIKDLAKKGHAIILISSEMPEIIGLSDRIVVMSNSCVSGSIENDIQNKKDVEEKIMKYAIGK

SEQ ID NO: 23771 - protein, 203 aa, Clostridium tetani E88
MMNKDVLFSIKEVMEEEIKAIKNVCENLDENYEKAVDLIHNCKGKVVFTGVGKSGHIGEKLAATFASTGTPAFFVHSTEALHGDLGMIEEKDIVIAISNSGETKEVLSIISSIKYIGSKIISITGNNNSSLAKESDVALEAKVDHEADPLNLAPTSSSTVALVLGDALAITLSQLKEFKRENFAVFHPGGSLGKRLFNEMKKL

SEQ ID NO: 23772 - protein, 300 aa, Clostridium tetani E88
MNTRNYLTPAEIATTTVETGVKKAKLSFSHQLILGILAGAFIAFASEGSNMAAFNLFENHETYGLGKALAGSMFGIGLMLVIFAGGELFTGNTLIIISVLEKKVTLREMLRNWCTVYMGNLIGSLIIAFMMVESGLFNSGAHILGGQTIKIAAYKVGLSFMPALYLGIMANWLIGLAVWLAHGAKSMVGKIFGIFCPIGLFVTSGFEQSIANMYYIPAGILAKSNINWVNASKLSPEELANLNWSNFIFNNLIPVTLGNIIGGAIFVGLIYWFVYLKPDTSQVMENTVVINNTLENEINL

SEQ ID NO: 23773 - protein, 486 aa, Clostridium tetani E88
MNTGLLSFFIIVIYLALMLGITIHSSRKSKASNAEGFFLANRGVNSFLLPLTMIAAMQSTFAFLGAPGMYYTHGISYMVLVLSQVWVALMVIYFGNKICKLGKKYGYMSIGDYFQDRYESDYLKVLASCISVLMTIVFLSMQYVGNARAISVISGGMISYKSAILVSAIFSLLYVVIGGASSVVLIDAIQAVILLVGMVLAAAVAIVPAGGVENLFKTAIETTPELLSRPGPKGLYNSKYWIMQFIVLPFGIWLCPHVWIKSLMAKDEKALSRSALSIPVSQVLIYGFATLFIGLAGHQLIGKVDAADNVLPILMNNHANWFLAALIMAAAVAAGMSTINSMILVTSQIVSQDLILMKKKDKVTDKQNLILSRIIILTIVIIGSLIALRPPKTLVQVVQDVAYTGLAQMAPAFVLGLYWKNARKEGAIVGMTVGTIILFATRILNVTPLGIPGFLWGFFINILCLMVISIAFKCKDNTRAEERFFA

SEQ ID NO: 23774 - protein, 207 aa, Clostridium tetani E88
MINDIKKIFENRENGILGNHERSAVVLFLCEDSKGELYIIFEVRALHLDHQPGDISLPGGKIEKNESPQQAATRESLEELNVDLENISIIGAMDCYVTPYNKIIYPFVGLIKDIDIKPNKDEVNHVFKVPLKFFMENEPKCYEVNIVSEFPEDFPYHLIIGGKDYNFSKGNLKQYFYQYNGYVIWGFTALIVKSFIEELKSKINNEN

SEQ ID NO: 23775 - protein, 400 aa, Clostridium tetani E88
MDRKVVYMDYSATTYTKPEVLEEMLPYFTGKFGNPSSKFYSVSQDPIEAIDSARERVAKGINSEKDEIYFTSGGSEADNWAIKGVAFANKNKGNHIITTAIEHHAVLHSCEFLKRNGFEITYLPVNDEGLISLEDLKNAIKDNTILVTIMFANNEIGAIQSIKEIGKICRERKVLFHTDAVQAMGHVPIDVKDMNIDMLSMAGHKFYGPKGIGALYIRKGVRIENLIHGGGQEKGKRGTTENVPGIVGIGKAIELATEHLYEEKERLTKMRDRLIEGLMNKIPHTKLNGPTGDKRLPNNVNLSFIGIEGETLLLDLDFEGVCASTGSACASGSLDPSHVLLSIGLSHGIAHGSLRLTLGEGSTEEDVDYILNTLPDIVKRRREMSPYWEDYLKSLKEGEK

SEQ ID NO: 23776 - protein, 339 aa, Clostridium tetani E88
MKGDNTYMKLMEEIWAKAKANKKKIVLPEGEEERNIEACSKIIENAIADVVLVGNPERIKEIANKLGVNVDGAEIVDPETSDKTADYAKALYELRKHKGVTIEKAEKIIRDPLYFGTMMVQKNDVDGMVSGAIHTTGDLLRPGLQIVKTAPGTSVVSSSFIMMVPGSKFGNEGLLLFADCAVNPNPTAEDLASIAISTAETAKNLCGLDPKVALLSFSTQGSASHDLVDKVVTATKLAKEKRPDLAIDGELQLDAAIVKSVADLKAPNSEVAGKANVLVFPDLQAGNIGYKLVQRFANAEAIGPITQGFAKPINDLSRGCTSDDIVNVVAVTAVQAQNQ

SEQ ID NO: 23777 - protein, 400 aa, Clostridium tetani E88
MKILVINCGSSSLKYQFINMTNEDVLAKGLVERIGMEGSILTHKVNDEKYVIQEPMKDHKDAIKLVLDALTDKEHGVIEDMSEISSVGHRVVHGGEKYANSVLIDEDVMKSLEECIKLAPLHNPPNIIGINACKALMPNTPMVAVFDTAFHQTIPEYAYIYPLPYELYKKYGIRKYGFHGTSHRYVSKRVAELMGKDIKDLKIITCHLGNGASICAVNEGKSVETSMGFTPLEGIAMGTRSGSIDPAILPFLMKELNLNLDDLNNLLNKKSGVYGISGVSSDFRDIEEAAEEGNDRAKLALDVFHYKVRRFIGSYAAAMGGVDCVVFTAGLGENSAESREEICKNLEFLGIKINEKKNNEGRGFAKVISEDNSKVKVFVIPTDEELMIARDTNEIVSNLK

SEQ ID NO: 23778 - protein, 401 aa, Clostridium tetani E88
MKIIVQKFGGTSVSTKERRQRVVEKIIKAKNAGYSPVVVVSAMGRKGEPYATDTLLSLVSNELKKNNLAIDLLMSCGEIISTVVMADELLSKNIDAVPLTGGQAGILTDDNYSNASILKLECDKILDVVEENKIPIVAGFQGISENGFITTLGRGGSDVTAVLLGGALKAEKVEIYTDVDGIMTADPRIVSDATLIKEISYNETFQFSHEGAKVIHPRAVEIAMNENIPIVIKNTLTNCDGTLINNISDLNLNNIITGITHTNDRTQIKIELEQNKENESYFRILDILAENSISIDLINVFPRESIFTIDGKDFEKFSSIMNKINLKYSHIDSCSKIAIIGNRMRGIPGVMAKIIYVLMNENIEVLQTADSHATIWCLVKDIHTEKAIKALHNAFNLSNNK

SEQ ID NO: 23779 - protein, 397 aa, Clostridium tetani E88
MLSKKGKEISPSVTLAITAKANEMKKDGIDVVGFGAGEPDFNTPENIQNAAIKAMREGYTKYTPVSGVVELKDAIVNKFKKENNLIYKSSQIIVSTGAKQCIANLFMAILNPGDEVLISAPYWVSYPELVKLADGVPVFVDCKKENDYKYSIDELEKRVSSKTKAIIISSPNNPTGSIYYEEELRDIAEFCKKHNLIILSDEIYEKLIYGHNKHISIASLNEDTYNRTVVINGVSKTYAMTGWRIGYAAGPGNVIKLMNNIQSHMTSNPNSIAQYAALEALTGEQESINSMVSEFEKRRNYMVERINSINGIECIEPKGAFYMFADINKVIGKKINGEEIKNSVDFCEKLLELYKVAVVPGAAFGLENHIRLSYAISMENIEKGLDRISNCVSELQS

SEQ ID NO: 23780 - protein, 399 aa, Clostridium tetani E88
MLGVSKRVEELRFSEIRKFIPYSDGAKAKGVQVHHLNIGQPDIKTPEEFISAIKNFDEEIVKYEDSQGNKDLIDAFVKYYESINIDIDKEDVYITNGGSEAILYALLTICDLGDSVIVPEPYYTNYNTMAKMAGVDIISFRTYREDGFRIKSKEDIINSIKDNTKAIMITNPSNPTGVVYTKEEIRMISDIAKEKDLFIISDEVYREFVYDDLKFTSFMDMKDILDRVIIIDSISKRYSACGARIGALICKNRNVTENFMKMCQARLSVSSLDQVGAANLINVPKSYIEEVRIEYEKRRNILYEGLCDIPGVHCEKPSGAFYIIAKLPIDNSDDFTKWMLKDFQYNNKTVMVTPAEGFYTTEGLGKDEVRLSYCINSQDLKESMLILKKALEEYNKLRK

SEQ ID NO: 23781 - protein, 378 aa, Clostridium tetani E88
MKKNIYMDYAATTYIKKEVIEAMMPYLTEYYANPSSVYNMSNNLKIVIDEAKEEIADFIGATPEEVFFTSGGTEGNNWAIKGIAYANEEKGKHIITSSIEHPAVLNSCKYLKEKGFEITFLPVDSYGKVDLEKLEKSIRNDTILVSIMAANNEIGTIQHIKSIGEICKRHKVLFHTDAVQALGHIPINAEEMDIDLMTIAAHKIYGPKGIGALYIKKGTKIENILHGGSQERGKRPGTENTAAIVGFKKAVSLLKENGLEESKRIEKLRDKFIKGLLQIENTKINGAMGKERLKGNVNVSFKNIDGELLLMLLDREGIYASAGSACSAGSIDASHVLVALGLEDEFLKGTIRFTLGARNTEEEVDFVLEKLNQLIKKI

SEQ ID NO: 23782 - protein, 231 aa, Clostridium tetani E88
MKKILIVEDDLSIAELQKDYLEISDFEVKICTDGVSGLNEIKENKYDLIILDVMLPKMDGFDILRIIHDTKDVPVLMVSAKKEEIDKIKGLSLGADDYITKPFSPGELVARVKSHIQNYERLKNKFSDKLNNNVISIRGLEINKDSRQVIINDKEVNLAQKEFDLLLHMAQYPNRVFGKDELFESIWGLDSIGDSATVTVHIRRIREKIEFNPSKPQYIETVWGVGYRIRV

SEQ ID NO: 23783 - protein, 588 aa, Clostridium tetani E88
MNILERRILMDTLKKFTVYYKPYKGMFFIDMFCALTLSMIDLIFPLIVRYLLNDIYVNKSSSEIIYFVGLIGLGLLIMYVVRYFCQYYISSWGHIMGARMEADMREDIFLHLQKQSFSYYDNTNTGQLMSRIVNDLFDISELAHHGPEDLFISLLKILGSFIILMNINVKITSVLFFITLFMIYFSYFYNKKMKYIFKKNRVKIASVNSQIQDSLSGVRVVKSFSNEELEVEKFKKGNNEYLRTKEKGYFIMGKFFSGNGFFQGMLYLSVILVGGILIGTGKAQASDLVVYILYINIFLNPIEKLVNFTEQFQKGITGFERFLEILDSEPEIEDKLNAIELKKPKGEIEFKDVTFSYDERSTVLEGINIKIENGKTVALVGSSGSGKTTLCNLIPRFYELDSGFIKIDNKNIRDITLRSLRDSIGVVQQDVYMFAGTIKENIAYGKPEATDEEIYMAAKRANAHDFIMNLEKGYDTFVGERGVKLSGGQKQRVSIARVFLKNPPILILDEATSALDNVSEKYVQQSLDELAKNRTTLVIAHRLSTIKNADEILVLTEDGIQEKGTHEELIEKKGIYESLYNMQFKEVL

SEQ ID NO: 23784 - protein, 256 aa, Clostridium tetani E88
MGMVNSFLVVLSGNGNGRIKMKECTCGRCQHNICAKKVPIFSSLSDEELIKIVNMTGHEAFKKGEIICNEGHKSETLIIINEGKVKLSKLTKDGKEQIIHILSNGDFFGELNLFNDNESYNFSAYAISDVKICTLTKKKMDEILIENPNISLKILKEVTKRLAETETLAQNLATNDADIRIAHMILEFGEKYGINKKQSIEIKLPINREEMANYAGVTRETISRKLSKFEELNIIELVGNKMIIVKDEDALKELAE

SEQ ID NO: 23785 - protein, 295 aa, Clostridium tetani E88
MFKSGFITVIGRPNVGKSTLLNNIMKEKLSIVSHKPQTTRNNIQTILTQEDCQIVFVDTPGMHKPKHKLGEYMVKVAEEALKGVDIVLFMTTPEGQLGRGDVYILEQLKRIKQPVFLIVNKIDENDQGKVAETLKNYHDAYPFFKEIIPISASKDKNVDTLLELMKKYLPEGPKYYPEDMITDQQERFIVAEIIREKALRLLSEEVPHGIAVEMMTMKKNEKGNYEINATMLCERDSHKGIIIGKNGSMLKKISQYARQDIEKFLQSKVSLKVWVKVKKEWRDDNRILKELGYRQ

SEQ ID NO: 23786 - protein, 618 aa, Clostridium tetani E88
MAKVIGIDLGTTNSCVSVMEGGNPVVITNSEGARTTPSVVSFQDNGERLVGQIAKRQAITNPHKTIMSIKRYMGTDHKETIDGKEYTPQELSAIILQKLKADAEAYLGGTVTQAVITVPAYFNDSQRQATKDAGRIAGLEVLRIINEPTAASLAYGLDKMDTNQKILVYDLGGGTFDVSILELGDGVFEVKSTNGNTKLGGDDFDQRIIDHIAETFKKDSGIDLRTDKMALQRLKEAAEKAKIELSSSTQTNINLPFITADATGPKHIDMNLTRAKFNELTQDLVEGTLTPMKKALQDAEMSIGEIDKVILVGGSTRIPAVQDAVKNFTGKEPSKDVNPDECVAMGAAVQAGVLTGDVKDVLLLDVTPLTLGIETLGGVATPLIERNTTIPTRKSQVFSTAADGQTSVEIHVVQGERQMAADNKTLGRFTLSGIAPAPRGIPQIEVTFDIDANGIVNVSAKDKGTGKEANITITASTNLSDDEVEKAVNDAKKFEEEDKKRKESVEVKNNAEQIFYQTEKTLNELGDKVSAEDKATIEEKLNALKGVKDGEDIEAIKKATEDLTQAFYQISSKIYQDAGAPGAEGFDSNMAGEANAGQNANNDDNVVDADYKVEDDEK

SEQ ID NO: 23787 - protein, 425 aa, Clostridium tetani E88
MFIDKAKIYVKSGDGGNGSVSFRREKYVPLGGPDGGDGGKGGDIVLVSDPDMTTLLDFSYKRKYKADAGEGGSRSRSYGKDAEDLYIKVPMGTVVKEASTGKIMADLSHENDKVVVVKGGRGGRGNARFATATRQAPNFAEPGMPGEEREIILELKLLADVGLVGFPNVGKSTILSTVSNAKPKIANYHFTTLKPNLGVASIKGLEPFVIADIPGIIEGASEGVGLGLDFLRHIERTRVLIHVIDISGIEGRDPYEDFLKINEELKNYSVKLWDRPQIVAANKSDLVAEDKRFEEFKEKIQKLGDYKIFKISAATGEGIKELMAEVSKTLATIPVTQVEIKREDLFIPEEKRFTYEILREDDGTFVVEGSFVDRLLGSVNVNEPDGLRYFYVVLKNKGVIDDLIKKGIKDGDMVRLNDFEFEFVI

SEQ ID NO: 23788 - protein, 486 aa, Clostridium tetani E88
MYRLNQSETPLFDALMEYVNRQTIPFHVPGHKKGVGIDEEFKNFIGENPFKIDVTVFKLVDSLHHPTGPIKKAQALASDAYGSDASFFCIHGTSGAIQAMIMSVVKSGDKIIIPRNVHKSVTSGIILSGATPIYMQPELDKRVGIAHGVTPETVEKTLKENPDAKAVLIINPTYYGVATDIKKIADIVHNYDIPLIVDEAHGPHLAFNDTLPISAIEAGADICCQSTHKIIGALTQCSLLHVRSKSIDVNRVQQMLSLLQTTSPSYILMASLDCARRQIALNGKELLDKSIALSNYAREEINKIPGFYCFGKEIVGRPGVFAIDPTKITITCRDLGITGFELDMILSNQYHIQLELSDLYNGLAVGSFGDTKENIDALINALKEISKEYVNNENKKSDFIDIPAIPKQVQIPRDAFNSEKVVLPLKDSEGRVSGEFLMAYPPGIPVLCPGEIITQEIIDYIQKLKDTGLYVQGTEDLEVNFIKVVK

SEQ ID NO: 23789 - protein, 297 aa, Clostridium tetani E88
MARLVECVPNFSEGKDKKIIETIVDEVRKIENVKLLDYSSDEDHNRSVVTMIGDPEDVKKAVLGLAKKSIELIDMTKHHGGHPRMGAVDVIPFTPVSDVTMEECVELANEVGKEIGSLGVPVYLYEDAATTPERQNLAKVRKGQYEGFFEKIKESEWKPDYGPQEMNAKSGCTAVGARVALVAFNVNLGTDNLEVADAIAKKVRFIGGGLRFAKAIGLKLEERNIVQVSMNLVNYEKTSVYRAFEMIKMEAKRYGVPVVGSEVIGTVPMKALLDCAEYYLQIENFDISQILEKRLLD

SEQ ID NO: 23790 - protein, 427 aa, Clostridium tetani E88
MRVYYYYINLSKVLRRVFMKREIIEGILTLKIDMVTTLTLAILMFFLGDLLKKRVNFFERFCIPSPVIGGLLFSIFTLILKQANVITITMDATFQSPFMLVFFTTIGLGGSFSLLKKGGKPLIIYWALCGILAVSQNLIGVYMAKVVNLHPLLGVLMGAASMEGGHGAAAAFGNDVEKLGITGATTVALAAATFGLIAGGLIGGPITKTLIDKYNLKPSEEEQKEDVSYKEVAGITDKGNITAYGFLMHLGIITVCMTLGSIAGGWVRAGGTVLPGYVGAMFIAVIFRNLNDKFNFIKLDFYTIDLMGDIALSIFLSMALMTLKLWELANLAGPMFVVLITQVVFIALYTVFVTFRLLGKDFDAAIMCAGMLGHGLGATPNAIANMSTVSEKYGPSTKAFLIVPLVGAFLIDLIGIPNIIYFINVFK

SEQ ID NO: 23791 - protein, 407 aa, Clostridium tetani E88
MVLFMEIKLDMMQTAALAVVIYYFGAWIKTKAQILEKFCIPAPVVGGLIFAFVNLILKQSGALSLELDTTLQKPFMMVFFTSIGMGASIKLIKKGGIQVLIFWLVASLLCVFQNAIGIGLAKVLNQSPLLGMICGSVTMTGGHGTGGAFGPSFEKDYGVVGATATAMASATFGLVMGSLIGGPIGKKLIESRNLKPNVDAYESADTEAAITAKEEAISYDEVFKALALILISIGIGAVLEKFFVSIGVTLPSYVNSMIIAAIILNVGESTGKWHVNSKCMDILGNIGLNVFLSMALVGLKLWELAAVAGPMLIILVAQTIFMALFAYFVTFNLLGRDFDAAVLAAGNCGFGMGATPNGIANMTAVVERYGPAPRAFFVLPIVGAFLIDFSNSIIIAGFLNFVTKYLL

SEQ ID NO: 23792 - protein, 439 aa, Clostridium tetani E88
MNNIIVTKFGGSSLADVNQFKKVKNIVLGDQRRKYVVPSAPGKRHKEDQKITDLLYLCHANVEQNVEIDYIFTIIEKRFKDLAKELGVNIDIDTELENIKKNIKNGATADYTASRGEYLNGLILSNYLGYEFVDPAEIIFFRRNGVFDSDKTQEAVSKRLCNIQKAVIPGFYGSLPNGDIKTFSRGGSDVTGAIIARGVAADLYENWTDVSGFLMVDPNIVENPKNIEKITYRELRELAYMGATVLHEEAVFPVRSAGIPINIKNTNRPEDKGTLIIDDLKPASYAGSITGIAGKKDFVVIAIEKNMMNIEQGYCRKVLSVLEENYVSFEHMPSGVDAVSLVISKNQLNGKLDGILEEIEMKCKPDSIEVYPNMALVAIVGRGMLRTVGMSAKIFDALAREKVNIRMIIQGSSEINIIVGVENEDFEKALKSIYDEFAK

SEQ ID NO: 23793 - protein, 256 aa, Clostridium tetani E88
MFSQEINKLAVASEKKVALLKESKAKYVLASMLAGIYVGFGILLIFSIGGILSPANSPFTKIIMGVSFGIALSLVLVAGSELFTGNNLIMTIGALEKKVTWKSALNVWIFSYIGNFIGSFLLGLMFTYSGLPKGNIAKFIISGTKNKIAAPSIELFIRGILCNMLVCLAVWCFFKLKEEGAKLIMIFWCLFAFITAGFEHSVANMTLFSIAYMIPHGLEITFGGLMHNMLWVTLGNFVGGALFIGWTYWYISKKQS

SEQ ID NO: 23794 - protein, 356 aa, Clostridium tetani E88
MAHKLLIINPGSTSTKIGVFEDENLIFEETLRHSAEEIGKYSNVYEQFPFRKEVILNVLKEKGFDINTLDAIVGRGGLLKPVEGGTYEVNDAMLKDLRESVRGEHASNLGGIIGNEIAKSLNIPAFIVDPVVVDELQDIARISGMPEIERTSIFHALNQKAVARRYAKENNKSYEDVNIVVVHMGGGSSVGAHKNGKIIDVNNALDGEGPFSPERSGGVPIGDLVRLCYSGKYTLDEIIKKINGKGGAVAYLGTNDFREVEEKALAGDEKYKLILDAFIYQISKEIGKCSVVLEGNVDAIVLTGGIAYSKYVTKEIENKVKFIAPVVLYPGEDELLALTQGGLRVLNGEEKAKEYK

SEQ ID NO: 23795 - protein, 402 aa, Synechococcus sp.
MYGITSTANSTGNQSYANRLFIYEVVGLGGDGRNENSLVRKSGTTFITVPYARMNQEMQRITKLGGKIVSIRPAEDAAQIVSEGQSSAQASAQSPMASSTKIVHPKTTDTSVPVNITRPKTPFLGKCIENYELVDEGGSGTVRHVTFDISEGDLRYLEGQSIGIIPPGEDKNGKPHKLRLYSIASTRHGDMEDNKTVSLCVRQLEYQDPESGETVYGVCSTYLCNLPVGTDDVKITGPVGKEMLLPDDEDATVVMLATGTGIAPFRAFLWRMFKEQHEDYKFKGKAWLIFGVPYTANILYKDDFEKMAAENPDNFRLTYAISREQKTADGGKVYVQSRVSEYADELFEMIQKPNTHVYMCGLKGMQPPIDETFTAEAEKRGLNWEEMRRSMKKEHRWHVEVY

SEQ ID NO: 23796 - protein, 238 aa, Oryza sativa Indica Group
MLPPHLTENGTVMIQFGHKMPDYESSATQSTSGSPREVSGMSEGSLNEQNDQSGNLDGYTKSDEGKMMSALSLGKSETVYAHSEPDRSQPFGISYPYADSFYGGAVATYGTHAIMHPQIVGVMSSSRVPLPIEPATEEPIYVNAKQYHAILRRRQLRAKLEAENKLVKNRKPYLHESRHQHAMKRARGTGGRFLNTKQQPEASDGGTPRLVSANGVVFSKHEHSLSSSDLHHRAKEGA

SEQ ID NO: 23797 - protein, 264 aa, Solanum tuberosum
MCGGAIISDYEPAGNFYRKLSARDLWAELDPISDYWSSSSSSSTVENPYSAQSPVTHSVDKPKKSDSGKSNQLKKGNKTVKVEKEKSTGPRQRKNKYRGIRQRPWGKWAAEIRDPQKGVRVWLGTFNTAEDAARAYDEAAKRIRGNKAKLNFPAPSPPAKRQCTSTVAADPPPALLLESSNIISYNNSPLMNFGYDVQSQTPYYPMEMPVASDDYELKEQISNLESFLELEPADSSDQFSGIVDPDPLNVFLMEDFASTQHQFY

SEQ ID NO: 23798 - protein, 546 aa, Oryza sativa Japonica Group
MRHVVVQCATSWDTPRTSTTNGSHAEPSAVVKAGTAPLIQALKSTANQDVSCFHFPGHNRGKASPPSLSELIGSRTFLHDLPELPELDDLFSPKGVILDAQKRAAELFGSFKTWFLVNGSTCGIQASVMATCSPGDYLIIPRNCHISVISALVLSGAVPKYIVPEYNSGWDIAGGITPSQVDKVVKELEEDRKKVGAVLVTSPTYHGICSNIQGIVNVCHLQGIPVIVDEAHGAHFRFHRNFPSSATEQGADLVVQSTHKVLCSLTQSSMLHMAGDLVDADKVSQCLQLLQSSSPSYLLLSSLDAARAQLSENAESFDEPVSMALETKHQLRIIPGISVLDLSSFLSDFPAIDPLRITLSASDLQLSGYEADDFLAEEHQIVSELVGTQAVTFAVNLGTRRHDVQRLVHSVKHLSEKYFSENGSSSRKENPASSPLDKFSIKLTPREAFFLKKRRVSIEDSLGEICGELICPYPPGIPVLIPGEIVTQDSLSYLMDVRDNGIAISGAADGELKSIMLSSPERKRKPQSEHSIRYKFAHLHGSPEAC

SEQ ID NO: 23799 - protein, 590 aa, Nicotiana tabacum
MALPETQQDTKTLPDAWDYKGRPAVRSSSGGWSSAAMILGIEAVERLTTLGIAVNLVTYLTGTMHLGNASSANNVTNFLGTSFMLTLLGGFVADTFLGRYLTIGIFTTIQAMGVTILTISTIIPSLRPPKCSPGSSTCIPASSKQLMVLYIALYMTALGTGGLKSSVSGFGSDQFDETDKKERGQMIKFFNWFFFFINVGSLGAVTVLVYIQDNLGREYGYGICACAIVIGLVIFLSGTRKYRFKKLVGSPLTQIASVFVAAWNKRHMDLPSDSYLLYNIDDIPGDGNKKAKQRLPHSKEFRFLDKAAIKVQDPESAGITVVNKWNLSTLTDVEEVKLVVRMLPTWATTIMFWTVYAQMTTFSVSQATTMDRHIGNFEIPPASLTLFFVGSILLTCIFYDRAVVPVCRRVLNNPHGTTPLQRIAVGLILSIIAMVAAALTEVKRLNVAHLHGLTNDANAKVPLSVFWLVPQFLLVGAGEAFTYIGQLDFFLRECPKGMKTMSTGLFLSTLSLGFFFSSILVTIVHKVTVKNPWLADNLNQGRLYDFYWLLATLSVLNLMIFLFISRRYVYKEKRLAECGIEMEDSEPACH

SEQ ID NO: 23800 - protein, 590 aa, Nicotiana tabacum
MALPETQQDTKTLPDAWDYKGRPAVRSSSGGWSSAAMILGIEAVERLTTLGIAVNLVTYLTGTMHLGNASSANNVTNFLGTSFMLTLLGGFVADTFLGRYLTIGIFTTIQAMGVTILTISTIIPSLRPPKCSPGSSTCIPASSKQLMVLYIALYMTALGTGGLKSSVSGFGSDQFDETDKKERGQMIKFFNWFFFFINVGSLGAVTVLVYIQDNLGREYGYGICACAIVIGLVIFLSGTRKYRFKKLVGSPLTQIASVFVAAWNKRHMELPSDSSLLYNIDDIPGDGNKKAKQRLPHSKEFRFLDKAAIKVQDPESAGITVVNKWNLSTLTDVEEVKLVVRMLPTWATTIMFWTVYAQMTTFSVSQATTMDRHIGNFEIPPASLTLFFVGSILLTCIFYDRAVVPVCRRVLNNPHGTSPLQRIAVGLILSIIAMIAAALTEVKRLNVAHLHGLTNDANAKVPLSVFWLVPQFLLVGAGEAFTYIGQLDFFLRECPKGMKTMSTGLFLSTLSLGFFFSSILVTIVHKVTGKNPWLADNLNQGRLYDFYWLLATLSVLNLMIFLFISRRYVYKEKRLAECGIEMEDSEPACH

SEQ ID NO: 23801 - protein, 594 aa, Nicotiana tabacum
MALPETQQDSKALPDAWDYKGRPALRSSSGGWASGAMILGVEAVERLTTLGIAVNLVTYLTGTMHLGNATAANNVTNFLGTSFMLTLFGGFVADTFLGRYLTIGIFATVQAMGVTILTISTIIPSLRPPKCEQVGSSSCIPANSKQLMVLYIALYMTALGTGGLKSSVSGFGTDQFDDADKKEKGQMIKFFDWFFFFINVGSLGAVTVLVYIQDNLGREWGYGICACAIVIGLVVFLSGTRKYRFKKLVGSPLTQIASVIVAAWKKRHLELLSDSSLLFEIDDIFGEGNKKNKQKLPHSKEYRFLDKAAIKEDHDLESNGTNVVINKWKLATLTDVEEVKLLIRMLPTWATTIMFWTVYAQMTTFSVSQATTMDRHIGTFEIPPASLTVFFVGSILLTVIFYDRVIVPICRRFMNKPHGLTPLQRIFTGLVLSILAMIAAALTEVKRLKVAHLHGLTNDANATIPLSVFWLVPQFLLVGAGEAFTYIGQLDFFLRECPKGMKTMSTGLFLSTLALGFFFSSILVTIVHVVTGTTNPWLADNLNQGRLYDFYWLLAILSVLNLMFFLYFSRKYVYKEKRLAEMGIELEDDGPVCH

SEQ ID NO: 23802 - protein, 594 aa, Nicotiana tabacum
MALPETQQDSKALPDAWDYKGRPALRSSSGGWASGAMILGVEAVERLTTLGIAVNLVTYLTGTMHLGNASSANNVTNFLGTSFMLTLLGGFVADTFLGRYLTIGIFATVQAMGVTILTISTIIPSLRPPKCEQVGSSSCIPANSKQLMVLYIALYMTALGTGGLKSSVSGFGTDQFDDSDKKEKGQMIKFFDWFFFFINVGSLGAVTVLVYIQDNLGREWGYGICACAIVIALVVFLFGTRKYRFKKLGGSPLTQIASVIVAAWKKRHLELPSDSSLLFEIDDIFGEGNKKSKQKLPHSKEYRFLDKAAIKEDDDLESNGTNVVINKWKLATLTDVEEVKILIRMLPTWATTIMFWTVYAQMTTFSVSQATTMDRHIGTFEIPPATLTVFFVGSILLTVIFYDRIIVPICRRFMNKPHGLTPLQRIFTGLVLSILAMIAAALTEVKRLKVAHLHGLTNDANATIPLTVFWLVPQFLLVGAGEAFTYIGQLDFFLRECPKGMKTMSTGLFLSTLALGFFFSSILVTIVHVVTGTTNPWLADNLNQGRLYDFYWLLAILSVFNLMFFLYSSRKYVYKEKRLAEMGIELEDDGPVCH

SEQ ID NO: 23803 - protein, 222 aa, Solanum lycopersicum
MAPKEKIGAVTAMAMVNLNGISKEVHYRGVRKRPWGRYAAEIRDPGKKSRVWLGTFDTAEEAARAYDNAAREFRGAKAKTNFPKLEMEKEEDLKFAVKNEINRSPGQTSTVESSSPVMVDSSSPLDLSLCGSIGGFNHHTVKFPSSGGGFTGSVQAVNRMYYIEALARAGVIKLEQIGRKRLDYLGGGDSDSSTVIDFMRVDVKSTTAGLNLDLNFPPPENM

SEQ ID NO: 23804 - protein, 69 aa, Shewanella oneidensis MR-1
MSKTTGVVKWFNEDKGFGFISPDNGGADAFVHFRAIVSDGFKTLAEGQKVSYEVEQGQKGPQAANVVVL

SEQ ID NO: 23805 - protein, 124 aa, Arabidopsis thaliana
MSGVWVFNKNGVMRLVENPYNQSAGDSSESSSSGGNQQQRMRRKILVHLPSSEVVSSYGSLEKILKNLGWERYYSGDNTDHLLQFHKRTSIDLISLPRDFSKFNSIHMYDIVVKNPNVFHVRDM

SEQ ID NO: 23806 - protein, 650 aa, Dunaliella salina
MPREAPAIGIDLGTTYSCVGVWQNDRVEIIANDQGNRTTPSYVAFTDAERLIGDAAKNQVAMNPFNTVFDAKRLIGRKFADQNVQNDAKLWPFQVRSGPGDIPEIVVSYKGEKKVFKAEEISSMVLIKMKETAQAYLGSDREVKKAVVTVPAYFNDSQRQATKDAGAIAGLEVLRIINEPTAAAIAYGLDKKASNVGERNVCIFDLGGGTFDVSLLTIEEGIFEVKSTAGDTHLGGEDFDERPVNHFANEFQRKFKKDLRTSARALRRLRTACERAKRTLSSAAQASIELDSLFEGADFATSITRARFEELCMDLFRKCMDPVEKCLRDAKMDKGQVHDVVLVGGSTRIPKVQSLLQDFFNGKELNKSINPDEAVAYGAAVQAAILTGEGGEKVQDLLLLDVTPLSLGLETAGGVMTTLINRNTTIPTKKEQVFSTYSDNQPGVLIQVYEGERARTKDNNLLGKFELSGIPPAPRGVPQICVIFDIDANGILNVSAEDKSTGTKNKITITNDKGRLTKDDIKRMVQEAEKYKADDEALKKKVEAKNNFENYAYNMRNTIREEKVAQAIGGEDKEKIEKALHEAMEWLDANQQAEVEEYEHKLKALEDLCNPIITRMYQGAGGGAPPPGAGGGAAPEGAGGPGGPKIEEVD

SEQ ID NO: 23807 - protein, 387 aa, Arabidopsis thaliana
MATNGSSEHLLPETTRPSAIINKQQPEFPASRFTFMSLVLWFDQSNFGISFVSLSIWSRKFGMRRFLFLDKLWDVSDKVRIEYEAEIQRSLKRLMIFVLPSLTLEATYRIWWYISGFNQIPYIINPILSHVVACTLQLSSWLYRNSLFIIVCILYKITCHLQTLRLDDFARCFASEITDVRSALGEHQKIRRNLRIVSHRFRRFILLSLILVTATQFMALLTTTRASVAVNIYEVGELALCSLSLVTGVFICLRSATKITHKAQSVTSLAAKWNVCATVDSFDHLDGETPTGSIIESQVSLRGNAIETSDDEEGEGDDDLDNTKIHPIYANTISYQKRQALVTYLENNKAGITVYGFLVDRSWLNTIFGIELALLLWLLNKTIGILA

SEQ ID NO: 23808 - protein, 350 aa, Pseudomonas sp. TW3
MNEFFKKISGLFVPPPESTVSVRGQGFQFKVPRGQTILESALHQGIAFPHDCKVGSCGACKYKLISGRVNELTSSAMGLSGDLYQSGYRLGCQCIPKEDLEIELDTVLGQALVPIETSALISKQKRLAHDIIEMEVVPDKQIAFYPGQYADVECAECSAVRSYSFSAPPQPDGSLSFHVRLVPGGVFSGWLFGGDRTGATLTLRAPYGQFGLHESNATMVCVAGGTGLAPIKCVLQSMTQAQRERDVLLFFGARQQRDLYCLDEIEALQLDWGGRFELIPVLSEESSTSSWKGKRGMVTEYFKEYLTGQPYEGYLCGPPPMVDAAETELVRLGVARELVFADRFYNRPPC

SEQ ID NO: 23809 - protein, 245 aa, Populus tremuloides
MGRGRVELKRIENKINRQVTFAKRRNGLLKKAYELSVLCDAEVALIIFSNRGKLYEFCSTSNMLKTLERYQKCSYGAEEVNKPAKELENSYREYLKVKARFEGLQRTQRNLLGEDLGPLNTKDLEQLERQLESSLNQVRSTKTQYMLDQLADLQNKEHLLQEANRGLTIKLDEISARNSLRPSWEGDDQQNMSYGHQHAQSQGLFQALECNPTLQIGYNPVGSDQVSAITHATQQVHGFIPGWML

SEQ ID NO: 23810 - protein, 237 aa, Populus tremuloides
SGTENKINRQVTFAKRRNGLLKKAYELSVLCDAEVALIIFSNRGKLYEFCSTSNMLKTLERYQKCSYGAEEVNKPAKELENSYREYLKVKARFEALQRTQRNLLGEDLGPLNTKDLEQLERQLESSLNQVRSTKTQYMLDQLADLQNKEHLLLEANRGLTIKLDEISARNSLRPSWEGDDQQNMSYGHQHAQSQGLFQALECNPTLQIGYNAVGSDQVSAITHATQQVHGFIPGWML

SEQ ID NO: 23811 - protein, 388 aa, Phormidium lapideum
MKLAARVESVSPSMTLIIDAKAKAMKAEGIDVCSFSAGEPDFNTPKHIVEAAKAALEQGKTRYGPAAGEPRLREAIAQKLQRDNGLCYGADNILVTNGGKQSIFNLMLAMIEPGDEVIIPAPFWVSYPEMVKLAEGTPVILPTTVETQFKVSPEQIRQAITPKTKLLVFNTPSNPTGMVYTPDEVRAIAQVAVEAGLWVLSDEIYEKILYDDAQHLSIGAASPEAYERSVVCSGFAKTYAMTGWRVGFLAGPVPLVKAATKIQGHSTSNVCTFAQYGAIAAYENSQDCVQEMLAAFAERRRYMLDALNAMPGLECPKPDGAFYMFPSIAKTGRSSLDFCSELLDQHQVATVPGAAFGADDCIRLSYATDLDTIKRGMERLEKFLHGIL

SEQ ID NO: 23812 - protein, 66 aa, Lactobacillus plantarum WCFS1
MKNGTVKWFNADKGFGFITGEDGTDVFVHFSAIQTDGFKTLDEGQKVTYDEEQGDRGPQATNVQPQ

SEQ ID NO: 23813 - protein, 395 aa, Lactobacillus plantarum WCFS1
MQKTLIINAGSSSLKWQLFAMPAETVVASGLVERISMPGSIFTIKYGDHQKFETTVDNLDQNHAAQMLLAELQRLAIIDSLTEITAVAHRVVAGGETFKQAVEVTPAVLEAIKGLSDFAPLHNPMEARGIETMAQALPTVKQYAVFDSQFFTDLPEMNAIYSLPYELTQKYHIRRYGEHGISHGYLTGRAAELLAKPKDDLNLVTLHLGSGASLAAVKNGRAFDTSMGFTPLTGVTMGTRAGDVDPAVLPFLMKALKIDDPNEIMMMLNNQSGLLGISGISPDMREIRAQEATNPQAQLAVEIFVNRIVKYAGSYLTELKRADALIFAGGIGEHNATLRQQIIDELSIFGVTLDPKLNEAGQEGLISGADSKIKVMLIPTNEELAMVRQVAALQN

SEQ ID NO: 23814 - protein, 398 aa, Lactobacillus plantarum WCFS1
MAKILAINAGSSTLKWKLFSVPEETVIASGMVDRLGLPDSVFTIKKADGSKYSETKDQIDAKEAAAMVLTRLKSDNIVTHLSEITGVGHRVVAGGEDFKDSVVITSQTLKKIKDLSEYAPLHNPTQAYYIEVFRDLLPKATQVAVFDTSLYADMPKVNYLYSIPYDYYEKFGARKYGAHGTSHRYVANRTAQLLGKPLDSLKLVTLHLGSGASITAFDHGKAVDTSMGFTPLAGITMSTRSGDIDASIIPFLMRHLGISDVEDFVDILNHKSGLLGISGLSPDMRDLDKTQDTRERSKLAIDIFVNRVVKYVGSYIAEMNGIDALVFTAGVGENSWMIRERVTKALGYFGVTVDDEKNHMHGKEQIISKDDEPVTVMVVPTNEELMIVRDVERLSKAE

SEQ ID NO: 23815 - protein, 391 aa, Lactobacillus plantarum WCFS1
MKFEESKILQQLPKQFFANLVKKVNAKAAAGADVINLGQGNPDQPTPEFVVKAMQTATANPADHKYSLFRGLPRFKQAAADFYEREYGVKLDPETEIAVLGGSKIGLVELPFALLNPGDTMILPDPGYPDYLSGITLAQVKLALLRLTAANHFLPDYQQVDPQVAAAAKLLYLNYPNNPTGAVATSQFFQDTVDFANEHQIGIVHDFAYGAIGFDGQRPVSFLQTPGAKDVGIEMYTLSKSFNMAGWRVGFAAGNADMIEALNLIQDHLFVSVFPAIQDAAIAALNSDQQTVHELVRLYERRRNQFFTTARKIGWEPYPSGGSFYAWMPVPEGYTSEAFADLLLDKAAVAVAPGNGFGAGGEGYVRVGLLIDEPRFTEACQRIAKLHLFDR

SEQ ID NO: 23816 - protein, 326 aa, Lactobacillus plantarum WCFS1
MSEQYFDPKLKIFALNSNKPLAEKIADAVGVKLGKTSVDRFSDGEIRINIEESIRGDQVYIIQSTSAPVNDNLMELLIMIDALRRASAKTINVVIPYYGYARQDRKARSREPITAKLVANMLETAGATRILALDLHAAQIQGFFDIPLDHLMGAPLLADYFLNHHLDENAVVVSPDHGGVTRARKLAEFLKAPIAIIDKRRPRANVAEVMNIIGDVKGKRAIMIDDMIDTAGTITLGAQALVDAGATEVYASCTHPVLSGPAIERIEKSPIKKLVVTDSIELPAAKRIDKIEQVSVGQLMGQAIKFIHENKPVSPLFKNRFHNEEN

SEQ ID NO: 23817 - protein, 130 aa, Lactobacillus plantarum WCFS1
MLIDMLKGKIHRATVTQADLEYVGSITIDETLMEASGILEYEKVQIADVNNGARFETYVIAGPRDSGVICLNGATARCASVGDKVIIMNYAQFEPEEAKHAKPYVVLVDDENRLTKRVRYEKHGLLAEEL

SEQ ID NO: 23818 - protein, 261 aa, Lactobacillus plantarum WCFS1
MATLGANASLYSEQHRITYYECDRTGRATLTTLIDIAVLASEDQSDALGLTTEMVQSHGVGWVVTQYAIDITRMPRQDEVVTIAVRGSAYNPYFAYREFWIRDADGQQLAYITSIWVMMSQTTRRIVKILPELVAPYQSEVVKRIPRLPRPISFEATDTTITKPYHVRFFDIDPNRHVNNAHYFDWLVDTLPATFLLQHDLVHVDVRYENEVKYGQTVTAHANILPSEVADQVTTSHLIEVDDEKCCEVTIQWRTLPEPIQ

SEQ ID NO: 23819 - protein, 411 aa, Lactobacillus plantarum WCFS1
MVKQNDKIILAYSGGLDTSVAISWLKDKGYDVVACGIDVGEGKDMDAIKEKALKLGAVSSYMIDAKQEFAEEYALIALQGHTLYEGEYPLVSALSRPLIAKKLVTLAKQEHAVAIAHGCTGKGNDQVRFEVAIHALAPDIKIEAPVRDWHWSREEEIDYAKEHNIPVPINLDSPYSIDENLWGRANECGILEDPWQGAPADAFDRTKALADTPDTPTTLEITFEAGVPVALDGESLNLADLIIKLDQIAGEHGIGRIDHIENRLVGIKSREVYEAPAATVLLKAHKDLEDLTFERELAHFKPIIEQKLADTIYNGLWFSPLMEAMVAFLKQTQQVVNGVVRVQLFKGNVITEGRKSPNSLYDTNLATYTSADSFDQQAAVGFIKLWGLPTQVNAQVQAKAQAEAKTDKAHA

SEQ ID NO: 23820 - protein, 324 aa, Lactobacillus plantarum WCFS1
MTKVFIAGQLPAQANTLLLQSQLVIDTYTGDNLISHAELIRRVADADFLIIPLSTQVDQDVLDHAPHLKLIANFGAGTNNIDIAAAAKRQIPVTNTPNVSAVATAESTVGLIISLAHRIVEGDHLMRTSGFNGWAPLFFLGHNLQGKTLGILGLGQIGQAVAKRLHAFDMPILYSQHHRLPISRETQLGATFVSQDELLQRADIVTLHLPLTTQTTHLIDNAAFSKMKSTALLINAARGPIVDEQALVTALQQHQIAGAALDVYEHEPQVTPGLATMNNVILTPHLGNATVEARDGMATIVAENVIAMAQHQPIKYVVNDVTPA

SEQ ID NO: 23821 - protein, 325 aa, Lactobacillus plantarum WCFS1
MDLFESLAQKITGKDQTIVFPEGTEPRIVGAAARLAADGLVKPIVLGATDKVQAVANDLNADLTGVQVLDPATYPAEDKQAMLDALVERRKGKNTPEQAAKMLEDENYFGTMLVYMGKADGMVSGAIHPTGDTVRPALQIIKTKPGSHRISGAFIMQKGEERYVFADCAINIDPDADTLAEIATQSAATAKVFDIDPKVAMLSFSTKGSAKGEMVTKVQEATAKAQAAEPELAIDGELQFDAAFVEKVGLQKAPGSKVAGHANVFVFPELQSGNIGYKIAQRFGHFEAVGPVLQGLNKPVSDLSRGCSEEDVYKVAIITAAQGLA

SEQ ID NO: 23822 - protein, 587 aa, Lactobacillus plantarum WCFS1
MMTKMIAGQALVKVLEAWGVDHIYGIPGGSINHTVEGLYLEKADIDYIQVRHEEVGALAASADAKFTGKIGVSFGSAGPGATHLFNGLYDAKMDHVPVLALVGQVPQATMNTNYFQEMDETPMFSDVAVYDRTVTTAGQLPYVINQAIREAYRQKGPAVVIIPENLSAEEIDYQPVSTPNTVSDTFEQRVDPQAITATLKMLKAAKHPLVYAGRGLLGAKADLVKFSEQFNIPVMNTVPATGVIPTNHPNAIGTFGRLGSKSGFEALQHADLILFLGSEFPFASFWPKGIKIIQVNNNSFDIGKMVPIDYAVISDAQAYLQAMIATGETLPETAWLTTNRQNKRNWDKWLQQLAADDHDGLAPEAVMHKVASMVGPRDTYGVDTGNVSEWAVRGLPMDQEQRFALSGLFATMGFGLPAGMAGALSVPDSQAWSFSGDGGFAMVAPDIITEARYGLPVINVIFSNQRFGFIYREQVDTKQHLYGVDLTDADWAKVADGLGGIGFTVQNNQEVETVFDQIKALQAKGNKRPIVVNAVIKNDDPIGTAYMPLDPELYGQAEVDAYAKANHIDIKEQPSLGALLRAQGDQL

SEQ ID NO: 23823 - protein, 465 aa, Lactobacillus plantarum WCFS1
MGIFQRIFQKEDLERYLQKDSHFERTLSAVDLIALGIGAVIGTGIFILPGTVAATKAGPGIILSFVLAAIVCAVAAMCYAEFASVLPIAGSAYSYGNIVYGEMIGWIIGWALVLEYVLAVATVAVGWAAYFNSFIAGFGLKLPKAITGSFDPAHGTYINVIAILIVCLIAWIIDTGLKTSIRLNNIIVVVKLAIIVLFLLVGSFYVKPSNWTPFAPFGGTEILKGAAVVFFAYLGFDAVSSSAAEVKNAKRNMPIGIIGTLVICTIFYILVSGVLTGMVSYKQLNVDDAVAFALQLVHQNFVAGIISIGALAGMFTMMVTMIYSSSRLLYSIGRDGLLPRFLGKIDKHHAPKNAMLTVTIVNSILAGLIPLDQLANLVNIGTLIAFAFVSFGILLLRRNPKLNAIKGFRVPLYPVLPIISGLLCLFMMTQLSMETWLASLVWFLLGLIIYFGYGIRHSRMNKADE

SEQ ID NO: 23824 - protein, 543 aa, Lactobacillus plantarum WCFS1
MSINSETLVNHMNHEIAAIQPSDILAFNAEIANIPGIVRLTLGEPDFNTPEHVKQAAIESIEADESHYAPSNGTLALRTAAAEFLAAKYDVHYDPASEVIITAGATGGIYTALTSILNPGDEVLIPTPIFPLYIAIVKLSGATPVFMDTSDNGFVLSPDQLQTTLAAHPKTKAVVLNFPSNPTGVTYRHDDLKALAAVLADQPIFVLSDEIYSELTYGEPHESIANYLPTQTILLNGVSKSHAMTGWRIGIMCAPKAITAQLGKIHQFTVTSTTTNAQAAAAGLKQLTSRTAGVDTIDIPAAKAAGLVVTNVPAYSPNSVAEMSVAQTMRLIRNLEMFDQRISQQNFQWAGLQAREIRSLTVGIIGAGRIGGTAARLFHGLGAKVIAYDVVRHPELEDVLTYVDTKEDLLRQADVVDLHVDLNETSAGLIDAAALKLMKTDAYLINASRGPVIVTDDLVAALKAGEIAGCALDTVEGENALFNQNHQGEVLQDTNVAQLMQMPNVIITPHVGFYTNLAVKNMVDISLDDVLAILNGETTAHAF

SEQ ID NO: 23825 - protein, 278 aa, Lactobacillus plantarum WCFS1
MKKLKRLIGALGMLAMLVVVLTACGSRQSLAKQDVLTNDKASKTITWGVKADTKLFGLMDVKDNQIKGFDADIATALTKRVLGKNATAKFVQVTSQTRIPLLKNGNIDAILATMTITPEREKQVDFTNSYFDAGQSLLVKKGSAIKSVKDLNKSGTKVLGVTGANSVENIKKAAPKAKVLELSDYAQAMTALKSGQGVALTTDNGILYGMASQNPGYEVVGGTFTKEPYGIAVNKGQEPLKKALNKALKEIEADGTYNRILKKWFGNVAGFDYKEASR

SEQ ID NO: 23826 - protein, 443 aa, Lactobacillus plantarum WCFS1
MQETKQATTLNRSLGFWSALSLVVGTVIGSGIFFKQSSVLDSAGSPSAALLAWLLGGLITLTAGLTIAQVGAQMPHTGGLYVYMEQIYGKLWGFLSGWMQIAVYGPAIIASISAYLGILLVGFFNLQAGWQAPLSIGVIVLIGILNMFENRWGAAFQIATTLGKLLPIAAIIIFGLFYGNQNALGQSLHTITQSTGSFGVAVLATLFAYDGWILVANLGGEIKNPQKLLPQAIILGISMVLIAYTLVSYGILHFVPAATIHKLGQQTTLYFAQAAFGTIGGRLLNIGIIISMVGCLNGKIMTFPRIVYAMAAQNQLPFAKQLSYLHKKSHEPIAATIAILVYASIMILFFNPDRLSDLCIFTVYCFYVATFVGVFILRKRRPASERPFSTPGFPITPLIAILGALFVIISEIGSDLSGVLISLVIVAVGFPIYYWKQQQNQNA

SEQ ID NO: 23827 - protein, 322 aa, Lactobacillus plantarum WCFS1
MHLIIPKDYDPKLSVKETQQAIRYIRETFQDEFGKQLNLSRLSAPMFVEKKTGLNDNLNGVEKPVSFTMQDMGDEQIEIVHSLAKWKRVALKRYGFDMHEGLYTNMNAIRKDEDLDNYHSAYVDQWDWEKVISKEERTVETLKAAVRQIFKVIKHMEHEVWYKFPQAVHHLPDEIHFLTTQELEDMYPDMTPRERENAICKKLGCVFLMQIGWKLDSGERHDGRAPDYDDWKLNGDILFWYEPLDQAIEISSMGIRVDAESMKKQLKDVDAEDRLSLPYHQMILNADVPYTIGGGIGQSRLCMLLLGKAHVGEVQAALWHKP

SEQ ID NO: 23828 - protein, 400 aa, Lactobacillus plantarum WCFS1
MEIIVQKFGGTSVKDEAARIQALKHVQYAVDQGDKVIVVVSAIGRKGAPYATDSLLGLVGAEHSRLTNRELDMLVSVGETISTAVFTELARKQGLNVTAMTGHDAGIVTNDDFQNAKILRVDPKPITDAFIDADVVVVTGFQGATESGHVTTIGRGGSDTSAAILGAALKAKRVDIFTDVNGMMTADPRLVTHARFIKAISYEELANMAHEGAKVIHPRAVEIAEQAHVPMRIRSTYQEPDELGTLVTDRTTTQIEHYRTVTGIAHQTDLTQFTVPTDTLSSSAIFQLMAQHGLSVDFINITPHQVVFNLVDGDADVAKQLLTDAHVHCQSIANCAKVSVVGAGITGTPGVTARIVSALAAQHIDILQSTDSYTTIWVLVKEADLKAAMNALHDEFLGIE

SEQ ID NO: 23829 - protein, 633 aa, Lactobacillus plantarum WCFS1
MCGFAGCLTDRTKADNAAYDQTIHEMTKMIVHRGPDDDGYFADDNITMGFRRLSIIDLAGGHQPLSYDNERYWMTFNGEIYNYVELREQLKQEGYEFKTSSDSEVILAMYAKYHADATKYLRGMFAFVIWDKQEKTLFAARDQFGIKPFYYAISGDDFYYASESKAIYKILKDKTFDKNALQDYMTFQFVPEPETLTKEIKMLAPGCSLTKKLGSAPRIDRYYHREFHPVERSEDEYAQKIKDALIDSVKIHMRSDVPVGSFLSGGIDSSIIVAIAKNFNPNLETISVGFEREGYSELDVAQETAEKLGVKNYSMTITPEAFMKAFPHFVWSMDDPLADPAAVPQYFLAKEAVKHVKVCLTGEGADELFGGYTIYHEPESLKPFRYTKPINGALKRIALMMPEGMRGRSFLLRGTTPLENRYVGNAFIFGEQEKQAFFKNYNQNHPFQSITQPLYDESVDYDPISRMQFIDMHTWLNGDLLHNADRTTMAHSLELRTPFVDREVYNLAAEIPADLRISHGTTKYILRKAVEDIVPAHVLHRKKLGFPVPIRFWLKDEMYDWAKQIINDSQTDQYFNKDYFLKLLDDHKAGVRDNSRKLWTVLTFMMWHRLYVESDHLMDSPEANAVAEKVEEF

SEQ ID NO: 23830 - protein, 66 aa, Lactobacillus plantarum WCFS1
MEHGTVKWFNADKGFGFITRENGSDVFVHFSAIQEDGFKSLDEGQAVNFDVEESDRGPQAVNVTKA

SEQ ID NO: 23831 - protein, 475 aa, Lactobacillus plantarum WCFS1
MKASQRLLVKKSVNPANFNKGGLEKTLSAFSLTMMGVGAIVGSGIFITPGIIAAKYAGPAAMLSFVIAAVVCSLAALCYAEFSSTIPLAGSAYTYVYTVFGEFLAWILGWSLISEYLFAVSSVAVSWSSYFQNLMSGFGLKLPTFLTAAAGTAGVSGAGFNLIAFVVVLAVSLLLVGGLQESTRVNSIMVIVKILVIVLFIGVAIFFVKPANYHPFMPHGVSGLVKGASLAFYAYIGFDAVSTASEEVKNPKRNMPIGIVGSLVVASILYVAMAAVLVGVVHYSKLNVGDPVAYALAVIHQNWAAGIVSLGAVVGMTTVLIVMLYGGTRLLFAISRDGLLPKVFRTVSPHTKVPVKSTWIFGIIASVFAAVIPLDKIAELVNIGTLFAFAMVSIGVVFLRRHETLQQINSSFKVPFYPVLPVVSFLACVYLMLNLQAFTWHMFGIWLVIGIVIYFAYSYRHSRIRAGLRAKESKS

SEQ ID NO: 23832 - protein, 66 aa, Lactobacillus plantarum WCFS1
MKNGTVKWFNADKGYGFITGEDGNDVFVHFSAIQTDGFKTLEEGQKVTFDEESSDRGPQAANVVPQ

SEQ ID NO: 23833 - protein, 395 aa, Lactobacillus plantarum WCFS1
MTLFRDDLNETISHIQVSTIRQFDEEVSAIPDMVKLTLGEPDFNTPEHVKAAAKKAIDDNYSHYTGMAGLLELRQAAAHFQETKYGVHYDAEDQVLVTVGATEAIATALTTICNPGDAIIIPSPIFPAYIPIIQEAHAKPLFMDTGVNDFVITPKMVDDFIAAHPDENFKGIVLNYPNNPTGVTYVEDEIKALADCFHRHNLWVVSDEIYSELTYGSDHVSIAKFIPDEVILINGLSKSHAMTGWRIGFLFASKEMTAQLKKVHQYYVTAATTIAQKAGVEALTNGIDDAQPMRQEYQARRDFVYQTMSKLGFKIARPTGAFYIFAKIPAGFEQDSMAFCKDLARKNQLAIIPGTGFGAEGEGYVRLSYAASMEKLHQAMDRLTAYMQEPANCIN

SEQ ID NO: 23834 - protein, 265 aa, Lactobacillus plantarum WCFS1
MATLEVKDLHVEVTDDEQKKSREILKGVNLSMKTGEIHAIMGPNGTGKSTLSQTIMGQPAYHVTQGDILLNGESIVNMPVDERARKGLFLGMQYPAEIQGVTNAEFLRAAMNARRPADDQISVMAFLKELDKNLALLNMSESMTERYLNEGFSGGEKKRNEILQLLMIKPSFALLDEIDSGLDIDALQVVSKGVNSMRGDNFGSLIITHYQRLLNYIVPDVVHVMMGGRIVKTGNADLAKTLEKEGYAGLRDDLNIDVKLVDDED

SEQ ID NO: 23835 - protein, 378 aa, Lactobacillus plantarum WCFS1
MSETSEETLYCIGCGAAIQTTDPKAAGYTPNSALQKSLASEAQDLYCQRCFRLRHYNEIVPVGLTDDDFRHLLATIRDANALVVYVVDIFDLNGSIIPGLQRFVGDNPVLLVGNKEDVLPRQLRRTKLREWMNQQVRAQGIKPVDVALTSAKKGHSIDELLAMIEKYRRGRDVYVVGVTNVGKSTLINRIIANNTGLKDLITTSRFPGTTLDKIEIPLDDGHMMVDTPGIIHPEQMAHVLSGDDLKLVSPQREIRPKGFQLGNGQTLFLGGVARLDIVDTLKATGTVYVDNNLPLHRTRTENADNFYTKHVGELITPPTGDAVADFPPLVRHEFKVTEISDIVFEGLGWVTVAADTRVAAWAPKGVAVLTRPAMINKR

SEQ ID NO: 23836 - protein, 102 aa, Lactobacillus plantarum WCFS1
MYAIIVTGGKQYKVEAGQAIYVEKLDAAAGDKVTFDQVVFVGGDTTKVGTPTVDGATVEGTVEKQGRDRKVVTFKYKAKKGQHTKKGHRQPYTKVTIDTINA

SEQ ID NO: 23837 - protein, 499 aa, Lactobacillus plantarum WCFS1
MQRLLKRLTLKEDPSIYEDKDSHLARVLTVKDFLALGVGTIVSTSIFTLPGVVAANHAGPAVVFSFIVAAVVAGLVAFAYAEMAAAMPFAGSAYSWINVMFGEFFGWIAGWALLAEYFIALAFVGSGLSANLRGLLSPLGLTLPKALSNTFGTDGGVVDLIAVLVIALVSLLLSRGISKASRVENVLVVLKVLAVLTFIVVGATAIHVQNYVPFIPKYHLNADGSAFGGWQGIYAGVSMIFLAYIGFDSIAANSAEAKNPGKTMPRGILGSLVIAVVLFVAVALVLVGMFKYSSYANNAEPVGWALRQAGHPIVASVIQAIAVLGMFTALIGMTLAGSRLIYSFGRDGMLPKWLGKLHRNQPNNALLVLTIVAIIIGAFCPFAFLAQLISAGTLIAFMFVSLGIYALRRREGVDIAVPAFKMPFYPVLPAIAFLGALFVFMGLDIQAKLYAGVWFIVGLVIYFSYGMRHSYLAEKRLSETDTAAKSASKVADSTVEERD

SEQ ID NO: 23838 - protein, 401 aa, Lactobacillus plantarum WCFS1
MYMELSRKVMQVQPSATLKISATAKQMMADGVDVINLGIGEPDFQTPDNIKQAAIDSIQNGQASFYTPATGLPALKQAISQRIEADHHYHFDPNQIVVTDGAKMALFTLFQVILNPDDEVLLPVPYWVSYSEQVKLAGGVPVEVSTDEQLRFTTADLEAQRTPKTKALVLNSPQNPSGLVFSRAELTAIVNWAVEHDVLVIADEIYEKLLYNGNEFTSVLELDDANMDHVVLINGVSKAYSMTGWRIGYAAGPQTIMAKMGVVLGHAASNPAAVSQYAAIEAFSGDQSSVETMRQGFEARLNELYPLIERLPGFKMPAGKPAGAFYLFPDITEALRLTGYADAPAFVTAVLLEAHVGLVPGEAFGMPGCLRLSYATDIDSLREAHRRLQKFMTEKIAEQAK

SEQ ID NO: 23839 - protein, 446 aa, Lactobacillus plantarum WCFS1
MENQQLARKLKRRHVQMIALGGAIGTGLFLGSGLAIKQAGPSILLAYAIGGFFCYLMMRALGELLLSDTRLHSFLEFINRYLGKRFEFAIGWTYWLCWISLAMADLTASGIYIRYWFPWIPQWVTPLIIILILLVFNMLSVSAFGELEYWFSMIKVVAIIALIVTGAILIGSSAHVGGQTVSVTNLVSHGGFFPTGVQGFLMSFSLVIFAFTGIEMVGITAGEAENPEKELPRAINSLPIRISFFYVGALFVIMAIYPWNQITTSQSPFVQVFSDVGIKAAASIINFVVLTAALSACNSAIFSTSRTLFTLAHGDNAPKWMGKVNRYNVPARSLLFSSLILLVIVALNYVIPSTVFTLISNVATTNFIIVWCALLVCHYVYKRTTDSTHNPFKLPLFPVTNIATLAFFIAVTVVLCFDQVNRWAVIGSVVWFVILLVIERSMHRTV

SEQ ID NO: 23840 - protein, 302 aa, Lactobacillus plantarum WCFS1
MAEQQAFHSGFVAIIGRPNVGKSTLLNRVVGQKVAIMSDKAQTTRNRIQGIYTTADTQMVFIDTPGIHKPHSRLGDFMVKSALSTLGEVDAVLFMINADERRGAGDNFIIDRLKTVKQPIYLVINKIDQVHPDHLLEIMDQYKDALPWKEVYPISALEGNNVDELLTTLKGQLPEGPQYYPSDQITDHPERFIISELIREKVLELTRQEVPHSTAVVIDSIKRQDEEKIHVQATIIIERSSQKGIIIGKGGSMLKKIGSLARRDIEHLLGDKVYLELWVKVQENWKDRQDLLASYGYRQDDY

SEQ ID NO: 23841 - protein, 431 aa, Lactobacillus plantarum WCFS1
MFVDQVKVDVKAGNGGNGMVAFRREKFVPNGGPAGGDGGRGGSVVLQADEGLRTLMDFRYTRKFKAAAGGNGMIKQMTGRSAKDTIIKVPLGTTVTDAETGELIGDIVNKDQRLVVAKGGRGGRGNIHFASAKNPAPEIAENGEPGDELTIRMELKVLADVGLVGFPSVGKSTLLSVVTSAKPKIAAYHFTTLVPNLGMVRLDDGRDFVMADLPGLIEGAANGVGLGIQFLRHIERTRVILHLIDMSGVEENDPFEDYHKINHELTSYDPDLLKRPQIVVATKMDMPDAEANLEDFKAKLATDDTLPNTPAVYPVSSITQQGLKALLAKTADLLDTTPQFPIKGVDDLKHRDYTTEADADFSIDNPEPGLFVLSGDKLERLFKMTNLDHEESLMRFARQLRGMGVDDALRAAGAKNDDTIQILDYSFQFMD

SEQ ID NO: 23842 - protein, 321 aa, Lactobacillus plantarum WCFS1
MSTDQSYAKLKLFALNSNLPLAEKIAQRVGIPLGKSSVKRFSDGEIQINIEESIRGAEVFVIQSISEPVNDTILELLIMIDALRRASASQINVVIPYYGYSRQDRKARSREPITAKLIATLLEKDRASRVLTVDLHAAQIQGFFDIPVDHLFAAPLLASYFKDRGITDNLVVVSPDHAGVSRARKMAELLGAPIAIIDNRHPDDDDLVPSSIIGDVKGRVAIVIDDMIDTGTRFDVSADALAQAGAATVYGCATHAIFSQDAVAKLQASKFEKVIVTDTIQIPADKHFDKLVQLSVGPLLGDAIKLVHEQQPVDRLFDPRI

SEQ ID NO: 23843 - protein, 386 aa, Lactobacillus plantarum WCFS1
MKQVYLDNAATTPMAASVIQTMTDQMTNTFGNASSTHAFGRAAREVLDDSRHVIAQSINAADDDIIFTSGGTESDNTAVMQTAWTRQHLGKHIITTAIEHQAILKSTAFLAEHGFEITYLPVNEQGQISLDDLKAALRPDTILVSIMTGNNEVGSQMPIHEIGELLKDHQAWFHTDAVQAYGLLDIDVQRDHIDMLSTSAHKINGPKFLGFLYRRNGINFPSFVKGGEQEDKRRAGTENIPAIAGFATAVQELTTAEKTHRQAKYREFKQYIVDQLTANGVDFEVNGSLGEHNLQHVLNLWIKGVSTYTMQTNLDLAGVAVSGGSACTAGSLEPSHVLIAMYGEDSPRISESIRLSFGRYTTKADLDQFVTVLTKTTQRLLKKQGA

SEQ ID NO: 23844 - protein, 397 aa, Lactobacillus plantarum WCFS1
MGKTIAINAGSSTLKFKLFEMPQERVIAQGAVERIGFKTSPVNIRYGVDHHYQEKAVVADHLAAVNIVLDELIKLRIIDSYDEITGVGHRVVAGGEQFHDSVLITDQVLKQITDLAEYAPLHNPANAVGIRAFKRVLPHVPAVAVFDTAFHASMPAVNYLYSLPYDYYQRYGARKFGAHGTSHRYVAVRAAKLLGRPLETLKLITLHLGAGSSITAIDHGQSLDTSMGFTPLAGITMATRSGDVDPSLVAYLMKKLNISDPDEMLTILNTQSGLLGLAGSADMQELEARYDEDSQAQLAIDIFVNRIVKYVGAYLAELQGADALVITAGIGERDARMRQRIADRLTYFGVAIDPTKNQVSGVERDLSTTDAKIRTLLIPTDEELMIARDVERVAQNQ

SEQ ID NO: 23845 - protein, 450 aa, Lactobacillus plantarum WCFS1
MKVIKFGGSSLASSQQLQKVLAIVEADQKRKYVIVSAPGKRFDGDTKVTDLLIQYARQTIHHQDTQAVTAAIIDRYAEIGHGFNVPEAQLTPIFETIRNLPKQSYADNTYLMAAFKAHGERLNAQLVAAVFQQSGLNARYLDPKDAGMVVTDVPDDAQIIKSSYDQLAKWANSEQILVIPGFFAYNRNGQICTFSRGGSDITGAIIARGVHAERYENFTDVDAIYAVNPSLVAKPAAISEMTFTEMRELSYAGFSVFHDEALIPAIEDNITVNVKNTNHPEAPGTLIQSTREPNPHYPVTGIASSSSFCSLYLRKYLLNKEVGLGRKILTILENHHISYEHMPSGIDDLTIIFDEHQLTPELEKTLVAEISTAINPDEIYFTHDYSILMLVGENMRNRVGIMSRAATALANDNIKLIMVNQGASEISIMFGVHDNDADQAVIALYKEFFD

SEQ ID NO: 23846 - protein, 279 aa, Lactobacillus plantarum WCFS1
MKKRLFALSLIVVMLLGMATTLSGCGQNVTKRADTQDTWSKIKKRGYVVVGLDDSFVPMGFREKSGKLVGYDIDLARAVFKLYGIKISFQTIDWSMNATELRNGTIDLIWNGYTKNPQREKVVAFSNTYLKNKQVLVSLKKNHINSFDDMTGKTLGVQSGSSGYESLENNPKLLKDKIAKKTPVQYDTFTNAFLDLNAGRIKGLLIDSVYASYYIKHEANSADYQETQGTFKSEDFAVGMRKGDKTMKRKINAGLKTLKANGTLDKINKKWFGNQKVEN

SEQ ID NO: 23847 - protein, 384 aa, Lactobacillus plantarum WCFS1
MIYFDNSATTQAAPAVLETYTTVSQKIWGNPSSLHNFGETAFHLLEQSRQQIAGLLGVQAHEIFFTSGGTEGDNWVLKGTAIEKRAFGKHLITTAVEHPAIHNSMEQLKELGYEVTYLPVDQEGRINVADLKAAIRPDTILVSTMAVNNEIGTIQPLLEVAELLKQYPKIHFHIDAVQGIGKGIQNMIMNDRVDFVTFSGHKFHATRGVGFIYARNGRKLAPLMNGGGQESNWRSGTENLPAIAGMAKALRLLLTDEDGKVARERAIKQRIYEHIKSFPKVTIFSQPTTGFAPHILCFTINGVRGETIVHAFEDQGIYISTTSACSSKKHLASSTLMAMHVQENIATSAVRVSLDENNTLAEADQFIKVFDQLYQKFSKINADA

SEQ ID NO: 23848 - protein, 629 aa, Lactobacillus plantarum WCFS1
MSEKNTSSTKPARPAGGHGPGGHAGLVEKPKSFWKTAIRLMRYMSDRWVGLAVVMIFAIASVIFQIRTPKILGKATTELYKGIMKGAAQQKAGISQSGYPINFEKIGQIIMIVLIMYLASALFNFIQQYIMTRISQRTVYKLRRSFKGKMQKVPISYYDTHSNGDIMSRAVNDMDNIANTLQQNLTQAVTSTVTFVGTLWMMLTISWKLTLIALVTIPLSVVVVGVIAPKSQKFFGTQQKSLGLLNNQVEENYAGHVVIKSFNKEQDAIDDFEIQNNNYYQSAWKAQFISGIIMPLMMFLNNIGYVFVAIIGGIDVANGNVSLGNIQAFLQYTQQFSQPISQMANLLNTIQSTVASAERVFEVLDEEEMKQTKSNLPAEPDSDNLISLQHVQFGYADNDLLMKDYNLDVKRGQQVAIVGPTGAGKTTIINLLERFYDIKGGSIKLKGTDTRDLDREDLRSHFAMVLQDTWLFTGTIFDNLKYGREDASDEEIYAAAKAAHVDSFVRKLPDGYQTVLNEEASNISQGQRQLLTIARAFVANPEILILDEATSSVDTRTEVHIQHAMERLLKNRTSFVVAHRLSTIQGADNIIVMNHGSVVETGTHEQLMAQNGFYADLYNSQFTGNISLD

SEQ ID NO: 23849 - protein, 286 aa, Lactobacillus plantarum WCFS1
MMKLGWIGTGVMGAAIVRNLMTAGYDVTVYNRTKSKADALVAAGATWADTPAAVAETSDVIFTMVGFPRDVEQVYFGDHGIFSGLAAGKTVIDMTTSQPKLAVKIATYACEHDMHALDAPVSGGDIGAKNATLTVMVGGDADTYEAMLPLFNVLGHKVNHFGDAGTGQHAKMANQIMIAGTMTGLTEMLLYTKAAGLDPEKVLATLSSGGADNWSMDNYVPRILKDDYTPGFFARHFLKDLRIALSEADAMGLNLVATAQAKRLYEVMVDVKGLGDQGTQGLINIY

SEQ ID NO: 23850 - protein, 237 aa, Lactobacillus plantarum WCFS1
MEFLLDTVHIEDIKKYVDIIPLSGVTSNPSIVKKEGRIDFFKHMRAVRQIIGDQATLHIQAVGQTTDAMLQDAYTILKNVDENVYIKIPTNEAGLAAIKQLKAAGINVTATAIYTKFQGYLAMTAGADYLAPYYNRMVNMNINADEVIGELSTQILRENSNTKILAASFHTVQQVNSAFEMGAQAATMSADILKTALSAPAISAAINDFTTDWESLYGQGSTISSLAKKQNLTTMTN

SEQ ID NO: 23851 - protein, 390 aa, Lactobacillus plantarum WCFS1
MMNTNIRIQQIQVSGIRRFDEAISQIPDIIRLTVGEPDLPTPSHVKKAAIQSIHNDWTHYSPLMGFAALQDAASHYFQQKYQLTYAPEQIIATVGASEAVATTLLTLLNPGDTVLLPTPAYTNYQPVVDIANAQLAPIDTTATGYKLTPSALQAALDDHRHDHVKALILNYPTNPTGVTYTDDELWALQAVIATAGIYVISDEIYSELTYEQPHTAFATLYPSKTITINGLSKSHAMTGWRLGFIMAPSNLITEMKKTHQYLVTSTSSITQAAGIEALTHGLDDGSEMRGVYQTRRDYVVKRLSEIGFNYIYPTGAFYIFVQLPQDFQGTSWDFATRLAHEAQVAVVPGSAFGTSGEGWFRISYAASQSALREGLNRLALWRAQTTTQED

SEQ ID NO: 23852 - protein, 455 aa, Lactobacillus plantarum WCFS1
MDLKHTPSSSNTNLDEFGYQQELKRTLSVKDLVIYGLIFMVPIAPMGIYGAVISVSQGMIALTYAIGMLAMFFTALSYGQMSQAFPVAGSVYAYAKLGINKSIGFLSGWMIILDYIFVPALLYIIAANSLKSLLPTIPTWLWLVGFIAINTLINVGGIAFTAIANRIFLIGELIVLAFFIILGSYGLMRGIGNGFTLKPFYDASHFNLNFVMTATSVAVLSFLGFDGISTLAEETTGGNQAVGKGILWSLLIVGALFIIQTYLAALIVPNWHSFNDLNTAFYVVAGKVGGPFLTDLTTIATILSWGFANALAAQAAISRILFGMARDHNLPHVLARVHPRFKTPYMSTLLVAIISLLVGLTFMNDSGTLSEIVNCGALTAFLVIHIAVINHFFIKQHSHDYWHHLIVPIIGFIIIGFVMINLNVLAKEIGGIWLLIGIGYYLILRVLQRNTEMNL

SEQ ID NO: 23853 - protein, 585 aa, Lactobacillus plantarum WCFS1
MERPQAAYSRPAGGKFDLKQFLQLIRHASPRYWQLWLGLALGLLATGAQLMVPKFAQTLINGFSHGVNQTLLIGVIGLFLISAVISALSGSLLGIFGENVVANLRGTLWHKLVRLPVRYFDNVKTGEMTSRLVNDSTQIKDLLANAFPQVVTSLMQLVGAIAIMVLMDWRMTLIMVLAIPVVLLVMFPIMRQTGKIGHERQDALANFSGTAEETLSEIRLVKSSNAEPVETTTGAHQIKTLYRIGLREAIYDSISSPVMTATMMALFVGVLLYASARVASGTMTMGTLVSFLMYLFQIIGPAGMLGQFFTTLAKASGSTARIRELLNEPEEQLTVGVEHAVANETLAMHHVDFAYDDDQQILHDVSFEAKPNTVVAFAGPSGGGKSTIFGLLERYYQPTAGEISIGGQDVNELSLNSWRSQIGYVSQDSAIMAGTIRQNLTYGADRLYSDNELWHVLELASAADFVRAMADGLETQVGERGVKVSGGQRQRLAIARAFLRDPKILMLDEATASLDSESEAMVQQALGELMKGRTTLVIAHRLSTIVDADQIYFIEDGHVSGSGTHQELMANVPLYRDYVKIQFKD

SEQ ID NO: 23854 - protein, 320 aa, Lactobacillus plantarum WCFS1
MKANLKTNMAWLGVMVIGFVVIDGLELMGVINSFIENMLVTIGINVILAVGLNLIIGFAGQFSLGHVGFMAIGAYATGIMTQTMATPAGFYLSMIVGMVIAMVAAVIVGIPTLRLRGDYLAIATMGAAEIIRILINNLKITNGAAGLFNIPALASWATVYVLMCLTTIITVNFIHSRGGRAVMAVRDDELAAGAMGINTTRWKLAAFVFGAATAAIGGSLHAAYIQTIAPGDFNIMASIAILIIVVLGGVGSITGTFVAAIVLGALDTILQNFGTIRMIIYSLALILIMIFKPAGLLGTWEFSFTRLFRRRSTKEAVNHE

SEQ ID NO: 23855 - protein, 633 aa, Lactobacillus plantarum WCFS1
MCGLVGCLTDRRKVDNAAYDQVVREMTKMIVHRGPDDEGYFADDNITMGFRRLSIIDLAGGHQPLSYDNERYWLTFNGEIYNYVELREQLIQEGYTFKTDSDSEVILGMYAKYQAKLTTYLRGMFAFVIWDKQEKTLFAARDQFGIKPFYYAIAGDDFYYASESKAIYKILKDKHFDQEALQDYLTFQYVPETETLTKEIKMLAPGCSLTKQLGHAPQIKRYYHWEFHPVVRSEQDYATRLKETLIDSVKIHMRSDVPVGTFLSGGIDSSIVVAIAKQFNPNLKTISVGFERPGYSELDVAQETAAKLNVDNVQMTITPEAFMAAFPHFVWSMDDPLADPAAVPQYFLTKEAVKHVKVCLTGEGADELFGGYTIYHEPESLKAFRYTKPINGALQRIAAMMPAGMRGRSLLMRGTTPLEKRYVGNAFIFNETEKQQFMKHYNRDHSFQQTTRVFYDEAKHYDLISKMQFIDMHTWLNGDLLHNADRTALAHSLELRTPFVDREVFNLAAEIPANLRISHGTTKYILRKAVEDIVPAHVLYRKKLGFPVPIRLWLKDEMYDWAKNIIVTSQTDQYFDKTYFLKLLDDHRAGIRDNSRQLWTVLTFMMWHKLYVEADMLMDSVTANHLAEQVEIG

SEQ ID NO: 23856 - protein, 474 aa, Lactobacillus plantarum WCFS1
MDLSHTRLLRKKDINAMLATYHSPLKKELKTFDLTMLGIGAIIGTGIFVLTGTGALTAGPGLMISFVLAAIACLFASLCYAEFAAMVPESGSAYTYAYTTLGEIVAFIIGWDLMLEYLFAVSTVSAGWSGYFQSFLAGFGLKLPAALSAAAGSVPGVTSYFNLPAFTIIILITTLLSLGVKETKRVNNVMVVIKLAVVLLFIFTAVRFIKPANWSPLLPFGFKGVFGAASSVFFAFIGFDAISSSVEETLEPSKTLPRSMLLSLGICTILYVAVSAIMTGVVPFETFAKYIDHPISAVLIYSGQNWMAGIIDLGAILGMTTVMLVCLYGQTRISFSMSRDGLLPHVFSDISAKTGAPLKSTVLFGSIAAIMGGFIPLADLAELVNIGTLTAFTLVSFSILRLRKTQPDLRRPFKTPWVPFVPIMSIICCVFLLINLKPVTWIRFVVWLAIGMVVYFGYSVKHSQLKTDTATDEK

SEQ ID NO: 23857 - protein, 555 aa, Lactobacillus plantarum WCFS1
MLSSRFIILKSKNIDWWVYLPTIGLFAAASVVLLMGGHSLETSLSGILNWLTNNMSWLYMSVYVITFIFFIYLGFSKLGKTKLGDPDDKPEFSTYHWGSMVYATGIDASILMLSMVDPLRYLQSPSFGVKPFSTSAYNYAHMLGQFNWGPMAWMMFAPATIAIAYAMYVKHIKVQRLSAAISVLQGPGKGKQIARNTIDFLVIIGIMGGVGTSVGMEIPVISKVLSAVTGIADTMTLKLGLFALLFVIFAMAVFNGLKKGIGRLSAAHVWLAIGFLIVVLIVGPTLYILNSETNSIGLFVNKFITLSTNTAPNGHATAMQRQTIFYWGWWLSFMPVMGLFIARISRGRTIRQVLGGMLLWGSLGCVSFYAILGGYALYLQRMGIVNLVHILNTQGQAAVIAAVLSTLPLKMIMLALYCLSCFIFLATTVSSFAFITSSFTSKKLAAGEQPSRFNRMSWVVIFLVFSLGLVTVGGFESIQSICAMSGFPLTIVALVLLYSIHHDLTTDPVKEAAKANAKAAELARRKRLARDVEITTKTDYARERRTARKRETEAD

SEQ ID NO: 23858 - protein, 217 aa, Lactobacillus plantarum WCFS1
MKFFLDTANTEDIKHFAELGLVDGVTTNPTLVSREGRDFETVIKEITQIVSGPVSAEVTATKAEEMIAQARNEIKWASNIVVKIPMTEEGLKAVKVLSGEGIKTNVTLVFSVSQGLLAAKAGATYISPFLGRLDDIGGNGIQLVKDLRQVLDTYGFKTEIIAASVRGPQHVQEAALAGADIATIPATVFGKLWSHPLTDKGLASFASDWKAFQATQK

SEQ ID NO: 23859 - protein, 229 aa, Lactobacillus plantarum WCFS1
MELLLDTVNLDTIKKYADVISLAGVTSNPSIVKKERPIDFYKHMREVRQIIGKERTLHVQVVGQTAEAMLADAHMILEELDDQVYIKVPTDMTGLAVIKQLKKEDIHVTATAIYSEFQGYLAIAAGVDYLAPYYNRMINMNIDSDLVIKHLANQIQREQSTTKILAASFHTVQQINASLVMGAQAVTLGPDLLETALNSPAISAVVAGFKADWESLYGANATLASLSVQ

SEQ ID NO: 23860 - protein, 456 aa, Arabidopsis thaliana
MSPAPSTDPQPISGEKNGGDGGRIPVEEWLPITESRKGNVYTATFHLLCSGIGLQVILLPAAFAALGWVWGTIILTVGFVWKLYTTWLLVQLHEAVPGIRISRYVRLAIASFGVKLGKLLGIFPVMYLSGGACTILVITGGKSIQQLLQIMSDDNTAPLTSVQCFLVFSCIAMIMSQFPNLNSLFGVSLIGAFMGIAYCTVIWILPVASDSQRTQVSVSYATMDKSFVHIFNAIGLIALVYRGNNLVLEIQGTLPSDSKNPSCKTMWRAVMISHALVAICMFPLTFAVYWAYGDKIPATGGPVGNYLKLYTQEHSKRAACFIHLTFIFSCLCSYPINLMPACDNIEMVYITKKKKPASIIVRMMLRVFLSLVCFTIAVGFPFLPYLAVLIGAIALLVTFTYPCFMWISIKKPQRKSPMWLFNVLVGCLGASLSVLLLVASAMRLAQKGLHANFFRP

SEQ ID NO: 23861 - protein, 250 aa, Arabidopsis thaliana
MGRGRVELKRIENKINRQVTFAKRRNGLLKKAYELSVLCDAEVSLIVFSNRGKLYEFCSTSNMLKTLERYQKCSYGSIEVNNKPAKELENSYREYLKLKGRYENLQRQQRNLLGEDLGPLNSKELEQLERQLDGSLKQVRCIKTQYMLDQLSDLQGKEHILLDANRALSMKLEDMIGVRHHHVGGGWEGGDQQNIAYGHPQAHSQGLYQSLECDPTLQIGYSHPVCSEQMAVTVQGQSQQGNGYIPGWML

SEQ ID NO: 23862 - protein, 564 aa, Arabidopsis thaliana
ESTLGRHLSRRLVQAGVTDVFSVPGDFNLTLLDHLIAEPELNNIGCCNELNAGYAADGYARSRGVGACVVTFTVGGLSVLNAIAGAYSENLPVICIVGGPNSNDFGTNRILHHTIGLPDFSQELRCFQTVTCYQAVVNNLEDAHEQIDKAIATALKESKPVYISISCNLAATPHPTFARDPVPFDLTPRMSNTMGLEAAVEATLEFLNKAVKPVMVGGPKLRVAKASEAFLELADASGYPLAVMPSTKGLVPENHPHFIGTYWGAVSTPFCSEIVESADAYIFAGPIFNDYSSVGYSLLLKKEKAIIVHPDRVVVANGPTFGCVLMSDFFRELAKRVKRNETAYENYERIFVPEGKPLKCKPGEPLRVNAMFQHIQKMLSSETAVIAETGDSWFNCQKLKLPKGCGYEFQMQYGSIGWSVGATLGYAQATPEKRVLSFIGDGSFQVTAQDISTMIRNGQKAIIFLINNGGYTTEVEIHDGPYNVIKNWNYTGLVDAIHNGEGKCWTTKVRYEEELVEAIKTATTEKKDSLCFIEVIVHKDDTSKELLEWGSRVSAANGRPPNPQ

SEQ ID NO: 23863 - protein, 354 aa, Arabidopsis thaliana
MSLLSDLVNLNLTDATGKIIAEYIWIGGSGMDIRSKARTLPGPVTDPSKLPKWNYDGSSTGQAAGEDSEVILYPQAIFKDPFRKDNNILVMCDAYTPAGDPIPTNKRHNAAKIFSHPDVAKEEPWYGIEQEYTLMQKDVNWPIGWPVGGYPGPQGPYYCGVGADKAIGRDIVDAHYKACLYAGIGISGINGEVMPGQWEFQVGPVEGISSGDQVWVARYLLERITEISGVIVSFDPKPVPGDWNGAGAHCNYSTKTMRNDGGLEVIKKAIGKLQLKHKEHIAAYGEGNERRLTGKHETADINTFSWGVANRGASVRVGRDTEKEGKGYFEDRRPASNMDPYVVTSMIAETTILG

SEQ ID NO: 23864 - protein, 586 aa, Securigera parviflora
MCGILAVLGCSDDSQAKRVRVLELSRRLKHRGPDWSGLHQHGDCFLAHQRLAIVDPASGDQPLFNEDQSIIVTVNGEIYNHEELRKQMPNHKFRTGSDCDVIAHLYEEHGENFVDMLDGIFSFVLLDTRDNSFIVARDAIGVTSLYIGWGLDGSVWIASELKGLNDDCEHFETFPPGHLYSSKEREFRRWYNPPWFSESIPSAPYDPLALRQAFEKAVVKRLMTDVPFGVLLSGGLDSSLVASITARHLADTKAAKQWGAKLHSFCVGLEGSPDLKAGKEVADYLGTVHHEFQYTVQDGIDALEDVIYHIETYDVTTIRASTPMFLMSRKIKSLGVKWVISGEGSDEIFGGYLYFHKAPNKEELHKETCRKIKALHKYDCLRANKSTFAWGLEARVPFLDKEFINVAMNIDPENKMIKLDEGRIEKWILRKAFDDEENPYLPKHILYRQKEQFSDGVGYGWIDGLKDHAAKHVTDRMMLNASNIYPFNTPTTKEAYYYRMIFERFYPQNSARLSVPGGASVACSTEKALEWDAEWSKNLDPSGRAALGVHVSAYENQLSSSVSKGVEPEKIIPKMEISPLGVAIQS

SEQ ID NO: 23865 - protein, 581 aa, Hordeum vulgare
MCGILAVLGCGDESQGKRVHVLELSRRLKHRGPDWSGLHQVADNYLCHQRLAIIDPASGDQPLYNEDKSVAVAVNGEIYNHEELRERLSGHRFRTGSDCEVIAHLYEEHGESFIDMLDGVFSFVLLDARDHSFIAARDAIGVTSLYIGWGIDGSVWISSEMKGLNDDCEHFEIFPPGNLYSSKEKCFKRWYNPPWFSEVIPSVPYDPLRLRSAFEKAVIKRLMTDVPFGVLLSGGLDSSLVAAVAARHFAGTKAAKRWGTRLHSFCVGLEGSPDLKAAKEVADHLGTVHHEFNFTVQVRIDAIEDVIYHIETYDVTTIRASTLMFQMSRKIKALGVKMVISGEGADEIFGGYLYFHKAPNKEEFHQETCRKIKALHQYDCLRANKATSAWGLEVRVPFLDKEFIDEAMSIDPEWKMIRPDLGRIEKWILRKAFDDEEKPFLPKHILYRQKEQFSDGVGYSWIDGLKDHAASNVSDKMMSNAKFIYPHNTPTTKEAYYYRMIFERYFPQSSAILTVPGGPSVACSTAKAIEWDAQWSGNLDPSGRAALGVHLSAYEQDTIAVGGSNKPGPMETVVNGVAIES

SEQ ID NO: 23866 - protein, 315 aa, Asparagus officinalis
MAYTPLAIILSLCIVSSNAQLSTTFYSNSCPNVFTTIKPVLQHAIEKEKRMGASILRLFFHDCFVNGCDGSILLADTPHFVGEQHANPNNRSARGFKVIDRIKTAVEKACPGVVSCADILAIAARDSVVILGGPNWDVKLGRRDSRTANKTAANNEIPPPTSSLANLTSLFAAKGLSTKDMVALSGAHTIGQARCTSFRSHIYNDSDIDPSFATLRKSNCPKQSGSGDMNLAPLDLQTPTTFDNNYYRNLVVKKGLMHSDQELFNGGSTDSLVKSYSDGTGKFYSAFVEGMIKMGDVSPLVGSNGEIRKICSKVN

SEQ ID NO: 23867 - protein, 301 aa, Asparagus officinalis
GSSSAHLSTNFYSSSCPKVFSTIKPVLQSAIAKEKRMGASILRLFFHDCFVNGCDGSILLADTANFRGEQHAGPNNGSVRGFKVIDKIKTAVENACPGVVSCADILAVAARDSVVILGGPDWKVKLGRRDARTASATLANNNIPPPTSSLSNLISKFAAQGLSTKDMVALSGAHTIGQARCTSFRGHIYNDADIDASFASLRQKICPRKSGSGDTNLAPLDLQTPTAFDNNYYKNLINKKGLLHSDQELFNNGATDSLVKSYSNSEGSFNSDFVKAMIKMGDISPLTGSKGEIRKICSKIN

SEQ ID NO: 23868 - protein, 320 aa, Asparagus officinalis
MASSSFKSLAPISLVSYPVRASSAQLTPNFYSSSCPTLFPTIKSVVQSAISSEKRMGASLLRLFFHDCFVNGCDGSLLLDDTSSFTGEKNAIPNKGSVRGFDVIDKIKTAVEQACPGVVSCADILAVTARDSVVLLGGPTWNVKLGRRDSRTASQSGANNNIPPPTSSLSNLISKFSAQGLSAKEMVALVGAHTIGQARCTNFRAHVYNDTDIDATFAKTRQSNCPSTSGSGDNNLAPLDLQTPVAFDNNYFKNLVSKKGLLHSDQQVFSGGSTNSQVSTYSTSPSTWSSDFVAAMIKMGDISPLTGKSGEIRKNCRKTN

SEQ ID NO: 23869 - protein, 765 aa, Sclerotinia sclerotiorum
MNRYDDGELEISLAPSANHRAQHRSSEASSNPRRDSQNGGNRRMESAPQKKTEQRVGAYSVVRTLGEGSFGKVKLAVHRVTQQQVALKIIARRKLISRDMAGRVEREIEYLQLLRHPHIIKLYTVIKTPHEIIMVSEYAGNELFDYIVQHGKMREDEARRFFQQIICAVEYCHRHKIVHRDLKPENLLLDENLNVKIADFGLSNIMTDGNFLKTSCGSPNYAAPEVINGKLYAGPEVDVWSCGVILYVLLVGRLPFDDEHIPSLFAKIARGQYNVPSYMGREAAALIKKMLAVNPVYRATIAEIRDDPWFTTNLPAYLQPPVEEFIDTGVDPAKAINPRAIAPHASPAIQEKLHVQVTEKISKTMGYGIKDVQEALAAEEPSAIKDAYLIVRENKLMQANPNLTDDKNQLLFQIPSPPTYDSTIPPSMPDSPSPLVKERPGNIPPTAPPFQPRPSPLLDAVSPRSSSSIGTDRSFVRPYVSKIGILPSSIPQYHKEFMETHKSGHQESTLSNSHSETIEPSPQTEAEKAETVRRLNPHSRSLAKLDEGKKPAGMTPVPVKKAKPTKWQFGIRSRNQPLEAIGCIYRALQKLGAEWLVGDEWTPGQSENNGNKRNDDNDDNDDPNGSGASLHRETSMNDNSKKNRFSGIDKKGNYKLPEDPWVLHVRWKKTDIRRHSIASLNSSTSSPAHPSSMPKDEGLDSIDGGVIMHLDIQLYEMEPGVYLVDFKCAGYETADGMMCEEKDVTSPFPFLDLASKLIIQLAEAD

SEQ ID NO: 23870 - protein, 182 aa, Arabidopsis thaliana
MVTATSIIAWGSGEDGQLGIGTNEEKEWACVVEALEPYSVRSVVSGSRNSLAICDDGTMFTWGWNQRGTLGHQPETKTENIPSRVKALANVKITQAAIGGWHCLAVDDQGRAYAWGGNEYGQCGEEPLKDEMGRPVRRDIVIPKRCAPKLTVRQVAAGGTHSVVLTREGHVWTWGQPWPPVT

SEQ ID NO: 23871 - protein, 348 aa, Tropheryma whipplei str. Twist
MTDLLSCAPHARGANNRPGFSDRDVQNDGPMRNLVLIAGRSHPDLARATAESLGVGLLQTDIRTFANGEIYTRFNSSVRGKDVFVLQTGCDPVNDGLVELLLLIDSCKRASAKHISAVTPCYPYSRQDRKGYGREPISARLVADLIACAGADRIITVDLHASQIQGFFNGPVDHLTGVPALIKHVKSLRIDNLTIVSPDIGRVKVADVWSDKLNAPLAIIHKRRDPRVHNNVTMHEIVGDVRSRVCLVVDDLIDTGDTLAKAAIALKKAGAVKVIAAATHGIFSTPERLVSCGEIDHVIVTDSVPASKVFDRVKTVSIAPLLACAICEVVTEGSISEMLDCVSKRIDN

SEQ ID NO: 23872 - protein, 581 aa, Tropheryma whipplei str. Twist
MVRISGAQAVIKSLEELGIDLVFGIPGGAILEVYNSLFSSSIRHILVRHEQGAGHAAEGYACSSGKLGVCLATSGPGATNLVTAIADAYMDSVPILAITGQVYSHLLGSDAFQESDIIGITMPITKHAFSVKRATEIPAAIFAGAKIATTGRPGPVLIDITKDAQQDEFDFMWPPKSIDLSGYSVAQNIPDTLAQFADGFFDMLSGSIRPVIYAGGGTVRSGASEELIRFAEGFGIPVVTTLTARGVLPDSNRLNLGMPGMHGTVAAILALQKSDLLIALGTRFDDRVTGRLDSFAQNARVVHVDIDPAEIGKNRRPDLFVIGDVKEVLGYINSHSENKTTGDLTAWWRSLEKMRQIYPLVFPQKSSDGNLSPGYVIKRLGELSGPDAIYATGVGQHQMWASQAISFSRPNSFLTSGGAGTMGYAVPAAMGAKAANPEKIVWAIDGDGCFQMTNQELATCSVNGLPIKVAVINNRSLGMVRQWQGLFYNKRYSQTDLNTGDAYIPDFCKLAESYSCASCRVSSVDEVDNAIEFALAINDRPVVIDFVVCKDSMVWPMVPQGLGNSHLKYLQDVSPVWHDNE

SEQ ID NO: 23873 - protein, 301 aa, Tropheryma whipplei str. Twist
MVVSRSPGGYRSGIITLVGRPNVGKSTLINSLVGEHLSITSDKPQTTRRIIRGVISRMNAQIAITDTPGIHKPKTPFGKGLNEMTTCALSASDSIGICLPVNQKIGSGDRFILDKVEAIGPYKKIAIVTKIDRVEKRDLLLKLSEISDLGCNFAAVVPVSAKRAVQIDLLKDVFFENCLNFSEKLFFDHEKPSVSDQISELIREKALCLLEQEIPHSLLVEVEEILTDSNRVFIHANLYVERNSQKMIVLGKGGRTIKNISITSRLAIESFLGKKVYLRLIVKVVKNWQKSESFLGKIYLS

SEQ ID NO: 23874 - protein, 249 aa, Tropheryma whipplei str. Twist
MSVLEIRDLCVTIGDDSVKKEILKGVCLKIKSGEKHAIMGPNGSGKSTLASVIAGHPRYTVTSGSITLDNKDVLQMSVDERARAGIFLAMQYPMEITGVSVGNFLRTAKAALDQKQPQIRQWIETVRGAMDRLQIERAFLERNVNEGFSGGEKKRHEILQLELFKPLFAILDETDSGLDIDALRVVSEGVNRAHSENNMGILLITHYTRILRYIKPDFVHIFVNGRIVEEGGEGLADRLEKEGYNAYVS

SEQ ID NO: 23875 - protein, 383 aa, Tropheryma whipplei str. Twist
MMFGTYLDYAAHAPLMPEAAAVYQEFCNMPGNASSSHFYGRHMRAVIEKAKEGILTALNAPPGTEVSFTSGGTESINTCIYGTYLFRNSFVSHINDGNISKKIILANPADHTAQLSSIKSLPYAEIVWLPIDKYARVLPDSLEQAILQKDPNKIALFACTWVNSELGTISPVYDYARICQTYDIPVHIDSVAATSLIDFSRLVGKVSLSIAGHKIGAPPGTGAILSSFSFPPLLRGGNQQRLRSGSVDPLGSTSLSIALNRKVQSLRALRQRLVEVVLSAVPEAVVNSDTQDSSDAILNVSFPGCSSDTLLYLFDEAKIAISSGSACHSGVIQPSHVMSAVGLKPDLAKATLRFSLGWASTFDDIEVLSQNLGDIYKKALIAK

SEQ ID NO: 23876 - protein, 445 aa, Tropheryma whipplei str. Twist
MSGITLPEFVDCVTVEFSAGRGGNGCASVRREKYKPLAGPDGGSGGHGGSIFLKADTSERTLISFRRKGHYSASNGAHGLSRLRNGARGKDLEVSVPCGTSVYDEGGRQIADLVSPGSCLQVVRGGTGGLGNAALAGYRRKTPRFALLGLPGQKRKLRLEVKSIADVALVGFPSVGKSSIISAISSAKPKIADYPFTTLHPNLGVVQSGPYRYTVADVPGLVEGASKGIGLGLNFLRHIERCSVVVHVIDCANTQQDPISGFNLIEKELSEYKVAENAIPLNKRPKVIVLNKIDVLQTKEEQDTLLYLQSVFKKLVTDVYAISAVTRSGLRQFTLRLGEICQEYPSQVQPTSQTILIPAKNTPEFSLDRTDGVYRVTGKKPEKWILQTDFSSDEAISYLAERLDRLGIEDALVRAGATCGDEVEIGGVIFTWDPSVANTSFSLSV

SEQ ID NO: 23877 - protein, 364 aa, Tropheryma whipplei str. Twist
MMGFLSSVMRWWKGMSRPQQWFFLLPFVVLVYLLPIINPPVITTEPGNNFPISLFTMAIYALAAVGLNVVVGYAGLLDLGYIAFFAVGAYVSAVFTSPDSPYVKIPYLWTIPVAIFTAMVFGAALGVPTLRLRGDYLAIVTLGFGEIVRIMATIIPALRGNLGFSNVGHPPGDYPSGQPIFTPDNGVAWYWVAITVVIFVLVIVGNLERSIVGRNWFAICQDEDAAEVMGVNTFSFKVWAFAIGAAIGGLSGSLQAAQTGFVNNQRFDVATSVLFLVAVVLGGSGNKFGAAIGGALVAYIPLRFTEIAQYKYLIFGVCLILLMLFRHEGLFPMKANLFSRQVLLRKLSLRHSPDKRASSSPSGS

SEQ ID NO: 23878 - protein, 418 aa, Tropheryma whipplei str. Twist
MSLIVQKYGGSSLASANNLKRVAERVSCAYYGNNRLVVVVSAMGSTTDRLLTLAHEVSVEPERRELDVLLSTGECVTASLLAMAINSIGLSARSFTAAQAGIVTDEHHCNARIITITPTPIEDALNAGEIAVVAGFQGVNRKGQVTTLGRGGSDTTAVALAAALKADRCEIYSDVEGVFTADPRIVPKARLLESIPIDHMLELSTAGARILSLRSVVFAKRHNVSVKVGSTFSDTSGTILCNEGEAMEEPVITGIATDTSQARITIVGLPDIPGSAAEVFSALSVAEVAVDNIVQNFSSSNTGFIDLSFTSPKAQGPAVTSALRENQTRIGYKDLQYDDEVGKITVVGSGIQHSADISAQLFRLLSDAKVNVEMISTSEMRISFVVRANVVAEVARLIHTSFGLDADLRAVVHSEGRV

SEQ ID NO: 23879 - protein, 404 aa, Tropheryma whipplei str. Twist
MSERISKRCSKLGESVTLSIDSKAKRMKKAGKPIISYAAGEPDFPTPEHIVSRCQLAAATRSNHVYTETAGLAELREAIAEKTLADSFLKVSESQILITNGCKQAVYMACQTILDPNDEVILPTPYWTTYPESIRAAGAKVVIPATDSFYVTVDQLQSVLTNKTKAIILSSPSNPSGAVYSLDSLRDIARFAKKHGIWIISDEIYQNIYYSGRVAPGFGEALPEIKDQLILVNGLSKTYAMTGWRIGWMIGPQDIINASVKLQSHICSHVSNIMQQAALEALTGPQDCVAYMRDEFKKRRDLMLRELGRIKGLSIPKPDGAFYIYPDVSAFIGRRITGRMIHSSFELAELVLSETLVATVPGEAFGTKGHLRLSYALDETSLLEGTGRLVEFFDTANSDMTKVF

SEQ ID NO: 23880 - protein, 705 aa, Tropheryma whipplei str. Twist
MCGGSFMSESQSELDKYGTNLTKTAATNKLDPVIGRDAEIRRVCQILSRRTKNNPVLIGSAGVGKTAIVEGLAQRIVAGDVPESLRNKEIVSLDLSALLAGASYRGEFEKRVKNLLEEIQKSKVIIFIDEVHTLMSAGAAEGAIAAGNMLKPLLARGELRLIGATTLDEYREHLEKDPALERRFQQVFVGEPNLEDCIAIMRGLKERYEAHHKVSISDTALVTAVELSSRYITGRQLPDKAIDLLDEAASSLRMEIDSSPVELDQLRREVDRLRLEELALKSENDPTSEQRLRSITNQLSGKQEMLNTLQASWNSERARLNQIGALKEQIDIAKQSADIAQREGRLEDASRLLYATIPQLQKNLAEKLEEQDSAPLVSDQVMPEDIASVVEGWTGIPVKKLMQKDAKQLLHLEEDLSKSVIAQKVAIGVIADAVRRSRAGLSDPNRPSGTFLFLGPTGVGKTQLVKALASLLYDGEIVRIDMSEYSEKFSISRLIGAPPGYIGHESAGQLTESVRRRPYSVVLFDEAEKAHPEVFDILLQVLDEGRLTDSHGRTVDFRNTIIVLTSNIGSRYLSDISLEATTAHEYVNDEVRRTFRPEFLNRLDEIVIFEPLSQSDICQIVDLNIESLNKRIKDRRIVVTVSEDLRRWLSKSGYDVIYGARPLRRLIQREIEDRLAKLIIEGLIHDGQTASFDLSGGAVNAQVCS

SEQ ID NO: 23881 - protein, 333 aa, Tropheryma whipplei str. Twist
MALICQGLVRNTALISLGSRLEKMFDGLFDFLQNILLPIKWVIEQILVFFHTLLGFLGFGDKSGLSWALSIVGLVIVIRATLIPVFLKQIRAQRKMLEIAPEVRRIQEKYKGKRDVLSRQSMNQEMMEIYRVRGANPLSSCLPIVLQMPVFFGLYQVIESAQNAGTGVGPLNGPLGMDFRDSRIFGVVPLHDSFSHDFYALQAGQAFNLITMIVAGVLTAIMIAVQLFTQLKVIPKNIPENAKNTSVYKNQKVMLYLLPIMFLGMGFSFPVGILIYWTASNVWSAVQQAVAIYRNPSPGSLAFELRRKRLGVQNKKTKGQRQQPVNKRRAKRR

SEQ ID NO: 23882 - protein, 1307 aa, Ceratodon purpureus
MSATKKTYSSTTSAKSKHSVRVAQTTADAALEAVYEMSGDSGDSFDYSKSVGQSAESVPAGAVTAYLQRMQREGLIQNFGCMVAVEEPNFCVIAYSENASEFLDLIPQAVPSMGEMDVLGIGTDIRTLFTPSSSAALEKAAATQDISLLNPITVHCRRSGKPLYAIAHRIDIGIVIDFEAVKMIDVPVSAAAGALQSHKLAARAITRLQALPGGDIELLCDTIVEEVRELTGYDRVMAFKFHEDEHGEVVAEIRRMDLEPYMGLHYPATDIPQASRFLLMKNRVRLIADCYASPVKLIQDPDIRQPVSLAGSTLRAPHGCHAQYMGNMGSIASLVMAVIINDNEEYSRGAIQRGRKLWGLVVCQHTSPRTVPFPLRSVCEFLMQVFGMQLNLHVELAAQLREKHILRTQTLLCDMLLRDAPIGIVSQTPNIMDLVKCDGAALYYGKRVWLLGTTPTENQIKEIADWLLEHHNDSTGLSTDSLADANYPGAHLLGDAVCGMAAAKITAKDFLFWFRSHTATEVKWGGAKHDPDEKDDGRKMHPRSSFKAFLEVVNKRSPPWEDVEMDAIHSLQLILRGSFRDIADSDTKTMIHARLNDLKLQGVEERNALANEMSRVLETAAAPILAVDSRGMINAWNAKIAQVTGLPVEEAMHCSLTKDLVLDESVVVVERLLSLALQGEEEQNVEIKLKTFGTQTTERAVILIVNACCSRDASDFVVGVFFVGQDVTEQRMFMDRFTRIQGGEKTTVQDPHPLMRPSFDGDEFGRTFKRNSALGGLKDHATGSVERLDLYLRRAEECMEVMETIPSPKFNNKQCQYLAGKLKAVLQSASLFLRISHHEHHELGASIDMGRHVEIFKLLLALAKEIESFIQGCCKDEWIKAAMTLTNVSEYVSSMGFNLELCKIAFCKSCAASGSLTLDQIEVICKDEAEVVKRNASIDVDTLFAKVIYDLTEKTLSSDQNDLAIYLLQRLKRAKPILPSFSSRPSWWNFYDDWSFSEKFFQWIQITGSLGSGSSATVEKAVWLGTPVAKKTFYGRNNEDFKREVEILAELCHPNITSMFCSPLYRRKCSIIMELMDGDLLALMQRRLDRNEDHDSPPFSILEVVDIILQTSEGMNYLHEKGIIHRDLKSMNILVKSVKVTKSEIGYVHVKVADFGLSKTKDSSTRYSNQTWNRGTNRWMAPEVINLGYESTEGEISFDGKVPKYPLKSDVYSFGMVCYEVLTGDVPFPEEKNPNNVKRMVLEGVRPDLPAHCPIELKALITDCWNQDPLKRPSFAVICQKLKYLKYLLMTGFSSYQDSYPSTEEPS

SEQ ID NO: 23883 - protein, 504 aa, Proteus sp. LE138
MSKDNKKAGIEPKVFFPPLIIVGILCWLTVRDLDASNEVINAVFSYVTNVWGWAFEWYMVIMFGGWFWLVFGRYAKKRLGDEKPEFSTASWIFMMFASCTSAAVLFWGSIEIYYYISSPPFGMEGYSAPAKEIGLAYSLFHWGPLPWATYSFLSVAFAYFFFVRKMEVIRPSSTLTPLVGEKHVNGLFGTVVDNFYLVALILAMGTSLGLATPLVTECIQYLFGIPHTLQLDAIIISCWILLNAICVAFGLQKGVKIASDVRTYLSFLMLGWVFIVGGASFIVNYFTDSVGTLLMYMPRMLFYTDPIGKGGFPQAWTVFYWAWWVIYAIQMSIFLARISKGRTVRELCLGMVSGLTAGTWLIWTYSGGNTLQLIDQNILNIPQLIDQYGVPRAIIETWAALPLSTATMWGFFILCFIATVTLINACSYTLAMSTCRSMKEGAEPPLLVRIGWSVLVGIIGIILLALGGLKPIQTAIIAGGCPLFFVNIMVTLSFIKDAKVHWKD

SEQ ID NO: 23884 - protein, 379 aa, Cucumis melo
MPSLTAPHGLPLFLFLLLFLFSSVSAQFQPAPDPRSDPYQYRLSGSMAVIIVILIAALFFMAFFSVYIRHCNDSPSNTVRPITAAAGRSRRATRGLDPAVIETFPTLIYSDVKEHKIGKSALECAVCLNEFEDDETLRLIPKCDHVFHPECIDAWLASHSTCPVCRANLSPQPTDSVHRADDSNAVVNSDTDGGDIEAQSNDVVSETTAPPTVQIQTESELSTTTSNKALNRTRTRGSRSNRLRWLFPRSHSTGHSLVQPGEDTERFTLRLPVEIRKQVVNRKLHRATSMVVLARQSSSMRGYRFGSGEGSSRGKYYRRLERLDRTSKSDRWVLSMTPPFFTRMSSMKTPRGGSNRAEPGSGRELGQGNTAVDSSRLPV

SEQ ID NO: 23885 - protein, 180 aa, Rhizobium gallicum bv. gallicum
EFDAFPALEQLPLWGFDGSSTMQAEGRSSDCVLKPVAVYPDPARSNGALVMCEVMMPDGVTPHPSNSRATILDDEDAWFGFEQEYFFYENGRPLGFPEQGYPAPQGPYYTGVGYKNVGSVAREIVEEHLDLCLAAGINHEGINAEVAKGQWEFQIFGKGSKRAADQIWMARYLLLRLCEK

SEQ ID NO: 23886 - protein, 180 aa, Rhizobium etli bv. phaseoli
EFDAFPTLEQLPLWGFDGSSTMQAEGRSSDCVLKPVAIYPDPARTNGVLVMCEVMMPDGVTPHPSNARATILDDEDAWFGFEQEYFFYQNGRPLGFPEQGYPAPQGPYYTGVGYSNVGDVAREIVEEHLDLCLAAGINHEGINAEVAKGQWEFQIFGKGSKKAADQIWMARYLLQRLTEK

SEQ ID NO: 23887 - protein, 180 aa, Rhizobium gallicum bv. gallicum
EFDAFPALEQLPLWGFDGSSTMQAEGRSSDCVLKPVAVYPDPARTNGALVMCEVMMPDGVTPHPSNSRATILDDEDAWFGFEQEYFFYENGRPLGFPEQGYPAPQGPYYTGVGYKNVGSVAREIVEEHLDLCLAAGINHEGINAEVAKGQWEFQIFGKGFKRAADQIWMARYLLLRLCEK

SEQ ID NO: 23888 - protein, 180 aa, Rhizobium gallicum bv. gallicum
DFDAFPALEQLPLWGFDGSSTMQAEGRSSDCVLKPVAVYPDPARTNGALVMCEVMMPDGVTPHPSNSRATILDDEDAWFGFEQEYFFYENGRPLGFPEQGYPAPQGPYYTGVGYKNVGSVAREIVEEHLDLCLAAGINHEGINAEVAKGQWEFQIFGKGFKRAADQIWMARYLLLRLCEK

SEQ ID NO: 23889 - protein, 573 aa, Saccharomyces bayanus
MLSKSEKHIDLLAGNMSNLSFDGPGTPSSTGLFNVNQNNTNRRMRPTGFNDSPSPIKSSLFPHEDSSNMDIDEVSQSDMDITNSPKKLPPKFYERATSNKTQRVVSVCKMYFLEYYCDMFDYVISRRQRTKQVLEYLQQQSQLPTADQAKLNEEWSSYLQKEHQVLRKRRLKPKNRDFEVITQVGQGGYGQVYLARKKDTKEVCALKILNKKLLFKLNETKHVLTERDILTTTRSEWLVKLLYAFQDLQSLYLAMEFVPGGDFRTLLINTRCLKSGHARFYISEMFCAVNALHDLGYTHRDLKPENFLIDAKGHIKLTDFGLAAGTISNERIESMKIRLEKIKDLEFPAFTEKSIEDRRKMYNQLREKEVNYANSMVGSPDYMALEVLEGKKYDFTVDYWSLGCMLFESLVGYTPFSGSSTNETYDNLRRWKQTLRRPRQSDGRAAFSDRTWDLITRLIADPINRLRSFEHVKRMSYFADINFSTLRSMIPPFTPQLDSETDAGYFDDFTSEADMAKYADVFKRQDKLTAMVDDSAVSSKLVGFTFRHRNGKQGSSGILFNGSEHSDPFATFY

SEQ ID NO: 23890 - protein, 304 aa, Saccharomyces bayanus
MSSNAQINTPLPPAPAPKKESNFMIDFLMGGVSAAVAKTAASPIERVKLLIQNQDEMLKQGTLDRKYGGILECFKRTAQQEGIISFWRGNTANVIRYFPTQALNFAFKDKIKAMFGFKKEEGYGKWFAGNLASGGAAGALSLMFVYSLDYARTRLAADSKSSKKGGARQFNGLVDVYRKTLKSDGIAGLYRGFLPSVVGIVVYRGLYFGLYDSLKPVLLTGSLEGSFLASFLLGWVVTTGASTCSYPLDTVRRRMMMTSGQAIKYDGAFDCMRKIIAAEGVSSLFKGCGANILRGVRRAGVISM

SEQ ID NO: 23891 - protein, 307 aa, Saccharomyces bayanus
MSSSTKQQDSSFAINFLMGGVSAAIAKTAASPIERVKILIQNQDEMIKQGTLEKKYSGIVECFKRTAKQEGMISFWRGNTANVIRYFPTQALNFAFKDKIKLMFGFKKEEGYGKWFAGNLASGGAAGALSLLFVYSLDFARTRLAADAKSSKKGSSRQFNGLVDVYKKTLKSDGIAGLYRGFMPSVVGIVVYRGLYFGLFDSLKPVVLTGSLEGSFLASFLLGWVVTTGASTCSYPLDTVRRRMMMTSGQAIKYEGAMDCLKKIVAAEGVGSLFKGCGANILRSVAGAGVISMYDQLQMILFGKKFK

SEQ ID NO: 23892 - protein, 579 aa, Saccharomyces servazzii
MFSRTDKNVDTLAGDISQLSFDSPSSKLAYNANNNMTPLRQRDNNRFGVGAGMNMGTPTPSPTKSTVYDQENDSSAMMVDDEDNDDITNSPKKLPMDFYKKSSSNKTQRLVSVCKMYFLDYYCDMFDYVISRRQRTKKVMEYIEQQKVLNNVPVERLNTEWFGYLQQEHDVLRKRRLKPKHKDFEMITQVGQGGYGQVYLARKKDTKEVCALKILNKKLLFKLNETNHVLTERDILTTTRSEWLVKLLYAFQDPESLFLAMEFVPGGDFRTLLINTKYLKSAHARFYISEMFCAVNALHELGYTHRDLKPENFLIDAKGHIKLTDFGLAAGTVSNERIESMKIRLEEVKNLEFPGFKEKSIEDRRKIYHHMRETDVNYANSMVGSPDYMALEVLEGKKYDFTVDYWSLGCMLFESLVSYTPFSGSSSNETYENLRHWKQTLRRPRLDNGRPAFSDRTWDLITRLIADPISRLRSFEHVKRMPYFSDIDFDNLRNMSPPFIPQLDSETDAGYFDDFTNEADMAKYADVFKRQNKLSAMVDNSAVSSKLVGFTFRHRSGKQGSSGILYNGSEHSDPFATFY

SEQ ID NO: 23893 - protein, 144 aa, Saccharomyces servazzii
DVYTKTLKSDGIVGLYRGFGPSVVGIMVYRGLYFGLYDSLKPVLLTGTLENSFLASFLLGWCVTIGASTCSYPLDTVRRRMMMTSGQTVKYKNARDCMKQIVAKEGASSLFKGCGANIFRGVAAAGVISLYDQLQLILFGKKFK

SEQ ID NO: 23894 - protein, 553 aa, Saccharomyces castellii
MFPRSDKDVDQLVGNLNQLGLNKPNARFVSVTPTRANKENRSSLSPSPSPNKTKRFTADETELKNSPKKLPHDFYKKALSNDTKRIVNVCQMYFLDYYCDMFDYVISRRQRTKSVLNYLERNQNSLSTEELNNEWTAYLQQEHDVLRKRRLKPKNKDFEMITQVGQGGYGQVYLARKRDTKEVCALKILNKKLLFKLNETNHVLTERDILTTTRSDWLVKLLYAFQDTESLYLAMEFVPGGDFRTLLINTRFLRNTHARFYISEMFCAVNALHELGYTHRDLKPENFLIDSEGHIKLTDFGLAAGTISTERIQSMKIRLEEVKNLEFPAFTEKSIEDRRKMYTHLRQTEVNYANSMVGSPDYMALEVLEGKKYDFTVDYWSLGCMLFESLVGYTPFSGSSTNETYENLRHWKKTLRRPVLDNGRPAFSDRTWDIITRLIADPINRLRSFEHIKRMPYFAEVNFNTLRQSAPPFTPQLDSETDAGYFDDFTNEADMAKYADVFKRQNKLSSMVDDSAVDSKLVGFTFRHRNGQKGLSGILYNGSEHSDPFATFY

SEQ ID NO: 23895 - protein, 573 aa, Saccharomyces castellii
MSERKMENLTGTMHQLNFNLPNQPNRGSTSQFASLDNFSTPTKYKNDKLNGSPIPPGARRYEIDDSDSKMDIDGSSYNDIDITNSPKKLPQGFQTMASNNKTQRLVSVCKMYFLDYYCDMFDYVISRRQRTKKVLEYLEQKKNENVDLNSLNNEWNGYIQREHQVLRKRRLKPKHKDFEMITQVGQGGYGQVYLPGKKDTNEVCALKILNKKLLFKLNETNHVLTERDILTTTRSQWLVKLLYAFQDTQNLYLAMEFVPGGDFRTLLINTRFLKSTHARFYISEMFLAVNALHDLGYTHRDLKPENFLIDAKGHIKLTDFGLAAGTISNDRIQSMKVRLEEVKNLEFPEFSDKSIEDRRQMYQKYRETEVNYANSMVGSPDYMALEVLEGKKYDFTVDYWSLSCMLFESLVGYTPFSGSSTNETYENLRHWKKTLRRPMLDNGRPAFSDRTWDFITRLIADPINRLRSFEHVKRMTYFESVDFNTLRDLSPPFIPQLDNETDAGYFDDFTNEADMAKYADVFKRQNKLSTMVNDADIDSKLVGFTFRHRYGKNGSSGVLYNGLEQSDPFSTFY

SEQ ID NO: 23896 - protein, 305 aa, Saccharomyces castellii
MSTEKPQSNFAIDFLMGGVSAAVAKTAASPIERVKLLIQNQNEMLKQGTLDTKYKGIVDCFRRTAQQEGIISFWRGNTANVIRYFPTQALNFAFKDKIKLMFGFKKEDGYGKWFAGNLASGGAAGGLSLLFVYSLDFARTRLAADSKSSKKGGSRQFNGLIDVYKKTLKSDGVAGLYRGFLPSVVGIIVYRGLYFGLYDSIKPVLLTGSLEGSFLASFLLGWVVTTGASTCSYPLDTVRRKMMMTSGQAVKYKGAFDCFKKIVAAEGVASLFKGCGANILRGVAGAGVISMYDQLQMILFGKKFK

SEQ ID NO: 23897 - protein, 308 aa, Saccharomyces castellii
MSSKEEVKKESNFAIDFLMGGVSAAVAKTAASPIERVKLLIQNQDEMIKQGSLDSKYKGIIECFQRTAKTEGIIAFWRGNTANVIRYFPTQALNFAFKDKIKAMFGFKKEEGYGKWFAGNLASGGAAGGLSLLFVYSLDYARTRLAADAKSSKKGGSRQYKGLIDVYKQTLATDGMAGLYRGFLPSVVGIIVYRGLYFGLYDSLKPAVLTGSLEGSFLASFLLGWIVTTGASTASYPLDTVRRRMMMTSGQAVKYDGAFDCFRKVVAAEGVSSLFKGCGANILRGVAGAGVISMYDQLQMIMFGKKFK

SEQ ID NO: 23898 - protein, 227 aa, Saccharomyces castellii
HVIRYFPTQALNFAFKDKIKAMFGFNKERDGYTKWFMGNVASGGCAGALSLLFVYSLDYARTRLAADAKSIKSGAPRKFNGILDVYKKTLFTDGVLGLYRGFLPSVVGIMVYRGLYFGLYDSLKPVLLTGSFENAFLPSFLLGWAVTISASTTSYPLDTVRRRMMMTSGQAVKYKGAIDCFQQIVSQEGVYSLFKGCGANIFRGVAAAGVISLYDQLQLLLFGRKFK

SEQ ID NO: 23899 - protein, 577 aa, Lachancea kluyveri
MFTRGVNGANRDIDALADNIGQLSFDASDPNKFIFEPTTPSKYKENGSTTGTPSPTKSTLYDDNAGDVSKLSMMDIDERTQDEIDVTKSPKKLPLNFYAKASSSKTKRLVNVCQMYFLDYYCDMFDYVISRRERTRQVMKYLEQQRGQGIQPQQISNEWQGYLNKETNTLRKRRLKPKNKDFEMITQVGQGGYGQVYLARKKDTKEICALKILNKKLLVKLNETNHVLTERDILTTTRSDWLVKLLYAFQDPQSLYLAMEFVPGGDYRTLLINTRFLQAPHARFYISEMFCAVDALHQLGYTHRDLKPENFLIDSKGHIKLTDFGLAAGTVSMERIESMKLRLEEVKNLEFPEFKERSMDDRRRMYKKLRESDVNYASSTVGSPDYMALEVLEAKSYDFTVDYWSLGCIMFESLVGYTPFSGSSTNETYENLRRWKQVLRRPRCENGRYAFSDRTWDLITRLIADPVNRVRSFEHVKRMKYFAEIHFDSLRSMSPPFIPQLDSETDAGYFDDFSNEADMAKYADVFKRQDRLTAMMDDSSADSKLVGFTYRHRKGKNGSSGVLYGGAEHADPFATFY

SEQ ID NO: 23900 - protein, 304 aa, Lachancea kluyveri
MAEKKQSNFAIDFLMGGVSAAVSKTAAAPIERVKLLIQNQDEMIKQGSLDRRYNGIVDCFKRTSEAEGVVSFWRGNTANVIRYFPTQALNFAFKDKIKAMFGFKKEEGYAKWFAGNLASGGLAGGLSLMFVYSLDYARTRLAADSKSAKKGGERQFNGLVDVYKKTLASDGVAGLYRGFLPSVVGIVVYRGLYFGLYDSLKPLLLTGTLEGSFFASFLLGWAVTTGASTASYPLDTVRRRMMMTSGQAVKYDGAFDAFRKIVAAEGIKSLFKGCGANILRGVAGAGVISMYDQLQMILFGKKFK

SEQ ID NO: 23901 - protein, 364 aa, Tropheryma whipplei TW08/27
MMGFLSSVMRWWKGMSRPQQWFFLLPFVVLVYLLPIINPPVITTEPGNNFPISLFTMAIYALAAVGLNVVVGYAGLLDLGYIAFFAVGAYVSAVFTSPDSPYVKIPYLWTIPVAIFTAMVFGAALGVPTLRLRGDYLAIVTLGFGEIVRIMATVIPALRGNLGFSNVGHPPGDYPSGQPIFTPDNGVAWYWVAITVVIFVLVIVGNLERSIVGRNWFAICQDEDAAEVMGVNTFSFKVWAFAIGAAIGGLSGSLQAAQTGFVNNQRFDVATSVLFLVAVVLGGSGNKFGAAIGGALVAYIPLRFTEIAQYKYLIFGVCLILLMLFRHEGLFPMKANLFSRQVLLRKLSLRHSPDKRASSSPSGS

SEQ ID NO: 23902 - protein, 445 aa, Tropheryma whipplei TW08/27
MSGITLPEFVDCVTVEFSAGRGGDGCASVRREKYKPLAGPDGGSGGHGGSIFLKADTSERTLISFRRKGHYSASNGAHGLSRLRNGARGKDLEVSVPCGTSVYDEGGRQIADLVSPGSCLQVVRGGTGGLGNAALAGYRRKTPRFALLGLPGQKRKLRLEVKSIADVALVGFPSVGKSSIISAISSAKPKIADYPFTTLHPNLGVVQSGPYRYTVADVPGLVEGASKGIGLGLNFLRHIERCSVVVHVIDCANTQQDPISGFNLIEKELSEYKVAENAIPLNKRPKVIVLNKIDVLQTKEEQDTLLYLQSVFKKLVTDVYAISAVTRSGLRQFTLRLGEICQEYPSQVQPTSQTILIPAKNTPEFSLDRTDGVYRVTGKKPEKWILQTDFSSDEAISYLAERLDRLGIEDALVRAGATCGDEVEIGGVIFTWDPSVANTSFSLSV

SEQ ID NO: 23903 - protein, 383 aa, Tropheryma whipplei TW08/27
MMFGTYLDYAAHAPLMPEAAAVYQQFCNMPGNASSSHFYGRHMRAVIEKAKEGILAALNAPPGTEVSFTSGGTESINTCIYGTYLFRNSFVSHINDGNISKKIILANPADHTAQLSSIKSLPYAEIVWLPIDKYARVLPDSLEQAILQKDPNKIALFACTWVNSELGTISPVYDYARICQTYDIPVHIDSVAATSLIDFSRLVGKVSLSIAGHKIGAPPGTGAILSSFSFPPLLRGGNQQRLRSGSVDPLGSTSLSIALNRKVQSLRALRQRLVEVVLSAVPEAVVNSDTQDSSDAILNVSFPGCSSDTLLYLFDEAKIAISSGSACHSGVIQPSHVMSAVGLKPDLAKATLRFSLGWASTFDDIEVLSQNLGDIYKKALIAK

SEQ ID NO: 23904 - protein, 249 aa, Tropheryma whipplei TW08/27
MSVLEIRDLCVTIVDDSVKKEILKGVCLKIKSGEKHAIMGPNGSGKSTLASVIAGHPRYTVTSGSITLDNKDVLQMSVDERARAGIFLAMQYPMEITGVSVGNFLRTAKAALDQKQPQIRQWIETVRGAMDRLQIERAFLERNVNEGFSGGEKKRHEILQLELFKPLFAILDETDSGLDIDALRVVSEGVNRAHSENNMGILLITHYTRILRYIKPDFVHIFVNGRIVEEGGEGLADRLEKEGYNAYVS

SEQ ID NO: 23905 - protein, 581 aa, Tropheryma whipplei TW08/27
MVRISGAQAVIKSLEELGIDLVFGIPGGAILEVYNSLFSSSIRHILVRHEQGAGHAAEGYACSSGRLGVCLATSGPGATNLVTAIADAYMDSVPILAITGQVYSHLLGSDAFQESDIIGITMPITKHAFSVKRATEIPAAIFAGAKIATTGRPGPVLIDITKDAQQDEFDFMWPPKSIDLSGYSVAQNIPDTLAQFADGFFDMLSGSIRPVIYAGGGTVRSGASEELIRFAEGFGIPVVTTLTARGVLPDSNRLNLGMPGMHGTVAAILALQKSDLLIALGTRFDDRVTGRLDSFAQNARVVHVDIDPAEIGKNRRPDLFVIGDVKEVLGYINSHSENRTTGDLTAWWRSLEKMRQIYPLVFPQKSSDGNLSPGYVIKRLGELSGPDAIYATGVGQHQMWASQAISFSRPNSFLTSGGAGTMGYAVPAAMGAKAANPEKIVWAIDGDGCFQMTNQELATCSVNGLPIKVAVINNRSLGMVRQWQGLFYNKRYSQTDLNTGDAYIPDFCKLAESYSCASCRVSSVDEVDNAIEFALAINDRPVVIDFVVCKDSMVWPMVPQGLGNSHLKYLQDVSPVWHDNE

SEQ ID NO: 23906 - protein, 418 aa, Tropheryma whipplei TW08/27
MSLIVQKYGGSSLASANNLKRVAERVSRAYYGNNRLVVVVSAMGSTTDRLLTLAHEVSVEPERRELDVLLSTGECVTASLLAMAINSIGLPARSFTAAQAGIVTDEHHCNARIITITPTLIEDALNAGEIAVVAGFQGVNRKGQVTTLGRGGSDTTAVALAAALKADRCEIYSDVEGVFTADPRIVPKARLLESIPIDHMLELSTAGARILSLRSVVFAKRHNVSVKVGSTFSDTSGTILCNEGEAMEEPVITGIATDTSQARITIVGLPDIPGSAAEVFSALSVAEVAVDNIVQNFSSSNTGFIDLSFTSPKAQGPAVTSALRENQTRIGYKDLQYDDEVGKITVVGSGIQHSADISAQLFRLLSDAKVNVEMISTSEMRISFVVRANVVAEVARLIHTSFGLDADLRAVVHSEGRV

SEQ ID NO: 23907 - protein, 404 aa, Tropheryma whipplei TW08/27
MSERISKRCSKLGESVTLSIDSKAKRMKKAGKPIISYAAGEPDFPTPEHIVSRCQLAAATRSNHVYTETAGLAELREAIAEKTLADSFLKVSESQILITNGCKQAVYMACQTILDPNDEVILPTPYWTTYPESIRAAGAKVVIPATDSFYVTVDQLQSVLTNKTKAIILSSPSNPSGAVYSLDSLRDIARFAKKHGIWIISDEIYQNIYYSGRVAPGFGEALPEIKDQLILVNGLSKTYAMTGWRIGWMIGPQDIINASVKLQSHICSHVSNIMQQAALEALTGPQDCVAYMRDEFKKRRDLMLRELGRIKGLSIPKPDGAFYIYPDVSAFIGRRIAGRMIHSSFELAELVLSETLVATVPGEAFGTKGHLRLSYALDETSLLEGTGRLVEFFDTANSDMTKVF

SEQ ID NO: 23908 - protein, 699 aa, Tropheryma whipplei TW08/27
MSESQSELDKYGTNLTKTAATNKLDPVIGRDAEIRRVCQILSRRTKNNPVLIGSAGVGKTAIVEGLAQRIVAGDVPESLRNKEIVSLDLSALLAGASYRGEFEKRVKNLLEEIQKSKVIIFIDEVHTLMSAGAAEGAIAAGNMLKPLLARGELRLIGATTLDEYREHLEKDPALERRFQQVFVGEPNLEDCIAIMRGLKERYEAHHKVSISDTALVTAVELSSRYITGRQLPDKAIDLLDEAASSLRMEIDSSPVELDQLRREVDRLRLEELALKSENDPTSEQRLRSITNQLSGKQEMLNTLQASWNSERARLNQIGALKEQIDIAKQSADIAQREGRLEDASRLLYATIPQLQKNLAEKLEEQDSAPLVSDQVMPEDIASVVEGWTGIPVKKLMQKDAKQLLHLEEDLSKSVIAQKVAIGVIADAVRRSRAGLSDPNRPSGTFLFLGPTGVGKTQLVKALASLLYDGEIVRIDMSEYSEKFSISRLIGAPPGYIGHESAGQLTESVRRRPYSVVLFDEAEKAHPEVFDILLQVLDEGRLTDSHGRTVDFRNTIIVLTSNIGSRYLSDISLEATTAHEYVNDEVRRTFRPEFLNRLDEIVIFEPLSQSDICQIVDLNIESLNKRIKDRRIVVTVSEDLRRWLSKSGYDVIYGARPLRRLIQREIEDRLAKLIIEGLIHDGQTASFDLSGGAVNAQVCS

SEQ ID NO: 23909 - protein, 310 aa, Tropheryma whipplei TW08/27
MFDGLFDFLQNILLPIKWVIEQILVFFHTLLGFLGFGDKSGLSWALSIVGLVIVIRATLIPVFLKQIRAQRKMLEIAPEVRRIQEKYKGKRDVLSRQSMNQEMMEIYRVRGANPLSSCLPIVLQMPVFFGLYQVIESAQNAGTGVGPLNGPLGMDFRDSRIFGVVPLHDSFSHDFYALQAGQAFNLITMIVAGVLTAIMIAVQLFTQLKVIPKNIPENAKNTSVYKNQKVMLYLLPIMFLGMGFSFPVGILIYWTASNVWSGVQQAVAIYRNPSPGSLAFELRRKRLGVQNKKTKGQRQQPVNKRRAKRR

SEQ ID NO: 23910 - protein, 249 aa, Fragaria x ananassa
MGRGRVELKRIENKINRQVTFAKRRNGLLKKAYELSILCDAEVALIIFSNRGKLYEFCSSSSMLKTLERYQKCSYGAMEVQKPAKELEESSYREYLKLKTRCESLQQTQRNLLGEDLGPLNTKELEQLERQLESSLKHVRSTKTQHMIDLLSDLQSKEHMLIEANRDLKTKLDEIDSRTQLRQTWEHGHDHQTMLYGTQHAQTQGLMFQPLDCNPTLQIGYNAVVSQEMPAATPAHAQPVNGFIPGWML

SEQ ID NO: 23911 - protein, 371 aa, Dendrobium sp. XMW-2002-2
MWRHSCCYKQKLRKGLWSPEEDEKLLKHITKYGHGCWSSVPKLAGLQRCGKSCRLRWINYLRPDLKRGTFSQQEENLIIELHGVLGNRWSQIAAQLPGRTDNEIKNLWNSCIKKKLRLRGIDPNTHKPLAETEVQLAEIDSADQPAPEPEKHTVQQTETGVPNNSVRPGNSPAASYFSLPDLTYSPDCGGSIGQIQQFWLNQSGKFFSNNNSNSEFSFNSVSSLVPSVPRSTLSTSKELKPLTSLLMENSPSGFYWETGNSSNSSASSGSNDPLFDGSIFQWTQLIPERDINVQLHGETEDLKWSEYLNGSIPLSTELQSQNPELCNGMKAEEQFGIDGLSIWLQNHQQQQQQQQQASNNYGKDSQRDIIC

SEQ ID NO: 23912 - protein, 216 aa, Dendrobium sp. XMW-2002-8
MGRSPCCEKAHTNKGAWTKEEDERLVAYIKVHGEGCWRSLPKAAGLLRCGKSCRLRWINYLRPDLKRGNFTEEEDELIIKLHSLLGNKWSLIAGRLQGRTDNEIKNYWNTHIRRKLLSRGIDPTTHRPLHGQADASFVNEVEKVVSFRRREDENKSSNSSSSNSRSNSEEAKRWRCPDLNLELCISPPLQKQEDSEEDMMREEFGLCFTNGLLEFR

SEQ ID NO: 23913 - protein, 151 aa, Dendrobium sp. XMW-2002-9
MEEDGILINYIANHGEGVWNNLAKSAGLKRTGKSCRLRWLNYLRPDVRRGNITPEEQLLIMELHARWGNRWSKIARQLPGRTDNEIKNYWRTRIQKKVKNGDAVDYSSQMIIDEACTSHTSSIEEGMAQQNYPVHPNTNPEGYRLQTTRVN

SEQ ID NO: 23914 - protein, 220 aa, Dendrobium sp. XMW-2002-10
MGRSACCEKAHTNKGAWTKEEDERLIAHIRTHGEGCWRSLPKAAGLLRCGKSCRLRWINYLRPDLKRGNFTDEEDELIIKLHSLLGNKWSLIAGRLPGRTDNEIKNYWNTHIRRKLLNRGIDPATHRPVSTATASNLTMSFSSGSSVKDKRTSSSSSSSRVGRISALLPRCPDLNLDLCISPSLEEQMPQDLLVEESNCGGEFLRLGSSFLLDYRSLEMK

SEQ ID NO: 23915 - protein, 807 aa, Leptosphaeria maculans
MLTTKARLSARHLITHGTVQLPSRPLLPCAAITLRAHQDPVPRQQLLGPTRSYMNTTRPQQPCLIQPRITSRGYANGRPHPPGGTHRMNMGGEPEKPALEQYGIDLTERARDGKLDPVIGRDGEIQRTIQILSRRTKNNPVLIGKAGTGKTAILEGLAQRIVKGDVPESIKDKRVISLDLGSLIAGAKFRGDFEERLKSVLKEVEEAKKGVILFVDELHTLLGLGKAEGSIDASNLLKPALSRGELQLCGATTLSEYRQIEKDAALARRFQPIQVGEPTVQDTISILRGIKERYEVHHGVRITDNALVAAASYSNRYITDRFLPDKAIDLVDEAASALRLQQESKPDAIQELDRQIMTIQIELESLRKETDIASKERRQRLEESLKQKQEEAKGLTEKWEKERAELEEIKNAQENLEKARLELEQARREGNFAKAGELQYSRIPELIEKLPKDEELVAGASRPDSLLHDSVTADDIASVVSRTTGIPLSKLNSGESEKLIHMEETLRQFVKGQDEALTAVANAIRLQRAGLSGENRPIASFMMLGPTGVGKTEVCKRLAEYLFSTPQAVIRFDMSEFSEKHTVSRLIGSPAGYVGYEDAGQLTEAVRRKPYAVLLFDEWEKAHKDISTLLLQVLDEGFLTDAQGHKVDFRNTIIVMTSNLGADIIVGDDALRSGNQDSGEISSDVRNAVMDIVSATYPPEFLNRLDEFIIFRRLSREALRDIVDIRLKELQQRLDDRRITLDCPDEAKQWLCDRGYDPKYGARPLNRLIAREIGNGLADKIIRGEIRSGDTAKIGVKSDGSGLEVTA

SEQ ID NO: 23916 - protein, 1185 aa, Leptosphaeria maculans
MASVDETVANVQRKIDRERALINAANAMRQSTNNPAVLSRLDGQIKDGHRNIEYFESKLRDLDVQRTSTGMENMSLQPGSGGSGARKPVNNPLTPPPKDGWSSYTQPDQGGYGGPQSQYSNLSGGDGLMPPRAPYAPPGPGTTNKRPNYSKLGKSHLIKYDTPHLGPRIQLMLSQLEFKLSVEKQYKDGIEKMVRLYQMEGDRKSKTDAEAKRIESAQKIQLLKHSLKRYEDLHVDIEGEGGDDDSLNIPSQRKPLSGHLSLRIHAVADVDHAATGRFSRGPETFVNIKVEDAIKGRTKPTRNDRWIDEQHEFAIDKANEIEITVYDKTGDHLLPIGMLWVRISDIAEEMRRKKIETELQNSGWVAADKMSGAAAGIQPDLQFQPPPGQNPAGTPGAPAPGGARPQGGPQPQTGPIMIDDWFSLEPVGRIHLTMSFAKNTGNKQPFDLGLGRKGAVRQRKEDVVEQYGHKFVQQQFYNVMRCALCGEFLKYAAGMQCSDCNYTCHKKCYPKVVTKCITQSNAETDPDEAKLNHRIPHRFENFSNMGANWCCHCGYVLPLGRKQTKKCAECNLTCHAHCVHFVPDFCGMSMEVANQILMEIKRTRRGQSASGPGVPPMAQRTLRPQSAKPLPPAQSQYPAQPGQEPSQTDRYSYGKEQMSPPPGPPRQPSYATSAASVDAARVSYSTSNSTPTPTSPTSSTTSRPSSGARTQSSVAAAQAAMSKTTPPAPGYGRSNTDYQPQGNRTSGGNYPADQRTPQQPQAPQQAPYDPSAYANIPSYPPAQAQQGGMQSYPPGKGSYALPQPSPQMQQPHQSPMSQKQPEAIAQIPPSKQLPPANPENKVTPSANTQGSGKRIGLDHFNFLAVLGKGNFGKVMLAETKSTKQLYAIKVLKKEFIIENDEVESTRSEKRVFLIANKERHPFLLSLHACFQTETRVYFVMEYISGGDLMLHIQRGQFGTKRAQFYAAEVCLALKYFHENGVIYRDLKLDNILLTLDGHIKIADYGLCKEEMWYGSTTSTFCGTPEFMAPEILLDKKYGRAVDWWAFGVLIYQMLLQQSPFRGEDEDEIYDAILADEPLYPIHMPRDSVSILQKLLTREPEMRLGSGPTDAQEIMSHAFFRNINWDDIYHKRVAPPFVPQISSPTDTSNFDTEFTSVTPVLTPVQSVLSQAMQEEFRGFSYSADFN

SEQ ID NO: 23917 - protein, 428 aa, Medicago truncatula
MAQILAPSTQCQARITKISPVATPISSKMWSSLVMKQNKKVARSAKFRVMAVNSGTINRVEDLLNLDITPFTDSIIAEYIWIGGTGIDVRSKSRTISKPVEHPSELPKWNYDGSSTGQAPGEDSEVILYPQAIFKDPFRGGNNILVICDAYTPQGEPIPTNKRHKAAEIFSNPKVEAEIPWYGIEQEYTLLQTDVKWPLGWPVGGYPGPQGPYYCAAGADKSFGRDISDAHYKACLYAGINISGTNGEVMPGQWEYQVGPSVGIEAGDHIWASRYILERITEQAGVVLTLDPKPIEGDWNGAGCHTNYSTKSMREDGGFEVIKKAILNLSLRHKIHIEAYGEGNERRLTGKHETASINTFSWGVANRGCSIRVGRDTEKNGKGYLEDRRPASNMDPYVVTALLAESTLLWEPTLEAEALAAQKIALKV

SEQ ID NO: 23918 - protein, 439 aa, Aster tripolium
MKILLGVGINGGLFGSCVSSRSKVDSSTSGISSHFEIKSTNNVSKDQPTTSNSEHNLPTLTPEDELKVASRLRKFGFNDLKMATRNFRPESLLGEGGFGCVFKGWIEENGTAPVKPGTGLTVAVKTLNHDGLQGHKEWLAEVNFLGDLGNPNLVKLIGYCIEDDQRLLVYEFLPRGSLENHLFRRSLPLPWSIRMKIALGAAKGLAFLHEEAKRPVIYRDFKTSNILLDAEYNAKLSDFGLAKDGPEGDKTHISTRVMGTYGYAAPEYVMTGHLSSKSDVYSFGVVLLEMLTGRRSMDKKRPNGEHNLVEWARPHLGERRRFYRLIDPRLEGHFSIKGAQKAAQLASRCLSRDPKARPLMSEVVDCLKPLPALKDMAGPSYYLQTVQPERAGSSPDPNRTRVGSFSRNGSQHPRTLSIPNASPRHNQFLQDSPNPNGKQ

SEQ ID NO: 23919 - protein, 367 aa, Glycyrrhiza echinata
MAFSTNGSEEIELYHAQIHLYKHVYNFVSSMALKSAMELGIADVIHNHGKPITLPELASALKLHPSKVGILYRFLRLLTHNGFFAKTTVPSQNGKDGEEEEETAYALTPPSKLLVKGKPTCLASIVRGALHPSSLDMWRSSEKWFKEDKELTLFESATGESFWDFLNKDSESGTLSMFQEAMAADSQMFKLALKECRHVFEGLESLVDVGGGTGGVTKLIHEEFPHLKCTVFDQPQVVGNLSGNENLKFVGGDMFKSIPPADAVLLKWVLHDWNDELSLKILKNSKEAISGKGKEGKVIIIDISIDEASGDRELTELQLDYDLVMLTMFNGKEREKKEWEKLISDAGFSSYKITPICGFKSLIEVFP

SEQ ID NO: 23920 - protein, 365 aa, Lotus japonicus
MDFSSSNGSEDTELSQAQIHLYKHVYNFVSSMALKSAMELGIADVIHSHGKPITLPELATALNLRPSKIGVLHRFLRLLTHNGFFAKTTVSRGEGAEEETAYGLTPPSKLLVKSNSTCLAPIVKGALHPSSLDMWRSSKKWFLEDNEELTLFESATGESFWEFLNKETESDTLSMFQEAMAADSHMFKLALKECKHVFEGLGSLVDVAGGRGGVTKLIREAFPHVKCTVFDQPQVVANLTGDENLNFVGGDMFKSVPPADAVLLKWVLHDWNDELSLKILKNCKEAISGRGKEGKVIIIDISIDETSDDRELTELKLDYDLVMLTMFNGKEREKKEWEKLIYDAGFSSYKITPICGFKSLIEVFP

SEQ ID NO: 23921 - protein, 554 aa, Selenomonas ruminantium
MNGAQAVVACLREQGVDTVFGYPGGMILPLYDALYDSKEIKQVLVTHEQNAAHAADGYARASGKVGVCIATSGPGATNLVTGLATAFMDSIPVVAITGQVDTTLLGRDAFQETDILDVTMPITKHNYKIKDARHLLSTIREAFTLAKKGRPGPVLVDVPRDLFFQEVAWEEVPACTKKVGKPDADFLICAAEAAREIVKAQRPVVIVGGGVVSAGATAEVTAFVEKYNLPVAHTLMGLGAIPREHPQSLGFAGMHGEKAANHAIAAADLIIAIGSRFGDRQTGNVKKYTQDTKFIHIDIDPAEIDKNIGNSLGLAGDMKVILGLLMKQEAVGNIDEWWQQIQSWKETYDYDYHVNRLTVPWALHQVAQNTKGKPYAFATDVGQHQMWAALHLRIEEPRTWLTSGGLGTMGFGLAAAMGAQMYYGDSRRVIHVAGDGGIKMTGNEFYTIARLNLPVISLIVNNTSLGMIRQLQKVMYKERYIACEFDYQMDYAAYAGSFGIKAETVSTQEEFAEALNRALADQDHPRVIVLNVWRSFVEPMIKGGARIDEFVEFK

SEQ ID NO: 23922 - protein, 412 aa, Streptococcus pyogenes SSI-1
MEYEVYETMKIIEKSSKLEHVAYDIRGPVLDEANRMIASGEKILRLNTGNPAAFGFEAPDEVIRDLIVNARLSEGYSDSKGIFSARKAIMQYCQLKGFPDVDIEDIYLGNGVSELISISLQALLDNGDEVLVPMPDYPLWTACVSLGGGKAVHYLCDEEAGWYPDIADIKSKITSRTKAIVVINPNNPTGALYPKEILEDIVALAREHQLIIFADEIYDRLVMDGKEHIAIASLAPDVFCVSMNGLSKSHRIAGFRVGWMVLSGPKDHVKGYIEGLNMLANMRLCSNVLAQQVVQTSLGGHQSVDALLLPGGRIFEQRNFIYEAINAIPGLSAVKPEAGLYLFPKIDRQMYRIDDDEEFVLQLLKQEKVMLVHGRGFNWKDPDHFRIVYLPSVEELEDVQEKITRVLYQYRR

SEQ ID NO: 23923 - protein, 437 aa, Streptococcus pyogenes SSI-1
MSMFLDTAKISVQAGRGGDGMVAFRREKYVPNGGPWGGDGGKGGSVIFRVDEGLRTLMDFRYNRKFKAKSGEKGMTKGMHGRGAEDLIVFVPQGTTVRDAETGKVITDLVEHGQEVVIAKGGRGGRGNIRFATPRNPAPEIAENGEPGEERQLELELKILADVGLVGFPSVGKSTLLSVVSSAKPKIGAYHFTTIVPNLGMVRTKSGDSFAMADLPGLIEGASQGVGLGTQFLRHIERTRVILHVIDMSASEGRDPYEDYVSINNELETYNLRLMERPQIIVANKMDMPEAQDNLKAFKKKLATQYDEFNDLPMIFSISSLAHQGLENLLEATAELLAKTDEFLLYDESDLVDEEAYYGFAEAEKEFEITRDDDATWVLSGEKLERLFVMTNMERDESIMKFARQLRGMGVDEALRERGAKDGDLVRIGKFEFEFVD

SEQ ID NO: 23924 - protein, 522 aa, Pseudomonas syringae pv. tomato str. DC3000
MRWLNRHKFLPFLAWLPQQSRASVGRDALVGLSGAILALPQSIAYALIAGLPPEYGLYAAIVPVLIACLWGSSWHLICGPTAAISIVLYVSVSPLAVPASQDYIMLILLLTFIAGVFQLLLGMMRFGALVNFVSHSVVLGFTLGAAVVIALGQMPNLLGIDLPSQTTALKSLSAVLEHRGELDKPSLMLGLLTLTLGIGLKAWVPRWPTLLIALVSSSLLVWLWPAMFGHVRVVSAFVGHLPPFSPLPLDLELILKLLPTAVAVGMLGLVNSLSIARSLSARSQQMLNANQEVRAQGLSNMVGSLFSGYLSAGSFTRAALSYEAGARSPLAGVFSALWVALFAVAGASLVSHIPIPAMAASILLICWGLVDRRGIRALLRVSRAEFFVMALTCLATLLLELQTAIYAGVLASLFFYLKRTSQPRVQQWREGDEDVLRVGGSIFFGASHYLQTRLQRTEGLRVVIDAQQINFIDYSGVEMLHQEARRLGQQGRVLVLRNARPLVIEELHKLEGPENCPILFED

SEQ ID NO: 23925 - protein, 183 aa, Pseudomonas syringae pv. tomato str. DC3000
MKLLILDRDGVINHDSDAYIKSVEEWIPIPGSVEAIAALSKAGWTVAIATNQSGIARGYYDLAILDAMHARLRTLVAEQGGEVGLIVYCPHGPDDGCDCRKPRPGMLQAIARHYSADLKGLWFVGDSKGDLQAALAVDSQPVLVLTGKGRKTMNGEVPTGTLIFDDLAAVAAELIHTSASLNN

SEQ ID NO: 23926 - protein, 388 aa, Pseudomonas syringae pv. tomato str. DC3000
MNLPMTTPALYLDYAATTPVDEQVIEAMVACMGREGHFGNPASSGHGYGQVARQAVELARRQVADAVGAPADTIVWTSGATESNNLAIKGIAHDSSAQRRHIITSVLEHKAVLDTVSTLERQGFPVTWLKPDAQGLIQPQAVQAALREDTLLVSLMLVNNELGTLTDIARIGAIVREHGALFHVDAAQAVGKVKVDLASLAVDLMSFSAHKAYGPKGIGALYVGPRAHSLLQAQIHGGGHEGGFRSGTLATHQIVGMGTAFALAISQAEAENRRIEELSCHLREGLLALPDVQLNGSPEQRIPHTLNLCITRSGFTSSQLSHNLAVSSTSACNSASNAPSHVLLALGMDSTKALASVRVSLGRYTTQADVERAVEVFSKALSAPAAFW

SEQ ID NO: 23927 - protein, 366 aa, Pseudomonas syringae pv. tomato str. DC3000
MSQSFLSPVTTQTWANGRHLVRVVKVIQETWDVRTFCFMADQPIMFFFKPGQFVTLELEIDGVPIMRSYTISSSPSVPYSFSITVKRVPGGKVSNYLHDTLSEGQELAVHGPVGLFNAIDFPNPKILYLSGGVGITPVMSMARWFYDTNANVDMVFVHSARSPKDIIYHRELEHMASRIDNFSLHLVCEKHGLGEPWAGYRGYLNQKMLELMAPDFMDREVFCCGPTPYMTAVKRLLQENGFNMAQYHEESFGATPPEARADAVEQAEIAADAPDVDAADLHQVEFTDTGKSIRVAPGETVHAAAAKLGLMIPKACGMGICGTCKVMKLSGEVEMEHNGGITDEDVAEGYILSCCSVPKGDVRIEY

SEQ ID NO: 23928 - protein, 544 aa, Pseudomonas syringae pv. tomato str. DC3000
MFGPDFPFAFDDWIEHPKGLGSIPAEHHGAEVAIIGAGIAGLVAAYELMKMGLKPVVYEASKMGGRLRSQEFEGAKGIVAELGGMRFPVSSTAFFHYVDKLGLESRPFPNPLTAASGSTVIDLEGTTYYAQMLSDLPALFQEVADAWADALESGSQFGDIQQAIRDRDVPRLKELWNKLVPLWDDRTFYDFVATSKAFAKLSFYHREVFGQVGFGTGGWDSDFPNSMLEIFRVVMTNCDEHQHLIVGGVQQVPVGLWSHVPERCTHWPKGTSLSSLHRGAPRPGVKRIARAEDGSFAVTDNWGDTRQYAAVLTTCQSWLLTTQIECEESLFSQKMWMALDRTRYMQSSKTFVMVDRPFWKDKDPQTGRDLMSMTLTDRLTRGTYLFDNGDDKPGVICLSYSWMSDALKMLPQPIEKRVKLALDALKKIYPKVDIAARIIGDPITVSWEADPHFLGAFKGALPGHYRYNQRMYAHFMQQDMPSEQRGMFIAGDDVSWTPAWVEGAVQTSLNAVWGIMNHFGGKTHAENPGPGDVFHEIGPITLAD

SEQ ID NO: 23929 - protein, 296 aa, Pseudomonas syringae pv. tomato str. DC3000
MNIAFIGLGNMGAPMARNLINAGHSLHVFDLNKDVLSEFAGLGAKVSDSPRQAAEGSGLVITMLPAAAHVRSVYLNDDGVLKGIAPGVPAVDCSTIDPQTIRDIAAIAAQQGVVLGDAPVSGGTGGAQAGTLTFMVGGSAQHFAALKPVLEIMGRNIVHCGEVGTGQIAKICNNMLLAISMIGVSESMALGSALGIDTEVLASIINTSTGRCWSSEAYNPWPGIVETAPASRGYSGGFGAELMLKDLGLATEAARVAHQPVILGAIAQQLYQAMSLRGDGGKDFSAIIEGYRKKAL

SEQ ID NO: 23930 - protein, 103 aa, Pseudomonas syringae pv. tomato str. DC3000
MYAVIVTGGKQYKVAPGEYLKIEKLEIATGESVTFDRVLLVGNGDDVNIGAPVVAGATVVAEVISQGRHDKVRIIKFRRRKHHMKRMGHRQWYTEIKITGIQA

SEQ ID NO: 23931 - protein, 407 aa, Pseudomonas syringae pv. tomato str. DC3000
MKFVDEVSIRVKAGDGGNGCMSFRREKFIENGGPNGGDGGDGGSVFMIADVNLNTLVDYRYTRHFDAERGANGGSADCTGRKGEELVLRVPVGTTIIDATTQEIIGDLTKDGQRLMVAQGGWHGLGNTRFKSSTNRAPRQTSPGKPGDQRDLKLELKVLADVGLLGLPNAGKSTFIRSVSAAKPKVADYPFTTLVPNLGVVSVDRWKSFVVADIPGLIEGASDGAGLGIRFLKHLARTRLLLHLVDMAPLDETSAPDAAEVIVSELEKFSPSLAERDRWLVLNKCDQILEEEQEARKQEIVDRLGWTGPVYVISAIAKEGTEQLTRDIMRYLEERSLRIAEEPGYAEELAELDQRIEDEARAQLQALDDQRALRRSGVKSVHDIGEDDWDEEDVDDEDGPEIIYVRD

SEQ ID NO: 23932 - protein, 854 aa, Pseudomonas syringae pv. tomato str. DC3000
MRIDRLTSKLQLALSDSQSLAVGLDHPAIEPAHLMQALLEQQGGSIKPLLLQVGFDINSLRKELSAELDRLPKIQNPTGDVNMSQDLARLLNQADRLAQQKGDQFISSELVLLAAMDENSKLGKLLLGQGVSKKALENAINNLRGEGAVNDPNIEESRQALDKYTVDLTKRAEEGKLDPVIGRDDEIRRTIQVLQRRTKNNPVLIGEPGVGKTAIAEGLAQRIINGEVPDGLRGKRLLSLDMGALIAGAKYRGEFEERLKSLLNELSKQEGQIILFIDELHTMVGAGKGEGSMDAGNMLKPALARGELHCVGATTLNEYRQYIEKDAALERRFQKVLVDEPSEEDTIAILRGLKERYEVHHKVAITDGAIIAAAKLSHRYITDRQLPDKAIDLIDEAASRIRMEIDSKPEVLDRLERRLIQLKVEAQALKKEKDEAAIKRLEKLQEEIVRLEKEYADLEEIWTSEKAEVTGSAQIQQKIEQSRQELEAARRRGDLNRMAELQYGIIPDLERSLQMVDQHGKPENQLLRSKVTEEEIAEVVSKWTGIPVSKMLEGEREKLLRMETLLHNRVIGQEEAVVAVSNAVRRSRAGLSDPNRPSGSFMFLGPTGVGKTELCKALAEFLFDTEEAMVRIDMSEFMEKHSVARLIGAPPGYVGYEEGGYLTEAVRRKPYSVILLDEVEKAHSDVFNILLQVLEDGRLTDSHGRTVDFRNTVIVMTSNLGSAQIQELVGDREAQRAAVMDAVSTHFRPEFVNRIDEVVIFEPLARDQIAGITDIQLGRLRKRLAERELTMVLSPEALDKLIAVGYDPVYGARPLKRAIQRWIENPLAQLILSGGFEPGSSITGKVVDDEIVFG

SEQ ID NO: 23933 - protein, 392 aa, Pseudomonas syringae pv. tomato str. DC3000
MQDVVIVAATRTAVGSFQGSLAAVPAVDLGAAVIRQLLAQTGVDGALVDEVIMGQVLTAGAGQNPARQAAIKAGLPFSVPAMTLNKVCGSGLKTLHLATQAIRCGDADIVIAGGQENMSLSNYVLPGARTGLRMGHASMIDTMITDGLWDAFNDYHMGITAENLAQKYEISREAQDAFAALSQQKAIAAIEAGRFVDEITPILIPQRKGEPLSFATDEQPRAGTTAETLGKLKPAFKKDGTVTAGNASSLNDGAAAVMLMSATKAEQLGLPVLAHIAGYANAGVDPAIMGIGPVSATRRCLDKAGWSLDELDLIEANEAFAAQSLSVGKELGLDPQKLNVNGGAIAIGHPIGASGCRVLVTLLHEMIRRDAKKGLATLCIGGGQGVALALAR

SEQ ID NO: 23934 - protein, 390 aa, Pseudomonas syringae pv. tomato str. DC3000
MTQPYSARSRAIEPFHVMALLARANELQAAGHDVIHLEIGEPDFITAEPIIKAGQAALADGKTRYTAARGLPQLREAIAGFYAQRYQLDIDPQRILVTPGGSGALLLASSLLVDPGKHWLLADPGYPCNRHFLRLIEGEAQLVPVGPQERYQLTPELVASHWNPNSVGALVASPANPTGTLLTRDELAALSSALKARNGHLVVDEIYHGLTYGVDASSVLEVDNEAFVLNSFSKYFGMTGWRLGWLVAPPEAVADLEKLAQNLYISAPSMAQYAALACFEPQTLAILEQRRAEFGRRRDFLLPALRELGFGIAVEPEGAFYLYADISAFGGDAFAFCKHFLETEHVAFTPGLDFGRFQAGHHVRFAYTQSLPRLEQAVERIARGLRSWSA

SEQ ID NO: 23935 - protein, 574 aa, Pseudomonas syringae pv. tomato str. DC3000
MELLSGAEMIVRFLRDEGVEHIYGYPGGALLHVYDALFKEPAVSHILVRHEQAATHMADGYARATGKAGVVLVTSGPGATNAITGIATAYMDSIPMVVLSGQVASTLVGTDAFQETDMIGISRPIVKHSFMIKHPSEIPEILKKAFYLAQSGRPGPVVVDIPKDMTNPAEKFEYVFPKKAKLRSYSPAVRGHSGQIRKAVEMLLAAKRPIIYAGGGVIMGNASAQLTELAQLLNAPVTNTLMGLGCYPGTDRQFVGMLGMHGSYTANLAMHHTDVILAVGARFDDRVINGASKFCPNAKIIHIDIDPASISKTIKADVPIVGPVESVLTEMVATLKEIGETPDKASVAAWWKQIDEWRGSGDLFPYNRGDGTVIKPQAVIETLCEVTKGDAYVTSDVGQHQMFAAQYYRFNKPNRWINSGGLGTMGFGFPAAMGVKLSFPDEHVACVTGEGSIQMNIQELSTCLQYGLPVKIILLNNGVLGMVRQWQDMSYGARHSHSYMESLPDFVKLVEAYGHVGMRITDLKDLKPKMEEAFAMTDRLVFLDIQVDVSEHVYPMQIKDGSMRDMWLSKTERT

SEQ ID NO: 23936 - protein, 313 aa, Pseudomonas syringae pv. tomato str. DC3000
MSKMMVFTGNANPDLARRVVRQLHIPLGDVSVGKFSDGEISTEINENVRGKDVFIIQPTCAPTNDNLMELVVMADAFRRSSASRITAVIPYFGYARQDRRPRSARVAISAKVVADMLTVVGIDRVLTVDLHADQIQGFFDIPVDNIYGSPVLVDDIEDQRFENLMIVSPDIGGVVRARAVAKSLGVDLGIIDKRREKANHSEVMHIIGDVEGRTCILVDDMVDTAGTLCHAAKALKEHGAAKVFAYCTHPVLSGRAIENIENSVLDELVVTNTIPLSAAAQACSRIRQLDIAPVVAEAVRRISNEESISAMFR

SEQ ID NO: 23937 - protein, 696 aa, Pseudomonas syringae pv. tomato str. DC3000
MQTFFIAPTDFGVGLTSISLGLVRTLERAGLKVGFFKPIAQPHPGDLGPERSTELMARTHGLKPPKPLGLAHVERMLGDGQLDELLEEIINLYQQAAVGKDVLVVEGMVPTRSASYAARVNLHLAKSLDAEVILVSAPENEVLTELSGRVELQAQLFGGPKDPKVLGVILNKVRTEESMEVFAARLKEHSPLLRNGDFRLLGCIPYRAELNAPRTRDVAELLGAQVLNAGDYDQRRMSRIIICARTVLNTVPLLKPGVLVVTPGDRDDIILAVSLAAINGVPLAGLLLTSDTVPDPRIMELCRGALQAGLPVLSVSTGSYDTANRLNQLNKEIPIDDRERAEIITDFVASHLDASWLHQRCGTPRELRLSPAVFRYQLIQRAQAANKRIVLPEGNEPLTIQAAAICQARGIARCVLLARPEEVQAVAQAHGIELPPGLEILDPDLIRERYVAPMVELRKSKSLNAPMAEQQLEDPVVIGTVMLALDEVDGLVSGVVHSTANTIRPALQLIKTAPGCTLVSSVFFMLFPEQVLMYSDCIMNPHPSASELSEIALQSADSATAFGISPRVAMISYSSGNSASGEEVEKVREATQLARETRRDLLIDGPLQYDAAANEHVARQLAPDSQVAGRANVFVFPDLNTGNTTYKAVQRSADCVSLGPMLQGLRKPVNDLPRGAQVDDIVYTIALTAIQADTLS

SEQ ID NO: 23938 - protein, 324 aa, Pseudomonas syringae pv. tomato str. DC3000
MKKTVLAFSRVSPEMAERLAQDFNVIVPNPKQGDINAQFDEALPHSHGLIGAGRKLGREQLHSATQLEVVSSISVGYDNYDVDYLSERGILLTNTPDVLTESTADLGFSLIMSSARRVAELDAYTKAGQWTRSIEQPHFGTDVHGKTLGIVGMGNIGAAIARRGRLGFNMPILYSGNSRKTELEQELGAQFRSLDQLLAEADFVCLVVPLSEKTKHLIGRRELSLMKPGAILVNIARGLIVDEPALIEALQNGTIRGAGLDVYEKEPLSESPLFQLKNAVTLPHVGSATTETRQAMADRAYNNLRSALLGERPQDLVNPQVWKG

SEQ ID NO: 23939 - protein, 342 aa, Pseudomonas syringae pv. tomato str. DC3000
MKMLKSTLAIVTALAAFGVTGAANAGATLDAIVKKGFVQCGVSDGLPGFSVPDSTGKITGIDADVCRAVAAAVFGDATKVKFSQLNAKERFTALQSGEIDILSRNTTWTSSRDSAMGLMFAGVTYYDGIGFLVNKKLGVNSAKELDGATICIQAGTTTELNVSDYFRSNNLKYTPITFDTSDESAKSLEGGRCDVLTSDQSQLYAQRSKLAKPDDYVVLPEVISKEPLGPVVRKNDPEWFAIVKWTLFAMLNAEEAKITSKNVEAEAKATKNPDVARMLGADGTYGKDLNLPKDWVVQIVKQVGNYGEVFERNLGEGTPLKIKRGQNALWNAGGIQYAPPIR

SEQ ID NO: 23940 - protein, 70 aa, Pseudomonas syringae pv. tomato str. DC3000
MAERQSGTVKWFNDEKGFGFITPESGPDLFVHFRAIQGNGFKSLKEGQKVTFIAVQGQKGLQADEVHAEG

SEQ ID NO: 23941 - protein, 404 aa, Pseudomonas syringae pv. tomato str. DC3000
MKLPIYLDYSATTPVDPRVAQKMIECLTVEGNFGNPASRSHVFGWKAEEAVENARRQVADLVSADPREIVWTSGATESNNLAIKGVAHFYASKGKHLITSKVEHKAVLDTTRQLEREGFEVTYIEPGEDGLITPSMIEAALRDDTILVSIMHVNNEIGTINDIAAIGELTRSRGVLFHVDGAQSTGKVEIDLASLKVDLMSFSAHKTYGPKGIGALYVSRKPRVRLEAAMHGGGHERGMRSGTLATHQIVGMGEAFRIAKEEMAAESVRIKALSDRFYKQVENLEELYVNGSLTARVPHNLNLSFNYVEGESLIMALKDLAVSSGSACTSASLEPSYVLRALGRNDELAHSSIRFTFGRFSTEEEIDYAAQKVCEAVTRLRALSPLWDMFKDGVDISKIEWAAH

SEQ ID NO: 23942 - protein, 382 aa, Pseudomonas syringae pv. tomato str. DC3000
MIDSKLPNVGTTIFTVMSQLAAETGAINLSQGFPDFDGPQALRDAVCRHITQGHNQYSPMTGLPALRQQVAAKIARSYGREINPDSEITITPGATQAIFCAIHSVIRPGDEVIIFDPCYDSYEPAVELAGGRCVHVQLGLDDFSIDWQKLSDALSPRTRMIVINSPHNPSGALISRAELDRLASLIADRDIYLLSDEVYEHLVFDGARHVSVLDHDELYQRAFVVSSFGKTYHVTGWKTGYVVAPPALTAELRKVHQYVSFCGVTPLQYALADFMAEHPEHIDELPGFYQAKRDYFCNQLAGSRFSFKPVGGTYFQLVDYSQIRPDLNDVDMALWMTREHGVASIPISVFYQSPPPGQRLIRLCFAKQEDTLRLAAEKLCAI

SEQ ID NO: 23943 - protein, 198 aa, Pseudomonas syringae pv. tomato str. DC3000
MLDELLRRVVSHTPETLDSDRQFPEAAVLVPVTRSEQPELILTLRASGLSTHGGEVAFPGGRRDPGDPDLIFTALREADEEIGLPPGLVEVIGPLSPLISKHGIKVTPYVGVIPDFVEYRPNDGEIAAVFSVPLEFFRQDTREHTHRIDYEGRSWYVPSYRYGEYKIWGLTAIMIVELVNVLYDTRISLHHPPERSTN

SEQ ID NO: 23944 - protein, 590 aa, Pseudomonas syringae pv. tomato str. DC3000
MCGLAGELRFDHQPADLAAVERITHELAPRGPDAWGFHSQGPIALGHRRLKIMDLSDGSAQPMIDSNLGLSMAFNGAIYNFPELRAELESLGYQFHSGGDTEVLLKGYHAWGAEMLPKLNGMFAFAIWERDSKQLFIARDRLGVKPLYLSKTDKRLRFASSLPALLKGGDISGMLDPVALNHYLNFHAVVPAPRTLLAGVEKLPPASWMRIDASGKVEQKVWWTLPYGPHEDEKNLTLEDWRDRVLDSTREAVAIRQRAAVDVGVLLSGGVDSSMLVGLLREVGVEDLSTFSIGFQDAGGERGDEFQYSDLIAKHYGTRHHQLRIQESEIIEQLPAAFRAMSEPMVSHDCIAFYLLSREVAKHCKVVQSGQGADELFAGYHWYPQVDGASDPVAAYRYAFVDRSYAEYADTVQPKWRTANDAAGDFVRDHFAQPGASAAVDKALRLDSTVMLVDDPVKRVDNMTMAWGLEARTPFLDYRLVELSARIPGKFKLPDGGKQVLKEAARLVIPSEVIDRKKGYFPVPGLKHLQGDTLNWVRELLTDPSQDRGLFNPTMVDKLLTNPEGQLTPLRGSKLWQLAALNLWLSEQGL

SEQ ID NO: 23945 - protein, 407 aa, Pseudomonas syringae pv. tomato str. DC3000
MTDQSQPLLLVLNTGSSSIKFSLYSAAALAASGPQCLGNGSFEVRKDTERLIFQGADGCAQTREEWSRNGASLNKASVNSGTLANLMGWIERHADGQICAAAHRVVHGGSRTQVAARVDAVLMADMQALVPLAPLHQPLCLAPMTYLSREHGGLVQFACFDTAFHHTLDALETRFGLPAALTAQGLRRYGFHGLSYEYIASVLPHYDQRAAQGRTIVAHLGNGASLCAMHNRVSRGTTMGFSTLDGVLMGTRPGRLDPGVLLYLLRERRMSVQALEHLLYHECGLLGVSGGISSDMRELSASQAPEARDAIALFVRSVVREIGSLAAILGGVDALVFTGGIGEHAADVRDAILDGCAWLGLKRDRAVATQPGARLSHPDSAVSAWTIATDENAIIARHALGLLHERT

SEQ ID NO: 23946 - protein, 562 aa, Pseudomonas syringae pv. tomato str. DC3000
MTQEIGGFAALELHPNIVAAVVATGYEEPSAIQQQSIPIILAGHDMIGQAQTGTGKTAAFALPILHRIDPTKREPQALILAPTRELALQVATAFETYAKQMPGVTVVAVYGGAPMGPQLKAIRNGAQIVVATPGRLCDHLRRDEKVLATVNHLVLDEADEMLKLGFMDDLEVIFKAMPETRQTVLFSATLPQSIRAIAERHLRDPKHVKIQTKTQTVTAIEQAHLLVHADQKTSAVLSLLEVEDFDALIMFVRTKQATLDLASALEAKGYKAAALNGDIAQNQRERVIESLKDGRLDIVVATDVAARGLDVPRITHVFNVDMPYDPESYVHRIGRTGRAGREGRALLLVTPRERRMLQVIERVTGQKVAEVRLPDAQAVLDARIKKLTNSLAPLVADAESTHGDLLDRLTADIGCSPRALAAALLRKATNGQALTLAAIERDRPLVPNNAPRGDRPERSGSSDRGDRGDRPERERRAPVPLAEGRARCRTALGARDGIAAKNLLGAILNEGGLAREAIGRIQVRDSFSLVELPEDGLERLLTKLKDTRVAGKQLKLRRYRED

SEQ ID NO: 23947 - protein, 403 aa, Pseudomonas syringae pv. tomato str. DC3000
MQFNKSNKLANVCYDIRGPVLKHAKRLEEEGHRILKLNIGNPAPFGFEAPDEILQDVIRNLPTAQGYSDSKGLFSARKAVMQYYQQKQVEGVGIEDIYLGNGVSELIVMSMQALLNNGDEVLVPAPDYPLWTAAVALSGGSPVHYLCDEQANWWPDLEDIKAKITPNTKAMVIINPNNPTGAVYSREVLLGMLELARQHNLVVFSDEIYDKILYDDAVHICTASLAPDLLCLTFNGLSKSYRVAGFRSGWIAISGPKHNAQSYIEGIDILANMRLCANVPSQHAIQTALGGYQSINDLILPPGRLLEQRNRTWELLNDIPGVSCVKPMGALYAFPRIDPKVCPIFNDEKFVLDLLLSEKLLVVQGTAFNWPYPDHFRVVTLPRVDELEQAIGRIGNFLKGYRQ

SEQ ID NO: 23948 - protein, 469 aa, Pseudomonas syringae pv. tomato str. DC3000
MSETTAPSGELKRGLKNRHIQLIALGGAIGTGLFLGSAGVLKSAGPSMILGYAICGFIAFMIMRQLGEMIVEEPVAGSFSHFAHNYWGGFAGFLSGWNCWLLYILVGMSELTAVGKYIHYWLPHIPSWVSAAVFFVLINAINLTNVKVFGETEFWFAIIKVVAIIGMIALGSYMLVSGSGGPQASVSNLWEHGGFFPNGVSGLVMALAIIMFSFGGLEMLGFTAAEAEQPKTVIPKAINQVIYRILIFYIGALVVLLSLTPWDSLLASLNASGDSYSGSPFVQVFSMLGSDAAAHILNFVVLTAALSVYNSGTYCNSRMLVGMAEQGDAPKLLAQVDKRGVPVKAIFASAAVTLVAVLLNYFVPQQALELLMSLVVATLVINWAMISYSHLKFRQHMNRTGQVPLFKALWYPYGNYVCLAFVVFILGIMLMIPGIQISVYAIPVWLAVMWVCYRAKNRRSVVVNAETGK

SEQ ID NO: 23949 - protein, 410 aa, Pseudomonas syringae pv. tomato str. DC3000
MALIVQKFGGTSVGSVERIEQVADKVKKFREAGDDLVVVLSAMSGETNRLIELARQISDQPVPRELDVIVSTGEQVTIALLAMALMKRGVPAVSYTGNQVRILTDSAHNKARILQIDDQKIRSDLKAGRVVVVAGFQGVDEHGNITTLGRGGSDTTGVALAAALKADECQIYTDVDGVYTTDPRVVSQAQRLDKITFEEMLEMASLGSKVLQIRAVEFAGKYNVPLRVLHSFKEGPGTLITIDEEESMEQPIISGIAFNRDEAKLTIRGVPDTPGVAFKILGPISAANIEVDMIVQNVSHDNTTDFTFTIHRNDYQAALQVLETTAREISAREVSGDTKIAKVSIVGVGMRSHAGVASRMFEALAKESINIQMISTSEIKVSVVIEEKYLELAVRALHTAFELDAPRQGE

SEQ ID NO: 23950 - protein, 471 aa, Pseudomonas syringae pv. tomato str. DC3000
MPINVLLVEDDRSLREALGETLELAGYGYQAVGSAEEALVAAEAQPFSLVISDVNMPGMDGHQLLSLLRSRHPQLPVLLMTAHGAVDRAVDAMRQGAADYLVKPFEPKALIALVARHALGRLGPAESDGPIAVEPASIQLLNLASRVAKSDSTVLISGESGTGKEVLARFIHQNSPRADKPFIAINCAAIPDNMLEATLFGHEKGSFTGAIAAQAGKFEQADGGTILLDEISEMPMGLQAKLLRVLQEREVERVGARKPITLDIRVVATTNRDLAGEVAAGRFREDLFYRLSVFPLAWQALRQRTADILPLAERLLAKHVNKMKHAPVRLSAQAQQCLVSYPWPGNVRELDNAVQRALILQQGGVIEAQDFCLAGPVTSLPVAVPSEAVPPQPVISSAENAGVGVGAESAGALGDDLRRREFQMIIDTLRAERGRRKEAAERLGISPRTLRYKLAQMRDAGMDVEGYLFAT

SEQ ID NO: 23951 - protein, 589 aa, Pseudomonas syringae pv. tomato str. DC3000
MISLVSRRQRQAIRLAASFIAPYRWQALGALLALVVTAGITLSIGQGIKLMIDQGFMTRSPQLLERSIGFFMLLTVGLAIGTFSRFYLVSWIGERVVADLRKKVFDHLIELHPGFYENNRSSEIQSRLTADTTLLQSVIGSSLSMFLRNALMVVGGIVLLFITNPKLTSIVVVALPLIIAPILMFGRRVRTLSRESQDRVANVGSYVAEALGQIKTVQAYNHQQQDKQRFAHTVEQAFDTARKRILQRSWLITLVIVLVLGAVAVMLWVGGMDVISGRISSGELAAFVFYALVVGMAFGTLSEVIGELQRAAGAAERIGELLQARSEISAPTTGLQTLPQRISGGLALEGVSFAYPSRPERNAVDDLTLTVEPGETLALVGPSGAGKSTIFDLLLRFYDPGCGRILIEGVPAVQLDPHDLRRCFAMVSQTPGLFFGSVEDNIRYGNVNASFEQVQAAARIAHAHEFILEMADGYRTHLGEGGLGLSGGQRQRLAIARALLVDAPILLLDEATSALDAQSEHLIQQALPSLMKGRTTLVIAHRLATVQNADRIAVMDQGQLVAVGTHQQLIASNPLYARLAALQFNAGVE

SEQ ID NO: 23952 - protein, 403 aa, Pseudomonas syringae pv. tomato str. DC3000
MNERTGNALDWVAGSDAPEMNSLDVGFMALTDCAPLVVAATQGFAQPYGLSLNLKRQTSWAGLRDRLVSGQLQAAHSLYGLIYAVELGISGGPATDMAILMGLNQNGQCINLSRELQDAGVITPEALDKRAHQSGSKLTFAQTFPTGNHAMWLYYWLASQGIHPLDDVTSVVVPPTQMAQHLQAGRIDGFCVGEPWGASAVQQQLGFTMATSQAIWPDHPGKVLGCTREFVEQNPNTARALIMAVLEASRFIEQSDHNRRSTAQLLSGVDYLDASLDCIEPRLLGQYSDGLGNQWQDPHAVSFHDQGQVNYPWLSDGMWFMTQFRRWGLLREDPDYLAVASRVQQLDLYRQAANALGIDAPSATLRSSQLIDGKVWDGSDPAGYARSFKLHSLADTAPAVASR

SEQ ID NO: 23953 - protein, 70 aa, Pseudomonas syringae pv. tomato str. DC3000
MSNRQTGTVKWFNDEKGFGFITPQGGGDDLFVHFKAIESDGFKSLKEGQTVSFVAAKGQKGMQAEQVRVD

SEQ ID NO: 23954 - protein, 867 aa, Pseudomonas syringae pv. tomato str. DC3000
MIDVDLQQLVKALDAPTRNELEGAAGRCVSRGSSQILVEDMLPGLLERPDGMLMRALSDADVSTAEFAGLILVPVEHSVDRTPVFAAELVQWFQDALLIATLDLGQSHIDQAALILALLRNPLRYADRPYQPLLAKINIERFRDYVLSRQASGTARQAIHQSDSLLERFTHNLTQQAREGSLDPVLCRDDCLRQMVDILARRRKNNPIVVGEAGVGKTAIVEGLALRIVRGEVPDLLKDVELLSLDMGLLQAGASIKGEFERRLKGVIDEVKSSPGSFILFIDEAHTLIGAGANAGGSDAANILKPALARGELRTIAATTWAEYRQYFEKDPALARRFQPVRVLEPTVEQAVTILRGLAPLYEQSHGVYLRDDAVVAAARLSARYISGRQLPDKAIDLLDTACARVQISLVAVPERLEHLRSEMVQQQRHLEAVQRDADAGLSVDDKVLSTLASSVSRIRKEAIVLEDAWLDQRKTARRVLDLRQQLAHRKIQQNALTTLDSDCQATQALESELAQAQQTILSTQLKDRLVSFEVCPRLVAQVVNAWTGIPLSQLVQEHSLSIADFSSDLRLRIRGQEQAVQVLERAVKASAAGLNAPNAPTGVFLLVGPSGVGKTETAIALADLLYGGERFLTTINMSEFQEKHTVSRLIGAPAGYVGYGEGGMLTDAVRQKPYSVILLDEVEKADPEVMNLFYQIFDKGVANDGEGREINFRNTLILMTSNLGGDLIHASCREGERPDADELAMRIKPLLTAHFKPALLARMRVVPYYPVTGVVLHELIELKLSRLGERLECRGLTFSYSPDLTRYLLECCTQSDSGARLIDHVLESRVTPLIADRLLSAASSGDSVSRAHATLDASGGIVCEFE

SEQ ID NO: 23955 - protein, 446 aa, Pseudomonas syringae pv. tomato str. DC3000
MSDPTNNKPAPVLRESATFDRLTIQEIQRAAETGIYDIRGGGTKRKLPHFDDLLLLGASVSRYPLEGYREKCGTDVVLGNRFAKKPLYLKIPVTIAGMSFGALSANAKEALGRGATIAGTSTTTGDGGMTPEERGQSQHLVYQYLPSRYGMNPDDLRKADAIEIVLGQGAKPGGGGMLLGMKVTERVAGMRTLPVGVDQRSACRHPDWTGPDDLAIKIAEIREITDWEKPIYVKIGASRPYYDVKLAVKAGADVIVLDGMQGGTAATQEVFIEHVGIPILPAIPQAVQALQEMGMHRKVQLIVSGGIRNGADVAKAMALGADAVAIGTAALIALGDNHPRLDEELKKIGSAAGFYDDWQNGRDPAGITTQDPELSKRLDPVEGGRRLANYLRVLVLEAQTMARACGKSHLHNLDPEDLVALTVESAAMARVPLAGTSWIPGSGSGY

SEQ ID NO: 23956 - protein, 552 aa, Pseudomonas syringae pv. tomato str. DC3000
MYVYDDYDQKIIEDRVKQFRDQTRRYLAGELSEEEFRPLRLQNGLYVQRFAPMLRVAVPYGQLTSRQARMMAKIARDYDKGYAHISTRQNVQFNWPALEDVPDILAELATVQMHAIQTSGNCLRNVTTDQFAGVAADELVDPRPWCEIVRQWTTFHPEFAYLPRKFKIAINGSTSDRAAIEVHDIGLEPLRNEAGELGFRVLVGGGLGRTPVVGAFINEFLPWQDLLSYLDAILRVYNRYGRRDNKYKARIKILVKALTPEVFAAKVDAEMAHLRGGQTTLTEAEVQRVSRHFVDPQYKALDDQHAELAALEAQHPGFARWRQRNVLAHKKPGYIAVTLSLKPTGVAPGDVTDKQLDTIADLADRFSFGQLRTSHEQNIILADVEQAELFTLWNELRDNGFATPNIGLLTDIICCPGGDFCSLANAKSIPIAESIQRRFDDLDYLFDIGELDLNISGCMNACGHHHVGHIGVLGVDKKGEEFYQVSLGGSASRDASLGKILGPSFAQDAMPDVIEKLIDVYVEKRNEDERFIDTYQRIGIDPFKERVYAANH

SEQ ID NO: 23957 - protein, 283 aa, Pseudomonas syringae pv. tomato str. DC3000
MHRGPSFLKACAFVLAASFSLANTVQAAEGSKLDAVLKRGNLVVGTGSTNAPWHFQGADGKLQGFDIDIGRIIAKGLFNDPSKVEFVVQSSDARIPNLLTDKVDISCQFITVTASRAQQVAFTLPYYREGVALLLPANSKYKEIDDLKAAGDGVTVAVLQNVYAEELVHQALPKAKVDQYDSVDLMYQAINSGRADTAATDQSSVKYLMVQNPGRYRSPAFAWSPQTYACAVKRGDQDWLNFVNTALHEAMTGVEFPAYAASFKQWFGVDLPVPAIGFPMEYK

SEQ ID NO: 23958 - protein, 402 aa, Pseudomonas syringae pv. tomato str. DC3000
MTASRIAARVLRIKPSPSSAAADRANELRRAGKSIINLVVGEPDFDTPAHIRQAACAAIENGETRYTLNAGTATLREAIAAKLQRENGLTYAPGQIVVTSGAKAAIFNAFAATLGVDDEVLIPAPYWVSYPDMVLACDGRPVTLACPEENQFKLTAEQLREAITPRTRWLLLNSPSNPTGATYSAAEWRALADVLLDYPDVLIMTDDIYEHIRYDDTPLSHLLTVEPTLRERVLIINGVSKTYAMTGWRIGYAAGPSDIISAMATLQSQSTSNACSVSQAAAVAALNGDQSFVGESVKVYKQRRDRCLELINAIDGLSCIKPEGAFYLYVNCGALIGKTTPSGAVLHADTDVVLYLLESQGVAVVAGTAYGLAPFFRMSTATAIETLESGCARIATAVAALR

SEQ ID NO: 23959 - protein, 290 aa, Pseudomonas syringae pv. tomato str. DC3000
MSFKTALVLPLIAFTLLAGCDKPAEQKPVAKAAPSPSTSYLETIKARDKLIVGVFSDKPPFGFVNEQGQYVGFDTDLGKRFAKDLLGDEKKVEFVVVEPASRIPFLQSDKVDLILANMTVTPERAEAVDFTHPNLRVAVQALVPEASPVKTLDDLASKTTIVTTGTTADIWLTKNHPDWKVLKFEKNSESLQALANGRGDAYAQDNLVLFSWAKKNPGYRVLEQKLGDEAPIAPAVKKGNIELRDWVNTELTRLGEEKYLLKLYDQYVRPELAEGTDPNAVIVEGGNWKP

SEQ ID NO: 23960 - protein, 402 aa, Pseudomonas syringae pv. tomato str. DC3000
MSIERTIPHHDPVVIVSAARTPMGGFQGDLQSLGATRLGSIAIRAAVERAAIAPGDVEHVLFGCVLPAGCGQAPARQAALGAGLSTGTLCSTVNKMCGSGMQTAIMAHDLLMADAATVVVAGGMESMSNAPYLLDRARSGYRMGHGKVLDHMFLDGLEDAYEPGRLMGTFAEDCAQRHALSREAQDAFALASLARAQQAITDGHFDAEIVPVQVTVGKESRHITHDEQPPKARPDKIPTLKPAFRDGGTVTAANSSSISDGAAALLLMRQSQAQRRGLQPLAIFHAHAGFADEPGLFPTAPIGAIQRLLGKTGWALDDVDLFEINEAFAVVPMVAMSELGIPHEKVNVNGGACALGHPIGASGARIIVTLLAALRRRQLKRGLAAICIGGGEATAVAIELVY

SEQ ID NO: 23961 - protein, 393 aa, Pseudomonas syringae pv. tomato str. DC3000
MNEPVLYFDYAATTPVDERVIKVMVECLGASGNFGNPASSSHSFGQNARRAVEHAREQVAGLVGAQASQIIWTSGATESSNLALKGVAQERAKRLASLPGHIITSQIEHKATLDTARQLEEQGVEVTWLAPDSDGLITADAVSAALRDDTFLVSLMLVNNELGTVNNIAEIGRRVRGHGALLHVDAAQGAGKLPIDLSRLAVDLMSFSAHKIYGPKGIGALYVGPRAQQRVLAQIHGGGHECGLRSGTLATHQIAGMGAAFALAADVLDAEVLETERLNRLLRERLAGIAGLCINGSPTQRIAHTLSFTFGNNDLDLPALGKTLAFSSTSACNSAKNVPSHVLLALGLSPQAASQTIRLSLGRFTREQDIERAAESIRACLIQPAFWAVAQSR

SEQ ID NO: 23962 - protein, 310 aa, Pseudomonas syringae pv. tomato str. DC3000
MTTVLVLVENLDTYLPILESSGFQLIRAPTAEKRAEAIATHGQNISAVVTRGPLGFFAGEMDALPHLRIICVSGAGYEKVDLPAAQARGITVTNGAGVNAPTVADHALALLLSLVRDIPQADASVRRSEWRKAVRPSLAGKRLGIIGLGAVGLAIAKRAAAFDIVIGYHNRKPRHDCSYTWHETAQALAAESDFLMIATPGGNSTQHLVDAQVLAALGPDGFLVNIARASVVDTGALVSALENEQIAGAALDVFDDEPKVPDVFKTLNNVVLTPHVAGLSPEASRDSVQRVNDNLLAFFSGQPVLTPITE

SEQ ID NO: 23963 - protein, 391 aa, Pseudomonas syringae pv. tomato str. DC3000
MSLNPRDVVIVDFGRTPMGRSKGGMHRNTRAEDMSAHLISKLLERNNKVDPAEVEDVIWGCVNQTLEQGWNIARMASLLTQIPHTSAAQTVSRLCGSSMSALHTAAQAIMTNNGDVFVIGGVEHMGHVSMMHGVDPNPHMSLHAAKASGMMGLTAEMLGKMHGITREQQDAFGLRSHQLAHKATLEGKFKDEIIPMQGYDENGFLRVFDYDETIRPDTTLESLAALKPAFNPKGGTVTAGTSSQITDGASCMIVMSAQRAQDLGIQPLAVIRSMAVAGVDPAIMGYGPVPATQKALKRAGLSISDIDFFELNEAFAAQALPVLKDLKVLDKMNEKVNLHGGAIALGHPFGCSGARISGTLLNVMKQNGGTFGVSTMCIGLGQGIATVFERV

SEQ ID NO: 23964 - protein, 569 aa, Pseudomonas syringae pv. tomato str. DC3000
MSKDPMSKPTPEPAAHSKAGPAVPTNFLRPIVQADLDSGKHSKIITRFPPEPNGYLHIGHAKSICVNFGLAKEFGGDTHLRFDDTNPAKEDQEYIDAIMNDVKWLGFEWAGEVRYASQYFDQLHDWAVELIKAGKAYVDDLTPEQAREYRGTLTEPGKNSPFRERSVEENIDLFARMKAGEFEDGARVLRAKIDMASPNMNLRDPILYRIRHAHHHQTGDKWCIYPIYDFTHGQSDAIEGITHSICTLEFESHRPLYDWFLDNLPVPCKPRQYEFSRLNLNYTITSKRKLKQLVDEKHVNGWDDPRMSTLSGFRRRGYTPKSIRNFCEMIGTNRSDGVVDFGMLEFSIRDDLDHSAPRAMCVLRPLKVVITNYPEGQVEKLELPRHPKEDLGMRELPFSREIYIDRDDYMEEPPKGYKRLEPNGEVRLRGSYVIRADEAIKDADGNIVELRCSYDPDTLGKNPEGRKVKGVVHWVPAAESVECEVRLYDRLFRSANPEKAEDGASFLDNINPDSLQVLTGCRAEPSLGHAQPEDRFQFEREGYFCADIKDSKPGQPVFNRTVTLRDSWT

SEQ ID NO: 23965 - protein, 73 aa, Pseudomonas syringae pv. tomato str. DC3000
MGNRDTGTVKWFNTSKGFGFISRDSGDDIFVHFRAIRGEGHRVLVEGQRVEFSVMNRDKGLQAEDVIAALPRR

SEQ ID NO: 23966 - protein, 69 aa, Pseudomonas syringae pv. tomato str. DC3000
MSNRQTGTVKWFNDEKGFGFITPQSGDDLFVHFKAIQSDGFKSLKEGQQVSFIATRGQKGMQAEEVQVI

SEQ ID NO: 23967 - protein, 405 aa, Pseudomonas syringae pv. tomato str. DC3000
MADVNKVVLAYSGGLDTSVILKWLQDTYNCEVVTFTADLGQGEEVEPARAKAQAMGVKEIYIDDLREEFVRDFVFPMFRANTVYEGEYLLGTSIARPLIAKRLIEIANETGADAISHGATGKGNDQVRFELGAYALKPGVKVIAPWREWDLLSREKLMDYAEKHNIPIERHGKKKSPYSMDANLLHISYEGGVLEDTWTEHEEDMWRWTKSPEDAPNVATYLELTYRNGDIVALDGVDMTPATVLATLNRIGGENGIGRLDIVENRYVGMKSRGCYETPGGTIMLRAHRAIESITLDREVAHLKDELMVKYASLIYTGYWWSPERLMLQQMIDASQVHVNGVVRLKLYKGNVIVTGRKSDDSLFDANIATFEDDAGAYDQADAAGFIKLNALRMRIAANKGRKLF

SEQ ID NO: 23968 - protein, 108 aa, Pseudomonas syringae pv. tomato str. DC3000
MDIIETIKEQIASNTILLYMKGAPNAPQCGFSAKASQALMACGEKFAYVDILQNPEIRANLPKYANWPTFPQLWVAGELVGGSDIITEMMADGSLQTLVKEASAAKAE

SEQ ID NO: 23969 - protein, 300 aa, Pseudomonas syringae pv. tomato str. DC3000
MNDTTATRCGYVAIVGRPNVGKSTLLNHILGQKLAITSRKPQTTRHNMLGIKTEGTVQAIYVDTPGMHKNGEKALNRYMNKTASAALKDVDVVIFVVDRTRWTDEDQMVLERVQYVQGPVILAINKTDRIEDKSDLMPHLEWLQGQLPNASIVPISAQHGHNLEALESLIASHLPENDHFFPEDQITDRSSRFLAAELVREKIMRQLGAELPYQITVEIEEFKQQGRTLHIHALILVERDGQKKIIIGDKGDRIKRIGSDARRDMEVLFDSKVMLNLWVKVKGGWSDDERALRSLGYGDL

SEQ ID NO: 23970 - protein, 444 aa, Pseudomonas syringae pv. tomato str. DC3000
MLNSVIVVDDEAPIRQAVEQWLTLSGFEVQVFARAEECLAQMPEHFPGVVLTDVRMPGMTGLQLLTHLHALDRDLPVILLTGHGDVPMAVEAMREGAYDFLEKPFSPETLISNLRRALEKRQLVLENRRLHEQADARTRLDATLLGVSPSLQTLRRQVLELSQLPVNVIIRGETGSGKELVARCLHDFGPRAGKPFVALNCAAIPEYLFEAELFGHESGAFTGAQGKRIGRLEYADGGTVFLDEIESMPLAQQVKLLRVLQDKCLERLGSNQSIKVDLRIIAATKPDLLEEARAGRFREDLAYRLNVAELRLPALRDRLEDIAQLFSHFSRAAAERMGREAPALSAARLNQLLSHDWPGNVRELANAAERQTLGLEMTPPQADTQLPGHSLAARQEAFEAQCLRASLTRHKGDIKAVLNELQLPRRTLNEKMQRHALVREMFLG

SEQ ID NO: 23971 - protein, 399 aa, Pseudomonas syringae pv. tomato str. DC3000
MRDVFICDAIRTPIGRFGGGLSSVRADDLAAVPIKALMERNPSVNWEEIDEVFFGCANQAGEDNRNVARMAALLAGLPTSVPGVTLNRLCASGMDAIGTAFRAIASGEMELAIAGGVESMSRAPFVMGKADAAFSRNMKLEDTTIGWRFINPAMKALYGVDSMPETGDNVATDFRISRADQDAFALRSQQRTAIAQAAGFFEEEIVPVRVAHKKGETIVDKDEHPRGDTSLETLSKLKPVNGPDQTVTAGNASGVNDGAAALILASAEAVKKHGLTPRARVLGMASAAVEPRVMGIGPVPAVRKLVERLGLAVADFDVVELNEAFASQGLAVLRELGLADDAPQVNPNGGAIALGHPLGMSGARLVLTALHHLEKTGGRRGLATMCVGVGQGLALAIER

SEQ ID NO: 23972 - protein, 324 aa, Pseudomonas syringae pv. tomato str. DC3000
MNQSSDLIQSAQRTIRLEIEAIQGLLERLDGDFVRACEMILASKGRVVVVGMGKSGHVGKKIAATLASTGTTSFFVHPAEASHGDMGMITRDDIILALSNSGSTHEIVTLLPLIKRLGIKMISLTGDPESILARAADINLNAHVVHEACPLNLAPTSSTTAALVMGDALAVALLDARGFTAEDFAFSHPGGALGRRLLLKVENVMHSGDALPSVQRGTLLRDALLEMTRKGLGMTAILEADGTLAGIFTDGDLRRTLDRPVDIRQTTIDEVMTLHGKTAHADMLAAQALKIMEDNKISALVVVDQNDKPVGAFNLQDLLRAGVM

SEQ ID NO: 23973 - protein, 638 aa, Pseudomonas syringae pv. tomato str. DC3000
MGRIIGIDLGTTNSCVSILENGNVKVIDNAEGTRTTPSIIAYANDGEILVGQSAKRQAVTNPHNTLYAVKRLIGRKFDEQVVQKDIQMVPYKIVKADNGDAWVEVNGQKMAPPQISAEILKKMKKTAEDYLGEAVTEAVITVPAYFNDSQRQATKDAGRIAGLDVKRIINEPTAAALAYGMDKAKGDHTVIVYDLGGGTFDVSVIEIAEVDGEHQFEVLATNGDTFLGGEDFDIRLIDYFVDEFKKESGMSLKGDPLAMQRLKEAAEKAKIELSSSTQTEVNLPYITADATGPKHLVVKISRSKLESLVEDLVQRTIEPCRIALKDAGIDIGKINDVILVGGQTRMPLVQKLVTEFFGKEARKDVNPDEAVAMGAAIQGAVLAGDVKDVLLLDVSPLTLGIETMGGVMTALIEKNTTIPTKKSQVFSTADDNQNAVTIHVLQGERKQAGQNKSLGKFDLAEIPPAPRGVPQIEVTFDIDANGILHVGAKDKATGKQQSIVIKANSGLSEEEIQQMVRDAEVNSEEDRKFEELASARNQGDALVHSTRKMIADAGDKVTAEEKTAVEAALVALEAAIKGDDKAVIEAKVEELSKVSAPIAQKMYAEQAENPEAAAKPAEETAKADDVVDAEFEEVKDHK

SEQ ID NO: 23974 - protein, 476 aa, Pseudomonas syringae pv. tomato str. DC3000
MPADKAGIIPRPTGYKCSNPFSSQFIPGDPLNEQQSARTSSVTLRPSACPGLLRIVPALDGGICRIKLAGGVITSAQALAVAQAAQTYAQGVIEATNRANLQIRGIGADHDGLIETLMAAGLGPANPASDDVRNLMLSPTAGLDPHMLFDARPLAAQILRALENHTRFQELSPKFALSLDAGEALVMLEHPHDVWLSALKTGDEVLLAFGLAGCPASDRPLAAVPPAAGEALVVALLELFLDLARPEHTRMRHLLAELSTDELLRQLSTRLSCPVRVDDAVTGWQRPAVQGNRHIGVYPQAQSGLVAVGAVVPLGRLTAPMLAAVAQLATDHGDGTLRLTPWQSLLLPNVPAERAAAVMAALQAAGLICSAEQPLAQIVACTGSAGCAKGLADTKADALQLASGLAVSQAVHLSGCTRSCAAAHVAPVTLLAVAPGRYDLYFRDATHSGFGVLRARDLTIEAVGAQLNADSRSSIA

SEQ ID NO: 23975 - protein, 437 aa, Pseudomonas syringae pv. tomato str. DC3000
MSVTAAGPVTKPVEIKKSLIDAVVAGLLALIVFGPIVGIVLDGYSFNLQPTRVAWLVAVVMVGRFLISLFLQTPRGIRMSQSFESSDSGVHVLKPDHKSSLYWIIPLLIVVAIVFPIFANKYILTVVILGLIYVLLGLGLNIVVGLAGLLDLGYVAFYAIGAYGLALGYQYLGLGFWSALPLAAIAAALAGCILGFPVLRMHGDYLAIVTLGFGEIIRLVLNNWLSFTGGPNGVPVPSPTFFGLEFGRRAKDGGVPIHEYFGFDYNPDLKFIFIYTVLFLVVLAVLFIKHRLTRMPIGRAWEALREDEIACRSMGLNHVLVKLSAFTIGASTAGLAGVFFASYQGFVNPTSFTFFESALILAIVVLGGMGSTIGVVIAAFVLTVAPELLRSFSEYRVLLFGILMVLMMIWRPRGLIRISRTGVKPRKGALVTEGGAR

SEQ ID NO: 23976 - protein, 624 aa, Pseudomonas syringae pv. tomato str. DC3000
MLPQQAAAKTAVIQFGLFLIQRTLMTTPESSATSSVKIYFRLLSYVRPYVGIFLLSILGFVIFASTQPMLAGILKYFVDGLSNPEAVLFPNVPYLRELQLLQAVPLLIVLIAAWQGLGSFLGNYFLAKVSLGLVHDLRVELFNKLLVLPNRYFDTTNSGHLISRITFNVTMVTGAATDAIKVVIREGLTVVFLFIYLLMMNWKLTLVMLAILPLIAVMVSSASKKFRKQSKKIQVAMGDVTHVASETIQGYRVVRSFGGEAYEQNRFAEASDSNTRKQLRMTKTGAIYTPMLQLVIYSAMAVLMFLVLFLRGDATAGDLVAYITAAGLLPKPIRQLSEVSSTIQKGVAGAESIFEQLDVEEEVDTGTIELDRVSGHLEVKNLSFFYPQTERQVLNDISFSAAPGQMIALVGRSGSGKSTLANLIPRFYGHEMGNILLDGVEINDYRLRNLRKHIAQVNQNVTLFNDSIANNIAYGDLAGAPRADIEAAAADAYAKEFIDQLPQGFDTQVGENGVLLSGGQRQRLAIARALLKNAPLLILDEATSALDTESERHIQAALDHVMKGRTTLVIAHRLSTIEKADMILVMDAGKIVERGTHTELLAQNGYYARLHAMGLDEPAPAGAV

SEQ ID NO: 23977 - protein, 1481 aa, Pseudomonas syringae pv. tomato str. DC3000
MKAGLYQPDEFKDNCGFGLIAHMQGEPSHHLLQTAVQALTCMTHRGGINADGKTGDGCGLLIQKPDGFLRAMASEHFGVELPRQYAVGMVFLNQDDTKAKAARENMNREILAEGLELVGWRQVPIDTSVLGQLALERLPKIEQVYIGGEGLSDQEFAIKLFSARRRSSVANAADSDHYICSFSHKTIIYKGLMMPADLTAFFPDLSDERLQTAICVFHQRFSTNTLPKWPLAQPFRFLAHNGEINTITGNRNWAQARRTKFTNDLMDLDELGPLVNRVGSDSSSMDNMLELMVTGGIDLFRGVRMIIPPAWQNVETMDPDLRAFYEYNSMHMEPWDGPAGIVMTEGRHAVCLLDRNGLRPARWVTTKNGYITLASEIGVWDYKPEDVIAKGRVGPGQIFAVDTETGQILDTDAIDNRLKSRHPYKQWLRKNALRIQATMEDNDHGSAFYDSEQLKQYMKMYQVTFEERDQVLRPLGEQGQEAVGSMGDDTPMAVLSRRVRSPYDYFRQQFAQVTNPPIDPLREAIVMSLEICLGAERNIFQESPEHASRVILSSPVISPAKWRSLMNLERPGFERHIIDLNYDESLGLEAAVRNVADQAEEAVRSGHTLIVLSDRHIAPGKLPVHASLAVGAVHHRLTEQGLRCDSNILVETATARDPHHFAVLIGFGASAVYPFLAYEVLGDLIRTGEVLGDLYEVFKNYRKGITKGLLKILSKMGISTVASYRGAQLFEAIGLSEEVCNTSFRGVPSRLKGARFVDIEAEQKALAAEAWSPRKPIQQGGLLKFVYGGEYHAYNPDVVSTLQAAVQQGDYSKFKEYTALVDQRPVSMIRDLLQVKTLDQPLNIDEIEPLSEILKRFDSAGISLGALSPEAHEALAEAMNRLGARSNSGEGGEDPARYGTIRSSKIKQIATGRFGVTPEYLVNADVLQIKVAQGAKPGEGGQLPGGKVNGLIAKLRYAVPGVTLISPPPHHDIYSIEDLSQLIFDLKQVNPAALVSVKLVAEAGVGTIAAGVAKAYADLITISGYDGGTGASPLTSIKYAGAPWELGLAETHQTLRGNDLRGKVRVQTDGGLKTGLDVIKAAILGAESFGFGTAPMIALGCKYLRICHLNNCATGVATQNEKLRKDHYIGTVDMVINFFTYVAEETREWLARLGVRTLEELIGRTDLLDILPGETEKQRHLDLTPLLGSDHIPADKPQFSLVDRNPPFDKGLLAEKMVELAKPAIEALSGGEFELDICNCDRSIGARISGEIARLHGNQGMNKAPITFRFKGTAGQSFGVWNAGGLNMYLEGDANDYVGKGMTAGKLVIVPPKGSPFKTNESAIIGNTCLYGATGGKLFAAGTAGERFAVRNSGAHTVVEGTGDHCCEYMTGGFVCVLGKTGYNFGSGMTGGFAYVLDQDNTFVDLVNHELVEIQRISGESMEAYRTHLQSVLNEYVAETDSEWGRNLAENLDDYLRRFWLVKPKAANLKSLLSSTRANPQ

SEQ ID NO: 23978 - protein, 261 aa, Pseudomonas syringae pv. tomato str. DC3000
MTKRYSALLTALFASLMLSQTPAHANGLDDVVARGTLKVAVPQDFPPFGSVGPDMKPRGLDIDTAQLLADRLKVKLELTPVNSTNRIPFLTTGKVDLVISSLGKNPDREKVIDFSRAYAPFYLAVFGPPDSPVKDIADLKGKTISVTRGAIEDIELSKVAPEGATIKRFEDNNSTIAAYLAGQTDLIASGNVVMVAISERNPKRIPALKVKLKDSPVYVGLNKGQPELLSKVNEILNAAKADGTLEKASVTWLKEPLPADL

SEQ ID NO: 23979 - protein, 664 aa, Pseudomonas syringae pv. tomato str. DC3000
MSSPSTSSSGTVRMNAPVFYFAASFILIFGIIVIAFPQASGAWLLAAQNWAANTVGWYYMMVMTLYLVFVVVTALSGFGKIKLGADHDEPEFSYLSWAGMLFAAGISITLFFFCVSEPLTHLLQPPQGEGGTAEAARQGMQLLFLHWGLHGWGVFAFVGMALAYFAYRHNLPLALRSALYPLIGKRINGPIGYAVDGFGIIATIFGLGADMGFGVLHLNSGLDYLFGVPHTQWIQVGLITLMMGAAILVAIAGVDKGVRVMSDINMLLACALLLFVLFAGPTQHLLNTLVQNIGDYLGALPSKSFDVYAYNKPSDWLGGWTVFYWAWWIAWAPFVGLFIARISRGRTIREFVFGVLLIPLGFTLAWMSIFGNSAIDQVLNHGMAALGQSAIDDPSMTLYLLLETYPWSKTVIAVTVFISFVFFVTSADSGTVVLSTLSAKGGNPDEDGPKWLRVFWGVATALITSGLLFSGSIDALKSAVVLTSLPFSLILLLMMWGLHKAFVMESQRQIAQLYSLAPVSGSRRGGWRQRLSQAVHYPSRDEVYRFLDQTVRPAIDEVTAVFVEKGLNVVNVPDPSNDSVTLEIGHGEERPFIYQVQMKGFFTPSFARGGMGSKQLNNRRYYRAEVHLSEGSQDYDLVGYTKEQVINDVLDQYERHMQFLHLVR

SEQ ID NO: 23980 - protein, 458 aa, Pseudomonas syringae pv. tomato str. DC3000
MTSQDGLKRGLSARHIRFMALGSAIGTGLFYGSASAIQQAGPAVLLAYLIGGAAVYMVMRALGEMAVHDPVSGSFSHYATRYMGPLAGFVLGWTYAFEMIIVCLADVTAFGIYMGFWFPEVPRWIWVLGIVFLIGALNLCNVKVFGETEFWLSILKVSAIVAMIVAGFGIMIFGIGSSTSGTEIGISNLWAHGGFMPNGVTGLIASFAVVMFAFGGIEIIGITAGEAKDPQRSLPQAINAVPLRILLFYVLTLFVLMCIYPWPQIGTQGSPFVQIFDNLGIASAATILNIVVISAAVSAINSDIFGAGRMMYGLARDGQAPASFARLSRQGVPWMTVLVMGVTLLGGVLLNYLIPKDVFLLIASLATFATVWVWLMILLTQVAMRRSMSREEVTQLKFAVPFWPYGPAAAIAFMLFIFGVLGYFPDNRAALIVGAIWIALLLIAYGLWVKPKALNKTH

SEQ ID NO: 23981 - protein, 882 aa, Pseudomonas syringae pv. tomato str. DC3000
MSNVDLQQLIQALDAETRRDLESSAERCVARGGSKILVEDLLLELLERPQGLLARALQDAEVDAGELSASLQSRVEHSASRNPVFAPELVQWLQDALLVANLELGQTQVEQAALILALLRNPMRYAGSRYQPLLAKLNIDRLKEFALSKQEQPANGKSAAQGESLLERFTHNLTQQARDGKLDPVLCRDGAIRQMVDILARRRKNNPIVVGEAGVGKTAIVEGLASRIAAGEVPQALKGVELLSLDMGLLQAGASVKGEFERRLKGVIDEVKASPKPIILFIDEAHTLIGAGGNAGGSDAANLLKPALARGELRTIAATTWAEYKKYFEKDPALARRFQPVQLHEPTVSEAVTILRGLAQVYEKSHGIYLRDDAVVAAAELSARYLAGRQLPDKAVDVLDTACARVRISLAAAPESLERLRGELAEGGRQRQALRRDAEAGLLIDHESLEALETRLHAAEEERVALEAMWLEQKTLAERLLELRQQLAKAREAVAAVPVVEIGEDDEGTVIEAVALDETQSVEALTAALNDTHVALAALQVKERLVSFEVCPRLVAEVISAWTGVPLAQLAREHNAKVASFAKDLRIRIRGQEQAVHALDRSMRATAAGLNKPDAPVGVFLLVGPSGVGKTETALALADLLYGGDRFITTINMSEFQEKHTVSRLIGAPPGYVGYGEGGMLTEAVRQKPYSVVLLDEVEKADPDVLNLFYQIFDKGVANDGEGREIDFRNTLILMTSNLGSDQISALCEDGARPTAEVLEETIRPVLSKHFKPALLARMRVVPYYPVSGPVLRELIEIKLGRLGERLNRRQLEFTYCQDLVDHLAQRCTQSDSGARLIDHLLDLHVLPLVADRLLDAMATGESLKRVHATLDTSGTVTCEFA

SEQ ID NO: 23982 - protein, 562 aa, Pseudomonas syringae pv. tomato str. DC3000
MDIKRTILIVALAIVTYVGVLKWNQDYGQAAMPTQNVAASNTAPGIPDTAAGNNGSASADVPSATGNTTSAAPLETPAVASKDLIHVKTDVLDLAIDPVGGDVVQLRLPLYPRRQDRPDVPFQLFDNGGERTFLAQSGLTGTNGPDARASGRPVYSSAQKSYQLADGQDSMVVELKFSENGVNYIKRFTFKRGLYDLVMTYVVDNQSAQPWAGNLFAQLKRDASSDPSSTTATGTATYLGAALWTAAEPYKKVSMKDIDKGQIKENVQGGWVAWLQHYFVTAWIPDHNVTNAVQTRKDSQGNYIIGFTSPTLSVAPGAQGETTATLYAGPKSQAVLKELSPGLELTVDYGFLWFIAQPIFWLLQHIHAILGNWGWSIIVLTMLIKGLFFPLSAASYKSMARMRAVAPKLAVLKEQHGDDRQKMSQAMMELYKKEKINPLGGCLPILVQMPVFLSLYWVLLESVEMRQAPWILWITDLSIKDPFFILPIIMGATMFIQQRLNPTPPDPMQAKVMKMMPIIFTFFFLWFPAGLVLYWVVNNTLSIAQQAYITRKIGAATKKAAA

SEQ ID NO: 23983 - protein, 727 aa, Chlamydomonas sp. W80
MHARSSLGPRARAGARAPAVCHVAALAACRPAASTPPQPLCATISNSAGSARAAIMPQQGRGLGSGLVRCPTTPVATRASSVASAPASQPPAADSMKRPLRVLIAGAGIGGLVLAVALIKKGFHVTVFERDMTAIRGEGKYRGPIQIQSNALGALEAIDPSIADEVMDEGCITGDRVNGLCDGVTGDWYVKFDTFHPAVSKGLPVTRVISRVTLQNILAKAVLRYGGPDTIMSNSHVVGFEESNNGVSVTLENGDVHRGDILVGADGIWSKIRKAILGETEANYSQYTCYTGISDFTPADIDIVGYRVFLGNSQYFVSSDVGGGKMQWYGFHKEPAGGTDPEGQRKARLLDIFGHWNDNVVDLIKATPEEDIMRRDIFDRPPVFKWSEGRTVLLGDSVHAMQPNLGQGGCMAIEDAYELANNLSDGMDAAGQQPAHLDVKKAFSTYQSHRMIRASAIHGMAGMAAFMASTYKAYLGEGLPGPLQQLTKLKIHHPGRVVGRLVMNLTMPQVLGWVLGGNTENLDKSRVGHCRIADQPKAFHESQFSYLMENDEAIIQSSHADWMLMTSREAGSGSSDSNARVDATADATSTSECKGIYIGDEPSIIGRKSESADLSINDGQVAPQHARVWRTETSSVSGRDVVAYEYHVQDLGSDAGTWLNGRPMPRGGTCQLHAGDVLEFGQSPSKEVYRVKMQHVSLRNDKLNGHAFTTLVVGAHEGHGDKHMIMA

SEQ ID NO: 23984 - protein, 486 aa, Streptococcus pyogenes SSI-1
MKFTIITNYDTLSRKSFTIEGDNMTIFRKKKKYSNKTEMQRHFKVIDLIFLGLGSMVGTGIFTVTGIGAAKYAGPALTISIIISAIAIGILALFYAEFASRMPSNGGAYSYVYATLGEFPAWLVGWYIIMEFLTAISSVAVGWGSYLKGLLANYNIVLPNALNGTFNLKNGTYIDILPVLVMFFVTGIVLMNSKLALRFNSFLVILKFSALALFIFVGIFFIDHNNWFHFAPYGVGQITGGKTGIFAGASVMFFAFLGFESISMAVDEVKEPQKTIPKGIILSLIIVTALYIVVTTILTGIVHYTKLNVPDAVAFALRNIRLYWAADYVSIVAILTLITVCISMTYALARTIYSISRDGLLPKSLYTLTKKNKVPQNATLVTGLLAMICAGIFPLSSLAEFVNICTLAYLIILSGAIIKLRRIEGEPKANEFKTPLVPFLPMLAIIICLSFMSQYKAFTWIAFAIATIIGTLIYLAYGYTHSIENK

SEQ ID NO: 23985 - protein, 196 aa, Streptococcus pyogenes SSI-1
MEFRKAKKDHILFFEGDKRDKLFLVTSGYFKVEQSDQSGTFMYTDFIRHGTIFPYGGLFTDDYYHFSVVAMTDVTYFYFPVDLFEDYSLENRLQMKHLYSKMSKLLELHELRVRNLITSSASSRVIQSLAILLVEMGKDSDTLPFQLTTTDIAQISGTTRETVSHVLRDLKKQELITIKGKYLTYLDKDYFLQYTK

SEQ ID NO: 23986 - protein, 259 aa, Streptococcus pyogenes SSI-1
MKTPEQILEATIHIGEHKVTKTFLAKSILGFIGGAMISLGYLLYVRIAASGLEAFGAFSSIVGACAFPIGLIIILMAGGELITGNMMAVSAALLAKKIKFSELAKNWLIITLFNVIGAVFVAFVFGHFLGLTSAGIFKEEVIEVAHAKIAASPLQALVSGIGCSWFVGLALWLCYGANDAAGKFLGTWFPVMTFVALGFQHSVANAFVIPAAIFEGGATWLDFVTNFIFVYSGNIIGGAIFVSFLYFKVYYHPQKSKTQ

SEQ ID NO: 23987 - protein, 331 aa, Streptococcus pyogenes SSI-1
MSIRSLFGGLREKILGKNMKIVFPEGNDERVVRAAARLKFEGLLEPIILGQSEEVRNLLTKLGFADQDYTIINPNEYADFDKMKEAFVDIRKGKATLEDADKMLRDVNYFGVMLVKMGLADGMVSGAIHSTADTVRPALQIIKTKPGISRTSGVFLMNRENTSERYVFADCAINIDPTAQELAEIAVNTAETAKIFDIDPKIAMLSFSTKGSGKAPQVDKVREATEIAKGLNPDLALDGELQFDAAFVPETAAIKAPDSAVAGQANTFIFPDLQSGNIGYKIAQRLGMFDAIGPILQGLNKPVNDLSRGSSAEDIYKLAIITAAQAIESQG

SEQ ID NO: 23988 - protein, 69 aa, Streptococcus pyogenes SSI-1
MYMAQGTVKWFNAEKGFGFISTENGQDVFAHFSAIQTNGFKTLEEGQKVAFDVEEGQRGPQAVNITKLA

SEQ ID NO: 23989 - protein, 540 aa, Vibrio parahaemolyticus RIMD 2210633
MDSQRNILLIALALVSFLLFQQWQVAKNPAPQAVEQAQSSSSLPAPSFADELDPVPGQQQASAKTITVTTDVLTLSIDTVGGDVVHADLNQYSAELDSSDPFVLLKDTQGHQFIAQSGLVGPQGIDLSSSNRPHYNVSADSFTLADGQDELRVPMTFTANGIEYTKTYVLKRGSYALNVEYDVANNSGNNATFGMYAHLRQNLMDAGGSITMPTYRGGAYSTEDTRYKKYSFEDMQDRNLSINLADGQGWAAMIQHYFAAAWIPRNEPGTNLYTRVIGNLGDIGVRMPNKTIATGDQAKFEATLWVGPKLQQEMAAVAPNLDLVVDYGWLWFIAKPLHSLLAFIQSFVGNWGVAIICLTFIVRGAMYPLTKAQYTSMAKMRMLQPKLQAMRERIGDDRQRMSQEMMELYKKEKVNPLGGCLPLVLQMPIFIALYWALMESVELRHSPFFGWIHDLSAQDPYYILPLLMGASMFLIQKMSPTTVTDPMQQKIMTFMPVMFTFFFLFFPSGLVLYWLVSNIVTLIQQTLIYKALEKKGLHTK

SEQ ID NO: 23990 - protein, 391 aa, Vibrio parahaemolyticus RIMD 2210633
MTNQTRNVVVVDCLRTPMGRSKGGAFRHTRAEDLSAHLMKGILARNPQVNPSEIEDIYWGCVQQTLEQGFNIARNAALLAGLPIEIGAVTVNRLCGSSMQALHDGTRAIMTGDAEICLIGGVEHMGHVPMNHGVDFHPGMSKNVAKAAGMMGLTAEMLGKLHGISREQQDEFAARSHARAHAATLEGRFKNEILPTEGHAADGTLFQLDYDEVIRPETTVEGLSQLRPVFDPANGTVTAGTSSALSDGASAMLIMSEEKANELGLKIRARIKGMAIAGCDPSIMGYGPVPATQKALKRAGLAIEDMDVVELNEAFAAQSLPCAKDLGLLEVMDEKVNLNGGAIALGHPLGCSGARISTTLINLMEAKDAKYGLATMCIGLGQGIATVFERP

SEQ ID NO: 23991 - protein, 390 aa, Vibrio parahaemolyticus RIMD 2210633
MKFVDEAVVKVQAGDGGSGVVSFWREKFITKGGPDGGDGGDGGDVYIQADENLNTLIDYRFQRFYEAERGENGRGGNCTGKRGKDIVLRVPVGTRAVDIHTNEIVAEVAEHGKKVMVAKGGWHGLGNTRFKSSVNRAPRQRTLGTKGEIREIRLELLLLADVGMLGLPNAGKSTFIRAVSAAKPKVADYPFTTLIPSLGVVSVVPEKSFVVADIPGLIEGAADGAGLGIRFLKHLERCRVLLHMIDIMPIDQSDPVQNALTIIDELEQYSEKLASKPRWLVFNKVDLMPEEEANEKIQEILDALGWEDEYFKISAINRSGTKELCYKLADFMENLPREEEEVAEEDKVNFMWDDYHKDAMAGKDVVTEDDDDWDDWDDEEDDGHVVYVRD

SEQ ID NO: 23992 - protein, 574 aa, Vibrio parahaemolyticus RIMD 2210633
MTAMLSGAEMVVQSLIEENVEQIFGYPGGSVLDIYDALHAKTDQIKHVLVRHEQAATHMADGYARATGKPGVVLVCSGPGATNTITGIATAYMDSIPMIVISGNVPNSLIGNDAFQECDIVGVSRPVVKHSFLVKKAEDIPETIKKAFYISTTGRPGPVVIDLPKDVMNPQIKLPYQYPESISMRSYKPTTSGHKGQIKKALKSLIEAKKPVLYVGGGAVISGAHEHILELADKLNLPVVSTLMGLGAFPGTHKNSLGMLGMHGTYEANMAMHEADLIFGIGVRFDDRTTNNLEKYCPNAKVMHIDIDPSSISKNVKVDLPIVGSAEKVLTTMLGLLAEQDCGNDEAAITKWWDDIQVWRDRQCLSYETSSDRIKPQQVIETLHKLTNGDAYVASDVGQHQMFAALYYPFNKPRRWINSGGLGTMGFGLPAGMGVKFAMPEEEVVVVTGDGSIQMNIQELSTAMQYDIPVKIINLNNRFLGMVKQWQDIIYQGRHSNSYMSSVPDFAAIAEAYGHVGIRIETPDQLEEGLQKALDMKDRLVFVDINVDETEHVYPMQIKGEGMDKMWLSKTERT

SEQ ID NO: 23993 - protein, 360 aa, Vibrio parahaemolyticus RIMD 2210633
MDKIIISPSKYVQGEQVLTSIAHYVKTLGERPLVIADEFVTNLVGDDVKQSFADEKLPLTMNIFGGECSRIEIERITDICATQKHDVIVGIGGGKTLDTAKAVAFYTKIPVVVVPTIASTDAPTSALAVIYTPEGEFAEYLMIPKNPDMVIMDTSVIAKAPVRLLVSGMGDALSTYFEARANMTSGKATMAGGLATRSAQALAKLCYETLLEDGLKAKAAVENGVSTKAVENIIEANTYLSGIGFESSGLAGAHAIHNGLTKLEECHHLYHGEKVAFGTLVQLVLENAAMEEINTVLAFCRSVGLPTNLFDMGVKELNHAKLREVAEASTAEGETIHNMPFPVTAENVYSAILTAHQLGQ

SEQ ID NO: 23994 - protein, 857 aa, Vibrio parahaemolyticus RIMD 2210633
MRLDRFTSKFQIAISDAQSLALGRDHQYIEPVHLMVALLDQNGSPIRPLLTMLDVDVTHLRSKLGEMLDRLPKVSGIGGDVQLSSSMGTLFNLCDKVAQKRQDSYISSEVFLLAALEDRGPLGQLLKEVGLTEQKVSQAIEKIRGGQKVNDPNAEELRQALEKFTIDLTERAEQGKLDPVIGRDDEIRRTIQVLQRRTKNNPVIIGEPGVGKTAIVEGLAQRIVNNEVPEGLRGRRVLSLDMGALVAGAKYRGEFEERLKSVLNELAKEEGNVILFIDELHTMVGAGKGEGSMDAGNMLKPALARGELHCVGATTLDEYRQYIEKDAALERRFQKVLVDEPTVEDTVAILRGLKERYELHHHVEITDPAIVAAASLSHRYISDRQLPDKAIDLIDEAASSIRLQIDSKPESLDKLERKIIQLKIEQQALSNEHDEASEKRLQALNDELNEKEREYAELEEVWNTEKAALSGTQHIKSELEQARMDMEFARRAGDLNRMSELQYGRIPELEKQLDLATQAEMQEMTLLRNKVTDNEIAEVLSKQTGIPVSKMLEAEKEKLLRMEDVLHNRVVGQSEAVAVVSNAIRRSRAGLSDPNRPIGSFLFLGPTGVGKTELCKTLASFMFDSEDAMVRIDMSEFMEKHSVARLVGAPPGYVGYEEGGYLTEAVRRKPYSVILLDEVEKAHPDVFNILLQVLDDGRLTDGQGRTVDFRNTVVIMTSNLGSSRIQENFATLDYQGIKSEVMDVVSKHFRPEFLNRVDEIVVFHPLGQEHIKSIASIQLERLAKRLEEKGYQLEVSDKALDLIAQVGFDPVYGARPLKRAIQQNVENPLAKSILAGEIVPDKKVQLIVTNDQILAHQ

SEQ ID NO: 23995 - protein, 404 aa, Vibrio parahaemolyticus RIMD 2210633
MKLPIYLDYSATCPVDPRVAEKMVQYMTMDGTFGNPASRSHRYGWQAEEAVDTAREQIADLLNADPREIVFTSGATESDNLAIKGAAHFYSKKGKHVITCKTEHKAVLDPCRQLEREGFEVTYLEPESNGLIDLEKLKAAMRDDTVLVSIMHVNNEIGVIQDIAAIGELCRERKIVFHVDAAQSAGKLPIDVQEMKVDLISLSAHKVYGPKGIGALYVRRKPRIRLEAQMHGGGHERGFRSGTLATHQIVGMGEAFRIAKEEMQKDYDHALALRNRLLNGVKDLEAVTVNGDLEQRVPQNLNISFAFVEGESLLMSLKDLAVSSGSACTSASLEPSYVLRALGMDDELAHSSVRFSFGRFTTEEEIDYAIEQIRVAVTKLRDMSPLWDMYKEGVDLSTVEWAHH

SEQ ID NO: 23996 - protein, 637 aa, Vibrio parahaemolyticus RIMD 2210633
MGKIIGIDLGTTNSCVAVLDGDKPRVIENAEGERTTASVIAYTDGETLVGQPAKRQAVTNPTNTLFAIKRLIGRRFEDEEVQRDIEIMPYKIVKADNGDAWVEAKGQKMAAPQVSAEVLKKMKKTAEDFLGEEVTGAVITVPAYFNDAQRQATKDAGRIAGLEVKRIINEPTAAALAYGLDKKGGDRTIAVYDLGGGTFDISIIEIDEVEGEKTFEVLATNGDTHLGGEDFDNRLINYLVDEFKKEQGIDLKNDPLAMQRVKEAAEKAKIELSSTSQTDVNLPYVTADATGPKHMNIKVTRAKLESLVEDLVQRSLEPLKVALADADLSVNDITDVILVGGQTRMPMVQAKVAEFFGKEARRDVNPDEAVAMGAAVQGGVLAGEVKDVLLLDVTPLSLGIETMGGVMTKLVEKNTTIPTKANQVFSTAEDNQSAVTIHVLQGERKQAMYNKSLGQFNLEGIQPAPRGMPQIEVTFDLDADGILHVSAKDKQTGKEQKITIQASGGLSDDEIEKMVQEAEANKEADKKFEELATARNQADQMIHGTRKQMEEAGDALPAEEKEKIETAISELEEARKGEDKEAIDAKVQALMTAAQKLMEIAQQQAQAQQAQGADAGAQSKDDDVVDAEFEEVKDDKK

SEQ ID NO: 23997 - protein, 183 aa, Vibrio parahaemolyticus RIMD 2210633
MAKPAVFIDRDGVINVDHGYVHDEHDFEYIDGVFEATKALKDKGYLLVLVTNQSGIARGKFSEDRFLSLTQWMDWNFVDNGVEFDGFYYCPHHPEHGIGDYKQDCDCRKPKPGMFISARDFLKIDMEKSVMIGDKAEDMMAAEAAGVGTKILVRTGKPITEQGEALATVVLDSIADVPAYLQK

SEQ ID NO: 23998 - protein, 314 aa, Vibrio parahaemolyticus RIMD 2210633
MPDMKLFAGNATPELAQRIADRLYISLGDASVSRFSDGEVAVQINENVRGSDVFIIQSTCAPTNDNLMELVVMIDAMRRASAGRITAVIPYFGYARQDRRVRSARVPITAKVVADFLSNVGVDRVLTIDLHAEQIQGFFDVPVDNIFGTPVLLEDMQSRGLDNPVVVSPDLGGVVRARATAKALGDIDIAIVDKRRPRANVSEVMNLIGDVEGRDCVIVDDMIDTGGTLCKAAEALKERGAKRVFAYATHAVFSGNAADNIKNSVLDQVIVTDSISLSKEMAATGKVTTLSLSRMLAEAIRRISNEESISAMFN

SEQ ID NO: 23999 - protein, 554 aa, Vibrio parahaemolyticus RIMD 2210633
MCSVFGILDIKSDAAALRPIALEMSKKLRHRGPDWSGIYSSERAILAHERLAIVGLNSGAQPLYSPDKKLILAVNGEIYNHKEIRARYEGKYEFQTDSDCEVILALYQDMGADLLEELNGIFAFVLYDEEKDEYLVGRDHIGIIPLYQGYDEHGNYYVASEMKALVPVCKTVSEFPPGSHYSSKDAEPQRYYIRDWNEYAAVQGNSTSKEELTEALEAAVKRQLMTDVPYGVLLSGGLDSSITSAVAKRYAAMRIEDDEKSEAWWPQLHSFAVGLEGAPDLKAAREVAEKIGTVHHEMTYTIQEGLDAIRDVIYHIETYDVTTIRASTPMFLMGRKIKAMGIKMVLSGEGADEIFGGYLYFHKAPNAKEFHEETVRKLLALNMFDCARANKSLAAWGVEGRVPFLDKEFIDVAMRLNPADKMCGNGKMEKHILRECFEHYLPDSIAWRQKEQFSDGVGYSWIDTLKAVAEEKVTDQQMETAQYRFPYNTPTTKEGYVYREIFEELFPLPSAAECVPGGPSVACSSAKAIEWDESFKNCVDPSGRAVQTVHNDAY

SEQ ID NO: 24000 - protein, 556 aa, Vibrio parahaemolyticus RIMD 2210633
MSEADARPSNFIRQIIDKDLADGKHTSVHTRFPPEPNGYLHIGHAKSICLNFGIAQDYQGQCNLRFDDTNPEKEDIEYVESIKKDVNWLGFEWDGEVCYSSNYFDKLYEYAIELINKGLAYVDELSPEQIREYRGTLKEPGKPSPYRDRSVEENLALFEKMRAGEFEEGKACLRAKIDMGSSFMVMRDPVLYRVRFATHHQTGDKWCIYPMYDFTHCISDALEGITHSICTLEFMDNRRLYDWVLDNITIDCRPHQYEFSRLNLEYTVMSKRKLNQLVTEKLVNGWDDPRMPTVSGLRRRGFTPASIREFCKRIGVTKQENMIEFSSLESCIRDDLNENAPRAMAVLDPVKVVIENFEVGAVENLTLANHPNKPEMGEREVPFTREVWIEREDFREEANKKYKRLVLGKEVRLRGAYVIKAERVEKDAEGNITTIYCTYDPETLGKNPADGRKVKGVIHWVSADKALPAEIRLYDRLFTVPNPAAAEDFASTINTDSLVVINGFVEPSLASAEAEQGYQFERMGYFCADSKDSTADNLVFNRTVGLRDTWAKIENQ

SEQ ID NO: 24001 - protein, 404 aa, Vibrio parahaemolyticus RIMD 2210633
MQNIGMSSKLDNVCYDIRGPVLKHAKRMEEEGHKILKLNIGNPAPFGFDAPDEILVDVIRNLPTSQGYCDSKGIYSARKAVVQHYQRKGIRSLDVEDVYVGNGVSELIVMAMQALLNNGDEMLIPAPDYPLWTASVALSGGNPVHYLCDEQSDWYPDLDDIKKKITPKTRGIVLINPNNPTGAVYSRDFLLEVIEIARQHKLIIFADEIYDKVLYDGATHTSVATLTEDVLVMTFNGLSKAYRVCGFRGGWMFLTGPKHLAQGYVNGLELLSSMRLCANVPMQHAIQTALGGYQSINELILPGGRLLEQRNRAFELINQIPGVSCVKPKGAMYLFPKIDTKMYNIKNDQQMVLDFLKQEKVLLVQGSGFNWPKPDHFRIVTLPHVEDLETAIGRFERFLSTYSQ

SEQ ID NO: 24002 - protein, 79 aa, Vibrio parahaemolyticus RIMD 2210633
MHEGCISMATGTVKWFNNAKGFGFICSDEEEGDIFAHYSTIQMDGYRTLKAGQQVSYEIEKGPKGCHASSVVPIEAQAK

SEQ ID NO: 24003 - protein, 374 aa, Vibrio parahaemolyticus RIMD 2210633
MIIGVPKEIKNHEYRVGMIPASVRELISHGHQVLVETNAGAGIGFSDDDYIAVGASILPHAADVFAQADMIVKVKEPQAVERAMLREGQILFTYLHLAPDFPQTDELIKSKAVCIAYETVTDNMGRLPLLAPMSEVAGRMSIQAGAQTLEKSHGGRGLLLGGVPGVEPAKVVIVGGGVVGANAARMAVGLRADVTILDRNVDTLRKLDEEFQGQAKVIYSTEDAIEKHVLEADLVIGAVLIPGAAAPKLVTKEHIAKMKPGAAIVDVAIDQGGCFETSHATTHAEPTYVVDDVVHYCVANMPGAVARTSTFALNNATLPYIVKLANKGYQQALLEDKGFLEGLNVIHGKVTCKEVAESFDLDYVDPEQAIAMFN

SEQ ID NO: 24004 - protein, 357 aa, Vibrio parahaemolyticus RIMD 2210633
MSKQQKILFIDRDGTLIVEPPIDFQVDRLDKLKLEPFVIPSLLSLQDAGYRLVMVTNQDGLGTDSYPQEDFDAPHNMMMEIFESQGVKFDDVLICPHFEEDNCSCRKPKLGMVKEYLQGGKVDFQNSVVIGDRQTDLQLAENMAIRGIQYNPETMGWKQILKDLTVKARVAEVIRTTKETDIKVAVNLDEQGGNDISTGLGFFDHMLDQIATHGGFQMVCKVDGDLHIDDHHTIEDTALALGQALKEALGDKRGIGRFGFSLPMDECLAQCALDLSGRPYLKFDAKFSRDQVGDLSTEMVVHFFRSLTDTLACTLHLSSAGDNDHHIIESLFKAFGRTLRQAIKVEGTELPSSKGVL

SEQ ID NO: 24005 - protein, 286 aa, Vibrio parahaemolyticus RIMD 2210633
MNFNQFDSLLPPQAAERAAEVGVGKATKAPIKSFLLAISAGLHIGIAFIFYTTVTTGAGDLPWGITRLIGGLAFSLGLILVVVTGGELFTSSVLTLVARASGKISWKTLVKNWFVVYFGNMVGAILLVACMLVTKQYMFDHGQVGLNAMAISQHKLHHGFFAAVALGIMCNVLVCIAVWMTFSGRTLTDKIAVMILPVAMFVSAGFEHCIANMFQVPMAIGIKYFAPEAFWQMTGADIANYADLNMMGFIVNNLIPVTIGNIIGGGVFVGMWYWMIYLRDEDKHLR

SEQ ID NO: 24006 - protein, 351 aa, Vibrio parahaemolyticus RIMD 2210633
MFFEWQGNQPVTLRCIDKYFETHDTVSIKLAELTESLLFQFKPGQFINLGVEIDGKMEFRAYSISSINEDDHLQLTIKRVSGGKVSNYIVDSLLLGDTVQALPPAGEFNCIDHPPVLRDGETRALLISAGCGVTPVFSMAKHWLSNQDENDNDVDIAFLHIARSPEETIYYDQLETFDAVYPNFHLKLLLKNREGTSHPQGRLNADWLKELVPDFKQRTVYLCGPSQFMQDVHGYLNDLGFDMTNFYQESFTPATGAETSVSDEVVHVSVPDFAQTIDAQKGQVLADVLEGAGLPLIVACRSGICGSCKCKVRQGSVSSTSLETLTPEEIEQGYVLACSSTIEADLEVQIG

SEQ ID NO: 24007 - protein, 890 aa, Vibrio parahaemolyticus RIMD 2210633
MININLSSLIQRLHPIAKVALEDAAALAVSEKANEVQIEHYLLSLLERPNSDFDVLLSHFDCSENLLRQSVRSTLDTNAKGNGSKPVFSALLIEWLQESWLVSSLDLSETQIRSGALLLTLVSNPLRYGQHGYASILEAVNPDSLKRNFAELTSHSIEAQVATSEKTQAREDGSALSKFTTDFTGKARKGEIDPVFCRDQEIRQIVDILARRRKNNPIAVGEPGVGKTAVVEGLALKIVQGDVPDNLKGVELYGLDMGLLQAGASVKGEFEKRLNAVLDEVKNSPTPIILFIDEAHTLVGGGNQAGGSDAANLLKPALARGEVKTIAATTWSEYKKYFEKDPALARRFQLVKLDEPSPEQAALIIRGLRPAYEKSHNVYVRDDAITAAAALSARYISGRQLPDKAIDVLDTACARVNISLNAIPASVETLQQELAAQQRELEALERDALQQTGDKHSLANIPDLKLAMETTKEELAEQEVQWHKEKEQIQEMIALRSRLHELVFGKVNEEELVVDEDSEQDVSPYTEMDEEAVRIAISACQEQLDAIRNGNPLVHFEVGPDEVSHVISDWTGIPMGKMLQDEAETTLKLKESLTQSIKGQEYAIDALSEGIQTAKAGLGNPDAPTGVFLLVGPSGVGKTETARAIADQMFGGERFMTTINMSEFQEKHTVSRLIGSPPGYVGYGEGGMLTEAVRQRPYSVVLLDEVEKADPEVLNLFYQVFDKGTLNDGEGRTIDFKNTLIIMTSNLATHEIESLVHQSKEIDANIIAEAIRPTLNQHFKPALLARMSVLPFVPLSDEAMTEIIHHKLNKVSQRLHSHHKLSLSYEESLVEFVLGNCRLAETGARNIDAVINRQLLPQLSTQLLVHDKDDSHTQITVSVDEQGTLTYAFS

SEQ ID NO: 24008 - protein, 562 aa, Vibrio parahaemolyticus RIMD 2210633
MIKFASFLKFRVQINGGRYWSSSPLRSVSNYVKFVFMDNAFKKYSIDTTDYQVGQDNVQKWGFDIHNPVFGISAGLVVFCLISLLLVEPVTARDALNGIKNGIIEQFDAFFMWSTNFFLLFAVGLLFSPLGKIRLGGKEATPDHSTVSWLSMLFAAGMGIGLLFWSVAEPTAYFTDWWGTPLNAEAYSADAKSLAMGATMFHWGVHGWSIYALVALALAFFAFNKGLPLSLRAAFYPIFGDRAWGWLGHVIDILAVLSTLFGLATSLGLGAQQATSGINHVFGLNGGIGTQMVVIAFVTFIAVLSVVRGIDGGVKLLSNVNMIVAFALLIFITFITFDTAMGSLVDTTMAYIQNIIPLSNPHGREDETWMHGWTVFYWAWWVSWSPFVGMFIARVSKGRTVREFLFAVIVIPTLVTLVWMSVFGGIALDQVVNKVGELGANGLTDISLTLFHVYDVLPYSSVISILSIVLILVFFITSSDSGSLVIDSITAGGKIDAPVPQRIFWACIEGSIAAVMLWVGGKEALQALQSGVVATGLPFTFVLLLMCVSLVKGLRTELSAYR

SEQ ID NO: 24009 - protein, 427 aa, Vibrio parahaemolyticus RIMD 2210633
MVMTLTLMHRMSALQITEINIMSVTADQVHGVVQALTQSSDTLFLLLGAIMVFLMHAGFAFLEVGTVRQKNQVNALVKIIADFGISAIAYFFIGYWVAYGGTFFSDAQTLSQDNGYELVKFFFLLTFAAAIPAIVSGGIAERARFYPILIATFFTVGVVYPLFEGMIWNGNFGVQAWFESTFGYGFHDFAGSVVVHGVGGWIALVAVTFLGMRRGRIRAGKHTNFAPSNIPFLALGAWILCVGWFGFNVMSAQTLSGISGLVAMNSLMAMVGGIVASLLAGKNDPGFIHNGPLAGLVAVCAGSDLMHPLGALVTGAVAGVLFVYLFTYLQNRTKIDDVLGVWPLHGVCGAWGGIAAGVFGQSGFGGMGGVSFAVQVLGTFFGISIAVLGALVVYGAINALTGLRLSEEDEFNGADLAIHKISSTNED

SEQ ID NO: 24010 - protein, 553 aa, Vibrio parahaemolyticus RIMD 2210633
MSTDNNGGIKRPDGKVNAIDTDYQIGQDNVALKVGPFGLDIHNRVFAISGMAIVLFVVATLTFRQQVEPFFAGLRAWLVSNLDWFFLASGNVFVIVCLVLIVTPLGRVRIGGTEATPDYSYAGWLAMLFAAGMGIGLVFFGVSEPMSHFSSALGGVNIENGVRTDWAPLGGAVGDTDAASALGMAATIYHWALHPWSIYALLALGLAIFSFNKGLPLTMRSIFYPLFGERVWGWVGHIIDILAVVATVFGLATSLGYGASQAATGLNFLFGVPMTDTTQVVLIVVITALALISVVAGLDSGVKRLSEINMILAAMLLFFVIIVGPTMAILTGFFDNIASYITNIPALSMPFEREDVNYSQGWTAFYWAWWISWSPFVGMFIARVSRGRSVREFIICVILIPSTVCVLWMTAFGGTAISQYVNDGYEAVFNAELPLKLFAMLDVMPFAEITSVVGIILVVVFFITSSDSGSLVIDTIAAGGKVDAPTPQRVFWCTFEGLVAIALMLGGGLAAAQAMAVTTGLPFTIVLLVATVSLIKGLMDEPRLSTKAVKKDK

SEQ ID NO: 24011 - protein, 199 aa, Vibrio parahaemolyticus RIMD 2210633
MVIDKTKLLQNFQFHLPTGYHKESLARLNFMKGKPLRDAAVLIGFVDRPEGLQVILTKRAEHLRHHPGQISFPGGKFEPEDIHLVNTALRETNEEVGIEDKHIHVFGQLPKLPTISQFNVTPFLAFISPDYKTHIDPNEVESVFEVPANHILNPNKLYSSKFELKRSSHRVFAIPYRQHFIWGMTAQIIESMQKHIISG

SEQ ID NO: 24012 - protein, 70 aa, Vibrio parahaemolyticus RIMD 2210633
MSNKSTGSVKWFNETKGFGFISPENGGEDLFVHFQSIVSTGFKTLSEGQKVSYVVEQGKKGLQAGEVTVM

SEQ ID NO: 24013 - protein, 523 aa, Vibrio parahaemolyticus RIMD 2210633
MTKGIDKYSIDSTDYTVGQDNVQKWGFDVHNPVFGISAGFIALFLVAALVLDAHTAKTALDGLKWKIIGSFDWLFIIAGNIFVIFCLALIVSPLGKIRLGGKDAVADYSFMSWLAMLFAAGMGIGLMFWSVAEPVAYFTGWYETPLGVEANSPEAARLALGATMFHWGLHPWAIYGVVALSLAFFTYNKGLPLSMRSIFYPLLGDRAWGWAGHIVDILAVLATLFGLATSLGLGAQQAASGIHHVFGVEPGLGLQIVVITVVTLLAVVSVVRGIDGGVKVISNINMVVAFLLLILVGLIGWAASLGSIPTTLMAYVENIIPLSNPFGRTDEAWFQGWTVFYWAWWISWSPFVGMFIARVSRGRTVREFITAVLIVPTVVTVVWMSVFGGLAIDQVVNKVGELGANGLTDVSLAMFQMFDVLPFGNILSIIAVVLVLVFFITSSDSGSLVIDSITAGGKVDAPVLQRVFWAFMEGAIAVALLWIGGSEAVQALQAGAISTALPFTFILLAMCVSLLMGMKTERQ

SEQ ID NO: 24014 - protein, 398 aa, Vibrio parahaemolyticus RIMD 2210633
MSKLVLVLNCGSSSLKFAVVDAENGEEHLSGLAECLHLPEARIKWKLDGKHEAQLGNGAAHEEALAFMVETILASKPELSENLAAIGHRVVHGGEQFTQSALITDDVLKGIEDCATLAPLHNPAHIIGIKAAQKSFPALKNVAVFDTAFHQTMPEESYLYALPYNLYKEHGIRRYGMHGTSHLFITREVAGLLNKPVEEVNIINCHLGNGASVCAVKNGQSVDTSMGLTPLEGLVMGTRCGDIDPAIIFHLHDTLGYSVEKINTMLTKESGLQGLTEVTSDCRFVEDNYGEKEEATRAMDVFCHRLAKYVAGYTATLDGRLDAITFTGGIGENSAPIREMVLNRLGIFGIEVDSEANLKARFGGEGVITTENSRIPAMVISTNEELVIAEDTARLAGL

SEQ ID NO: 24015 - protein, 714 aa, Vibrio parahaemolyticus RIMD 2210633
MSRTIMLIPASAGVGLTSVSMGVLRAMERKGVKVSFYKPISQPRSGGDQPDLTSTIVGHNSDMKIGEPMAMSVAESLIGNDNMDELLETVVERYNQINKDADVTLIEGLVPTRKHPFANQVNAEIAATLGAEIVLVATPGTDNPAQLKERIEVACSNFGGTKNKNISGVIINKLNAPVDEAGRTRPDLSEIFDDADSAKQNEMKVMEIFNTSPIRVLGCVPWSIDLIATRAIDMAKHLKADIINEGDINTRRIKSITFCARSLPNMIEHFKPGSLLVTSADRPDVIVAASLAAMNGVDIGAVLLTGGYDIPREIEGLCKPAFETGLPIFKAQGNTWQTSLNLQSFSIEVPADDKERIEFINEHVAGHIDGNWIESMTEGTQKSRRLSPPAFRYQLTELARKAGKRIVLPEGDEPRTVKAAAICAERGIAECVLLGNPAEIKRVAAQQGVELGAGVQIIDADAIRENYVARLVELRGAKGMTEVVAREKLQDSVFLGTMMLENNEVDGLVSGAVHTTANTIVPPFQIIKTAPNASIVSSVFFMLLPDQVLVYGDCAINPDPTAEQLAEIAIQSADSAAAFGIEPRVAMISYSTGESGKGADVDKVREATKLAQEKRPDLIIDGPLQYDAAIMENVAASKAPNSPVAGKATVFVFPDLNTGNTTYKAVQRSADLVSIGPMLQGMRKPVNDLSRGALVDDIVYTIALTAIQATQEQK

SEQ ID NO: 24016 - protein, 111 aa, Vibrio parahaemolyticus RIMD 2210633
METIDKIKQQISENSILLYMKGSPKLPSCGFSSQASQALMACGEKFAYVDILQNPDIRAELPKYAQWPTFPQLWVEGELIGGCDIILEMFQKGELQPLIKEAAARAEGQAE

SEQ ID NO: 24017 - protein, 591 aa, Vibrio parahaemolyticus RIMD 2210633
MENLLARLLFAQWFPGLIQLKNYQKEWLVNDFRAAFSVVAVALPVAIAYAQLTGVSAIVGLYSCVLPMLVYALMGTSRQLIVGPDAATCAVIAAVVTPIAAGDPTKHWQLVMTMTAMTGIWCVLASRFKLGIFADFLSRPILLGLLNGVALTIIVGQFAKVVGLKYEQRYLLERLWEAPQRLAELHWPTVALSVATVVVYLVTKRYRPTWPAAMLAILVTTASVWLLHLQEMDVAVVGLTQGGFPQFQAPQFELGEVRELVVPALNLAIVSFVSMMLTARSFAAKNGYDIDANKEFQALGFANIASAFSQGFAISGADSRTAVNDANGGKSQLVSIVAAITIAIIAVFIYEPLQFIPIASLGVVLIIASLSLLDLKAIWILKTRDKDAFYLAIITFISVLVIGVIPGITLAVLLGLFQFLRIVMRPSDQLLGLDEKGTIRTIDETGKASPIPGMVIYRFNSPLTYFNAPYFKRRLLEHAEQNKDVSCVVVDAVSSFTHLDLSVMATLADIHEVLKKRGIRLVLAGRKRRLRQWCELTGISTSEGGILLRADMYLAIKLSGSYLSAVGEGIVPTVQKEPDLEQPPKPIPEVA

SEQ ID NO: 24018 - protein, 407 aa, Vibrio parahaemolyticus RIMD 2210633
MDIILGVVMFTLIVLALVLVILFAKSKLVPTGDITISVNGDADKAIVTQPGGKLLSALAGAGVFVSSACGGGGSCGQCRVKVKSGGGDILPTELDHITKGEAREGERLACQVAVKTDMDIELPEEIFGVKKWECTVISNDNKATFIKELKLQIPDGESVPFRAGGYIQIEAPAHHVKYADYDIPQEYREDWEKFNLFRYESKVNEETIRAYSMANYPEEHGIIMLNVRIATPPPNNPDVPPGIMSSYIWSLKEGDKCTISGPFGEFFAKDTDAEMVFIGGGAGMAPMRSHIFDQLKRLHSKRKMSFWYGARSKREMFYVEDFDGLAAENDNFVWHCALSDPLPEDNWDGYTGFIHNVLYENYLRDHEAPEDCEYYMCGPPMMNAAVIGMLKDLGVEDENILLDDFGG

SEQ ID NO: 24019 - protein, 409 aa, Vibrio parahaemolyticus RIMD 2210633
MELATTVTELRYALDTFFFLISGALVMWMAAGFAMLEAGLVRSKNTTEILTKNFCLYAIACTTYLVIGYNIMYVDNGEGGWLPSFGGLIGTQGEGADHSLESDFFFQVVFVATAMSVVSGAVAERMKLWSFLLFSAVLTAFIYPMEGYWTWGGGFLSEAGFSDFAGSGIVHMAGASAALAGVLLLGARKGKYGKNGEIYPIPGSNMPLATLGTFILWFGWFGFNGGSQLMVSDFENATAVGQIFLNTNAAAAAGSIAALFVCKTTWGKADLTMILNGALAGLVAITADPLSPSPLYAVAIGAVSGALVVFSIIGLDKLKIDDPVGAISVHGVCGFFGLMVVPLSNGEATFGAQLLGAAVIFAWVFGASLVVWAILKATVGIRVTEEEEMEGMDMHDCGVGAYPEFVTVK

SEQ ID NO: 24020 - protein, 320 aa, Vibrio parahaemolyticus RIMD 2210633
MADNEFDIDAFFASHGEVSSPENQHCGFIAIVGRPNVGKSTLLNKILGQKISITSRKPQTTRHRIMGVDTDGDYQAIYVDTPGLHIEEKRAINRLMNRAANSSLSDVNLVFFLVDGTHWTKDDEMVLTKLQKSNFPVVLCVNKVDNVQDRNEVMLHMAEMSKKMDFVDVVPISAKQGKNIDVLRKHVRNHLPKATHHFPEEYVTDRSQRFMASEIVREKLMRFTGDELPYSVTVEIERFDYNPETDGFHINALILVERNGQKKMVIGKGGEKIKTIGREARLDMEELFGRKVYLETWVKVKSGWADDERALRSLGYIDDL

SEQ ID NO: 24021 - protein, 410 aa, Vibrio parahaemolyticus RIMD 2210633
MAKVSLEKEKIKILLLEGLHPSSVEVLQAAGYTNIEYHKGSLSEEELIEAVKDTHFIGIRSRTNLSEEVINAANKLVAIGCFCIGTNQVDLGAAAKRGIPVFNAPFSNTRSVAELVLGQILLLLRGIPEKNALAHRGIWKKSADNSYEARGKRLGIIGYGHIGTQLGIIAENLGMRVYYYDIENKLSLGNATQIHTMSELLNKCDVISLHVPETPETKNMMGEEEFARMKPGAIFINAARGTVVDIPALCHSLEAGHLAGAAIDVFPVEPKTNADPFESPLQKFDNVILTPHVGGSTQEAQENIGVEVAGKLAKYSDNGSTLSSVNFPEVSLPEHGRECSRLLHIHKNRPGILTQINTIFAEEGINIAAQYLQTEAEIGYVVIDVETERSEEALTKLKSIEGTIRARILH

SEQ ID NO: 24022 - protein, 323 aa, Vibrio parahaemolyticus RIMD 2210633
MSNPFDFRTAAKQVLDIEVAALQELDKYFDEQFEQACELILSNSGKVVVMGMGKSGHIGNKIAATLASTGTSAFFVHPGEAAHGDLGMISAGDIVIAISNSGESHEILSLFPVLKRLNIKIISMTGKPESNMAKLADLHLQITVPQEACPLGLAPTSSTTATLVMGDALAVALLQARGFSAEDFALSHPGGALGRKLLLKLSDIMHFGNALPKVSPDALIRDALLEISEKGLGMTAIVDEHDAMLGIFTDGDLRRTLDKRIDIHTTAIGEVMTKNPTTAHPEMLAVEGLNLMQNKNINALILCKEDKIVGALNMHDLLKAGVM

SEQ ID NO: 24023 - protein, 320 aa, Vibrio parahaemolyticus RIMD 2210633
MSLPKVVFLDRATIPNHIQVPRPEFPHHWMEYALTPPEFVVERLADADIVISNKVVLDQSVLSQLPQLKMIAVAATGFNNVDVNYCAEHGIAVANVRGYATRSVPEHVIAMLFALRRNLFGYHQDIAAGEWQRNKQFCFFTHSIGDVGGSTLGVVGSGALGQATANLAQALGMTVLFAERKGAAECRPGYVPFEEVLKHSDALTLHCPLNEHTQNLIGKAELQQMKPNAILINTGRGGLVDEQALVDALKQGEIAAAGFDVFTQEPADESNPLIANIHLPNLLLTPHVAWGSDSSIQRLADILIENINAFQRGDLLNRLA

SEQ ID NO: 24024 - protein, 450 aa, Vibrio parahaemolyticus RIMD 2210633
MSAFNVAKFGGTSVANFEAMSRCATIIENNPNTRLVVSSACSGVTNILVELANGVQDQEHRAELLKNLAEIHDSILAQLEDATEASSEVYGILDTVTSLAEAASIQANTKLTDHLVACGELMSTHILAQLMRERGINAVRFDIREVLRTDDNFGRAEPNVEAIAQLAQEKLIPLCLDSVVITQGFIGSDEEGNTTTLGRGGSDYSAALIAEGVKASGLEIWTDVPGIYTTDPRIAPKASPIPEISFSEASEMANFGAKILHPSTLVPALRHDIPVFVGSSKEPEKGGTWIRHQVESSPLFRALALRCNQTMVTLRSANMFHAYGFLAKVFEILAKHKISVDLITTSEISVSLTLDQTDTSGGAPQLPQAAREELEELCKVEVEHDLCLVALIGNKMSERKGYAKQVFGTLEDLNLRMICYGASPHNLCFLVNESVAKQAIQKLHTELFEQ

SEQ ID NO: 24025 - protein, 279 aa, Vibrio parahaemolyticus RIMD 2210633
MKKQRAFLKWAGGKYGLVEDIQRHLPPARKLVEPFVGAGSVFLNTDYDHYLLADINPDLINLYNLLKERPEEYISEAKRWFVAENNRKEAYLSIRAEFNKTDDVMYRSLAFLYMNRFGFNGLCRYNKKGGFNVPFGSYKKPYFPEAELEFFAEKAKKATFVCEGYPETFRRARKGSVVYCDPPYAPLSNTANFTSYAGNGFTLDDQAALADMAERTATERGIPVLISNHDTTLTRRLYHGADLSVVKVKRTISRNGSGRNKVDELLALFKAPESDSAAS

SEQ ID NO: 24026 - protein, 404 aa, Vibrio parahaemolyticus RIMD 2210633
MSKVNVNKVVVAYSGGLDTSVIIPWLKENYDCEVVAFVADVGQGAEELEGIEAKAKASGASECYIADLKEEMVADYIYPTLKTGAYYEGKYLLGTSMARPIIAKAQVEVARKVGADALCHGCTGKGNDQVRFEGAFAALAPDLHVIAPWREWDLVSREQCLDYLAERNIPCSASLTKIYSRDANAWHISTEGGVLENTWNAPNEDCWVWTVDPEQAPNEAEYVTLKVEKGEVVAVDGEAMTPYNALVYLNEKGAKHGVGRIDIVENRLVGMKSRGCYETPGGTIMMEALRAVEQLVLDKSSFEFREELGLKASHLVYDGRWFTPLCKSILAASEELAQDVNGEVVVKLYKGQATVTQKRSDNSLYSEEFATFGEDEVYDQSHAGGFIRLYSLSSRIRALNSQKK

SEQ ID NO: 24027 - protein, 802 aa, Vibrio parahaemolyticus RIMD 2210633
MSVQRQLHKFGGSSLANPECYLRVADILKEYSAENDLVVVSAAGKTTNRLIEFLEGLDKDGRIAHEALQGLRQFQSELIESLLEGEVQTQLLASLHDEFSTLAELTAPLTDAQKAAVLGHGEVWSSRLLAALLSQQNVPAVAQDARAFLRAEAGTQPEVDRARSYPLIKEALAQHSHKRVIITGFMAQNEAGETVLLGRNGSDYSATVIGALAEVTTVTIWSDVAGVYSADPRLVSDACLLPLLRLDEASELARLAAPVLHSRTLQPVAQSTMDLSLKCSYQPESGSTRIERVLASGRGAKIITSLDEVLLIQLSFRHGHDFNKTQSDVLKSLQRAQLEPLSYEVQADQQKLRLAYTAEIATGALKYLQDLAVEAEIKLKEGYSLVAAVGAGVTKNANHCFGFYQKLKHAPVEFVSETESGLSLVAVLRRTDTEALVQLIHSQLFQAQKRVAVTLCGKGNIGSSWLNLFAIQKTELEKRHGMSFDLVAVVDSQTYWFDEKGIDAAAVADKFDDESIENDGTWLSRLGDLQGYDEAVVLDVTASKELAQRYVDIAQQGIHLISANKVAGSADSQYYHQVQDAFAKIGRYWLYNATVGAGLPINHTVRDLRESGDEIVALSGIFSGTLSWLFQQFDGSVPFNELVDLAWQQGLTEPDPRADLDGSDVMRKLVILARESGLDIEPDSVKVESLVPEELRSLSLDEFFDNGALLSEILQERLTKAQRDEQVLRYVARLEKNGKATVGVEALPREHALANLLPCDNIFAIESKWYKDNPLVIRGPGAGREVTAGAIQSDLNRLAGLF

SEQ ID NO: 24028 - protein, 394 aa, Vibrio parahaemolyticus RIMD 2210633
MLSNQTIEIVKATAPLIAETGPKLTAHFYDRMFTHNPELKDIFNMSNQRNGDQREALFNAICAYAANIENLPALLGAVEKIAHKHTSFLITKDQYQIVGKHLIATIDELFNPGQEVLDAWAEAYGVLANVFIQREEQIYQANASQEGGWRGLREFELVGKQLESEHICSFVFKPTDGSKVTKYKPGQYLGIYINSDKFENQEIRQYSLSSSVQENTYRISVKREQGGKVSNYLHDELNIGDKVKLAAPAGDFFMDVDTNTPVVLISAGVGLTPTLSMLESLTEHHAPVTWVHATENSKHHAFKEHVNQLVTAKENMNALIWYNQPTAEDKIGEDFHFTGFVNLHEIEAALKQDNVQVYFCGPVGFMQHVAKQLQELGVPQEQFHYECFGPHKVV

SEQ ID NO: 24029 - protein, 411 aa, Vibrio parahaemolyticus RIMD 2210633
MNHLISVGALESFLVAISVLFLGHFINAKLPILKKFNIPEPIVGGLIVACIITALHFNGVDLEFDLPLQNTFMLMFFATVGLAANYTQLMKGGAKVFIFLAVASFYIIIQNGVGVSLAAALGLDPLMGLIAGSITLSGGHGTGAAWSQTFQDVYGLNNVLEIAMASATFGLIIGGIIGSPVAQRLVEKHGIESEYGRGGRDAKTHEKFPELVTYNEYEEDKVTAKKVVEKLFFLLICVTGAKYVEQWVSTYEISWLMIPDFVYALFIGVIITNFLEVTKIRKLDAETVDMLGTVSLSLFLAMALMSLKLWNIFDLAIPFLVILAIQSVILAIFTYYVTFKVMGSNYDAAVISGGHCGFGLGATPTAVMNMGSIVNRFGPSPQAFMVVPIVGAFFIDIVNLIILQGYISFLG

SEQ ID NO: 24030 - protein, 408 aa, Vibrio parahaemolyticus RIMD 2210633
MNHVISIGPQESFLVAICVLFLGQFINTKLPILKKFNIPEPIVGGLVIACVITAMHFNGVDLSFDLPLQNTFMLMFFATVGLAANYTQLIKGGAKVFIFLAVASAYILIQNAVGVSLATALGLDPLMGLIAGSITLSGGHGTGAAWSQTFQDMYGLHNVLEVAMASATFGLVIGGIIGSPVAQRLIDKNNLESEYGRTNQSHQRFPELVTYNEHEEDRVTAKKVVESLSIILLCVTGAGYLENWVSSFGIKWLMIPDFVYALFIGVVITNIMEVTKVRKVDLETVDILGTVSLSLFLAMALMSLKLWNIFDLAIPFLIILAVQSVILAVFAYYVTFRVMGSNYDAAVISSGHCGFGLGATPTAVMNMGSIVNRFGPSPQAFMVVPIVGAFFIDIVNLVILQGCIAFIK

SEQ ID NO: 24031 - protein, 306 aa, Vibrio parahaemolyticus RIMD 2210633
MNDLFTKTDYSLYSNSMSFLRLPYIRNPVSADADVVVLGVPLDMATSGRPGARMGPDAIRRASVNLAWEGKKFPWDFNVLDKLKVIDAGDLVFDCGDAEDFTYRLEAATSEILKSGKTMLGLGGDHFITLPILRAYAKHHGQMALIHFDAHTDTYANGSSYDHGTMFYHAPKEGLISAKNSVQIGIRTEYKQQDHGFNVINAMQANDMSVNEILEEIRRTVADKPVYVTFDIDCLDPAFAPGTGTPVCGGLNSDKALKIIRGLAGMNIVGMDVVEVSPPYDHSDVTALAGATIALEMLYAYASGRE

SEQ ID NO: 24032 - protein, 539 aa, Vibrio parahaemolyticus RIMD 2210633
MHGFRALKSEVIMSNMTNAAPHTPIQEADYSAIHPPSLLKRLELTNPVFWLSGSFLSLFVLLALTNTESLTAMVNAGFGFATKYFGAYWQVLLLLNFLIGLALAFGRTGYVRLGGLAKPDIDTFKWLSIVLCTLLAGGGVFWAAAEPIAHFVTAPPLYGEASPKTSAINALSQSFMHWGFLAWAILGCLSSIVLMHLHYDKGLPLKPRTLLYPIFGDKAIHGWIGNLADACSIIAVAAGTIGPIGFLGLQISYALNSLFGFPDNFITQSMVIVAAIVMYTLSALSGVSKGIQLVSRYNIILSVLLIGYILFFGPTSFIIDGYVQGVGRMVDNFFPMALYRDDTGWLSWWTVFFWGWFIGYGPMMAIFIARISRGRTIRQLILSISIAAPLITCFWFSIVGGSGLAFELANPGLISSAFEGFNLPAVLLAITGELPFPMIISVLFLILTTTFIVTTGDSMTYTISVVMTGSAEPNAVIRSFWGLMMGVVAIALISMGSGGITALQSFIVITAVPVSFILLPSILKAPGIANQMAKDQGLV

SEQ ID NO: 24033 - protein, 605 aa, Vibrio parahaemolyticus RIMD 2210633
MSQPVLSQINVFPVKSVGGVSLSSAWVEKQGLSFDRRFMIAKADGSMITARKYPQMVTVKSALLADGVVFSSLGMEPLKIRYQDFKMQETPATVWKDAFTAYTTTDDADDWFSQVLGQRVELLFSGEQSNRVRESLGQNVSFADGYPVLVISQASLEELNKRSSEQHSMDQFRTNLVVSDTKPFEEDSWKRIRIGEVEFESLKPCERCILTTINTQRGTFRESKEPLKTLQQFRANERGGVFFGQNLVARNEGIIRQGDKVEVLEYKEPEFYPDNSPVRMTLTCVEREEIAQDFVTLWLEPSNCSLPNYLPGQHLPIEVDINGKKIGRRYTLSSSPSRPGRYAISVKRIAGGRVSNALLDNLQVGDVLEAENPDGQFHLKTHDAQPLLLLSAGSGVTPMLSMVRYLADHNQLNDVVFYHQCRTEHDIPCRSELEQLKREHSGLEVKICLTQPAVDWFGLKGRLSLSHIKQIKDVEQRQVFVCGPDGFMQKAKNLLLKKGLPEAHYHQEAFGVSAVEARPEKEVEIEFNGLKIQGNNQKTLLDQIEDAGKVVSNSCRAGLCGACKVQLTSGQVHHPDVPALTDEERAMGTVLACCAIPETDVTVTE

SEQ ID NO: 24034 - protein, 69 aa, Vibrio parahaemolyticus RIMD 2210633
MSNTATGTVKWFNETKGFGFIQQENGPDVFAHFSAITGDGFRTLVEGQKVEFVISQGQKGPQAEQIKVL

SEQ ID NO: 24035 - protein, 643 aa, Vibrio parahaemolyticus RIMD 2210633
MQDSVIQFSDLSLNDSILSALDGMGFVSPTPIQAAAIPHLLEGADALGKAQTGTGKTAAFSLPLLNKLDLDQRKPQAIVLAPTRELAIQVAAEMKNLGKNIKGLKVLEIYGGASIVDQMRALKNGAHVVVGTPGRVQDLINRERLHLDEVNTFVLDEADEMLNMGFVDDVTAIMEHAPESAQRVLFSATMPPMLKNIVERFLRDPVTVDVAGKNHTVDKVQQQFWVVKGVEKDEAMSRLLETEETDASIVFVRTRQDTERLADWLSARGFKAAALHGDIPQSLRERTVDHIKQGVIDILVATDVVARGLDVPRITHVFNYDIPFDVESYIHRIGRTGRAGRKGKAILLVRTNQIRMLRTIERVTKSSMEEIQLPLRDQVAEARLNKLAAELEAEKEHKALDKFAELVEKLQTSLEIDPAMLAAMLLKRQQGKRPLFYIGEDPMVEAIERDKQRRKERREGGREGGRSFNNQDWDTYQLQVGREQGVQVKDIVGALANELGLGKGSIGAIKLAQGHTFVQLPKAMTSEAASKLSKLRIRQQDVGAVVCDFDDFRESRGGRRDGGRRDGGRREGGFRGNREGGNRGGERREGGRREGGFRGNRDGNREGNREGGERRFDRNRGGDHRGNYRGERGHGRGRRTQDA

SEQ ID NO: 24036 - protein, 397 aa, Vibrio parahaemolyticus RIMD 2210633
MSNSFVLVINSGSSSLKFAVIDSVSGDAVLSGLGECFGLSDARMSWKFNGEKKEISIEGDDSHHKIAIGKLVGLTEELGLAQDIVAVGHRIVHGGEKFTKTVRITEEVTQEIEKLADLAPLHNPAGAIGIRAAVEAFPSLPQFAVFDTAFHQTMPQRAFTGAIAKELYTDFGIRRYGFHGTSHYFVSREAAKMINKPIEESSFISVHLGNGASVCAINNGESVDTSMGFTPLSGLMMGTRCGDLDPGIIEYLLKKGWSQEKVFNSLNKASGFLGVSGLTSDARGILEAMEEGHEGAALAFQVFTYRVSKYIASYLAALDSFDGIIFTGGIGENSMPIRREILKNLKLLGFVEDVKGNEDARFGNAGVIATSELLGAKALVIPTNEEWVIAQQSVELL

SEQ ID NO: 24037 - protein, 408 aa, Vibrio parahaemolyticus RIMD 2210633
MGNDIWIVSAKRTPIGCFQGLLQPYSAPQLGAFAIQAAMKSLGENVLSETVIDEVLMGCVLPAGCGQAPARQAALGAGLPPSTGCTTINKVCGSGMKSIMLAHDLIKAGTIRTAVAGGMESMTNAPYLLKEARNGMRLGHHSTYDHMFLDGLQDAYEGHLMGVYAQQIANRLKFSREKMDEWATMSAKRALEAQERGLFDDEIAPIDIRTKTATTHLDYDEHPRSIDLEKIPQLKPAFDKNGSVTAANSSAISDGAAALILMDEETARHQNLTPLAIIKSHATHARKPDEFTLAPVYAIEQLLSQLDWSIDEIDLWEINEAFAVVTQIAVAELGLDSSKVNIKGGACALGHPIGASGARILVTLIHSLRQLQALGIDGDASNKKVMRGVASLCIGGGEATAIGIEIPL

SEQ ID NO: 24038 - protein, 586 aa, Vibrio parahaemolyticus RIMD 2210633
MSRKNNKNLSILLKLNTFIAPYKWRVAAALVALVATASLTLSVGYGVRILIDQGFAQQSLQELTNAIQFIVGVTLCIAIGTFFRFYLVSSVGERVSADIRLAVFNHVITLHPSYFETNSSGDIMSRLTTDTTLLQSIIGSSFSMAMRSALMCFGAIIMLFATNVKLTLIVLASVPLVLVPILFYGRRVRALSRQSQDSMSDVGSYAGEAIEHIKTVQSFSSEPYERAAFAVEVEKAYEVGRQRVKQRAILISGVIVIVFSAIAGMLWIGGSDVIHGKMSAGDLAAFVFYAIMVASSTATISEVMGELQRAAGATERLIEILQVESDIKAPSNHLPVRSDMSAEVSFKSVNFNYPSRPNQPAVKGLNLTAEQGKVLALAGPSGAGKTTLFELLQRFYDPQQGQVLFGGEDIRQFDPNELRRQMALVPQQPALFSHDVFHNIRYGNPEATDEQVIEAAKKAHAHEFIEKLPEGYYSFLGERGVRLSGGQKQRIAIARAILKDPKILLLDEATSALDSESEHHVQQALEALMKGRTTLIIAHRLSTIQHADKIAVLDNGELVDVGNHQSLMQSCELYQRLVALQFKHLE

SEQ ID NO: 24039 - protein, 273 aa, Vibrio parahaemolyticus RIMD 2210633
MKLFKATITALLGLAIAMPTLAKEEAATTPNIDQIKERGTLRVGMSTFVPWAMRNKQGELIGFEIDVAKRLAEDSGLKVEFVPTAWDGIIPALLAKKFDVIIGGMSVTPERSKSVLFTEPYSHSGVQVAANKELASGFSEFSDFDSRRVKIAARRGAFTVQVARETFPKAKILQFDDDAQAFQEVLNGNAHAVIASSPKPEHETVKHSDKLFLPFSERLSKGNEAFAVRLGEEDKKAFFNKWIEERTQDGWLKQRYEYWFSTLDWQDQVAQGQ

SEQ ID NO: 24040 - protein, 483 aa, Vibrio parahaemolyticus RIMD 2210633
MAVTSSQTHQDFSPKEMMAEAEKFALSKANKTSSMTLGLAIMAGAFIGLAFLFYITVTTGSANTGWGLSRLAGGIAFSMGLILIVICGGELFTSSVLSSISWANKQISFGKMLSIWGKVYIGNFIGAMFLLALVTAAGLYQMDAGQWGLNALNIAQHKLHHTLLQAFALGVLCNLLVCLAIWLTFSSANAMTKALMTILPVAMFVSSGFEHCVANMFMVPLGIVIANFAPESFWASVGVPASQYADLNVAHFISANLIPVTFGNIVGGAVLVGLANWCIYRRPELKAANVSSITNTTQLSSVKEITMKNASFVKDIMNPKPVTLSVEMPVAAALDTLLDNNLTSAPVVDLHNRLVGFFSAHDVMVELWCQDYIPVKDQKVVDLMSRDVVAIDASDRLVDVVEFLCIDKEQLYPTSSMGIATRLTSLSLEERAKSMKVSKPQVLPVLENGQMVGVVTRQEVLKALRPVFGERLNLVEDKALETA

SEQ ID NO: 24041 - protein, 518 aa, Vibrio parahaemolyticus RIMD 2210633
MQIGVPREILAGESRVAASPKSVEQLIKLGFDVVIESQAGVLASFDDAAYEAAGAKVVSSDEVWASGLILKVNAPIVDEEKGIDEIALLQDGATLVSFIWPAQNAELMEQLSSKNINVLAMDSVPRISRAQALDALSSMANIAGYRAVVEAAHEFGRFFTGQITAAGKVPPAKVLVAGAGVAGLAAIGAAGSLGAIVRAFDVRPEVKEQVESMGAEFLTVDFQEDSGSGDGYAKEMSDDFNKKAAELYAEQAKDVDIIITTALIPGRPAPKLITKEMVDSMKAGSVIVDLAAANGGNCEYTVKDQVIMTDNGVKIVGYTDMVGRLPTQSSQLYATNLVNLLKLLCKEKDGNINIDFEDVVLRGVTVIKEGEITWPAPPIQVSAQPQAKQAQPVKKEPKVEEPTSPTKKLIGLVAAVGAFAWIASVAPAAFLSHFTVFVLACVVGYYVVWNVTHALHTPLMSVTNAISGIIVVGALLQIGQGNGVVSFLSFIAVLIASINIFGGFTVTKRMLEMFRKDK

SEQ ID NO: 24042 - protein, 282 aa, Vibrio parahaemolyticus RIMD 2210633
MSTDFKPAEFVQTMINVGEAKTNTSTRDLLLRGTMAGIILSLAVVVAITAMVQTGIGLVGALVFPVGFVILSVMGYDLVTGVFGLAPLAKFANRPGITWGRIFRCWGLVGLGNLIGSLIVAYLVAISLTGNFSLELNAVAKKFVAVSTARSLGFENMGMDGWITCFVRGIFCNLMVCLGVIGNMTARSVSGRVAMMWFPIFIFFALVFEHTVVNMFLFPLGMILGADFGIATWLNFNLIPTILGNIIGGLVMTCLPLYLTHAKTAPSLSVEQDVIAEPAIAK

SEQ ID NO: 24043 - protein, 568 aa, Vibrio parahaemolyticus RIMD 2210633
MKQKQLIEELKTIVGEENVLTDQVKTKYYRSGFRSGSGTALAVVFPNTLLEQWKIIKQCVEANCIIIMQAAKTGLTEGSAPSGNDYDRDVVVINITKIKKIHLLDGGKQAVCLPGASLHSLEKELRAVNRAPHSIIGSSSLGATVVGGIANNSGGALVKRGPAYTELAIYAQVDKQGNLHLVNHLGIDGLGETPEEILHNLQEGNFDPSKIVHDDRMASDKEYDERVRDVTSDIPSRFNADERRLFEASGCAGKLGVFAVRVDSYPVPSKEQVFYLGTNDANKLTKLRKDFLTQFDNLPEMGEYLHRDIFNMAEKYGKDVFLSIDLLGTDKLPKMFALKAKVENFLERVPFVSKYLPDTILYYASKLFPQHLPERMLEFRDKYEHHLVLKMSDGGIEEAQKYLKEVWAVEDDCDFFECTPDEGKKAYLHRFAAAGAAIRYETIHRNEVEDIVALDIALRRNDEEWLETLPEEVSKNLVQSLYYGHFMCYVFHQDYIFKKGTDTKLMKKLMLEHLNSRGAKYPAEHNVGHLYEAENSLQKFYHELDPTNTFNPGIGKMDKYKRNCNCCA

SEQ ID NO: 24044 - protein, 855 aa, Vibrio parahaemolyticus RIMD 2210633
MASLSLSALVERLSPQAKETLEQAAAMASSRTHHSIELTHWLLTIVQHPSGIYSEVFEAFDIDERKVEEQLQAQLEKYKTGCQTVPGLSAHTVTIMQNALMCATIEFHEEQVNCIHLLFAYLSDDTLVNMMNAISAELDKVEPSRLVVMKEHVGDGGNNTSKATSSSNSALNQFTTDLTEQAKAGKIDPVIGRDNEIRLMIDILLRRRQNNPILTGEAGVGKTAVIEGLAQKIVDGDVPPALHDVAIKSLDLALLQAGAGMKGEFENRLKNLIREVNESSQPIILFIDEAHGLIGGGGQAGQGDAANILKPALARGELRTIAATTWAEYKKYFEKDAALTRRFQVVKVDEPTPELAVDMLRGLVNIMGQHHDVYITSQALNAAVQLSARYINGRQLPDKAVSVLDTACSRVALSQSATPGALDSKKKKLNIKEAEFQQLTKEAQLGVSHDELLNNIRYEIDELSNQVIELEAIWEQEKQWVQEAKSLRARVIEENADCDKERLQEIESNLALNAQPLVFSHVNESLIAEVISDWTGIPLGKLQDDEIEAVLNLKDSLCERVVGQDHALEIMSEVIKTASAQLTDETKPNGVFLLTGPSGVGKTESALAIAEKVYGSEDNVTTINMSEFKEEHKVSLLLGSPPGYVGYGEGGVLTEAVRRKPYSVILLDEMEKAHPGVQDIFYQVFDKGSIKDGEGRDIDFKNTIIIMTANTGTETTMSLYADPDLAPEPEALKEALRDDLLTDFKPAFLGRVNVLPYLPLGKEVLTEITKLKLNKVSNRIRKHYSAGLYFDEQLINDIVDNSNESGSGARVVQTTIENNLLPKISHEILNAILNGKTFDEINVRGSIKELEVSLI

SEQ ID NO: 24045 - protein, 454 aa, Vibrio parahaemolyticus RIMD 2210633
MKWSSMLKVSAISLSVFTAVSAKAQLGEPEIEDLKFGFIKLTDMAPLAVAYEKGFFEDEGLYVTLEAQANWKVLLDRVIDGELDGAHMLAGQPLGATIGVGTKAEVITAFSMDLNGNAITVSNDTWEQMKPHIPKQPDGKPVHPIKADSLKPVVDSYRDKGKSFNMGMVFPVSTHNYELRYWLAAGGIHPGFYAPDSGDNSGQLDADVLLSVTPPPQMPATMEAGTIKGYCVGEPWNQQAVFKGIGTPVVTDYEIWKNNPEKVFGVSKAWAEKNPNTHIRVVKALIRAAHWLDENSNANRQEAVKMLAKSEYVGADADVIANSMTGTFEYEKGDKRDVPDFNVFFRHNATYPYYSDAIWYLTQMRRWGQISSEKSDDWYMDVAKEVYRPDIYQQAAQALIEDGVLSKKDFPDFSAEDGFRPPQTHFIDNIVYDGREPNKYLEKFSIGLKGKDKV

SEQ ID NO: 24046 - protein, 392 aa, Vibrio parahaemolyticus RIMD 2210633
MKNETWIVAAKRTPIGAFQGALASTDVTELGATAIQGALAESQLDADKIDEVLMGCVLPAGVGQAPARQASLKAEMPQSIGCTTLNKVCGSGMKTVMLAYDLIQSGNAHAVIAGGMENMSSSPYLLKKARDGFRLGHEQVLDHMFYDGLQDAYQGELMGVFAEQTAQKYQFSRESMDAWAQQSVTRAQQAIEQGLFKEEIVPVNVKSRRGETLVVDDEQPSKLDVTKIPTLRPAFAKDGGVTAANSSSISDGASAMILVDSEFGRQENLQPLAKIVAYSTHARQPDEFTIAPVFAIETLLEKTGWDKSDVDLWEINEAFAVVTQYAVKVLELDENKVNPRGGACALGHPIGASGNRILVTLIHALKQTGGKRGVASLCIGGGEATAIAIEIC

SEQ ID NO: 24047 - protein, 355 aa, Vibrio parahaemolyticus RIMD 2210633
MAQLSMRPCGDFRTTYKSDTPIFETKTIRSLAIAGVIAMLAAPLVLDIYFLNLFIQIAYLGIAALGLNILVGFTGQISLGHGAFFGFGAFASAWLNNQFNIPVVFAIPLAGYLTMIVGMLFGLPAARIKGLYLAIATLAAQFILEDFFARAEWFSGGSYGASASPINLFGFEFSTDESFFYVALFALIFMYLWASNLIRSRDGRAFVSVRDHYLSAEIMGINLTKYRLLSFGVCAFYAGIGGALYGHYLGFVSAEGFTIMMSIQFLAMIIIGGLGSVKGTLMGTIFIVLLPEVLEFGVTGLAAFSDNTSFIDGLAYFKEMAIGLVIMLFLIFEPQGLSHRWQQIRAYWKHYPFSY

SEQ ID NO: 24048 - protein, 402 aa, Vibrio parahaemolyticus RIMD 2210633
MEKVFIVAAKRTPIGAFGGSLKNTSAGDLAAVAIKGALEAAKLAGDKVDEVIVGNVVGAGQGMGVGRQAALFAGIPESVPAYGVNMVCGSGMKTVMDAVSHIRSGDAEIVVAAGVEVMSQIPFAAPSSIRDGNKMGNLELKDLLVADGLTDVYNQYHMGVTAENVAKEIGLTRQQQDEYALSSQQKAVAAIEAGKFKDEIVPVEVQQRRETVLFDTDEYPKANATMEALSKLRPAFDREGTVTAGNASGINDGASAIIVASESAVKAHGLTPLAEIVSYAQSGLDPKIMGLGPVESVNKALAKAELTVNDIDVYELNEAFAAQALGVIHQLAETNQVPVNAIQDKANFNGGAIALGHPLGASGNRILVTLVHELHKQNGQYGVASLCVGGGMGTAVVVKAVK

SEQ ID NO: 24049 - protein, 70 aa, Vibrio parahaemolyticus RIMD 2210633
MSAKVTGSVKWFNETKGFGFLSQDNGGQDVFVHFNAIVADGFKTLTEGQKVSFNVEQGKKGPQATEVTPL

SEQ ID NO: 24050 - protein, 224 aa, Vibrio parahaemolyticus RIMD 2210633
MIELYLDTADVAEVKRFNQCLPLKGVTTNPSILAKSKQGLNQTLAGMQEALGGTPRFHAQVVSTTVEGMVEEARQIHELPYDMVIKVPATETGLSAIKLMKKEGIQVLATAIYSAQQGFLAALCGADYLAPYVNRIDAMNGNGVEVVADLQLLLDQNQLPAKILAASFKNTQQAMEVMKLGIEAITLPVDVAAQMFSHPAVQPAVDQFDKDWKSTFGNKLSFES

SEQ ID NO: 24051 - protein, 497 aa, Vibrio parahaemolyticus RIMD 2210633
MIENSFAITSTFVAYLIIMVAIGVYAYKRTSNSSDYFLGGRSLGPWPAALSAGASDMSGWLLLGLPGYAYAAGIEAFWLAGGLLAGTWANWFISAKRLRTYSIQTDALTLPEFLSRRFNDKSKLIQTISAFFILLFFLFYTSSGLVAGGKLFETVFGLDYSIAVVIGTVCVVSYTLFGGFLAVSWTDLVQGLLMAAALMIVPIAVMDGGFGQLSSDMHNINPELLTLWNDVKGEPLSAIAIISLAAWGLGYFGQPHILARFKASRSNKDLTTARRIAVGWTALSMAGAMLVGLVGLVWVTGHPGTQLEDGEKIFMLLVNTVFHPVVAGILLAAILAAVMSTADSQLLVSSSALAEDFYKQVIKPDASSEEVVMIGRVGVIVISLIALFLAMTPDSSVLGLVSYAWAGFGAAFGPAVVLSLYWSGMNRNGALAGILVGGVTIVVWKQLTGGWFDVYEIVPGIIFSTLAIVLVSKMTGGAGQEVLDQHQEFKQKLVDLD

SEQ ID NO: 24052 - protein, 598 aa, Triticum aestivum
AASPAATSAAPPATALRPWGPSEPRKGADILVEALERCGIVDVFAYPGGASMEIHQALTRSPVITNHLFRHEQGEAFAASGYARASGRVGVCVATSGPGATNLVSALADALLDSIPMVAITGQVPRRMIGTDAFQETPIVEVTRSITKHNYLVLDVEDIPRVIQEAFFLASSGRPGPVLVDIPKDIQQQMAVPVWDTPMSLPGYIARLPKPPSTESLEQVLRLVGESRRPILYVGGGCAASGEELRRFVELTGIPVTTTLMGLGNFPSDDPLSLRMLGMHGTVYANYAVDKADLLLAFGVRFDDRVTGKIEAFASRSKIVHIDIDPAEIGKNKQPHVSICADVKLALQGLNDLLNGSKAQQGLDFGPWHKELDQQKREFPLGFKTFGEAIPPQYAIQVLDELTKGEAIIATGVGQHQMWAAQYYTYKRPRQWLSSSGLGAMGFGLPAAAGAAVANPGVTVVDIDGDGSFLMNIQELALIRIENLPVKVMILNNQHLGMVVQWEDRFYKANRAHTYLGNPENESEIYPDFVTIAKGFNVPAVRVTKKSEVTAAIKKMLETPGPYLLDIIVPHQEHVLPMIPSGGAFKDMIMEGDGRTSY

SEQ ID NO: 24053 - protein, 598 aa, Triticum aestivum
AASPAATSVAPPATALRPWGPSEPRKGADILVEALERCGIVDVFAYPGGASMEIHQALTRSPVITNHLFRHEQGEAFAASGYARASGRVGVCVATSGPGATNLVSALADALLDSIPMVAITGQVPRRMIGTDAFQETPIVEVTRSITKHNYLVLDVEDIPRVIQEAFFLASSGRPGPVLVDIPKDIQQQMAVPVWDTPMSLPGYIARLPKPPSTESLEQVLRLVGESRRPILYVGGGCAASGEELRRFVELTGIPVTTTLMGLGNFPSDDPLSLRMLGMHGTVYANYAVDKADLLLAFGVRFDDRVTGKIEAFASRSKIVHIDIDPAEIGKNKQPHVSICADVKLALQGLNALLNGSKAQQGLDFGPWHKELDQQKREFPLGFKTFGEAIPPQYAIQVLDELTKGEAIIATGVGQHQMWAAQYYTYKRPRQWLSSSGLGAMGFGLPAAAGAAVANPGVTVVDIDGDGSFLMNIQELALIRIENLPVKVMILNNQHLGMVVQWEDRFYKANRAHTYLGNPENESEIYPDFVTIAKGFNVPAVRVTKKSEVTAAIKKMLETPGPYLLDIIVPHQEHVLPMIPSGGAFKDMIMEGDGRTSY

SEQ ID NO: 24054 - protein, 598 aa, Triticum aestivum
AASPAATSAAPPATALRPWGPSEPRKGADILVEALERCGIVDVFAYPGGASMEIHQALTRSPVITNHLFRHEQGEAFAASGYARASGRVGVCVATSGPGATNLVSALADALLDSIPMVAITGQVPRRMIGTDAFQETPIVEVTRSITKHNYLVLDVEDIPRVIQEAFFLASSGRPGPVLVDIPKDIQQQMAVPVWDTPMSLPGYIARLPKPPSTESLEQVLRLVGESRRPILYVGGGCAASGEELRRFVELTGIPVTTTLMGLGNFPSDDPLSLRMLGMHGTVYANYAVDKADLLLAFGVRFDDRVTGKIEAFASRSKIVHIDIDPAEIGKNKQPHVSICADVKLALQGLNDLLNGSKAQQGLDFGPWHKELDQQKREFPLGFKTFGEAIPPQYAIQVLDELTKGEAIIATGVGQHQMWAAQYYTYKRPRQWLSSSGLGAMGFGLPAAAGAAVANPGVTVVDIDGDGSFLMNIQELALIRIENLPVKVMILNNQHLGMVVQWEDRFYKANRAHTYLGNPENESEIYPDFVTIAKGFNVPAVRVTKKSEVTAAIKKMLETPGPYLLDIIVPHQEHVLPMIPNGGAFKDMIMEGDGRTSY

SEQ ID NO: 24055 - protein, 598 aa, Triticum aestivum
AASPAATSVAPPATALRPWGPSEPRKGADILVEALERCGIVDVFAYPGGASMEIHQALTRSPVITNHLFRHEQGEAFAASGYARASGRVGVCVATSGPGATNLVSALADALLDSIPMVAITGQVPRRMIGTDAFQETPIVEVTRSITKHNYLVLDVEDIPRVIQEAFFLASSGRPGPVLVDIPKDIQQQMAVPVWDTPMSLPGYIARLPKPPSTESLEQVLRLVGESRRPILYVGGGCAASGEELRRFVELTGIPVTTTLMGLGNFPSDDPLSLRMLGMHGTVYANYAVDKADLLLAFGVRFDDRVTGKIEAFASRSKIVHIDIDPAEIGKNKQPHVSICADVKLALQGLNALLNGSKAQQGLDFGPWHKELDQQKREFPLGFKTFGEAIPPQYAIQVLDELTKGEAIIATGVGQHQMWAAQYYTYKRPRQWLSSSGLGAMGFGLPAAAGAAVANPGVTVVDIDGDGSFLMNIQELALIRIENLPVKVMILNNQHLGMVVQWEDRFYKANRAHTYLGNPENESEIYPDFVTIAKGFNVPAVRVTKKSEVTAAIKKMLETPGPYLLDIIVPHQEHVLPMIPNGGAFKDMIMEGDGRTSY

SEQ ID NO: 24056 - protein, 359 aa, Brassica napus
MEKYELVKDIGAGNFGVARLMKVKDSKELVAMKYIERGPKIDENVAREIYNHRSLRHPNIIRFKEVVLTPTHLAIAMEYAAGGELFERICGAGRFSEDEARYFFQQLISGVSYCHAMQICHRDLKLENTLLDGSPAPRLKICDFGYSKSSLLHSRPKSTVGTPAYIAPEVLSRREYDGKMADVWSCGVTLYVMLVGAYPFEDQEDPKNFRKTIQKIMAVQYKIPDYVHISQDCKHLLSRIFVANSLKRITIAEIKKHPWFTKNLPRELTETAQAAYFKKENPTFSAQTAEEIMKIVDDAKTPPPVSRSIGGFGWGGEGDLEGKEEEEVDEEEVEEEEDEEDEYDKTVKEVHASGEVRIS

SEQ ID NO: 24057 - protein, 141 aa, Solanum tuberosum
MKGAKSKAKADTKLGVRKKATESKKAKNAAKDPNKPKRPPSAFFVFMEEFRKTYKEKHPNNKSVAVVGKAGGDKWKQLSDEEKAPYQAKAEKRKAEYQKNMDAYNKKLAAGDADDEESDKSKSEVHDDDEDDDGSEQEDDD

SEQ ID NO: 24058 - protein, 295 aa, Hordeum vulgare subsp. vulgare
MHSCNDHGQKVKLNVVQADSAAHGVTAHGARTPPASAVALKPALIRVPSPPVGVTAARAETPLPFPASPACPPLPFLIPSSTPPRPDPVVRPRTNQMASARRLLQTYPGQFQAAEPPDALGADSDVVVILAALLCALLCVVGLAAVTGCARSRRGAGGARSAAPDAAAPSKGLKKRALMALPRLAYEDAVAARGAMAGEEREGVLLSECAICLSEFADKEEIRVLPQCGHGFHVACVDAWLRAHSSCPSCRRVVVVIVADAAPRGMPPQPKRCRKCEAMEEASSSSSSAAAQFLP

SEQ ID NO: 24059 - protein, 257 aa, Methanocaldococcus jannaschii
MRDTMEILRTENIVKYFGEFKALDGVSISVCKGDVTLIIGPNGSGKSTLINVITGFLKADEGRVYFENKDITNKEPAELYHYGIVRTFQTPQPLKEMTVLENLLIGEINPGESPLNSLFYKKWIPKEEEMVEKAFKILEFLKLSHLYDRKAGELSGGQMKLVEIGRALMTNPKMIVMDEPIAGVAPGLAHDIFNHVLELKAKGITFLIIEHRLDIVLNYIDHLYVMFNGQIIAEGRGEEEIKNVLSDPKVVEIYIGE

SEQ ID NO: 24060 - protein, 456 aa, Escherichia coli
  misc_feature (345)..(345): Xaa can be any naturally occurring amino acid
  misc_feature (363)..(363): Xaa can be any naturally occurring amino acid
  misc_feature (418)..(418): Xaa can be any naturally occurring amino acid
  misc_feature (430)..(430): Xaa can be any naturally occurring amino acid
  unsure (1)..(456): unsure at all Xaa locations
SRLVVVSNRIAPPDEHAASAGGLAVGILGALKAAGGLWFGWSGETGNEDQPLKKVKKGNITWASFNLSEQDLDEYYNQFSNAVLWPAFHYRLDLVQFQRPAWDGYLRVNALLADKLLPLLQDDDIIWIHDYHLLPFAHELRKRGVNNRIGFFLHIPFPTPEIFNALPTYDTLLEQLCDYDLLGFQTENDRLAFLDCLSNLTRVTTRSAKSHTAWGKAFRTEVYPIGIEPKEIAKQAAGPLPPKLAQLKAELKNVQNIFSVERLDYSKGLPERFLAYEALLEKYPQHHGKIRYTQIAPTSRGDVQAYQDIRHQLENEAGRINGKYGQLGWTPLYYLNQHFDRKLLXKIFRYSDVGLVTPLRDGXNLVAKEYVAAQDPANPGVLVLSQFAGAANELTSALIVNPYDRDEVAAALDRALTXSLAERISRHAEXLDVIVKNDINHWQECFISDLKQIVPR

SEQ ID NO: 24061 - protein, 442 aa, Cicer arietinum
MAEPSKVIHVRNVGHEISENDLLQLFQTFGVITKLVMLRTKNQALLQMEDIPSAISALQFYANAQPSIRGRNVYVQFSSHKELTTMDQSQGRDDEPNRILLVTVHQMQYPITVDVLQQVFSPHGYVEKIVTFQKSAGFQALIQYESRQSAVTARSSLQGRNIYDGCCQLDIQFSNLDELQVNYNNDRSRDYTNPNLPTEQKGRPSHSGYGDTGMHGVQGSGARPGGFSQMTNAAAIEAAFGGDLPPGITGTNDRCTVLVANLNPDRIDEDKLFNLFSIYGNIVRIKLLRNKPDHALVQMGDGFQAELAVYFLKGAMLFGKRLEVNFSKHPNIIQGADTHEYMNSNLNRFNRNAAKNYRYCCSPTKIIHLSTLPQDIIEEEIASLLEEHGLVVNCKVFEMNGKKQALVQFETEEEATEALVCKHASPLSGSIVRISFSQLQNI

SEQ ID NO: 24062 - protein, 777 aa, Neurospora crassa
MAQAYDDEELSISLSPSQIRSRNKRSGDGASGFGPSTGNLHEYGQHGQQLHPNINAVMADAPLRDKMRTEQRIGAYNIVKTLGEGSFGKVKLAVHRMTGQQVALKIIARKKLISRDMQGRVEREIEYLQLLRHPHIIKLYTVIKTPTEIIMVLEYAGGELFDYIVQHGKMKEDEARRFFQQMLCAVEYCHRHKIVHRDLKPENLLLDDNLNVKIADFGLSNIMTDGNFLKTSCGSPNYAAPEVIGGKLYAGPEVDVWSCGVILYVLLVGRLPFDDEHIPSLFAKIARGSYMVPTWMSPGAASLIKKMLVVNPVQRATIDEIRQDPWFLKDLPAYLHPPVEEFLNTGVDPNKAIKVSDIAPNAPPQEQEKLHNEVTEKISKTMGYGKRDVEEALEADEPSAIKDAYMIVRENKLMQSNLDFATSHPPSASILHLPSGEHRLTQKKSKSLSLRPSSFWSNTNEEYQDTLLKTDEEIPGLTTEESVPSPLHDPNMSSARSIASVSTATSPRPYVSKIGILPSSLPTYHRVFMEREKAKAEGLEPPDAIPTIVEPANQPRSQAEQEETIRRLKPHSRSQLRLDEANKRPQGLTPVHPPKKNKPARWQFGIRSRNAPWEALVCIYKALNKLGAGWIVDEDYERAHRDDDDTDDYDGPSIGSRKKSSSSMDPTKTYRLPADPWHIKIRWTTDKLKKHSVASGLSEAGENTHVSRDGSDSKYQVVAMRMEIQIYEMEHGVYLVDFKVDGYETPDGKLLEDKEVTSPFPFLDMAAKLIMQLADAD

SEQ ID NO: 24063 - protein, 315 aa, Buchnera aphidicola str. APS (Acyrthosiphon pisum)
MPDMKLFSGNSIPKLAKFIANRLYINLGKASVGRFSDGEISVQINENVRGSDVFIIQSTCSPTNDNIMELVVMVDSLRRASAGRITAVIPYFGYARQDRRVRSARVPITAKVVADFLSSIGVDRVLTVDLHAEQIQGFFDVPVDNVFGSLILLEDMLQRELKNPIVVSPDIGGVVRARAIAKLLYDTDMAIIDKRRPRANVSQIMNIIGDVANRDCILVDDMIDTGGTLCKAAEALKERGAKRVFAYATHPVFSGDAPKNLKNSVIDEVVVCDTIPLSENIELLPNVRTLTLSGMLAEAIRRISNEESISAMFEH

SEQ ID NO: 24064 - protein, 592 aa, Arabidopsis thaliana
MAPSMKEIFSKDNFKKNKKLVLLSAAVALLFVAAVAGISAGASKANEKRTLSPSSHAVLRSSCSSTRYPELCISAVVTAGACELTSQKDVIEASVNLTITAVEHNYFTVKKLIKKRKGLTPREKTALHDCLETIDETLDELHETVEDLHLYPTKKTLREHAGDLKTLISSAITNQETCLDGFSHDDADKQVRKALLKGQIHVEHMCSNALAMIKNMTDTDIANFEQKAKITSNNRKLKEENQETTVAVDIAGAGELDSEGWPTWLSAGDRRLLQGSGVKRDATVAADGSGTFKTVAAAVAAAPENSNKRYVIHIKAGVYRENVEVAKKKKNIMFMGDGRTRTIITGSRNVVDGSTTFHSATVAAVGERFLARDITFQNTAGPSKHQAVALRVGSDFSAFYNCDMLAYQDTLYVHSNRQFFVKCLIAGTVDFIFGNAAVVLQDCDIHARRPNSGQKNMVTAQGRTDPNQNTGIVIQKCRIGATSDLQSVKGSFPTYLGRPWKEYSQTVIMQSAISDVIRPEGWSEWTGTFALNTLTYREYSNTGAGAGTANRVKWRGFKVITAAAEAQKYTAGQFIGGGGWLSSTGFPFSLGL

SEQ ID NO: 24065 - protein, 512 aa, Arabidopsis thaliana
KQMNMENVSASKSVSNWSGTCYATPLIGAFIADAYLGRYWTIASFVVIYIAGMTLLTISASVPGLTPTCSGETCHATAGQTAITFIALYLIALGTGGIKPCVSSFGADQFDDTDEKEKESKSSFFNWFYFVINVGAMIASSVLVWIQMNVGWGWGLGVPTVAMAIAVVFFFAGSNFYRLQKPGGSPLTRMLQVIVASCRKSKVKIPEDESLLYENQDAESSIIGSRKLEHTKILTFFDKAAVEAESDNKGAAKSSSWKLCTVTQVEELKALIRLLPIWATGIVFASVYSQMGTVFVLQGNTLDQHMGPNFKIPSASLSLFDTLSVLFWAPVYDKLIVPFARKYTGHERGFTQLQRIGIGLVISIFSMVSAGILEVARLNYVQTHNLYNEETIPMTIFWQVPQYFLVGCAEVFTFIGQLEFFYDQAPDAMRSLCSALSLTAIAFGNYLSTFLVTLVTKVTRSGGRPGWIAKNLNNGHLDYFFWLLAGLSFLNFLVYLWIAKWYTYKKTTGHAL

SEQ ID NO: 24066 - protein, 401 aa, Pseudomonas sp. Y2
MNEALIIDAVRTPIGRYAGALASVRADDLGAIPLKALIARHPQLDWSAVDDVIYGCANQAGEDNRNVARMAALLAGLPVSVPGTTLNRLCGSGLDAVGSAARALRCGEAGLMLAGGVESMSRAPFVMGKSEQAFGRSAEIFDTTIGWRFVNKLMQQGFGIDSMPETAENVAAQFNISRADQDAFALRSQHKAAAAIANGRLAKEIVAVEIAQRKGPAKIVEHDEHPRGDTTLEQLAKLGTPFRQGGSVTAGNASGVNDGACALLLASSEAAQRHGLKARARVVGMATAGVEPRIMGIGPVPATRKVLELTGLALADMDVIELNEAFAAQGLAVLRELGLADDDERVNPNGGAIALGHPLGMSGARLVTTALHELEERQGRYALCTMCIGVGQGIALIIERI

SEQ ID NO: 24067 - protein, 357 aa, Pseudomonas sp. Y2
MSKFHSLTIKEVRPETRDAVSIAFDVPAELADSFRFTQGQHLVMRTQLDGEEVRRSYSICTGVNDGELRVAIKRVAGGRFSAYANESLKAGQRLEVMPPSGHFHVELDAARHGNYLAVAAGSGITPILSIIKTTLETEPHSRVTLLYGNRSSASTLFREQLEDLKNRYLQRLNLIFLFSREQQDVDLYNGRIDADKCGQLFSRWIDVKALDAAFICGPQAMTETVRDQLKANGMAAERIHFELFAAAGSAQKREARESAAQDSSVSQITVISDGRELSFELPRNSQSILDAGNAQGAELPYSCKAGVCSTCKCKVVEGEVEMDSNFALEDYEVAAGYVLSCQTFPISDKVVLDFDQI

SEQ ID NO: 24068 - protein, 424 aa, Adiantum capillus-veneris
DLEPYLGLHYPATDIPQASRFLFMKNRVRMICDCRAIPVKVIQDRELRQPLSLAGSTLRAPHGCHSQYMANMGSAASLVMAVLVNDNEEGSSSRSHKPKPRKLWGLVVCHHTNPRAVAFSLRSACEFLMQVFGLQLNMEVELAAQMREKHILRTQTLLCDMLLRDAPIGIVSESPNIMDLVKCDGAALYYGKKFWLLGTTPTEPQIRDLAEWLLDVHRDSTGLSTDSLADAGYPGAAALGDAVCGMAAAKITSRDFLFWFRSHTAKEIKWGGAKHDPEDRDDGRKMHPRSSFKAFLEVVKRRSLPWEDVEMDAIHSLQLILRGSFQDIDDSDTKTMIHARLNDLKLQGMDELSTVANEMVRLIETATAPIFAVDAGGFINGWNAKIAELTGLSVEEAMNRSLVGDLVVEDSAEIVERLLCLALQ

SEQ ID NO: 24069 - protein, 336 aa, Arabidopsis thaliana
MELALSLGDNTKKQFSFMEKNSKINNPSVSSTSTSEKDLGFCMALDVAFGGHRSLSSSSSPSVEDEKKKPAPRAKKSDEFRVSSSVDPPLQLQLHFPNWLPENSKGRQGGRMPLGAATVVEEEEEEEEAVPSMSVSPPDSVTSSFQLDFGIKSYGYERRSNKRDIDDEVERSASRASNEDNDDENGSTRKKLRLSKDQSAFLKDSFKEHSTLNPKQKIALAKQLNLRPRQVEVWFQNRRARTKLKQTEVDCEYLKRCCESLTEENRRLQKEVKELRTLKTSTPFYMQLPATTLTMCPSCERVATSAAQPSTSAAHNLCLSTSSLIPVKPRPAKQVS

SEQ ID NO: 24070 - protein, 683 aa, Chlamydomonas reinhardtii
MKALRSGTAVARGQAGCVSPAPRPVPMSSQTMIPSTSSPATRAPARSGRRALAVSAKLADGSRRMQSEEVRRAKEVAQAALAKDSPADWVDRYGSEPRKGADILVQALEREGVDSVFAYPGGASMEIHQALTRSDRITNVLCRHEQGEIFAAEGYAKAAGRVGVCIATSGPGATNLVTGLADAMMDSIPLVAITGQVPRRMIGTDAFQETPIVEVTRAITKHNYLVLDIKDLPRVIKEAFYLARTGRPGPVLVDVPTDIQQQLAVPDWEAPMSITGYISRLPPPVEESQVLPVVRALQGAAKPVIYYGGGCLDAQAELREFAARTGIPLASTFMGLGVVPSTDPNHLQMLGMHGTVFANYAVDQADLLVALGVRFDDRVTGKLDAFAARARIVHIDIDAAEISKNKTAHVPVCGDVKQALSHLNRLLAAEPLPADKWAGWRAELAAKRAEFPMRYPQRDDAIVPQHAIQVLGEETQGEAIITTGVGQHQMWAAQWYPYKETRRWISSGGLGSMGFGLPAALGAAVAFDGKNGRPKKTVVDIDGDGSFLMNVQELATIFIEKLDVKVMLLNNQHLGMVVQWEDRFYKANRAHTYLGKRESEWHATQDEEDIYPNFVNMAQAFGVPSRRVIVKEQLRGAIRTMLDTPGPYLLEVMVPHIEHVLPMIPGGASFKDIITEGDGTVKY

SEQ ID NO: 24071 - protein, 533 aa, Arabidopsis thaliana
MKARSGHEMKKTLTWWDLMWFGIGAVIGSGIFVLTGLEARNHSGPAVVLSYVVSGVSAMLSVFCYTEFAVEIPVAGGSFAYLRVELGDFMAFIAAGNIILEYVVGGAAVARSWTSYFATLLNHKPEDFRIIVHKLGEDYSHLDPIAVGVCAIICVLAVVGTKGSSRFNYIASIIHMVVILFVIIAGFTKADVKNYSDFTPYGVRGVFKSAAVLFFAYIGFDAVSTMAEETKNPGRDIPIGLVGSMVVTTVCYCLMAVTLCLMQPYQQIDPDAPFSVAFSAVGWDWAKYIVAFGALKGMTTVLLVGAIGQARYMTHIARAHMMPPWLAQVNAKTGTPINATVVMLAATALIAFFTKLKILADLLSVSTLFIFMFVAVALLVRRYYVTGETSTRDRNKFLVFLGLILASSTATAVYWALEEEGWIGYCITVPIWFLSTVAMKFLVPQARAPKIWGVPLVPWLPSASIAINIFLLGSIDTKSFVRFAIWTGILLIYYVLFGLHATYDTAKATLKEKQALQKAEEGGVVADNSCSAT

SEQ ID NO: 24072 - protein, 469 aa, Salmonella enterica subsp. enterica serovar Typhi str. Ty2
MHKNALKQKPISLSVNQAGFYSMTTILKHLPAGQRIGIAFSGGLDTSAALLWMRQKGAVPYAYTANLGQPDEDDYDAIPRRAMEYGAENARLIDCRKQLVAEGIATIQCGAFHNTTGGLTYFNTTPLGRAVTGTMLVAAMKEDGVNIWGDGSTYKGNDIERFYRYGLLTNAELQIYKPWLDTDFIDELGGRHEMSEFMIACGFDYKMSVEKAYSTDSNMLGATHEAKDLEFLNSSVKIVNPIMGVKFWDESVKIPAEEVTVRFEQGHPVALNGKTFSDDVEMMLEANRIGGRHGLGMSDQIENRIIEAKSRGIYEAPGMALLHIAYERLLTGIHNEDTIEQYHSHGRQLGKLLYQGRWFDSQALMLRDGLQRWVASQITGEVTLELRRGNDYSILNTVSDNLTYKAERLTMEKGESVFSPDDRIGQLTMRNLDITDTREKLFGYAKAGLLTASSATGLPQVENLENKAK

SEQ ID NO: 24073 - protein, 192 aa, Salmonella enterica subsp. enterica serovar Typhi str. Ty2
MDTSRLTLDHFLSRFQLLRPQMTHETLNQRQAAVLIPVVRRPQPGLLLTQRAIHLRKHAGQVAFPGGAVDSTDASLIAAALREAQEEVAIPPQAVEVIGVLPPVDSVTGFQVTSVVGIIPPNLPWRASEDEVSAVFEMPLAQALQLGRYHPLDVYRRGNSHRVWLSWYEHYFVWGMTANILRELALQIGVKP

SEQ ID NO: 24074 - protein, 401 aa, Salmonella enterica subsp. enterica serovar Typhi str. Ty2
MFELDTLSTLVAATLVLLLGRKLVQSVSLLKKYTIPEPVAGGLLVAVALLVLKKSVGWEVNFDMTLRDPLMLAFFATIGLNANLASLRKGGRVVGVFLVVVVGLLLMQNAIGIGMASLLGLDPLMGLIAGSITLSGGHGTGAAWSKLFVERYGFASATEVAMACATFGLVLGGLIGGPVARYLVKHSTTPDGMPDDQAVPTAFEKPDVGRMITSLVLIETIALIAICLTVGKIVAQLLAGTVLELPVFVCVLFVGVILSNGLALVGFYRVFERAVSVLGNVSLSLFLAMALMSLKLWELASLALPMLAILVVQTIFMALYAIFVTWRMMGKNYDAAVLAAGHCGFGLGATPTAIANMQAITDRFGPSHMAFLVVPMVGAFFIDIVNALVIKLYLMLPIFAQ

SEQ ID NO: 24075 - protein, 293 aa, Gossypium hirsutum
MFTREVSYLKLQEVKKRWRLRKGPWTEEEDSMLRAYVNIHGEGRWNAVARLSGLRRTGKSCRLRWLNYMRPEIKRGNISLEEQLLILELHSRWGNRWSKIAQHLPGRTDNEIKNYWRTRVQKQAKQLNCDVNSKQFKDAMRYVWIPRLVERIRASSESPSSQPSTTTNTTYNDRISNISSSQMSYANASGSVQVDPSLLPELSGTSSDSLDTQVSSVSDLTDCYNPQSLSNYLHKGLGLEKEGAATWGRDEEFQATEEHSNGWLVGGGESSMDTVWNEENVWFLQQQLHDDGI

SEQ ID NO: 24076 - protein, 395 aa, Lactobacillus collinoides
MSQKILAINAGSSSLKFKLYDMPEEVVLVSGLVDRISHEDAIFTYKIGGHDDKHETVQPVKDHTAAVQLVIDALLGSGLIQDKSEIVGVGHRVSHGGRYYTQSVEIDDDVAEKIDELSVLSPLHNPVNLLGIQAFEKLLPDAKEVAVFDTSFHSTMPPKAFMYALPYKYYTEDGVRRYGFHGQSHQYIYSEATRLLGEQTTSKLISCHLGNGASICAIKDGKSVNTSMGFTPLAGLVMGTRSGDVDPEILPFLEEKHHLNSEDIRSMLNHDSGLKGISDVSNDVRDVLDAESQGNERAKLALEIYVHQIQEYIGSYTTDLEGLTTLVFTAGVGEHSAPIRQRVCERLGYLGVKIDDAKNQANEIEIQADDSRVKVMVIPTDEELIIARDTQKIVG

SEQ ID NO: 24077 - protein, 410 aa, Chlorante-Aster yellows phytoplasma
MKIMSVNSGSSSLKFQLLEMPQQEVIVSGLVERIGSNQAVFTMKTKDKKDKQVLEVLNHQTAVELLLDALIQKKVINTLEEIEGVGHRVVQGGEIFSDSAVLTEKTLAQIESLCDLAPLHNPANIISIKAFQKVLPQVFQVAVFDTTFHQSMPAVNFLYATPYYWYQKYQIRKYGAHGTSYKYITEQMQQILGKKNAKIIICHAGNGVSLCAVDSGKSVDTSMGFTPLEGVPMGTRSGNIDPAVVKFIAEKENKTVACVIDDLNKKSGYLGVSGISNDTRDILASIKEGNQQAILSHDIQVKRIVDYIASYYVLLKGVDALVFTAGIGENSSFFRSEIIKRLSVLGIKLDEEKNKVQGKQELITTFDSAIKAFVVPTNEELAIAQDVLRLQQNQTNQDKDDQQECFCCCG

SEQ ID NO: 24078 - protein, 395 aa, Rhodococcus fascians
MSIVLAYSGGLDTSVAVHWLKERYQTEVIAYCANLGQIEDLEAVSKRATAAGASEVIVEDVRDLFLHDYAIPALAAGAAYEGKYLLAAPLSRPLIAERLVSIARERGASAVAHGATGKGNDQVRFYTSVRALAPELDILAPVIDWEMTSRGSEIAYADRHGIDVGVSKTTPYSIDTNIWGTSIECGDLDLIDHAPPPDAWQITTAPVQAPDRPTTITIEFEAGIPVALDGRKLDLIDLVSELGDTAAANGIGRTEILESRIVGFKSRGIYEAPAATVLLAARTDLEALVLDRETLHHKRSIADQYAELVYYGYWFTDLRAALDAYCARLAHRVTGTVTVELYKGSARCIGRTSPKYGRYSSALADYEEADTFLHEAGAGFAYCWALPLTEGVVTR

SEQ ID NO: 24079 - protein, 397 aa, Lactobacillus sanfranciscensis
MSKIIAVNAGSSTLKFKLYEMPEENVLAEGVIERIALPASHVEIKYGDGKKYEKTTDVKNHEQAIQILLDQLLDLDIIKEYSEINGVGHRVVAGGEYFDKSVVITPDVLKKIESLTELAPLHEPANVLGIKAFKKVLPDIISVAVFDTAFHATLPEKNFLYSLPYEYYEKYSARKYGFHGIGNRYVSQRAAELLGKPAEDLKMIITHLGAGASICPVKNGKSFDTSMGFTPVTGITMATRSGDVDPSLLAYVMEKEGMTDINEMIKVLNTKSGLLGISGVSADMREVEAAQATNPRAKVAREIYVNRIIRYVGAYLAEMGGADAIVFTAGVGENSITIRKEVAEGLNYFGIGVDNEKNDVRGVVRDISAKDSKIKTLLVPTDEELMIVRDVQTLANK

SEQ ID NO: 24080 - protein, 404 aa, Moritella abyssi
MTQTVKKVVVAYSGGLDTSVILPWLQENYDNCEIVALFVADVGQGAEELEGIEAKALASGASECYVVDLKDELVENYIYPTLKTGAVYEGTYLLGTSMARQSIAKAQVEIARKVGADALCHGCTGKGNDQIRFESCFAALAPELTVIAPWRIWDLTSRESLLEYLAERDIPTAASGTKIYSRDANAWHISHEGGELEDPWNQPSKQVWTMTVDPIDAPNEPEFLTISVVKGEITAVNGEEMYLIIRYTYLNEKAAAHGVGRVDIVENRLVGMKSRGCYETPGGTVMVEALRGIEELVLDKITRKWKHTVAAEFSHLVYDGRWFTPLCASLLAAAGTLAEEMNGEVIVKMYKGSVQAVQKQSPNSLYSEEFATFGDDNVYDDQSHAEGFIRLYSLSSRIKALASK

SEQ ID NO: 24081 - protein, 404 aa, Moritella profunda
MKMTQTVKKVVVAYSGGLDTSVILPWLQENYDNCEIVAFVADVGQGAEELEGIEAKALASGASECYVVDLKDELVENYIYPTLKTGAVYEGTYLLGTSMARPIIAKAQVEIARKVGADALCHGCTGKGNDQIRFESCFAALAPELTVIAPWRIWDLTSRESLLEYLAERDIPTAASATKIYSRDANAWHISHEGGELEDPWNQPSKQVWTMTVDPIDAPNEPEFLTISVVKGEITAVNGEAMSPYNTLMYLNEKAAAHGVGRVDIVENRLVGMKSRGCYETPGGTVMVEALRGIEELVLDKTTRKWKQTVAAEFSHLVYDGRWFTPLCASLLAAAGTLAEEMNGEVIVKMYKGSVQAIQKKSPNSLYSEEFATFGDDNVYDQSHAEGFIRLYSLSSRIKALASK

SEQ ID NO: 24082 - protein, 374 aa, Bacteroides thetaiotaomicron VPI-5482
MKKKILFIDRDGTLVIEPPIDYQLDSLEKLEFYPRVFRNLGFIRSKLDFEFVMVTNQDGLGTSSFPEDTFWPAHNLMLKTLAGEGITFDDILIDRSFPEDNAPTRKPRTGMLTKYIDNPEYDLAESFVIGDRPTDVELAKNLGCRAIYLQEATDDLKEKGLEEVCALATTDWDQVAEFLFAGERKAEVRRTTKETDIYVSLNLDGNGGCDISTGLGFFDHMLEQIGKHSGMDLTIRVKGDLEVDEHHTIEDTAIALGECIYQALGSKRGIERYGYALPMDDCLCQVCLDFGGRPWLVWDAEFNREKIGEMPTEMFLHFFKSLSDAAKMNLNIKAEGQNEHHKIEGIFKALARALKMALKRDIYHFELPSSKGVL

SEQ ID NO: 24083 - protein, 485 aa, Bacteroides thetaiotaomicron VPI-5482
MDKTYKRHSFTKLWIATAMFIFCCFATSAFAQEAVDADTFMTTTETITEVKTTPEIAETATASAETTPDTIGELALGLNTVWMLLAAMLVFFMQPGFALVEAGFTRVKNTANILMKNFVDFMFGSLLYWFIGFGLMFGAGGLIGMPHFFDLSFLDSDLPREGFLVFQTVFCATAATIVSGAMAERTKFSMYLVYTIFISVLIYPISGHWTWGGGWLMNGEEGSFMMNLFGTTFHDFAGSTIVHSVGGWIALVGAAILGPRIGKYGKDGKSRAIPGHNLTVAALGVFILWFGWFGFNPGSQLAASTEADAMAISHVFLTTNLAACAGGFFALAMSWMKYGKPSLSLTLNGVLAGLVGITAGCDAVAPSGAVLIGAICGVVMIFAVDFIDKVLKIDDPVGASSVHGVCGFLGTVLTGLFSTSEGLFYGHGAGFLGAQLFGAVVVGVWAAGMGFIIFKVLDKIHGLRVPARVEEEGLDIYEHGESAYN

SEQ ID NO: 24084 - protein, 559 aa, Bacteroides thetaiotaomicron VPI-5482
MCGIAGILNIKTQTKELRDKALKMAQKIRHRGPDWSGIYVGGSAILAHERLSIVDPQSGGQPLYSPDRKQALAVNGEIYNHRDIRARYAGQYDFQTGSDCEVILALYKDKGIHFLEEISGIFAFVLYDEEKDEFLIARDPIGVIPLYIGKDKDGKIYFGSELKALEGFCNEYEPFLPGHYFYSKEGKMKRWYTREWTDYESVKDNDAKVSDVKEALEDAVHRQLMSDVPYGVLLSGGLDSSVISAIAKKYAAKRIETDGASDAWWPQLHSFAIGLKGAPDLIKAREVAEYIGTVHHEINYTVQEGLDAIRDVIYFIETYDVTTVRASTPMYLLARVIKSMGIKMVLSGEGADEVFGGYLYFHKAPTPKDFHEETVRKLSKLHMYDCLRANKSLSAWGVEGRVPFLDKEFLDVAMALNPKAKMCPGKEIEKRIVREAFADMLPESVAWRQKEQFSDGVGYSWIDTLREITAAAVSDEQMEHAAERFPINTPLNKEEYYYRSIFEEHFPSESAARSVPSVPSVACSTAEALAWDVAFRNLNEPSGRAVRGVHEEAYAEEVK

SEQ ID NO: 24085 - protein, 618 aa, Bacteroides thetaiotaomicron VPI-5482
MDKNTITGLVLIGILLVGFSYLSRPSEEQIAAQKKYYDSIAVVQQQQEALKAKTEAALANENKGAAAAADSSALFFNAMHGTDSKVSIQNSVAEITFTTKGGRVYSAMLKEYKGQDKTNPVVLFDGDDATMSFNFYNKQGAIQTKDYYFEAVNKTDSSVTMRLAADNASYIDFIYTLKPNSYLMNFEIKATGMEGKLASTEYVDIDWTQRARQLEKGFTYENRLSELTYKVKGDNVDNLSAAKDDEKDLGNTAIDWVAFKNQFFSSVFIADQDFNKVSVKSRMEQQGSGYIKDYSAEMSTFFDPSGKQPTEMYFYFGPNHFKTLKALDKGRTEKWELNRLVYLGWPLIRWINQFITINVFDWLSGWGLSMGIVLLILTIMVKVVVYPATWKTYMSSAKMRVLKPKIDEINKKYPKQEDAMKKQQEVMSLYSQYGVSPMGGCLPMLLQFPILMALFMFVPSAIELRQQSFLWADDLSTYDAFITFPFHIPFLGNHLSLFCLLMTVTNILNTKYTMTMQDTGAQPQMAAMKWMMYLMPIMFLFVLNDYPSGLNYYYFVSTLISVGTMILLRKTTDETKLLAILEAKKKDPKQMKKTGFAARLEAMQKQQEQLQQQKQNKR

SEQ ID NO: 24086 - protein, 245 aa, Bacteroides thetaiotaomicron VPI-5482
MPFFFLRMQRKSIFASKQCRFMAKILLAEDEVNIASFIERGLKEFGHSVTVCHDGNTGWRILQEEPFDLVILDIIMPKINGLELCHLYRQMFGYQAPVIMLTALGTTEDIVKGLDAGADDYLVKPFSFQELEARIKALLRRNKETVTNQLTCDNLVLDCNTRRAKRGDADIDLTVKEYRLLEYFMTHQGVALSRITLLKDVWDKNFDTNTNIVDVYVNYLRVKIDRDFDKKLIHTVVGLGYIMNA

SEQ ID NO: 24087 - protein, 305 aa, Bacteroides thetaiotaomicron VPI-5482
MVFSGTNSRYLAEKICASLNCPLGNMNITHFADGEFAVSYEESIRGAHVFLVQSTFPNSDNLMELLLMIDAAKRASAKSVVAVIPYFGWARQDRKDKPRVSIGAKLVADLLSVAGIDRLITMDLHADQIQGFFNIPVDHLYASAVFLPYIQSLKLEDLVIATPDVGGSKRASTFSKYLGVPLVLCNKSREKANEVASMQIIGDVKDKNVVLIDDIVDTAGTITKAANIMMEAGAKSVRAIASHCVMSDPASFRVQESGLTEMVFTDSIPYAKKCAKVKQLSIADMFAETIKRVMNNESISSQYII

SEQ ID NO: 24088 - protein, 318 aa, Bacteroides thetaiotaomicron VPI-5482
MKTVVLDGFAANPGDLSWEGLKALGECTIYDRTAPEEVLERAAGAEVILTNKVIINADHMTALPELKYIGVLATGYNVVDTAVAKERGIIVTNIPAYSTASVAQMVFAHILNICQQVQHHSEEVHKGRWTNNKDFCFWDTPLIELRDKKIGLVGLGNTGYTTARVAIGFGMQVYALTSKSHFQLPPEIKKMDLDQLFSECDIISLHCPLTPETHELVNARRLALMKPNAILINTGRGPLVNEQDLADALNSGKIYAAGVDVLSSEPPRADNPLLTAKNCYITPHIAWASTEARERLMNIAISNLQAYISGTPENVVNK

SEQ ID NO: 24089 - protein, 579 aa, Bacteroides thetaiotaomicron VPI-5482
MTDIKNEDTGDKKSLNFIEQAVEKDLKEGKNGGKVQTRFPPEPNGYLHIGHAKAICLDFGIAAKHGGVCNLRFDDTNPTKEDVEYVEAIKEDIQWLGYQWGNEYYASDYFQQLWDFAIRLIEEGKAYIDEQTAEQIAQQKGTPTQAGVNSPYRDRPIEESLELFKKMNSGEIEEGAMVLRAKIDMSNPNMHFRDPIIYRVVKHPHHRTGTTWKAYPMYDFAHGQSDFFEGVTHSLCTLEFVVHRPLYDLFIDWLKEGKDLNDNRPRQTEFNKLNLSYTLMSKRNLLTLVKEGLVNGWDDPRMPTICGFRRRGYSPESIHKFIDKIGYTTYDALNDIALLESSVRDDLNSRATRISAVINPVKLIITNYPEGQVEQLEAINNPEDPEAGSHMIEFSRELWMEREDFMEDAPKKYFRMTPGQEVRLKNAYIVKCTGCKKDENGVITEVYCEYDANTRSGMPDANRKVKGTLHWVSCNHCLQAEVRLYDRLWKVENPRDELAAIREAKKCEALEAMKEIINPDSLKVLPNCYIEKFAATLPVLSYLQFQRIGYFNIDKDSTPEKLVFNRTVGLKDTWGKINK

SEQ ID NO: 24090 - protein, 439 aa, Bacteroides thetaiotaomicron VPI-5482
MKVLKFGGTSVGSAQRMKEVAKLITDGEQKIVVLSAMSGTTNTLVEISDYLYKKNPEGANEIINKLESKYKQHVDELFATQEYKQKGLEVIKSHFDYIRSYTKDLFTLFEEKVVLAQGELISTAMVNFYLQECGVKSVLLPALEFMRTDKNAEPDPVYIKEKLQTQLELYPDMEIYITQGFICRNAYGEIDNLQRGGSDYTASLIGAAVKASEIQIWTDIDGMHNNDPRIVDKTAPVRQLHFEEAAELAYFGAKILHPTCIQPAKYANIPVRLLNTMDPDAPGTLISNDTEKGKIKAVAAKNNITAIKIKSSRMLLAHGFLRKVFEIFESYQTSIDMICTSEVGVSVTIDNTKHLNEILDDLKKYGTVTVDKDMCIICVVGDLEWENVGFEAKALDAMRDIPVRMISFGGSNYNISFLIRDCDKKTALQSLSDMLFNNK

SEQ ID NO: 24091 - protein, 368 aa, Bacteroides thetaiotaomicron VPI-5482
MIIGVPKEIKNNENRVGMTPSGVAEVVKQGHQVYIQHTAGINSGFPDEAYLSVGAQVLPTIEDVYATADMIVKVKEPIAPEYHLIRKGQLLFTYFHFASDKELTLAMIDNKSICLAYETVEKEDHSLPLLIPMSEVAGRMSIQEGARFLEKPQGGKGILLGGVPGVKPAKVLILGGGIVGSNAAQMAAGMGADVTVADINLSRLRYLSETLPKNVKTLYASELRIKKELPDVDLVIGSVLIPGDKAPHLITRNILAMMQPGTVLVDVAIDQGGCFETSHPTTHSAPTYVIDGIVHYAVANIPGAVPYTSTLALTNATLPYVIALANKGWKKACKDDPALALGLNVVEGKVVYKAVADVFDLKYENINL

SEQ ID NO: 24092 - protein, 218 aa, Bacteroides thetaiotaomicron VPI-5482
MKFFIDTANLEQIQEAYDLGVLDGVTTNPSLMAKEGIKGTENQREHYIKICKIVNADVSAEVIATDYEGMIREGEELAALNPHIVVKVPCIADGIKAIKYFTEKGIRTNCTLVFSVGQALLAAKAGATYVSPFVGRLDDICEDGVGLVGDIVRMYRTYDYKTQVLAASIRNTKHIIECVEVGADVATCPLSAIKGLLNHPLTDSGLKKFLEDYKKVNG

SEQ ID NO: 24093 - protein, 763 aa, Bacteroides thetaiotaomicron VPI-5482
MAKITKEAALLYHSQGKPGKIEVVPTKPYSTQTDLSLAYSPGVAEPCLEIEKNPQDAYKYTAKGNLVAVISNGTAVLGLGDIGALSGKPVMEGKGLLFKIYAGIDVFDIEVDEKDPEKFIAAVKAIAPTFGGINLEDIKAPECFEIERRLKEELDIPVMHDDQHGTAIISSAGLVNALQVAGKKIEDVKIVVNGAGASAVSCTKLYVSLGARLENIVMLDSKGVISKTRTDLNEQKRYFATDRTDIHTLEEAIKGADVFLGLSKGNVLSQDMVRSMAPMPIVFALANPTPEISYEDAMSARPDVLMATGRSDYPNQINNVIGFPYIFRGALDTQAKAINEEMKIAAVHAIANLAKQPVPDVVNTAYHVNNLSFGPEYFIPKPVDPRLITEVSCAVAKAAMESGVARTEIKDWDAYCVHLRELMGYESKLTRQLYDTARRNPQRVVFAEGIHPNMLKAAVEAKAEGICHPILLGNDEAIGKLAEELDLSLEGIEIVNLRHPDESERRERYSRILAEKRAREGFTYEEANDKMFERNYFGMMMVETGDADAFITGLYTRYSNTIKVAKEVIGIQPGFNHFGTMHILNSKKGTYFLADTLINRHPDTETLIDIAKLADKTVRFFNHTPVISMLSYSNFGADTSGSPVKVHGAVNYMQKEYPELAIDGEMQVNFAMNRELRDAKYPFTRLKGKDVNTLIFPNLSSANAGYKLLQAMDPDTEFIGPIQMGLNKPIHFTDFESSVRDIVNITAVAVIDAIVVKKKNESR

SEQ ID NO: 24094 - protein, 565 aa, Bacteroides thetaiotaomicron VPI-5482
MSKDLITGAEAMMRSLEHQGVTTIFGYPGGSIMPTFDALYDHQNTLNHILVRHEQGAAHAAQGYARVSGKVGVCLVTSGPGATNTITGIADAMIDSTPIVVIAGQVGTGFLGTDAFQEVDLVGITQPIAKWSYQIRRAEDVAWAIARAFYIASSGRPGPVVLDFAKNAQVEKTKYEPTKQEFIRSYVPVPDTDEESVKAAAELINNAERPLVLVGQGVELGSAQEELRIFIEKADMPAGCTLLGLSALPTDHPLNKGMLGMHGNLGPNINTNKCDVLIAVGMRFDDRVTGNLATYAKQAKVIHFDIDPAEVNKNVKVDIAVLGDCKKTLAAVTGLLKKNRHTEWVDSFKEYEAVEEEKVIRPELHPATDSLSMGEVVRAVSEATRHEAILVTDVGQNQMISARYFKYTRERSIVTSGGLGTMGFGLPAAIGATFGRPDRTVCVFMGDGGLQMNIQELGTIMEQKAPVKIICLNNNYLGNVRQWQAMFFNRRYSFTPMLNPDYMKIASAYDIPSKRVFSREELKAAIDEMLSTDGAFLLEACVVEEGNVLPMTPPGGSVNQMLLEC

SEQ ID NO: 24095 - protein, 345 aa, Bacteroides thetaiotaomicron VPI-5482
MSYLIKPKNYKPLLDLKQTELGIKQIKEFFQLNLSSELRLRRVTAPLFVLKGMGINDDLNGIERPVSFPIKDLGDAQAEVVHSLAKWKRLTLADYNIEPGYGIYTDMNAIRSDEELGNLHSLYVDQWDWERVITNEDRNVEFLKEIVNRIYAAMIRTEYMVYEMYPQIKPCLPQKLHFIHSEELRQLYPNLEPKCREHAICQKYGAVFIIGIGCKLSDGKKHDGRAPDYDDYTSTGLNNLPGLNGDLLLWDDVLQRSIELSSMGVRVDREALQRQLKEENEEERLKLYFHKRLMDDTLPLSIGGGIGQSRLCMFYLRKAHIGEIQASIWPEDMRKECEELDIHLI

SEQ ID NO: 24096 - protein, 811 aa, Bacteroides thetaiotaomicron VPI-5482
MKVMKFGGTSVGSVNSILSVKRIVESAGEPVIVVVSALGGITDKLINTSKMAAAGDSAYEGEFREIVYRHVEMIKEVIPAGAGQVALQRQIGELLNELKDIFQGIYLIRDLSPKTSDTIVSYGERLSSIIVAELIDEAKWFDSRTFIKTEKKHNKHTIDADLTNQLVKEAFHSIPKVSLVPGFISSDKVSGDVTNLGRGGSDYTAAIIAAALDASSLEIWTDVDGFMTADPRVISTAYTISELSYVEATELCNFGAKVVYPPTIYPVCHKNIPIIIKNTFNPDGVGTVIKQETSNPQSKAIKGISSINDTSLITVQGLGMVGVIGVNYRIFKALAKNGISVFLVSQASSENSTSIGVRNADADLACEVLNEEFAKEIEMGEISPILAERNLATVAIVGENMKHTPGIAGKLFGTLGRNGINVIACAQGASETNISFVVDSKSLRKSLNVIHDSFFLSEYQVLNLFICGIGTVGGSLVEQIRCQQQKLMMENGLKLHVVGIIDAAKAMFSREGFDLANFREELQKKGKDSNLQTIRDEIVGMNIFNSVFVDCTASPDIASLYKDLLQHNVSVVAANKIAASSAYENYRELKTIARQRGVKYLFETNVGAGLPIINTINDLIHSGDKILKIEAVLSGTLNYIFNKISADIPFSRTIKMAQEERYSEPDPRIDLSGKDVIRKLVILAREAGYHIEQEDVEKNLFVPNDFFEGSLDDFWKRVPSLDADFEARRQVLEKEHKHWRFVAKLEDGKASVGLQEVGANHPFYGLEGSNNIILLTTERYKEYPMMIQGYGAGAGVTAAGVFADIMSIANV

SEQ ID NO: 24097 - protein, 397 aa, Bacteroides thetaiotaomicron VPI-5482
MNQLSDRLNSLSPSATLAMSQKSNELKAQGIDVINLSVGEPDFNTPDHIKEAAKKAIDDNFSRYSPVPGYPALRNAIVEKLKKENGLEYTAAQISCANGAKQSVCNAILVLVNPGDEVIVPAPYWVSYPEMVKMAEGTPVIVSAGIEQDFKITPKQLEAAITPKTKALILCSPSNPTGSVYSKEELAGLAAVLAKYPQVVVIADEIYEHINYIGAHQSIAQFPEMKERTVIVNGVSKAYAMTGWRIGFIAGPEWIVKACNKLQGQYTSGPCSVSQKAAEAAYVGTQEPVKEMQKAFERRRDLIVKLAKEVPGFEVNVPQGAFYLFPKCSYFFGKSNGERKIENSDDLAMYLLEDAHVACVGGTSFGAPECIRMSYATSDENIVEAIRRIKEALAKLK

SEQ ID NO: 24098 - protein, 353 aa, Bacteroides thetaiotaomicron VPI-5482
MKILVINPGSTSTKIAVYENETPLLVRNIKHTVEELSVYPQVIDQFEFRKNLVLQELEANGIPFAFDAVIGRGGLVKPIPGGVYAVNEAMKQDTLHAMRTHACNLGGLIAAELAASLPDCPAFIADPGVVDELEDVARISGSPLMPKITIWHALNQKAIARRFAKEQGTKYEELDLIICHLGGGISIAVHQHGKAIDANNALDGEGPFSPERAGTLPAGQLIDICYSGQFTKDELKKRISGRAGLTAHLGTTDVPAIIKAIEEGDKKAELILDAMIYNVAKAIGGAATVLCGKVDAILLTGGIAYSDYIISRLKKRISFLAPIHVYPGEGEMESLAFNALGALRGELPVQIYK

SEQ ID NO: 24099 - protein, 300 aa, Bacteroides thetaiotaomicron VPI-5482
MNWSKIIECVPNFSEGRDLEKIDKIVAPFRGKSGVKLLDYSNDEDHNRLVVTLVGEPEALRDAVIEAIGIAVRLIDLNHHSGQHPRMGAVDVVPFIPIKNTTMEEAVALSKEVASRVAELYNLPVFLYEKSATAPHRENLASVRKGEFEGMAEKIRLPEWQPDFGPAERHPTAGTVAIGARMPLVAYNINLSTNNLEIATKIAKNIRHINGGLRYVKAMGVELKERNITQVSINMTDYTRTALYRAFELVRIEARRYGVAIVGSEIIGLVPMEALIDTASYYLGLENFSMQQVLEARIME

SEQ ID NO: 24100 - protein, 201 aa, Bacteroides thetaiotaomicron VPI-5482
MIDSIKQLLQQEAQAVLNIPVTDAYEKAVQLIVEQIHQKKGKLVTSGMGKAGQIAMNIATTFCSTGIPSVFLHPSEAQHGDLGILQKNDLLLLISNSGKTREIVELTRLAHNLDPELKFIVITGNPDSPLANESNVCLSTGKPAEVCTLGMTPTTSTTAMTVIGDILVVQTMKKTGFTIEEYSKRHHGGYLGEKSRSLCEK

SEQ ID NO: 24101 - protein, 386 aa, Bacteroides thetaiotaomicron VPI-5482
MIQLSEITNSISPSLTRRLFNLAQKYDNVIDFTLGDPDIHPHDKIKEAGCKAILEGRTRYSPNAGLLELREIISSRYKLQYNIEYNPTNEIMVTVGGMEGLYLTLLAILNRGDEVIIPAPYWINYVQMVCMCSGEPIITAPVSTNDLSISIENIRKAITPKTKAIILNTPSNPSGRIISDDSIQQIAQIAIENDLIVITDEVYKTLLYDNAHFKSIVTCDKMKERTVVINSLSKEFCMTGWRLGYIAAPSELISVMTMFQENIAACAPLPSQYAAIEALRNSEKYSAGMIEEFTLRRNVLLEEVAKIKTITVDAPQGTFYAMLNIKSTGLKSEEFAYALLEKEQVAVVPGITYGDCCEDFIRIAFTLDIYKIKEGIQRLKRFVESL

SEQ ID NO: 24102 - protein, 611 aa, Bacteroides thetaiotaomicron VPI-5482
MKEFLQLMRRFVSPYKKYIGWAILLNILSAVFNVFSFTLLIPILDILFKTGENNKVYEYMEWGTAGFKDVAINNFYYYVSQMIQDNGPTTALIFLGLFLALMTLFKTSCYFASSAVMIPLRTGVVRDIRIMVYAKVMRLPMGFFSEERKGDIIARMSGDVGEVENSITSSLDMLIKSPIMIILYFITLIATSWKLTLFTVLVLPAMGWLMGKVGRKLKRQSLEAQGKWSDTMSQLEETLGGLRIIKAFIAEDRMIDRFTRCSNELRDAVNKVAMRQALAHPMSEFLGTILIVSVLWFGGALILGHNSSLTAPTFIFYMVILYSVINPLKDFAKAGYNIPKGLASMERVDKILKAENNIKEIPNPKPLTGMNDRIEFKDISFSYDGKREVLKHVNLTVPKGKTVALVGQSGSGKSTLVDLLPRYHDVQGGDITIDGTSIKDVRIADLRSLIGNVNQEAILFNDTFFNNIAFGVENATMEQVIEAAKIANAHDFIMEKPEGYNTNIGDRGGKLSGGQRQRVSIARAILKNPPILILDEATSALDTESERLVQEALERLMKTRTTIAIAHRLSTIKNADEICVLYEGEIVERGRHEELLELDGYYKRLNDMQAL

SEQ ID NO: 24103 - protein, 250 aa, Bacteroides thetaiotaomicron VPI-5482
MLEIKDLHASINGKEILKGINLTVKPGEVHAIMGPNGSGKSTLSSVLVGNPAFEVTKGSVTFYGKNLLELSPEDRSHEGIFLSFQYPVEIPGVSMVNFMRAAVNEQRKYKGLPALTASEFLKLMREKRAVVELDNKLANRSVNEGFSGGEKKRNEIFQMAMLEPRLSILDETDSGLDIDALRIVAEGVNKLKTPETSTIVITHYQRLLDYIKPDIVHVLYKGRIVKTAGPELALELEEKGYDWIKKEVGE

SEQ ID NO: 24104 - protein, 339 aa, Bacteroides thetaiotaomicron VPI-5482
MLNLINQIVARAKADRQRIVLPEGTEERTLKAANQILTDEVADLILLGKPAEINELAVKWGLGNISKATIIDPETSPKHEEYAQLLCELRKKKGMTIEEARQLTNDPLFYGCLMIKSGDADGQLAGARNTTGNVLRPALQIIKTAPGITCVSGAMLLLTHAPEYGKNGILVMGDVAVTPVPDPNQLAQIAVCTAQTAKAVAGIENPKVAMLSFSTKGSAKHEVVDKVVEATKIAKEMAPTLDLDGEMQADAALVPEVGASKAPGSPVAGEANVLIVPSLEVGNISYKLVQRLGHADAIGPILQGIARPVNDLSRGCSIEDVYRMIAITANQAIAAKNNK

SEQ ID NO: 24105 - protein, 399 aa, Bacteroides thetaiotaomicron VPI-5482
MKILVLNCGSSSIKYKLFDMTTKEVIAQGGIEKIGLKGSFLKLTLPNGEKKVLEKDIPEHTIGVEFILNTLISPEYGAIKSLDEINAVGHRMVHGGERFSESVLLNKEVLEAFAACNDLAPLHNPANLKGVNAVSAILPNIPQVGVFDTAFHQTMPDYAYMYAIPYEMYEKYGVRRYGFHGTSHRYVSKRVCEFLGVNPVGQKIITCHIGNGGSIAAIKDGKCIDTTMGLTPLEGLMMGTRSGDIDAGAVTFIMEKEGLNTTGISNLLNKKSGVLGISGVSSDMRELLAACANGNERAILAEKMYYYRIKKYIGAYAAALGGVDIILFTGGVGENQFECRESVCKDMEFMGIKLDNNVNAKVRGEEAIISTADSKVKVVVIPTDEELLIASDTMDILKK

SEQ ID NO: 24106 - protein, 383 aa, Bacteroides thetaiotaomicron VPI-5482
MKHTNPQVEQMTSFIVMDVLERANELQKQGVDVIHLEVGEPDFDVPACVAEAAKAAYDRHLTHYTHSLGDPELRREIAAFYQREYGVTVDPDCIVVTSGSSPSILLVLMLLCNSDSEVILSNPGYACYRNFVLAAQAKPVLVPLSEENGLQYDIEAIRKCVTPHTAGIFINSPMNPTGMLLDESFLRSVASLGVPIISDEIYHGLVYEGRAHSILEYTDKAFVLNGFSKRFAMTGLRLGYLIAPKSCMRSLQKLQQNLFICASSIAQQAGIAALRQADSDVERMKQIYDERRRYMISRLREMGFEIKVEPQGAFYIFADARKFTTDSYRFAFDVLENAHVGITPGIDFGTGGEGYVRFSYANSLESIREGLDRISQYLSRCGF

SEQ ID NO: 24107 - protein, 402 aa, Bacteroides thetaiotaomicron VPI-5482
MEEKKKKVVVAFSGGLDTSFTVMYLAKEKGYEVYAACANTGGFSEEQLKTNEENAYKLGAVKYVTLDVTQEYYEKSLKYMVFGNVLRNGTYPISVSSERIFQALAIARYANEIGADAIAHGSTGAGNDQIRFDMTFLVLAPNVEIITLTRDMALSRQEEIDYLNKHGFSADFTKLKYSYNVGLWGTSICGGEILDSAQGLPETAYLKHVEKEGSEQLRLTFEKGELKAVNDETFDDPIQAIQKVEEIGAAYGIGRDMHVGDTIIGIKGRVGFEAAAPMLIIGAHRFLEKYTLSKWQQYWKDQVANWYGMFLHESQYLEPVMRDIEAMLQESQRNVNGTAILELRPLSFSTVGVESEDDLVKTKFGEYGEMQKGWTAEDAKGFIKVTSTPLRVYYNNHKDEEI

SEQ ID NO: 24108 - protein, 293 aa, Bacteroides thetaiotaomicron VPI-5482
MHKAGFVNIVGNPNVGKSTLMNALVGERISIATFKAQTTRHRIMGIYNTDDMQIVFSDTPGVLKPNYKLQESMLNFSTSALTDADVLLYVTDVVETPDKNNEFMGKVRQMTVPVLLLINKIDLTDQEKLIKLVEEWKELLPQAEIIPISAASKFNVDYVMKRIQELLPDSPPYFGKDQWTDKPARFFVNEIIREKILLYYDKEIPYSVEVVVEEFKEEAKKIHIRAVIYVERDSQKGIIIGKQGKALKKVATEARRELERFFGKTIFLETYVKVDKDWRSSDKELRNFGYQLD

SEQ ID NO: 24109 - protein, 696 aa, Bacteroides thetaiotaomicron VPI-5482
MPKFNLNWLYMIIALMLLGLWWSSDSRGSGSKVVPYSDFQKYVTNGYISKVLGSEKTLEAHVKPNAVGAIFGADSTKVGRNPIITSNPPSKDRLDKFLQDEKAAGHFDGIADYPADSDIFPAILINILPLVLLIALWIFFMRRMSGGGGGGAGGVFNVGKSKAQLFEKGGSIKITFKDVAGLAEAKQEVEEIVEFLKEPQKYTDLGGKIPKGALLVGPPGTGKTLLAKAVAGEANVPFFSLAGSDFVEMFVGVGASRVRDLFKQAKEKAPCIVFIDEIDAVGRARGKNPAMGGNDERENTLNQLLTEMDGFGSNSGVIILAATNRVDVLDKALLRAGRFDRQIHVDLPDLNERKEVFGVHLRPIKIDDTVDVDLLARQTPGFSGADIANVCNEAALIAARHGKKFVGKQDFLDAVDRIIGGLEKKTKITTEAERRSIALHEAGHASISWLLEYANPLIKVTIVPRGRALGAAWYLPEERQITTKEQMLDEMCATLGGRAAEDLFIGRISTGAMNDLERVTKQAYGMIAYLGMSDKLPNLCYYNNEEYSFNRPYSEKTAELIDEEVKRMVNEQYERAKKILSEHMEGHNELAQLLIDKEVIFAEDVERIFGKRPWASRSEEIMAAKESQDAARAERELAEKLKAEEQEIKEEEAKNSAQEEATTETKITAEGKKVTVEGKVTIEAKSNEKEQTTESK

SEQ ID NO: 24110 - protein, 117 aa, Bacteroides thetaiotaomicron VPI-5482
MMIEVLKSKIHCARVTEANLNYMGSITIDEDLLDAANMIPGEKVYIADNNNGERFETYIIKGERGSGKICLNGAAARKVQPDDIVIIMSYALMDFEEAKSFKPTVIFPDPATNSVVK

SEQ ID NO: 24111 - protein, 105 aa, Bacteroides thetaiotaomicron VPI-5482
MYAIVEINGQQFKAEAGQKLFVHHIEGAENGSTVEFEKVLLVDKDGNVTVGAPTVEGAKVVCQVISNLVKGDKVLVFHKKRRKGYRKLNGHRQQFTELTITEVVA

SEQ ID NO: 24112 - protein, 388 aa, Bacteroides thetaiotaomicron VPI-5482
MAESNFVDYVKIYCRSGKGGRGSTHMRREKYCPNGGPDGGDGGRGGHIILRGNRNYWTLLHLKYDRHAMAGHGESGSKNRSFGKDGADKVIEVPCGTVVYNAETGEYLCDVTDDGQEVILLKGGRGGQGNSHFKTATRQAPRFAQPGEPMQEMTVIMELKLLADVGLVGFPNAGKSTLLSAISAAKPKIADYPFTTLEPNLGIVSYRDGKSFVMADIPGIIEGASQGKGLGLRFLRHIERNSLLLFMVPADSDDIRKEYEVLLNELRTFNPEMLDKQRVLAITKSDMLDQELMDEIEPTLPEGVPHIFISSVSGLGISVLKDILWEELNKESNKIEDIVHRPKDVTRLQQELKDMGEDEELDYEYEEDADDEDDDLDYEYEEEDWEEK

SEQ ID NO: 24113 - protein, 862 aa, Bacteroides thetaiotaomicron VPI-5482
MNFNNFTIKSQEAVQEAVNLVQSRGQQAIEPAHILHGVMKVGENVTNFIFQKLGMNGQQVALVVDKQIESLPKVSGGEPYLSRESNEVLQKATQYSKEMGDEFVSLEHILLALLTVKSTVSTILKDAGMTEKELRNAINELRKGEKVTSQSSEDNYQSLEKYAINLNEAARSGKLDPVIGRDEEIRRVLQILSRRTKNNPILIGEPGTGKTAIVEGLAHRILRGDVPENLKNKQVYSLDMGALVAGAKYKGEFEERLKSVVNEVKKSEGDIILFIDEIHTLVGAGKGEGAMDAANILKPALARGELRSIGATTLDEYQKYFEKDKALERRFQIVQVDEPDTLSTISILRGLKERYENHHHVRIKDDAIIAAVELSSRYITDRFLPDKAIDLMDEAAAKLRMEVDSVPEELDEISRKIKQLEIEREAIKRENDKPKLEIIGKELAELKEVEKSFKAKWQSEKTLMDKIQQNKVEIENLKFEAEKAEREGDYGKVAEIRYGKLQALDKEIEDTQEKLRGMQGDKAMIKEEVDAEDIADVVSRWTGIPVSKMMQSEKDKLLHLEDELHQRVIGQDEAIEAVADAVRRSRAGLQDPKRPIGSFIFLGTTGVGKTELAKALAEFLFDDESMMTRIDMSEYQEKHSVSRLVGAPPGYVGYDEGGQLTEAIRRKPYSVVLFDEIEKAHPDVFNILLQVLDDGRLTDNKGRVVNFKNTIIIMTSNMGSSYIQSQMEKLSGSNKEEVIEETKKEVMNMLKKNIRPEFLNRIDETIMFLPLTETEIRQIVLLQIKGVQKMLAENGVELEMTDAALNFLSQVGYDPEFGARPVKRAIQRYLLNDLSKKLLSQEVDRSKAIIVDSNGDGLVFRN

SEQ ID NO: 24114 - protein, 638 aa, Bacteroides thetaiotaomicron VPI-5482
MGKIIGIDLGTTNSCVAVFEGNEPVVIANSEGKRTTPSVVAFVDGGERKVGDPAKRQAITNPTRTIFSIKRFMGENWDQVQKEVTRVPYKVVKGDNNTPRVDIDGRLYTPQEISAMILQKMKKTAEDYLGQEVTEAVITVPAYFSDSQRQATKEAGQIAGLEVKRIVNEPTAAALAYGLDKAHKDMKIAVFDLGGGTFDISILEFGGGVFEVLSTNGDTHLGGDDFDQVIINWLVQEFKNDEGADLTQDPMALQRLKEAAEKAKIELSSSTSTEINLPYIMPVNGVPKHLVKTLTRAKFESLAHGLIQACLEPCKKAMSDAGLSNSDIDEVILVGGSSRIPAVQKLVEDFFGKTPSKGVNPDEVVAVGAAVQGAVLTDEIKGVVLLDVTPLSMGIETLGGVMTKLIDANTTIPARKSETFSTAADNQSEVTIHVLQGERPMAAQNKSIGQFNLSGIAPARRGVPQIEVTFDIDANGILKVSAKDKATGKEQAIRIEASSGLSKEEIEKMKAEAEANAEADKKEREKIDKLNQADSVIFQTENQLKELGDKLPADKKAPIEAALQKLKDAHKSQDLAAIDTAMAEINTVFQTASAEMYAQGGAQGGAQAGPDMDAGQNAGQDNSKHGDNVQDADFEEVK

SEQ ID NO: 24115 - protein, 211 aa, Pinus radiata
MDSRPATVLVIIVSAIMASATAKDVNPQHSGTSIAEFIKSSCQVSRYPQLCVSSLSPYAGSLKPTLCDLVKAAMNVSLVNARTVSVWAAGLKGRSAEMSERERAALNDCIQNFDDTVDEIQKSLKELEQLQRSNFNPQMNDMQTFMSAALTDQGSCLNGFEDVKAAAGKISAMVKVRVQNESELISNALALLNALALNAFANTGVDDGIHA

SEQ ID NO: 24116 - protein, 606 aa, Lotus corniculatus
MDVKLGSLDTTKPASNDVVSCATANHTTAIQSSIPSTAVSSCDATLGRHLARRLAQIGVTDVFSVPGDFNLTLLDHLIAEPQLNLVGCCNELNAGYAADGYARARGVGACVVTFTVGGLSVLNAIAGAYSENLPLICIVGGPNSNDYGTSRILHHTIGLPDFTQELRCFQTVTCFQAVVNNLEDAHEQIDTAISTALKESKPVYISIGCNLPGIPHPTFSRDPVPFSLSAKLSNQMGLEAAVEATAEFLNKAVKPVLVGGPKLRVAKASDAFVELADASGYALAVMPSAKGQVPEHHPHFIGTYWGAVSTAFCAEIVESADAYLFAGPIFNDYSSVGYSLLLKKEKAIIVQPDRVVIANGPAFGCVLMKDFLKALAKRLKHNNAAYENYHRIFVPEGKPLKSAPKEPLRVNVMFQHIQKMLSGETAVIAETGDSWFNCQKLKLPRGCGYEFQMQYGSIGWSVGATLGYAQAVPEKRVIACIGDGSFQVTAQDVSTMLRCGQNTIIFLINNGGYTIEVEIHDGPYNVIKNWNYTGLIEAIHNGEGKCWTSKVFCEEELVEAIATATGPKKDCLCFIEVIVHKDDTSKELLEWGSRVSAANGRPPNPQ

SEQ ID NO: 24117 - protein, 635 aa, Lotus japonicus
MCGICCVIGVPAGAESIRSTVLDRAKRIRHRGPDWTGVYAKGKNIIVHERLSIVDVETGNQPLKSADGKQVLVCNGEIYNHLQLRQSLKAPVQFATNSDSECILHLYNERGVGFVNSLNGIFGFVLIDEAKDTFIVARDHEGIIPLYYGWDETGALWVASELKALHDVCVRFEEFPPGHVLHGKVGSAGKLEKWYQPVWHDEAYVPAATAACDIKGLRESLEAAVERQMMTDVPYGVLLSGGLDSSVISAVAVRVAAKRAAAKADSKHTELGHVDPKSVVHSFSVGLKGSPDLKAAREVAAFIGTEHHEFVFTVDDGINALRDVIYHLETFDTTTIRASTAMYLMSRKIKALGVKMVLSGEGSDEVFGGYLYFHKAPDRVEFHKETVRKLKALNKFDCLRANKSTMAWGLEARVPFLDKEFLDFAMTLDPTHKMCGKHAGGRIEKWIVRKAFEGYLPPAILWRQKEQFSDGVGYSWIDSLKAFADAKVSDAQLAAAAFKFPENTPLTKESYLYRSIFETHYPEPAARACVPGGPSVACSTPAAIAWDAAFQKMADPSGRAVAGVHADAYAVAADDKTPDTSADAKHGTAAEHKASGATRAPFIAAANGIKCSAEAALPHALPKPVALASGKAEAE

SEQ ID NO: 24118 - protein, 256 aa, Enterococcus faecalis V583
MKCLYTPDEILGISIENGQKKIQKPLVAKLILGFIGGAMISLGYLAYVRVSASIPADLASVQALVGAAVFPIGLIVILMAGGELITGNMMAVSTAWFAKKVSFRELLVNWVTITLANMVGALFVAYFFGHYLGLTSSGAYLNQVLSLAEHKVAATWLQAIISGIGCNWFVGLALWLCYGAKDAAGKLLGIWFPVMIFVAIGFQHSVANAFIIPAAIFEGGVQWGDFFRNFIFVYLGNIIGGAIFVSGFYYLSYRKH

SEQ ID NO: 24119 - protein, 718 aa, Enterococcus faecalis V583
MNKKNNGMKNGLYYVLVVLAMVMVVYFIFGNNNQQSPDIDYSTFQQQLEDGKVKDMTIQPTNGVYRIEGQYKEKQEVKDTGGLSLWGSTQASSKGFTTTVLPSDTTLAGIQDAAQNNKVKLVVKEQSTSGAWLSLLFSFLPLVIIFFFFYMMMSQQGGGGGGGGRVMNFGKSKAKEADKKANRVRFSDVAGAEEEKQELVEVVEFLKDPRRFAELGARIPAGVLLEGPPGTGKTLLAKAVAGEAGVPFYSISGSDFVEMFVGVGASRVRDLFETAKKNAPAIIFIDEIDAVGRQRGAGMGGGHDEREQTLNQLLVEMDGFDGNEGVIVIAATNRSDVLDPALLRPGRFDRQILVGRPDVKGREAILRVHAKNKPLADDVDLKVVAQQTPGFAGADLENVLNEAALVAARRNKKKIDASDVDEAEDRVIAGPAKKDRVINKKEREMVAYHEAGHTIVGLVLSRARVVHKVTIIPRGRAGGYMIALPKEDQFLMTKEDMFEQIVGLLGGRTAEEIIFGVQSTGASNDFEQATGIARSMVTEYGMSDKLGPVQYEGNHQVFVGRDYGQTKAYSEQVAFEIDQEVRRILMDAHTKAHEIIEAHREQHKLIAEKLLEYETLDAKAIKSLFETGKMPEGADSDYPSEKEAQTFEEAKRALEEKEAQKQVEEKQDFEEAKKELHDEAEEVKVESEQTEKEVQSEEKKDSDSNSEYDRNNYEDRYK

SEQ ID NO: 24120 - protein, 244 aa, Enterococcus faecalis V583
MGKKHTSSYEVAYYDGDFTGAMKIPALLAVVIKVSEEQTELLGRDAAYVAQFGLGWVITNYEIEIHRLPKVGEKVAITTQAMSYNKYFCYRNFWVHDEEGKECVFVKSTFVLMDQKNRKISSVLPEIIAPFDSEKITKIYRHEKIEKVTEGNFLPYRVRFFDIDGNQHVNNAIYFNWLLDVLGYDFLTTHQPKKILVKFDKEVEYGQEVESHYEIVEQENQLKTRHEIRIDGQTYCEANIDWTN

SEQ ID NO: 24121 - protein, 450 aa, Enterococcus faecalis V583
MNVVKFGGSSLASAPQLQKVLQIVKEEPRRTFVVVSAPGKRTPQDIKVTDLLIQYYQRYLNNEEIESTISAIIRRYEDLFDELHLDKAVLADIAISIRQLATLPKENNAFLFDYFLASGEDNNAKVVASFFKQNGLDARYISPKELGLLVTPEPGNARILPKALEKISVYRETQQILVIPGFFGYTEAGEICTFSRGGSDITGSIVAAGVQADLYENFTDVDGIYVAHPGIIEQPQTIQELTYREMRELAYAGFAVLHDEALMPAYRANIPVVIKNTNNPHHPGTLITTSRKVKHAPVVGIASDQGFASIYISKYLMNRELGFGRRLLEVLEKLALSYEHMPSGIDDITIVLREDQLTTEIENRLMAQLQEVLAPDELRITHHLSMIMIVGEGMRQRIGVTAESTMALAKEKINLEMINQGSSEVSIMFGIKKEQEEKAIKALYRTFFHD

SEQ ID NO: 24122 - protein, 381 aa, Enterococcus faecalis V583
MIYFDNSATTPIYPQALDTYVKTSQRIIGNPSSLHDLGSQANRLLQQARKQIAELINVSANEIYFTSGGTEGDNWVLKGTAIEKREFGNHIIISAVEHPAVTETAEQLVELGFELSYAPVDKEGRVKVEELQKLIRKETILVSVMAVNNEVGTIQPIKEISEVLAEFPKIHFHVDAVQAIGKVNYSEWLTDRVDFATFSAHKFHGPRGIGFMYWKQGKRLAPLLTGGGQENNQRSGTENVPAIVAMAKALRLHLENEQQRPQHVATLRSYLLKALEEFQNVTVFSQDNEHFAPHILCFALKGIRGEVLVHALEEKQIYISTTSACSSRKKMASSTLYAMHVPGELATSAVRISLDESNTMAEIEQFMIVFNQLYQKFSRVN

SEQ ID NO: 24123 - protein, 356 aa, Enterococcus faecalis V583
MNNLFIFVCFCFMWLMIFGVILYYVGLVNHRYIHHTLILGLVTIISGTLCWLFVGYSLSFFGNIQYSIFYSPLASSEIVSILIQLLFCLYSVIMIIGSVLERGNWKYIVLFVPLWIVFVYAPICFSLWGHGNWLGKMGVLDYSGGLVVHTTAGIGSLVLAITSPIRLKNSLIFKSQEMIAFVGMLFITLGWFGFNMAPSGKIGEEAIQVWLNTLISILGGSISWTFTQWILIKKVSIYSIMNGIIGGLVGSTCSVGYVSPAFSLLISVIVCTLCPIVIHIMHLSIANFDDAADSFGMNAVGGIAGSILTGVMAEKGDFFLQLFGTFLISIWSLSLSLLIHYLLKKIVNDCYSQCIK

SEQ ID NO: 24124 - protein, 66 aa, Enterococcus faecalis V583
MNNGTVKWFNADKGFGFITGEDGNDVFAHFSAIQSDGFKTLDEGQAVTFDTEEGPRGLQATNIVKA

SEQ ID NO: 24125 - protein, 384 aa, Enterococcus faecalis V583
MDRKNIATRYQQPTENLLMDIATLAKKTPNLIDLSIGDPDLITDERIIEQAANDAKNGHTKYTASDGSEAFIEAVIQFYQSHYQLSFQPNQVRATVGALHGMYLALQVILNPGDEVIIHEPYFSPYKDQVLLADGVPVFLPTYEEDGFQIDVALLKEKITPKTKAIILNSPNNPTGAVFSEETFREIAQVAIEHNLYILSDEVYEAFCFQETFTPMATFAPENTITFGSFSKAFAMTGWRIGYMIAPDYINEVAKLINEGVTYSAPTLSQQAGIYALQHFDEFVDPIVEVFQTRLEYVAQRVAKIPFLSLHPVKGSIYAFINIQKTGLTSVPFVEKLLKETQVLVIPGKAFGETTGDEYIRLAATQNLDLLKEAFDRIERMTFE

SEQ ID NO: 24126 - protein, 362 aa, Enterococcus faecalis V583
MEQSLIVRGTPQEYLCEIGSWELLEGQLLCRNIHRVFILHGTESWQAAKPYFPTFQKVTAVFENYGGVCTDQRVQELEAQVLDNHLEAIVAVGGGKVADLGKALAHKMALPVIILPTLAATCAPCTPLSVMYREDGAMERYDVFPQANALVLVEPRVLLHSPRSLMVAGIGDTLAKWYEADAIISQLDVQVLPIQVSHFAAEKCRDILLNESINALKAMEEQQLNQSFIDVIETNLIIGGMVGGFGDDYGRTAGAHSIHDALTLLPASHRQLHGNKVAYGVFVQLAIEEKWQEIAELIPFYHQLGLPISLKEMDMDLTEAEYQEVAERACIEGETIHYMKQKITPEIVKTAMQDLEKYTATK

SEQ ID NO: 24127 - protein, 463 aa, Enterococcus faecalis V583
MSIFRKKEITVPVNDSGGMKKNLKTMDLIFLGIGAVVGTGIFVVTGVAAERYAGPGLVLSFLVAAAAIILSGLCYAEFASRIPVIGGPYAYMYVVFGEIVAWMTGWMIICEFFLAVSSVASGWSGYVHGFLDSLGFSLPQALSGAYNPTNGTYIDLIAMLVVVAVTFWVSLEAKTALRLNNLMVFVKFGIILLFVLVGIFYVKPTNWQPFIPYGFSGVFSGAALVFFAFLGFDAVSMAAEEVKNPKKDIPKGIIGSIIISTLLYIVVTLVLTGIVPFTDLGVKDPVAFAMRFINHGAIATIISVGAILTLLTVTIAMMYSLARVIYAISKDGLLPQFMSKIDEKRHTPKNATYVAGFLAMVFAGIVPMEMLAELTNIVTLFYLMFLALGIIKLRTMKGEPQAGEFKVPLVPVLPLISIVVCAALMFQLSLATWQVFGVAVVIGLAIYFFYGRHHSIVRFETKE

SEQ ID NO: 24128 - protein, 327 aa, Enterococcus faecalis V583
MELFDSLKFKVVRRNIKIVFPEATDPRILGAAARLKSDELVEPILIGDPTDIANAAMARGINTSNFIIINPNDYEKWDEMVEAFVERRNGKATKEDAEKILKDVNYFGTMLTYMGIADGMVSGAIHSTGDTVRPALQIIKTKPGVSRTSGAFLMIRGRDQERYLFSDCAINVNPTAQELAEIAVDSAKTAELFDIEPKVSLLSFSTKGSAKAPEVTKVAEATKIAQELAPEYAIDGELQFDASYVSSVAQLKAPNSKVAGEATVFVFPDLQSGNIGYKIAQRLGNFEAIGPILQGLNKPVSDLSRGANEEDVYKLSIITAAQTLMND

SEQ ID NO: 24129 - protein, 102 aa, Enterococcus faecalis V583
MYAIIKTGGKQVKVEVGQAIYVEKLNVEAGEKVVFDEVILVGGESTKVGAPTVAGATVEGTVEKHGKQKKVVTFQYKPKKHSHRKQGHRQPYTKVMIEAINA

SEQ ID NO: 24130 - protein, 275 aa, Enterococcus faecalis V583
MKKQNKWLAGLSLLVLAGIIVGCGSGNNDSTSKSASSNKTVTVEQLKKAGKIKVGVKEDIPNFGYMNPDTNKNEGMEPDIARLIAKEITGSEENVEFVGVTAKTRGPLLDNGELDMVIATFTITDERKKTYNFTTPYYTDEIGFLVRKEDNFSSMKDLDGKTIGVAQSATTKENLEKKAQEEGIKFTYQELGSYPELKTALTSKRIDAFSVDKSILSGYVDGKTEILKDGFSPQEYGITTKKANTELNDYLNGLIEKWEKDGTLEKIYQDWGLKN

SEQ ID NO: 24131 - protein, 550 aa, Enterococcus faecalis V583
MSKKGSDIIVESLINHEVPYIFGIPGAKIDGVFDALVDKGPELILARHEQNAAFMAQGIGRLTGEPGLVIATSGPGASNLATGLVTATAEGDPVLALAGQVKRSDLSKLTHQSMNNAALFSPITKFSTEIQDPETLSENIANAYRIAKTAKKGATFLSIPQDVTDSPVTGEAIKPLSAPKLGHASAGTIAALAERIKQAKLPVLLLGMRASARKVTAAIRELVAITGLPVVETFQGAGIISKELEEHFFGRVGLFRNQPGDRLLKRSDLVIAIGYDPIEYEARNWNAEKDARVIVIDEVQMEIDQYMQPEEELIGDMSKNILKLSEAFSEPILTEDAQDYLETLQEKLTIKEVKTSTIENRLHPLEIVQTLQEKTTNEMTVTVDVGSHYIWMARHFRSYEPRHLLFSNGMQTLGVALPWAISAALVRPNTQIISVSGDGGFLFSAQELETAVRLKQNIVHIIWNDGSYDMVKFQEEMKYNRSSGVDFGPVDFVKYAEAFGAKGVRVHSQAEFAAALEEGMQTEGPVIIDVPVDYSDNQELGKTLLPDQLY

SEQ ID NO: 24132 - protein, 379 aa, Enterococcus faecalis V583
MRKALILPTKYVQGEDELLNLGYFVSTFGKKALLIANPADVDRVRPQLEETAKKFDITFVEGGFSGEVTREETKRLQNVGQKEQADCIIGLGGGKAIDASKVVAEGENLIIVPTIAAQDAPTSHSAVLYHEDGSFDDYAYFKQSPSVVMVDTKVVAKAPTRFLVAGMGDALSTYFEARATHNSYSRVNASLPMGSREGLTPAASGTYAALAMAKLCWENLQEDGLKAKLACDANVVTESLNKIIETNILLSGLGFESGGLAAAHAIHNGMTVLPGAHSYLHGEKVAFATIAQLVLEDAAKDELEAVLDFSASVGLPLTLSDIGVDEITYEEALEVAKIACIPEESIHSMPFPIVVEEVANAIIVADKVGQEYKTRHKLD

SEQ ID NO: 24133 - protein, 803 aa, Enterococcus faecalis V583
MKTVVIIDALRTPIGKYKGSLSQVSAVDLGTHVTTQLLKRHSTISEEIDQVIFGNVLQAGNGQNPARQIAINSGLSHEIPAMTVNEVCGSGMKAVILAKQLIQLGEAEVLIAGGIENMSQAPKLQRFNYETESYDAPFSSMMYDGLTDAFSGQAMGLTAENVAEKYHVTREEQDQFSVHSQLKAAQAQAEGIFADEIAPLEVSGTLVEKDEGIRPNSSVEKLGTLKTVFKEDGTVTAGNASTINDGASALIIASQEYAEAHGLPYLAIIRDSVEVGIDPAYMGISPIKAIQKLLARNQLTTEEIDLYEINEAFAATSIVVQRELALPEEKVNIYGGGISLGHAIGATGARLLTSLSYQLNQKEKKYGVASLCIGGGLGLAMLLERPQQKKNSRFYQMSPEERLASLLNEGQISADTKKEFENTALSSQIANHMIENQISETEVPMGVGLHLTVDETDYLVPMATEEPSVIAALSNGAKIAQGFKTVNQQRLMRGQIVFYDVADPESLIDKLQVREAEVFQQAELSYPSIVKRGGGLRDLQYRTFDESFVSVDFLVDVKDAMGANIVNAMLEGVAELFREWFAEQKILFSILSNYATESVVTMKTAIPVSRLSKGSNGREIAEKIVLASRYASLDPYRAVTHNKGIMNGIEAVVLATGNDTRAVSASCHAFAVKEGRYQGLTSWTLDGEQLIGEISVPLALATVGGATKVLPKSQAAADLLAVTDAKELSRVVAAVGLAQNLAALRALVSEGIQKGHMALQARSLAMTVGATGKEVEAVAQQLKRQKTMNQDRAMAILNDLRKQ

SEQ ID NO: 24134 - protein, 66 aa, Enterococcus faecalis V583
METGTVKWFNSDKGFGFITAENGNDVFVHFSAIQGDGFKTLEEGQAVTFEIEEGQRGPQATNVTKA

SEQ ID NO: 24135 - protein, 274 aa, Enterococcus faecalis V583
MDFFSSEEIVASLGDKAEMKGKLSFVRLCILGIMAGFCIALGYLAFIRITGTAPTEWGSFNNFLGGALFPVGLIALTFVGGELATGNMMVMTLGVLQKKVRVGALCYNWIVVLLTNCLGGFLVAYLFGHIVGLTEGAFLDKTVAVAQAKIADPPLVAFVSGIGCNIFVCLAVYLGALAKSYLGKMFGLWFPVMVFVVCGFQHVVANAFIIPAAIFSQSTTISWWDYLQNTLWVFLGNAVGGSLFMAVPLIFMTKPATVKPRVEKTIQTEELYGN

SEQ ID NO: 24136 - protein, 582 aa, Enterococcus faecalis V583
MNSFEWIWQYAKKNKNKLLLAVIFVVINAILIVIIPLLSGRIVDQVINQGKTEELVPILGIMIGVTVIRTVVRYSYQVLFESVGQSALFDLRKDMYVKLQELDFDFFNHTRVGDIMARMTGDTDAIRHFVSWVTYNLLECILWFIAAVIVMGTINWQLMLALILITPLIFLLTQKMSKESHPVFFEIRESFSRLNSMVEENIGGNRVVKAFSQEPYEIEKFNKHNEDYKKWNMASADVSKKYLPWLDGFAGSLNVIALVLGGLFVIQGRMTIGDLVAFNGFLWMLNMPMRMSGWLINDVQRFTASSIKIRQLLATKPKIPIAREKEAEPIQGYVTFDHVSFHFSDDPETPILSDVSFSAKPGETIGILGETGSGKTTLVNLIARFYDPTKGTVYIDGKDAKSYSVRKLRENISMVMQDVFLFSNTIEDNIAFGNTLANLEQVQMMAEIADAHSFISRMPEGYATIVGERGVGLSGGQKQRISLARALTKDPAILILDDTTSAVDMETESKIQKELGRLTEKKTTFIIAHRISSVREANLILMMEKGRVVESGTHSELVEQKGKYFDVYQKQLGLTKEGESRG

SEQ ID NO: 24137 - protein, 392 aa, Enterococcus faecalis V583
MDLTNRFNRQVNKIAVSLIRQFDEQVSGIEGILKLTLGEPDFNTPEHVKKAAKEAIDANFSHYTGMSGLLDVREAAAYFMKEKYHLTYQPATEILVTVGATEAISASLLAILEQGDKVLLPAPIYPGYEPIITLAGAEPVYLDTRDNDFVLTPEMIEAAMAEHGEQVKAIILNYPSNPTGVTYNRQELQAIADVLKKYDIFVISDEIYSELTYDESHVSIAEMLRDQTILINGLSKSHAMTGWRIGFIFAPAILTAEIIKVHQYLVTAAATVSQKAAVRALIEGMHDAEIMKEEYRKRRDFVYEQMTQLGFEVARPNGAFYIFAKIPTGYEQDSMKFCIDLAQKEAVALIPGISFGPEAEGYVRISYASDMDKLTTAMERIAHYMATQRVTH

SEQ ID NO: 24138 - protein, 68 aa, Enterococcus faecalis V583
MQKGIVKWFDNRKGYGFIVYNEEDEIFVHFTAIEGDGFKSLDENQSVEFEIMEGNRGLQAAHVKKIDN

SEQ ID NO: 24139 - protein, 131 aa, Enterococcus faecalis V583
MKVTMLKGKIHRAKVEQAELDYVGSITVDMDLLEAAGIYEYEKVQIVDVNNGNRFETYTIAGERGTGMICLNGAAARCVSTGDKIILMAYCELNENEVKDHRPKVVFVDDNNKVERVTSYEKHGRLSDIIL

SEQ ID NO: 24140 - protein, 395 aa, Enterococcus faecalis V583
MSKTIAINAGSSSLKWQLYQMPNEEVIAKGIVERIGLKDSIFTIKYGEGQKYEVIVDIDNHEVAVKMLLDQLIDLNILGSYDEITGVGHRVVAGGEEFKDSVVITDEVLEKIEALSELAPLHNPANAMGIKAFKHILPEIISVAVFDTSFHTTMPEHNYLYSVPREYYEKFAARKYGAHGTSHRYVSQRAAEMLGRPIEDLKIITCHLGNGASITAVDGGKSVDTSMGFTPLAGVTMGTRSGDVDASLLPYLMTKLGLTDVQDMVDILNKKSGLLGLTNGLSSDMRDIQSNLDKPEVQTAYNIFIDRIRKYIGSYVTVMNGVDAIVFTAGIGENAVGVRKDIIDGMTWFGCEIDDDKNNVHGEEAVISTDDSKIKLLLVPTDEELMIARDVERLK

SEQ ID NO: 24141 - protein, 66 aa, Enterococcus faecalis V583
MNNGTVKWFNSDKGFGFITGEDGNDVFAHFSAIQADGFKSLEEGQAVTFDIEEGQRGMQAVNIFKA

SEQ ID NO: 24142 - protein, 499 aa, Enterococcus faecalis V583
MTNFLFVVFKLEILKEIAILKRDRHRIFHENSYYFRYLFKKVEILLRFFSLNEMRESMEKKQLKREITTFGALSTVMGTVIGAGVFFKAASVVGHAQSASLAIFAWVLGGALTICAGLTSAELATAIPETGGAVKYIEYTYGKLAGFLLGWAQSIIYYPANISALSIIFSTQLINLFHLSANLLIPIAILAGTSITIINLLGTKIASLVQSTTLVVKLIPIALISLVGLFTPGQVAVSLFPVETTANTGFLVAFSGALVATMFAYDGWLGVGNVAGEMKRPERDLPKAIIFGLLLITLIYALINFVFLKTLPIEQIAGNLNAASDASVAIFGPIGGKIVTIGILISVYGALNGYTMTGIRIPYALALDNLMPFSRQFQKLSKRFVVPYVAGIFQLAVAIIMMFFGTFDLLTDMLVFVMWLFNLLIFLAVFILRKREPELKRPYKVPGYPIIPIIASLGGIFILVTTSITQPILALIGIGITLLGIPVYLVNKQKTKPKT

SEQ ID NO: 24143 - protein, 381 aa, Enterococcus faecalis V583
MEPIYLDHAATTPLHPTVIQAMTENMQTTFGNPSSIHQFGRKAHGLLEEVRQTIAESLQAKPHEIIFNSGGTEGDNTAILAVAFSRQKEGKHIITTAIEHPAVLRTMEYLETLGFEVTYLPVNENGQISMDQFKKSLREETILVSMMYGNNEIGNRLPIAEVGAILKNHSAIFHTDAVQAYGSEVILPHELGIDLLSISAHKINGPKGVGFLFKSDAIQLPPLLHGGEQEEKRRAGTENLAGIIGMGTAVSLLTSAEKQARKTAYQSFQTIILKALEEANIDFSINGEPTNRLAHVLNLHLKGIPSDLLLMHLDLRGIAISTGSACTAGTVDPSHVLTAMYGENSSAIKESIRISFGYGNTPEEIATFSEVLVAVIQQLKK

SEQ ID NO: 24144 - protein, 324 aa, Enterococcus faecalis V583
MTENYQDDTLRIFSLNANRPLAEKIAASVGTELGKSTVRQFSDGEIQINIEESIRGDHVYIIQATNAPVNDHLMELLILIDALKRASAKTVNVILPYYGYARQDRTAKPREPITAKLVANMLVEAGATRLLTLDLHTVQVQGFFDIPVDNLFTMPLFAHYYRQQALVGEEIVIVSPKNSGVQRARSLSEYLDATLAIVDHEEIDGVRQEGYVIGNVAGKKCILVDDILNTGQTLATAAEVLMKNGAQEVYACASHGLLSEGAKATLENAPIKEISITDSVYTTADRQPATLNIISCAELMGEALLRIHENKPMSPLFRLEPKGE

SEQ ID NO: 24145 - protein, 399 aa, Enterococcus faecalis V583
MNVSNRAQQLTPSVTLAAAAKAKALKAKGVDVLSLTVGEPDFVTPKNIQKAAIASIEDGRASYYTPSGGIPELKQAIVSYVEREYQLRYQPKQVIVTDGAKYALYLLFQAILNVGDEVIIPVPYWVSYGEQVKLAEGKPVFVSSTQEQSFKVSVAQLEAVRTDKTKAIILNSPSNPTGVIYTEEELRQIGEWAVAHNILIIADDIYGRLVYNGHRFTPIATISEAIRQQTIIINGVSKTYAMTGWRIGFAVGDEKIIQAMTQLASQSTSNPVAVSQYAAIEALTGEQSTVEDMRQAFEKRLNHIYPKVAALPGVSLIKPEGAFYLFPNVKKTLEICGYDNVTNWVEDLLQEAHVALVTGEGFGAPEHVRMSYATDLMTLEKAIERMNDFIEKKRIQHNA

SEQ ID NO: 24146 - protein, 256 aa, Enterococcus faecalis V583
MSVLEIKNLHVSIEDKKILKGVDLTINTGEIHAIMGPNGTGKSTLSAAIMGNPNYEVTEGEILFDGVNVLDLEVDERARLGLFLAMQYPSEIPGITNAEFMRAAINAKRDEDNKMSVMQFLKKLDSKMELLNMPEEMAERYLNEGFSGGEKKRNEILQLLMLEPTFAILDEIDSGLDIDALKVVSKGVNEMRGENFGALIITHYQRLLNYITPDVVHIMMEGRVVKTGGADLAKRLETEGYAGISQELGIDYKEEA

SEQ ID NO: 24147 - protein, 300 aa, Enterococcus faecalis V583
MTTEHKSGFVAIVGRPNVGKSTLLNRIVGQKIAIMSDKAQTTRNKIQGIYTIPEAQIVFIDTPGIHKPKHRLGDFMVESAYNAMREVDATLFMVSADQKRGKGDDFIIERLKNNNSPVYLIINKIDKVHPDDLLSIIEDYSKQMDFKEIIPISATEGNNFEHLMDVLVEQMPEGPQYFPDDQITDHPEYFIVSELIREKVLLLTRDEIPHSVAVVVDSMKRDENDKVHVQATIIVERDSQKGIIIGKGGKMLKQIGTKARQDIEYLLDDKVYLELWVKVQKDWRDKKIYLQDFGYRKEEY

SEQ ID NO: 24148 - protein, 622 aa, Enterococcus faecalis V583
MSSRPKGGPMGGGPGRNIGAKGPKPKNFWKTVKRLFRYMSKRMLSIIAVLVLAIAAVVFQIQTPKVLGQATTEIFKGVMKGAAEMKQGLKITSFPIDFDKIGQILLIVIAMYLISAVFNFLQQVIMTRVSQRTVYELRQELEAKMNKVPISYYDTHSNGDIMSRAINDMDNIASTLQQNLTQLITSIVTFVGVLWMMLTISWQLTLIALATVPLSLIVVMVVAPRSQKHFAAQQKSLGLLNNQVEETYGGHVVVKSFNHEESDQEVFEKENEKLYHAGRKAQFISAIIMPLMNFIKNLGYVFVAVLGGVKVANGMMDLGDVQAFLQYTNQFSQPITQIANLMNTIQATVASAERVFEVLDEEEMVDEPSGIPVETDSPYRVSFEHVAFGYSPEKLLMKDFNLNVKPGEMVAIVGPTGAGKTTLINLLERFYDISSGSIKYDGVDTRDLSREELRAHFSMVLQDTWLFTGSIYDNIHYGNEQASEEEVIRAAKAAHVDDFVRKLPEGYQTILNEEASNISQGQRQLITIARAFLANPDVLILDEATSSVDTRTEILIQAAMNRLLENRTSFVVAHRLSTIRDADTIIVMAEGSIVETGTHDELMAKNGFYADLYNSQFSEEVA

SEQ ID NO: 24149 - protein, 369 aa, Enterococcus faecalis V583
MTEAIHCIGCGAIIQTENPHELGYTPKTAFEKGMETGEVYCQRCFRLRHYNDIQDVQLTDDDFLRLLNGLGTEDALIVNVVDIFDFNGSLIPGLHRFIGDNPVLLVGNKVDILPKSLKKPKMVQWMRERAHEAGLRPVDVLLTSGKKPQEMQELLDTIEKYREGRDVYVVGVTNVGKSTLINQIIQQTVGVQDVITTSQFPGTTLDKIEIPLDDGHFLIDTPGIIHRHQMAHYLGKKDLKIIAPQKEIKPKVYQLNAEQTLFLGGLARFDYVQGAKSSFIAYVSNDLKLHRTKTATADAFYEKHVGGLLQPPRADEVAEFPELVRFEFSVKEKTDIVFAGLGWITVTEPGVVAGWAPKGVDVLRRKALI

SEQ ID NO: 24150 - protein, 296 aa, Enterococcus faecalis V583
MSKIGFIGTGVMGKSIIRNMMKNNLSVNVYNRTKSKTDDLVAEGAVWYDTPKAIAEASDIIFTMVGFPSDVEGVYFNETGIFQADLTGKIVVDLTTSTPTLAEKIAKKAAEVGAHALDAPVSGGDLGAKNGTLTIMVGGDQESYDTVLPIFKTFGKTFMLHGSAGKGQHTKMANQLMIAGTMTGLTEMLVYANATGLTLEKVLETVGGGSAANWSLSNYGPRILKEDYTPGFFVKHFIKDLKIALDEAKKLDLPLPATQKATELYESLADKGFENDGTQALIKLWWTDGKQPTNKN

SEQ ID NO: 24151 - protein, 66 aa, Enterococcus faecalis V583
MEQGTVKWFNAEKGFGFISREDGSDVFVHFSAIQGDGFKTLEEGQAVTFDVEDSDRGPQAVNVEKN

SEQ ID NO: 24152 - protein, 368 aa, Enterococcus faecalis V583
MLTDLKVKVGPQFYRYHEGALASVPSLFKEYHAQRILVVHGTVSFEKAQPFLPFLADSEYQFFYHTYTGECSYFGAEQISQQIKEHQIDFLLGVGGGKLADLVGYSAHLNNLNFGLVPTLASNCAPWTPLAVMYQENGAAEGKTEHFFRQAAFLITDPKLLLDAPRDYFVAGLADTLAKWYESETILRQAHLQGEPFLQLAGATAKLSQEAIMRDSKAALAAMDEGKLTPEFVHLSEIVFAVSGLVGGFGDKYARNAAAHAMHDAMSKFLPKSHDYLHGEKVAYGIFYQLALEKRWAIIDALIPFYQELNLPMSLRQMGLYPKEEAVLDAMVQFIDSKEKVHLIPIEISEERLRQGIKELEKYIQNQG

SEQ ID NO: 24153 - protein, 323 aa, Enterococcus faecalis V583
MSKHYFDPRLKIFSLNSNRPLAEKIADAVGVELGKCSVTQFSDGEIQVNIEESIRGAHVYVIQSTSSPVNDNLMELLIMIDALKRASAKTINVVMPYYGYARQDRKARAREPITAKLVANMIEKAGATRMLTLDLHAVQIQGFFDIPVDHLMGAPLIADYFIEHGIQGDDVVVVSPDHGGVTRARKLAEFLKAPIAIIDKRRPKANVAEVMNIIGHVEGKTCVLIDDMIDTAGTISLAANALKEAGAKDVYASCTHPVLSGPALQRIEDSAIERLVVTDSIYLSDDRKIVKIDEVSVGELIGDAIKRIHENKPVSPLFETKNK

SEQ ID NO: 24154 - protein, 225 aa, Enterococcus faecalis V583
MEFMLDTINLEAIRKYQKILPLAGVTSNPSIVKQAGKIDFFAQMKEIKKTIGQASLHVQVVGQTTEEMLEDAQTIVQQLGQETFIKIPVNEAGLAAIKQLKQANYRITATAIYTEFQGYLAIAAGADYLAPYYNRMENLTIDSQKVIEHLAAEIKRTNAKSKILAASFKNVAQINQACQMGAQAVTIAPELVTQGLAMPAIQKAVTDFQEDWVAVFGVETVNELA

SEQ ID NO: 24155 - protein, 275 aa, Enterococcus faecalis V583
MKKYKRLLLMAGLVTLVFVLSACGTAPVSESSTGIWDRYIVYYFAQAIKFLSLGGSVGIGIILFTLVIRIILLPLMHFQTKSMRKTQELQPQLKALQQKYSSKDPETQRLFREEQQRLYAENNVNPYIGCLPLLVQLPIMMALYQAISRVPELKEGTFLWLSLDKPDPYLILPILAAVFTFASTYLSSMSQLETNASLKIMNYVMPAMIFFMGISLASSLSLYWVVSNAFQTGQTLLLNNPFKIRKEREEAARQAKARERALERAKSPKKKGKKK

SEQ ID NO: 24156 - protein, 630 aa, Escherichia coli
MCGLAGFLESNLNDNNSAKVLHSMGESIYRRGPDGTGIWFENIENKINVGFVHTRLAIIDLSDAGQQPMHSHCGRYVIAFNGEIYNHLELRYLLESNNHISWRGHSDTETLLACFGIWGIDKTLQACVGMFAIALWDKKEHRLTLARDRVGEKPLYWGWQDDALLFGSELKALKTHPAFSAEINRDALCLLLRHNYIPAPHTIYRGIQKLQPGHYLSVELSNDERKETLHQYWSYEKVVQEGLVNPFMGSPIQAVEHLESLIAQSINGQLISDVPLGAFLSGGIDSSLIVSIMQSLSSSPVKTFSIGFDDKKYDEAIFAVEVARHLGTDHTEMYVNDKDIQDVIPLLPEVYCEPFADSSQLPTFLVSKMAQQHVTVALSGDAGDELFGGYTPYSFTPKYWNYARNIPLQIRKFASRYIDKLPVNPKFKKLIECMAVQNPQLFYRNIISHWLNPEELVKNSSEPSTAFSSSTTFPVNGGYVDWMMSVDAQVYMTDDILVKVDRAAMYNSLETRVPLLDHRIIEFAWQLPVSLKINNGVGKWPLREILYKRVPKSMIERPKKGFSVPLSSWLRGPLRDWAEELIAYKRLADEGYFNVAAVRSCWNLHIQGQADYSRKLWSILMFQSWLENQK

SEQ ID NO: 24157 - protein, 1207 aa, Solanum lycopersicum
MKAHKTVFNQHPLSLNKLFFVLLLIFFLPPASPAASVNGLYKDSQQLLSFKAALPPTPTLLQNWLSSTGPCSFTGVSCKNSRVSSIDLSNTFLSVDFSLVTSYLLPLSNLESLVLKNANLSGSLTSAAKSQCGVTLDSIDLAENTISGPISDISSFGVCSNLKSLNLSKNFLDPPGKEMLKAATFSLQVLDLSYNNISGFNLFPWVSSMGFVELEFFSLKGNKLAGSIPELDFKNLSYLDLSANNFSTVFPSFKDCSNLQHLDLSSNKFYGDIGSSLSSCGKLSFLNLTNNQFVGLVPKLPSESLQYLYLRGNDFQGVYPNQLADLCKTVVELDLSYNNFSGMVPESLGECSSLELVDISYNNFSGKLPVDTLSKLSNIKTMVLSFNKFVGGLPDSFSNLLKLETLDMSSNNLTGVIPSGICKDPMNNLKVLYLQNNLFKGPIPDSLSNCSQLVSLDLSFNYLTGSIPSSLGSLSKLKDLILWLNQLSGEIPQELMYLQALENLILDFNDLTGPIPASLSNCTKLNWISLSNNQLSGEIPASLGRLSNLAILKLGNNSISGNIPAELGNCQSLIWLDLNTNFLNGSIPPPLFKQSGNIAVALLTGKRYVYIKNDGSKECHGAGNLLEFGGIRQEQLDRISTRHPCNFTRVYRGITQPTFNHNGSMIFLDLSYNKLEGSIPKELGAMYYLSILNLGHNDLSGMIPQQLGGLKNVAILDLSYNRFNGTIPNSLTSLTLLGEIDLSNNNLSGMIPESAPFDTFPDYRFANNSLCGYPLPIPCSSGPKSDANQHQKSHRRQASLAGSVAMGLLFSLFCIFGLIIVAIETKKRRRKKEAALEAYMDGHSHSATANSAWKFTSAREALSINLAAFEKPLRKLTFADLLEATNGFHNDSLVGSGGFGDVYKAQLKDGSVVAIKKLIHVSGQGDREFTAEMETIGKIKHRNLVPLLGYCKVGEERLLVYEYMKYGSLEDVLHDRKKIGIKLNWPARRKIAIGAARGLAFLHHNCIPHIIHRDMKSSNVLLDENLEARVSDFGMARLMSAMDTHLSVSTLAGTPGYVPPEYYQSFRCSTKGDVYSYGVVLLELLTGKQPTDSADFGDNNLVGWVKLHAKGKITDVFDRELLKEDASIEIELLQHLKVACACLDDRHWKRPTMIQVMAMFKEIQAGSGMDSTSTIGADDVNFSGVEGGIEMGINGSIKEGNELSKHL

SEQ ID NO: 24158 - protein, 1207 aa, Solanum peruvianum
MKAHKTVFNQHPLSLNKLFFVLLLIFFLPPASPAASVNGLYKDSQQLLSFKAALPPTPTLLQNWLSSTDPCSFTGVSCKNSRVSSIDLSNTFLSVDFSLVTSYLLPLSNLESLVLKNANLSGSLTSAAKSQCGVTLDSIDLAENTISGPISDISSFGVCSNLKSLNLSKNFLDPPGKEMLKGATFSLQVLDLSYNNISGFNLFPWVSSMGFVELEFFSIKGNKLAGSIPELDFKNLSYLDLSANNFSTVFPSFKDCSNLQHLDLSSNKFYGDIGSSLSSCGKLSFLNLTNNQFVGLVPKLPSESLQYLYLRGNDFQGVYPNQLADLCKTVVELDLSYNNFSGMVPESLGECSSLELVDISNNNFSGKLPVDTLLKLSNIKTMVLSFNKFVGGLPDSFSNLPKLETLDMSSNNLTGIIPSGICKDPMNNLKVLYLQNNLFKGPIPDSLSNCSQLVSLDLSFNYLTGSIPSSLGSLSKLKDLILWLNQLSGEIPQELMYLQALENLILDFNDLTGPIPASLSNCTKLNWISLSNNQLSGEIPASLGRLSNLAILKLGNNSISGNIPAELGNCQSLIWLDLNTNFLNGSIPPPLFKQSGNIAVALLTGKRYVYIKNDGSKECHGAGNLLEFGGIRQEQLDRISTRHPCNFTRVYRGITQPTFNHNGSMIFLDLSYNKLEGSIPKELGAMYYLSILNLGHNDLSGMIPQQLGGLKNVAILDLSYNRFNGTIPNSLTSLTLLGEIDLSNNNLSGMIPESAPFDTFPDYRFANNSLCGYPLPLPCSSGPKSDANQHQKSHRRQASLAGSVAMGLLFSLFCIFGLIIVAIETKKRRRKKEAALEAYMDGHSHSATANSAWKFTSAREALSINLAAFEKPLRKLTFADLLEATNGFHNDSLVGSGGFGDVYKAQLKDGSVVAIKKLIHVSGQGDREFTAEMETIGKIKHRNLVPLLGYCKVGEERLLVYEYMKYGSLEDVLHDRKKTGIKLNWPARRKIAIGAARGLAFLHHNCIPHIIHRDMKSSNVLLDENLEARVSDFGMARLMSAMDTHLSVSTLAGTPGYVPPEYYQSFRCSTKGDVYSYGVVLLELLTGKQPTDSADFGDNNLVGWVKLHAKGKITDVFDRELLKEDASIEIELLQHLKVACACLDDRHWKRPTMIQVMAMFKEIQAGSGMDSTSTIGADDVNFSGVEGGIEMGINGSIKEGNELSKHL

SEQ ID NO: 24159 - protein, 305 aa, Linum usitatissimum
FAMSLLASSGSAQLAANFYATSCPTLLTIVRNAMTQAVNSENRMAASILRLHFHDCFVNGCDGSLLLDDTATFTGEKNAGPNQNSVRGFDIIDTIKTRVEAACNATVSCADILALAARDGVVLVGGPTWTVPLGRRDARTASQSAANAQIPAPGSSLGTITNLFTNKGLTARDVTILSGAHTIGQARCTTFRQRIYNDTNIDPAFATTRRGNCPQAGAGANLAPLDGTPTQFDNRYYQDLVARRGLLHSDQELFNNGTQDALVRTYSNNAATFATDFAAAMVRMGNISPLTGTNGEIRFNCRRPN

SEQ ID NO: 24160 - protein, 583 aa, Penicillium marneffei
MYNAHRGMVPAPNNRLTELLEQLRQEFESQSRSTGEFEHQLTGQIQEMEMIRQKVYQLEQAQIKIKAEYENEIRVLRHELESRGVQTVPSHVGGPTHAGPSQAPPALGHGTNNLFGGIMANQGGSGPGLAPPPPQEQQPPQHGLQQPAPAAQQGPPQPPQSSYGGYQPSAGVNGYGPPPPPTASPGPGKGRGRAPPGPATPQQTHQLNYPAPGASPQIPRPTPTGQLVRERPGNTLANWNPDDLPASQKREGPDWYAVFNPEVQRVLDVELVHHLVHDSVVCCVRFSRDGKYVATGCNRSAQIFDVATGQNVATLQDESVDKDGDLYIRSVCFSPDGKYLATGAEDKQIRVWDIATRSIKHVFTGHEQDIYSLDFAGNGRYIASGSGDKTVRLWDVLEGKLVYTLSIEDGVTTVAMSPDGHYVAAGSLDKSVRVWDTTTGYLVERLENPDGHKDSVYSVAFAPNGRDLVSGSLDKTIKMWELTAPRGMLPGTGVKGGKCVRTFEGHKDFVLSVCLTPDGHWVMSGSKDRGVQFWDPNTGSAQMMLQGHKNSVISVAPSPTNNLFATGSGDMRARIWRYVEFPE

SEQ ID NO: 24161 - protein, 256 aa, Selaginella remotifolia
ETWLVTTTSSSNPEVGLATGLAATGGAQDLLNPPLNKQKEPPVGRGKIEIKRIENATSRQVTFSKRRGGLLKKAHELSVLCDAQVALIIFSSTGKLFEYASTSMKEILDRYGKYPESVQGGNMASHHEASDFISHEIRRLKQQLQRSQQSRRHLLGDDLSHLPIKDLQNLEQQLEVGLSRVRSRKDQVLMDQVDELRRRELTLHKDNEMLRRRLSDVQGMAESGRSTLIVNPWRQGNLLQTWQMYPCHFLDTKAAA

SEQ ID NO: 24162 - protein, 263 aa, Ceratium horridum
MLSIKNLEARIEEKEILRGINLEVKPGEIHAIMGPNGSGKSTLASVLAGREDYEVTSGDVDFLGKDLLDMDADERAREGIFLACQYPVEIPGVSTTNFMKTAINQVREHHGEKPLDAVSFLKLMKEKMKLVEIDQSLLSRSLNEGFSGGEKKRNEIFQMAMLEPKLAILDETDSGLDIDALKIVANGVNALKSKDNATIVVTHYQRLLDYIVPDYVHVLYKGRIVKSGTKDLALELEAKGYDWIKEEVTQLFKQWINYQVNLF

SEQ ID NO: 24163 - protein, 775 aa, Cyanidioschyzon merolae strain 10D
MAHHRCDAAACVFNQHAQEARTHARTHARTLARMHHRRLRKQSESASLQPLDSIARNGGAANTTTAFGVVVVVCDVVPRRVKELGQVDMATRRFSYRRVSIWNWALVAVLVHVCCCLFGRAVLVGAKDASSGGGKIEGPVIGIDLGTTYSCVGVFKNGKVEIIANEQGNRITPSYVAFTDKERLIGDAAKNQLALNPERTIFDVKRLIGRRFDEETVQKDIKLLPYKVVNKDGKPYIRVEVRDGEVKTFSPEEISAMILGKMKKIAEDYLGKPVKNAVVTVPAYFNDAQRQATKDAGTIAGLTVQRIINEPTAAAIAYGLDKGGSEKNILVFDLGGGTFDVTLLTLDDGVFEVLATNGDTHLGGEDFDQRVMDYLVKQFKKKNDGLDLRTDKRAMAKLRREVEKAKRALSYQTQVRIEIESIMDGKDLIEELTRARFENLNMDLFRKTLKPVEIVLKDAKKEKKDIDEIVLVGGSTRIPKIQELITEFFDGKQPSKGINPDEAVAYGAAVQGAILSGEGGETTKDILLLDVTPLSLGIETVGGVMTKIINRGTTIPTKKSQIFTTHVDRQSSVLIQVYEGERVATKDNHLLGKFELTGIPPAPRGVPQIEVTFEIDANGILQVSAEEKTAGKREKITIRNDKGRLKDEEIQRMVREAEEYAEVDAKLKRKVDAKNNFENYIYQVRQMYEDKDKKTKLSTDDIDKLKDSVESAQDWLDEHGEASDAAAIEERMKAFQDVVQPIILKTYESAKGTGKDSSADSSADDDRDSEEHDEL

SEQ ID NO: 24164 - protein, 696 aa, Saccharomyces cerevisiae
MIVRMIRLCKGPKLLRSQFASGSALYSTKSLFKPPMYQKAEINLIIPHRKHFLLRSIRLQSDIAQGKKSTKPTLKLSNANSKSSGFKDIKRLFVLSKPESKYIGLALLLILISSSVSMAVPSVIGKLLDLASESDGEDEEGSKSNKLYGLTKKQFFTALGAVFIIGAVANASRIIILKVTGERLVARLRTRTMKAALDQDATFLDTNRVGDLISRLSSDASIVAKSVTQNVSDGTRAIIQGFVGFGMMSFLSWKLTCVMMILAPPLWPMALIYGRKIRNLSRQLQTSVGGLTKVAEEQLNATRTIQAYGGEKKQVRRYAKEVRNVFHIGLKEAVTSGLFFGSTGLVGNTAMLSLLLVGTSMIQSGSMTVGELSSFMMYAVYTGSSLFGLSSFYSELMKGAGAAARVFELNDRKPLISSDYWKGSCVISPKTHRVFKNVSFTYPTRPKHQIFKDLNITIKPGEHVCAVGPSGSGKSTIASLLLRYYDVNSGSIEFGDEDIRNFNLRKYRRLIGYVQQEPLLFNGTILDNILYCIPPEIAEQDDRIRRAIGKANCTKFLANFPDGLQTMVGARGAQLSGGQKQRIALARAFLLDPAVLILDEATSALDSQSEEIVAKNLQRRVERGFTTISIAHRLSTIKHSTRVIVLGKHGSVVETGSFRDLIAIPNSELNALLAEQQDEEGKGGVIDLDNSVAREV

SEQ ID NO: 24165 - protein, 311 aa, Saccharomyces cerevisiae
MKDEYLKYKGVTVTDESGASNVDIPVGKYLSFTLDYVYPFTIIKQNFNKFMQKLLNEACNIEYKSDTAAVVLQEGIAHVCLVTSSSTILKQKIEYSMPKKKRTTDVLKFDEKTEKFYKAIYSAMKKDLNFDKLKTIILCSPGFYAKILMDKIFQYAEEEHNKKILDNKGMFFIAHCSTGYLQGINEVLKNPLYASKLQDTKYSKEIMVMDEFLLHLNKDDDKAWYGEKEVVKAAEYGAISYLLLTDKVLHSDNIAQREEYLKLMDSVESNGGKALVLSTLHSLGEELDQLTGIACILKYPLPDLDEDDGEE

SEQ ID NO: 24166 - protein, 238 aa, Triticum monococcum
MGRGKVVLQRIENKISRQVTFAKRRNGLLKKAYELSLLCDAEVALVLFSHAGRLYQFSSSSNMLKTLEKYQRYIFASQDAAVPTTDEMQNNYLEYMELKARVEVLQRSQRNLLGEDLAPLSTIELEQLEGQVGKTLRQIRSRKTQVLLDEMCDLKRKEQILQDANMTLKRKLGEIELEATPDPPQQPQQQQMWQGDRGVPPHTPPQPEHFFQALERYPSLQPVFRGMDVNQPPPAWMA

SEQ ID NO: 24167 - protein, 926 aa, Paracoccidioides brasiliensis
MNGTQLTDRANQALVDAHALAEQHAHPQLLPIHLAVSLLDPPVDESKDQQVTTHPSHQASSGSLFKRVVEKAHGDPQQLRRALNKSLVRLASQDPPPETISPSPAFAKVLRAASNLSKTQKDTYVAIDHLIAALAQDPTIQRALADANIPNVKMIDSAIQQIRGMKRVDSKTADTEEESENLKKFTVDMTAMAREGKIDPVIGREEEIRRVIRILSRRTKNNPVLIGEPGVGKTTVVEGLARRIVNADVPANLANCKLLSLDVGSLVAGSKYRGEFEERMKGVLKEIEESKETIVLFVDEIHLLMGAGSSGEGGMDAANLLKPMLARGQLHCIGATTLGEYRKYIEKDQAFERRFQQVLVKEPTVGETISILRGLKERYEVHHGVNILDGAIVSAANLASRYLTARRLPDSAVDLIDEAAAAVRVTRESQPEALDTLERRARQLQIEIHALAREKDAASKARLEAAKQEAANVNEELRPLREKYESEKQRSKDIQDAKIKLDLLKVKRDEATRSGDTQTASDLIYYAIPDVEKRIEQLEAERARQDAELSAQPGAGETLMADAVGPEQINEIVARWTGIPVTRLRTTEKDRLLHMESHLSKIVVGQKEAVQSVSNAIRLQRSGLSNPNSPPSFLFCGPSGTGKTLLTKALAEFLFDDPKAMIRFDMSEYQERHSLSRMIGAPPGYVGHDAGGQLTESLRRRPFSILLFDEVEKAAKEVLTVLLQLMDDGRITDGQGRIVDAKNCIVVMTSNLGAEFLQRPTASNGQIDPTTKELVMGALRNYFLPEFLNRISSIIIFNRLTRREIRKIVDVRLQEIQRRLEQNDRTVTIDCTDEVKDYLGNAGYSPVYGARPLSRLIEKEVLNRLAVLILRGAIKDGETARVVMQEGRITVLPNHVETESEDEEMIDESDTLAEMEEDMGERDLYE

SEQ ID NO: 24168 - protein, 579 aa, Nicotiana benthamiana
MLDSGKNVNFSKGKKKLFLTVVASVLLVAAVIGVVVGVKFRSNNSDDHADIQAITSAAHAIVKSACENTLHPELCYSTIASVSDFSKKVTSQKDVIELSLNITCRAVQHNFFKVEKLIKTRKGLKPREKVALHDCLETIDETLDELHTAIKDLELYPNKKSLKAHADGLKTLISSAITNQETCLDGFSHDDADKKVRKALLKGQKHVEKMCSNALAMICNMTDTDIANEQKLKGTTTNRKLREDNSEWPEWLPAGDRRLLQSSTVRPDVVVAADGSGNFKTVSEAVAKAPEKSSKRYVIRIKAGVYRENVDVPKKKTNIMFMGDGRSNTIITGSRNVKDGSTTFHSATVAAVGEKFLARDITFQNTAGAAKHQAVALRVGSDLSAFYRCDILAYQDSLYVHSNRQYFVQCLIAGTVDFIFGNAAAVLQDCDIHARRPGSGQKNMVTAQGRSDPNQNTGIVIQKCRIGATSDLRPVQKSFPMYLGRPWKEYSRTVIMQSSITDVINSAGWHEWNGNFALNTLFYGEYQNTGAGAGTSGRVKWKGFKVITSATEAQAYTPGRFIAGGSWLSSTGFPFSLGL

SEQ ID NO: 24169 - protein, 502 aa, Ceratodon purpureus
  misc_feature (493)..(493): Xaa can be any naturally occurring amino acid
  unsure (1)..(502): unsure at all Xaa locations
KSVGQSAESVPAGAVTAYLQRMQREGLIQNFGCMVAVEEPNFCVIAYSENASEFLDLIPQAVPSMGEMDVLGIGTDIRTLFTPSSSAALEKAAATQDISLLNPITVHCRRSGKPLYAIAHRIDIGIVIDFEAVKMIDVPVSAAAGALQSHKLAARAITRLQALPGGDIELLCDTIVEEVRELTGYDRVMAFKFHEDEHGEVVAEIRRMDLEPYMGLHYPATDIPQASRFLLMKNRVRLIADCYASPVKLIQDPDIRQPVSLAGSTLRAPHGCHAQYMGNMGSIASLVMAVIINDNEEYSRGAIQRGRKLWGLVVCQHTSPRTVPFPLRSVCEFLMQVFGMQLNLHVELAAQLREKHILRTQTLLCDMLLRDAPIGIVSQTPNIMDLVKCDGAALYYGKRVWLLGTTPTENQIKEIADWLLEHHNDSTGLSTDSLADANYPGAHLLGDAVCGMAAAKITAKDFLFLFRSHTATEVKWGGAKHDPDEKDDGRKMXPRSSFKAFL

SEQ ID NO: 24170 - protein, 133 aa, Listeria monocytogenes
ISAWSIYAIVALALAYFKFRKNAPGLISATLYPILGKHAKGPIGQLIDIIAVFATVIGVATTLGLGAQQINGGLTYLFGVPNNFTVQFTIIIIVTILFMLSAMSGLDKGIQLLSNVNIYVAGVLLVLTLILGP

SEQ ID NO: 24171 - protein, 191 aa, Listeria monocytogenes
TQAAMKDALRYSFFHWGISAWSIYAIVALALAYFKFRKNAPGLISATLYPILGKHAKGPIGQLIDIIAVFATVIGVATTLGLGAQQINGGLTYLFGVPNNFTVQFTIIIIVTILFMLSAMSGLDKGIQLLSNVNIYVAGVLLVLTLILGPTLFIMNNFTNSFGDYLQNIIQMSFQTAPDAPDARKWIDSWT

SEQ ID NO: 24172 - protein, 195 aa, Listeria monocytogenes
PGGEVGTQAAMKDALRYSFFHWGISAWSIYAIVALALAYFKFRKNAPGLISATLYPILGKHAKGPIGQLIDIIAVFATVIGVATTLGLGAQQINGGLTYLFGVPNNFTVQFTIIIIVTILFMLSAMSGLEKGIQLLSNVNIYVAGVLLVLTLILGPTLFIMNNFTNSFGDYLQNIIQMSFQTAPDAPDARKWIDS

SEQ ID NO: 24173 - protein, 191 aa, Listeria monocytogenes
TQAAMKDALRYSFFHWGISAWSIYAIVALALAYFKFRKNAPGLISATLYPILGKHAKGPIGQLIDIIAVFATVIGVATTLGLGAQQINGGLTYLFGVPNNFTVQFTIIVIVTILFMLSAMSGLDKGIQLLSNVNIYVAGVLLVLTLILGPTLFIMNNFTNSFGDYLQNIIQMSFQTAPDAPDARKWIDSWT

SEQ ID NO: 24174 - protein, 208 aa, Listeria monocytogenes
AEPLSHYAVQAPGGEVGTQAAMKDALRYSFFHWGISAWSIYAIVALALAYFKFRKNAPGLISATLYPILGKHAKGPIGQLIDIIAVFATVIGVATTLGLGAQQINGGLTYLFGVPNNFTVQFTIIVIVTILFMLSAMSGLDKGIQLLSNVNIYVAGVLLVLTLILGPTLFIMNNFTNSFGDYLQNIIQMSFQTAPDAPDARKWIDSWT

SEQ ID NO: 24175 - protein, 199 aa, Listeria monocytogenes
PGGEVGTQAAMKDALRYSFFHWGISAWSIYAIVALALAYFKFRKNAPGLISATLYPILGKHAKGPIGQLIDIIAVFATVIGVATTLGLGAQQINGGLTYLFGVPNNFTVQFTIIIIVTILFMLSAMSGLDKGIQLLSNVNIYVAGVLLILTLILGPTLFIMNNFTNSFGDYLQNIIQMSFQTAPDAPDARKWIDSWTIF

SEQ ID NO: 24176 - protein, 208 aa, Listeria monocytogenes
AEPLSHYAVQAPGGEVGTQAAMKDALRYSFFHWGISAWSIYAIVALALAYFKFRKNAPGLISATLYPILGKHAKGPIGQLIDIIAVFATVIGVATTLGLGAQQINGGLTYLFGVPNNFTVQFTIIIIVTILFMLSAMSGLDKGIQLLSNVNIYVAGVLLVLTLILGPTLFIMNNFTNSFGDYLQNIIQMSFQTAPDAPDARKWIDSWT

SEQ ID NO: 24177 - protein, 194 aa, Listeria monocytogenes
GGEVGTQAAMKDALRYSFFHWGISAWSIYAIVALALAYFKFRKNAPGLISATLYPILGKHAKGPIGQLIDIIAVFATVIGVATTLGLGAQQINGGLTYLFGVPNNFTVQFTIIIIVTILFMLSAMSGLDKGIQLLSNVNIYVAGVLLVLTLILGPTLFIMNNFTNSFGDYLQNIIQMSFQTAPDAPDARKWIDS

SEQ ID NO: 24178 - protein, 197 aa, Listeria monocytogenes
WGAAEPLSHYAVQAPGGEVGTQAAMKDALRYSFFHWGISAWSIYAIVALALAYFKFRKNAPGLISATLYPILGKHAKGPIGQLIDIIAVFATVIGVATTLGLGAQQINGGLTYLFGVPNNFTVQFTIIVIVTILFMLSAMSGLDKGIQLLSNVNIYVAGVLLVLTLILGPTLFIMNNFTNSFGDYLQNIIQMSFQTA

SEQ ID NO: 24179 - protein, 210 aa, Listeria monocytogenes
AEPLSHYAVQAPGGEVGTQAAMKDALRYSFFHWGISAWSIYAIVALALAYFKFRKNAPGLISATLYPILGKHAKGPIGQLIDIIAVFATVIGVATTLGLGAQQINGGLTYLFGVPNNFTVQFTIIIIVTILFMLSAMSGLDKGIQLLSNVNIYVAGVLLVLTLILGPTLFIMNNFTNSFGDYLQNIIQMSFQTAPDAPDARKWIDSWTIF

SEQ ID NO: 24180 - protein, 191 aa, Listeria monocytogenes
TQAAMKDALRYSFFHWGISAWSIYAIVALALAYFKFRKNAPGLISATLYPILGKHAKGPIGQLIDIIAVFATVIGVATTLGLGAQQINGGLTYLFGVPNNFTVQFTIIIIVTILFMLSAMSGLDKGIQLLSNVNIYVAGVLLILTLILGPTLFIMNNFTNSFGDYLQNIIQMSFQTAPDAPDARKWIDSWT

SEQ ID NO: 24181 - protein, 202 aa, Listeria monocytogenes
AEPLSHYAVQAPGGEVGTQAAMKDALRYSFFHWGISAWSIYAIVALALAYFKFRKNAPGLISATLYPILGKHAKGPIGQLIDIIAVFATVIGVATTLGLGAQQINGGLTYLFGVPNNFTVQFTIIIIVTILFMLSAMSGLDKGIQLLSNVNIYVAGVLLVLTLILGPTLFIMNNFTNSFGDYLQNIIQMSFQTAPDAPDARK

SEQ ID NO: 24182 - protein, 196 aa, Listeria monocytogenes
APGGEVGTQAAMKDALRYSFFHWGISAWSIYAIVALALAYFKFRKNAPGLISATLYPILGKHAKGPIGQLIDIIAVFATVIGVATTLGLGAQQINGGLTYLFGVPNNFTVQFTIIVIVTILFMLSAMSGLDKGIQLLSNVNIYVAGVLLVLTLILGPTLFIMNNFTNSFGDYLQNIIQMSFQTAPDAPDARKWIDS

SEQ ID NO: 24183 - protein, 211 aa, Listeria monocytogenes
WGAAEPLSHYAVQAPGGEVGTQAAMKDALRYSFFHWGISAWSIYAIVALALAYFKFRKNAPGLISATLYPILGKHAKGPIGQLIDIIAVFATVIGVATTLGLGAQQINGGLTYLFGVPNNFTVQFTIIVIVTILFMLSAMSGLDKGIQLLSNVNIYVAGVLLVLTLILGPTLFIMNNFTNSFGDYLQNIIQMSFQTAPDAPDARKWIDSWT

SEQ ID NO: 24184 - protein, 194 aa, Listeria monocytogenes
GGEVGTQAAMKDALRYSFFHWGISAWSIYAIVALALAYFKFRKNAPGLISATLYPILGKHAKGPIGQLIDIIAVFATVIGVATTLGLGAQQINGGLTYLFGVPNNFTVQFTIIIIVTILFMLSAMSGLDKGIQLLSNVNIYVAGVLLILTLILGPTLFIMNNFTNSFGDYLQNIIQMSFQTAPDAPDARKWIDS

SEQ ID NO: 24185 - protein, 207 aa, Listeria monocytogenes
PLSHYAVQAPGGEVGTQAAMKDALRYSFFHWGISAWSIYAIVALALAYFKFRKNAPGLISATLYPILGKHAKGPIGQLIDIIAVFATVIGVATTLGLGAQQINGGLTYLFGVPNNFTVQFTIIVIVTILFMLSAMSGLDKGIQLLSNVNIYVAGVLLVLTLILGPTLFIMNNFTNSFGDYLQNIIQMSFQTAPDAPDARKWIDSWTI

SEQ ID NO: 24186 - protein, 190 aa, Listeria monocytogenes
GGEVGTQAAMKDALRYSFFHWGISAWSIYAIVALALAYFKFRKNAPGLISATLYPILGKHAKGPIGQLIDIIAVFATVIGVATTLGLGAQQINGGLTYLFGVPNNFTVQFTIIIIVTILFMLSAMSGLDKGIQLLSNVNIYVAGVLLILTLILGPTLFIMNNFTNSFGDYLQNIIQMSFQTAPDAPDARK

SEQ ID NO: 24187 - protein, 185 aa, Listeria monocytogenes
TQAAMKDALRYSFFHWGISAWSIYAIVALALAYFKFRKNAPGLISATLYPILGKHAKGPIGQLIDIIAVFATVIGVATTLGLGAQQINGGLTYLFGVPNNFTVQFTIIIIVTILFMLSAMSGLDKGIQLLSNVNIYVAGVLLVLTLILGPTLFIMNNFTNSFGDYLQNIIQMSFQTAPDAPDARK

SEQ ID NO: 24188 - protein, 196 aa, Listeria monocytogenes
GGEVGTQAAMKDALRYSFFHWGISAWSIYAIVALALAYFKFRKNAPGLISATLYPILGKHAKGPIGQLIDIIAVFATVIGVATTLGLGAQQINGGLTYLFGVPNNFTVQFTIIIIVTILFMLSAMSGLDKGIQLLSNVNIYVAGVLLVLTLILGPTLFIMNNFTNSFGDYLQNIIQMSFQTAPDAPDARKWIDSWT

SEQ ID NO: 24189 - protein, 194 aa, Listeria monocytogenes
EVGTQAAMKDALRYSFFHWGISAWSIYAIVALALAYFKFRKNAPGLISATLYPILGKHAKGPIGQLIDIIAVFATVIGVATTLGLGAQQINGGLTYLFGVPNNFTVQFTIIVIVTILFMLSAMSGLDKGIQLLSNVNIYVAGVLLVLTLILGPTLFIMNNFTNSFGDYLQNIIQMSFQTAPDAPDARKWIDSWT

SEQ ID NO: 24190 - protein, 184 aa, Listeria monocytogenes
GAAEPLSHYAVQAPGGEVGTQAAMKDALRYSFFHWGISAWSIYAIVALALAYFKFRKNAPGLISATLYPILGKHAKGPIGQLIDIIAVFATVIGVATTLGLGAQQINGGLTYLFGVPNNFTVQFTIIIIVTILFMLSAMSGLDKGIQLLSNVNIYVAGVLLILTLILGPTLFIMNNFTNSFGDY

SEQ ID NO: 24191 - protein, 193 aa, Listeria monocytogenes
TQAAMKDALRYSFFHWGISAWSIYAIVALALAYFKFRKNAPGLISATLYPILGKHAKGPIGQLIDIIAVFATVIGVATTLGLGAQQINGGLTYLFGVPNNFTVQFTIIIIVTILFMLSAMSGLDKGIQLLSNVNIYVAGVLLILTLILGPTLFIMNNFTNSFGDYLQNIIQMSFQTAPDAPDARKWIDSWTIF

SEQ ID NO: 24192 - protein, 198 aa, Listeria monocytogenes
APGGEVGTQAAMKDALRYSFFHWGISAWSIYAIVALALAYFKFRKNAPGLISATLYPILGKHAKGPIGQLIDIIAVFATVIGVATTLGLGAQQINGGLTYLFGVPNNFTVQFTIIIIVTILFMLSAMSGLDKGIQLLSNVNIYVAGVLLILTLILGPTLFIMNNFTNSFGDYLQNIIQMSFQTAPDAPDARKWIDSWT

SEQ ID NO: 24193 - protein, 187 aa, Listeria monocytogenes
VFWGAAEPLSHYAVQAPGGEVGTQAAMKDALRYSFFHWGISAWSIYAIVALALAYFKFRKNAPGLISATLYPILGKHAKGPIGQLIDIIAVFATVIGVATTLGLGAQQINGGLTYLFGVPNNFTVQFTIIVIVTILFMLSAMSGLDKGIQLLSNVNIYVAAVLLVLTLILGPTLFIMNNFTNSFGDY

SEQ ID NO: 24194 - protein, 194 aa, Listeria monocytogenes
GGEVGTQAAMKDALRYSFFHWGISAWSIYAIVALALAYFKFRKNAPGLISATLYPILGKHAKGPIGQLIDIIAVFATVIGVATTLGLGAQQINGGLTYLFGVPNNFTVQFTIIIIVTILFMLSAMSGLEKGIQLLSNVNIYVAGVLLVLTLILGPTLFIMNNFTNSFGDYLQNIIQMSFQTAPDAPDARKWIDS

SEQ ID NO: 24195 - protein, 200 aa, Listeria monocytogenes
APGGEVGTQAAMKDALRYSFFHWGISAWSIYAIVALALAYFKFRKNAPGLISATLYPILGKHAKGPIGQLIDIIAVFATVIGVATTLGLGAQQINGGLTYLFGVPNNFTVQFTIIVIVTILFMLSAMSGLDKGIQLLSNVNIYVAGVLLVLTLILGPTLFIMNNFTNSFGDYLQNIIQMSFQTAPDAPDARKWIDSWTIF

SEQ ID NO: 24196 - protein, 193 aa, Listeria monocytogenes
QAPGGEVGTQAAMKDALRYSFFHWGISAWSIYAIVALALAYFKFRKNAPGLISATLYPILGKHAKGPIGQLIDIIAVFATVIGVATTLGLGAQQINGGLTYLFGVPNNFTVQFTIIVIVTILFMLSAMSGLDKGIQLLSNVNIYVAGVLLVLTLILGPTLFIMNNFTNSFGDYLQNIIQMSFQTAPDAPDARK

SEQ ID NO: 24197 - protein, 185 aa, Listeria monocytogenes
TQAAMKDALRYSFFHWGISAWSIYAIVALALAYFKFRKNAPGLISATLYPILGKHAKGPIGQLIDIIAVFATVIGVATTLGLGAQQINGGLTYLFGVPNNFTVQFTIIVIVTILFMLSAMSGLDKGIQLLSNVNIYVAGVLLVLTLILGPTLFIMNNFTNSFGDYLQNIIQMSFQTAPDAPDARK

SEQ ID NO: 24198 - protein, 198 aa, Listeria monocytogenes
GGEVGTQAAMKDALRYSFFHWGISAWSIYAIVALALAYFKFRKNAPGLISATLYPILGKHAKGPIGQLIDIIAVFATVIGVATTLGLGAQQINGGLTYLFGVPNNFTVQFTIIIIVTILFMLSAMSGLDKGIQLLSNVNIYVAGVLLVLTLILGPTLFIMNNFTNSFGDYLQNIIQMSFQTAPDAPDARKWIDSWTIF

SEQ ID NO: 24199 - protein, 172 aa, Listeria monocytogenes
APGGEVGTQAAMKDALRYSFFHWGISAWSIYAIVALALAYFKFRKNAPGLISATLYPILGKHAKGPIGQLIDIIAVFATVIGVATTLGLGAQQINGGLTYLFGVPNNFTVQFTIIIIVTILFMLSAMSGLDKGIQLLSNVNIYVAGVLLILTLILGPTLFIMNNFTNSFGDY

SEQ ID NO: 24200 - protein, 213 aa, Listeria monocytogenes
VFWGAAEPLSHYAVQAPGGEVGTQAAMKDALRYSFFHWGISAWSIYAIVALALAYFKFRKNAPGLISATLYPILGKHAKGPIGQLIDIIAVFATVIGVATTLGLGAQQINGGLTYLFGVPNNFTVQFTIIVIVTILFMLSAMSGLDKGIQLLSNVNIYVAGVLLVLTLILGPTLFIMNNFTNSFGDYLQNIIQMSFQTAPDAPDARKWIDSWT

SEQ ID NO: 24201 - protein, 196 aa, Listeria monocytogenes
APGGEVGTQAAMKDALRYSFFHWGISAWSIYAIVALALAYFKFRKNAPGLISATLYPILGKHAKGPIGQLIDIIAVFATVIGVATTLGLGAQQINGGLTYLFGVPNNFTVQFTIIIIVTILFMLSAMSGLDKGIQLLSNVNIYVAGVLLVLTLILGPTLFIMNNFTNSFGDYLQNIIQMSFQTAPDAPDARKWIDS

SEQ ID NO: 24202 - protein, 199 aa, Listeria monocytogenes
AVQAPGGEVGTQAAMKDALRYSFFHWGISAWSIYAIVALALAYFKFRKNAPGLISATLYPILGKHAKGPIGQLIDIIAVFATVIGVATTLGLGAQQINGGLTYLFGVPNNFTVQFTIIIIVTILFMLSAMSGLDKGIQLLSNVNIYVAGVLLILTLILGPTLFIMNNFTNSFGDYLQNIIQMSFQTAPDAPDARKWIDS

SEQ ID NO: 24203 - protein, 196 aa, Listeria monocytogenes
PGGEVGTQAAMKDALRYSFFHWGISAWSIYAIVALALAYFKFRKNAPGLISATLYPILGKHAKGPIGQLIDIIAVFATVIGVATTLGLGAQQINGGLTYLFGVPNNFTVQFTIIIIVTILFMLSAMSGLDKGIQLLSNVNIYVAGVLLILTLILGPTLFIMNNFTNSFGDYLQNIIQMSFQTAPDAPDARKWIDSW

SEQ ID NO: 24204 - protein, 206 aa, Listeria monocytogenes
AEPLSHYAVQAPGGEVGTQAAMKDALRYSFFHWGISAWSIYAIVALALAYFKFRKNAPGLISATLYPILGKHAKGPIGQLIDIIAVFATVIGVATTLGLGAQQINGGLTYLFGVPNNFTVQFTIIVIVTILFMLSAMSGLDKGIQLLSNVNIYVAGVLLVLTLILGPTLFIMNNFTNSFGDYLQNIIQMSFQTAPDAPDARKWIDS

SEQ ID NO: 24205 - protein, 196 aa, Listeria monocytogenes
AEPLSHYAVQAPGGEVGTQAAMKDALRYSFFHWGISAWSIYAIVALALAYFKFRKNAPGLISATLYPILGKHAKGPIGQLIDIIAVFATVIGVATTLGLGAQQINGGLTYLFGVPNNFTVQFTIIVIVTILFMLSAMSGLDKGIQLLSNVNIYVAGVLLVLTLILGPTLFIMNNFTNSFGDYLQNIIQMSFQTAPD

SEQ ID NO: 24206 - protein, 212 aa, Listeria monocytogenes
GAAEPLSHYAVQAPGGEVGTQAAMKDALRYSFFHWGISAWSIYAIVALALAYFKFRKNAPGLISATLYPILGKHAKGPIGQLIDIIAVFATVIGVATTLGLGAQQINGGLTYLFGVPNNFTVQFTIIIIVTILFMLSAMSGLDKGIQLLSNVNIYVAGVLLILTLILGPTLFIMNNFTNSFGDYLQNIIQMSFQTAPDAPDARKWIDSWTIF

SEQ ID NO: 24207 - protein, 177 aa, Listeria monocytogenes
TQAAMKDALRYSFFHWGISAWSIYAIVALALAYFKFRKNAPGLISATLYPILGKHAKGPIGQLIDIIAVFATVIGVATTLGLGAQQINGGLTYLFGVPNNFTVQFTIIVIVTILFMLSAMSGLDKGIQLLSNVNIYVAGVLLVLTLILGPTLFIMNNFTNSFGDYLQNIIQMSFQTA

SEQ ID NO: 24208 - protein, 194 aa, Listeria monocytogenes
APGGEVGTQAAMKDALRYSFFHWGISAWSIYAIVALALAYFKFRKNAPGLISATLYPILGKHAKGPIGQLIDIIAVFATVIGVATTLGLGAQQINGGLTYLFGVPNNFTVQFTIIVIVTILFMLSAMSGLDKGIQLLSNVNIYVAGVLLVLTLILGPTLFIMNNFTNSFGDYLQNIIQMSFQTAPDAPDARKWI

SEQ ID NO: 24209 - protein, 165 aa, Listeria monocytogenes
TQAAMKDALRYSFFHWGISAWSIYAIVALALAYFKFRKNAPGLISATLYPILGKHAKGPIGQLIDIIAVFATVIGVATTLGLGAQQINGGLTYLFGVPNNFTVQFTIIVIVTILFMLSAMSGLDKGIQLLSNVNIYVAGVLLVLTLILGPTLFIMNNFTNSFGDY

SEQ ID NO: 24210 - protein, 165 aa, Listeria monocytogenes
TQAAMKDALRYSFFHWGISAWSIYAIVALALAYFKFRKNAPGLISATLYPILGKHAKGPIGQLIDIIAVFATVIGVATTLGLGAQQINGGLTYLFGVPNNFTVQFTIIIIVTILFMLSAMSGLDKGIQLLSNVNIYVAGVLLVLTLILGPTLFIMNNFTNSFGDY

SEQ ID NO: 24211 - protein, 206 aa, Listeria monocytogenes
AEPLSHYAVQAPGGEVGTQAAMKDALRYSFFHWGISAWSIYAIVALALAYFKFRKNAPGLISATLYPILGKHAKGPIGQLIDIIAVFATVIGVATTLGLGAQQINGGLTYLFGVPNNFTVQFTIIIIVTILFMLSAMSGLDKGIQLLSNVNIYVAGVLLILTLILGPTLFIMNNFTNSFGDYLQNIIQMSFQTAPDAPDARKWIDS

SEQ ID NO: 24212 - protein, 216 aa, Listeria monocytogenes
VFWGAAEPLSHYAVQAPGGEVGTQAAMKDALRYSFFHWGISAWSIYAIVALALAYFKFRKNAPGLISATLYPILGKHAKGPIGQLIDIIAVFATVIGVATTLGLGAQQINGGLTYLFGVPNNFTVQFTIIIIVTILFMLSAMSGLDKGIQLLSNVNIYVAGVLLILTLILGPTLFIMNNFTNSFGDYLQNIIQMSFQTAPDAPDARKWIDSWTIFY

SEQ ID NO: 24213 - protein, 209 aa, Listeria monocytogenes
WGAAEPLSHYAVQAPGGEVGTQAAMKDALRYSFFHWGISAWSIYAIVALALAYFKFRKNAPGLISATLYPILGKHAKGPIGQLIDIIAVFATVIGVATTLGLGAQQINGGLTYLFGVPNNFTVQFTIIIIVTILFMLSAMSGLDKGIQLLSNVNIYVAGVLLILTLILGPTLFIMNNFTNSFGDYLQNIIQMSFQTAPDAPDARKWIDS

SEQ ID NO: 24214 - protein, 203 aa, Listeria monocytogenes
AAEPLSHYAVQAPGGEVGTQAAMKDALRYSFFHWGISAWSIYAIVALALAYFKFRKNAPGLISATLYPILGKHAKGPIGQLIDIIAVFATVIGVATTLGLGAQQINGGLTYLFGVPNNFTVQFTIIVIVTILFMLSAMSGLDKGIQLLSNVNIYVAGVLLVLTLILGPTLFIMNNFTNSFGDYLQNIIQMSFQTAPDAPDARK

SEQ ID NO: 24215 - protein, 191 aa, Listeria monocytogenes
APGGEVGTQAAMKDALRYSFFHWGISAWSIYAIVALALAYFKFRKNAPGLISATLYPILGKHAKGPIGQLIDIIAVFATVIGVATTLGLGAQQINGGLTYLFGVPNNFTVQFTIIVIVTILFMLSAMSGLDKGIQLLSNVNIYVAGVLLVLTLILGPTLFIMNNFTNSFGDYLQNIIQMSFQTAPDAPDAR

SEQ ID NO: 24216 - protein, 191 aa, Listeria monocytogenes
PGGEVGTQAAMKDALRYSFFHWGISAWSIYAIVALALAYFKFRKNAPGLISATLYPILGKHAKGPIGQLIDIIAVFATVIGVATTLGLGAQQINGGLTYLFGVPNNFTVQFTIIIIVTILFMLSAMSGLDKGIQLLSNVNIYVAGVLLILTLILGPTLFIMNNFTNSFGDYLQNIIQMSFQTAPDAPDARK

SEQ ID NO: 24217 - protein, 185 aa, Listeria monocytogenes
TQAAMKDALRYSFFHWGISAWSIYAIVALALAYFKFRKNAPGLISATLYPILGKHAKGPIGQLIDIIAVFATVIGVATTLGLGAQQINGGLTYLFGVPNNFTVQFTIIIIVTILFMLSAMSGLEKGIQLLSNVNIYVAGVLLVLTLILGPTLFIMNNFTNSFGDYLQNIIQMSFQTAPDAPDARK

SEQ ID NO: 24218 - protein, 198 aa, Listeria monocytogenes
QAPGGEVGTQAAMKDALRYSFFHWGISAWSIYAIVALALAYFKFRKNAPGLISATLYPILGKHAKGPIGQLIDIIAVFATVIGVATTLGLGAQQINGGLTYLFGVPNNFTVQFTIIIIVTILFMLSAMSGLDKGIQLLSNVNIYVAGVLLVLTLILGPTLFIMNNFTNSFGDYLQNIIQMSFQTAPDAPDARKWIDSW

SEQ ID NO: 24219 - protein, 174 aa, Listeria monocytogenes
GGEVGTQAAMKDALRYSFFHWGISAWSIYAIVALALAYFKFRKNAPGLISATLYPILGKHAKGPIGQLIDIIAVFATVIGVATTLGLGAQQINGGLTYLFGVPNNFTVQFTIIIIVTILFMLSAMSGLDKGIQLLSNVNIYVAGVLLVLTLILGPTLFIMNNFTNSFGDYLQNI

SEQ ID NO: 24220 - protein, 195 aa, Listeria monocytogenes
PGGEVGTQAAMKDALRYSFFHWGISAWSIYAIVALALAYFKFRKNAPGLISATLYPILGKHAKGPIGQLIDIIAVFATVIGVATTLGLGAQQINGGLTYLFGVPNNFTVQFTIIVIVTILFMLSAMSGLDKGIQLLSNVNIYVAGVLLVLTLILGPTLFIMNNFTNSFGDYLQNIIQMSFQTAPDAPDARKWIDS

SEQ ID NO: 24221 - protein, 204 aa, Listeria monocytogenes
PLSHYAVQAPGGEVGTQAAMKDALRYSFFHWGISAWSIYAIVALALAYFKFRKNAPGLISATLYPILGKHAKGPIGQLIDIIAVFATVIGVATTLGLGAQQINGGLTYLFGVPNNFTVQFTIIVIVTILFMLSAMSGLDKGIQLLSNVNIYVAGVLLVLTLILGPTLFIMNNFTNSFGDYLQNIIQMSFQTAPDAPDARKWIDS

SEQ ID NO: 24222 - protein, 199 aa, Listeria monocytogenes
QAPGGEVGTQAAMKDALRYSFFHWGISAWSIYAIVALALAYFKFRKNAPGLISATLYPILGKHAKGPIGQLIDIIAVFATVIGVATTLGLGAQQINGGLTYLFGVPNNFTVQFTIIVIVTILFMLSAMSGLDKGIQLLSNVNIYVAGVLLVLTLILGPTLFIMNNFTNSFGDYLQNIIQMSFQTAPDAPDARKWIDSWT

SEQ ID NO: 24223 - protein, 198 aa, Listeria monocytogenes
PGGEVGTQAAMKDALRYSFFHWGISAWSIYAIVALALAYFKFRKNAPGLISATLYPILGKHAKGPIGQLIDIIAVFATVIGVATTLGLGAQQINGGLTYLFGVPNNFTVQFTIIIIVTILFMLSAMSGLEKGIQLLSNVNIYVAGVLLVLTLILGPTLFIMNNFTNSFGDYLQNIIQMSFQTAPDAPDARKWIDSWTI

SEQ ID NO: 24224 - protein, 186 aa, Listeria monocytogenes
FWGAAEPLSHYAVQAPGGEVGTQAAMKDALRYSFFHWGISAWSIYAIVALALAYFKFRKNAPGLISATLYPILGKHAKGPIGQLIDIIAVFATVIGVATTLGLGAQQINGGLTYLFGVPNNFTVQFTIIIIVTILFMLSAMSGLDKGIQLLSNVNIYVAGVLLILTLILGPTLFIMNNFTNSFGDY

SEQ ID NO: 24225 - protein, 206 aa, Listeria monocytogenes
PLSHYAVQAPGGEVGTQAAMKDALRYSFFHWGISAWSIYAIVALALAYFKFRKNAPGLISATLYPILGKHAKGPIGQLIDIIAVFATVIGVATTLGLGAQQINGGLTYLFGVPNNFTVQFTIIIIVTILFMLSAMSGLDKGIQLLSNVNIYVAGVLLVLTLILGPTLFIMNNFTNSFGDYLQNIIQMSFQTAPDAPDARKWIDSWT

SEQ ID NO: 24226 - protein, 212 aa, Listeria monocytogenes
WGAAEPLSHYAVQAPGGEVGTQAAMKDALRYSFFHWGISAWSIYAIVALALAYFKFRKNAPGLISATLYPILGKHAKGPIGQLIDIIAVFATVIGVATTLGLGAQQINGGLTYLFGVPNNFTVQFTIIIIVTILFMLSAMSGLDKGIQLLSNVNIYVAGVLLILTLILGPTLFIMNNFTNSFGDYLQNIIQMSFQTAPDAPDARKWIDSWTI

SEQ ID NO: 24227 - protein, 200 aa, Listeria monocytogenes
AVQAPGGEVGTQAAMKDALRYSFFHWGISAWSIYAIVALALAYFKFRKNAPGLISATLYPILGKHAKGPIGQLIDIIAVFATVIGVATTLGLGAQQINGGLTYLFGVPNNFTVQFTIIVIVTILFMLSAMSGLDKGIQLLSNVNIYVAGVLLVLTLILGPTLFIMNNFTNSFGDYLQNIIQMSFQTAPDAPDARKWIDSW

SEQ ID NO: 24228 - protein, 195 aa, Listeria monocytogenes
PGGEVGTQAAMKDALRYSFFHWGISAWSIYAIVALALAYFKFRKNAPGLISATLYPILGKHAKGPIGQLIDIIAVFATVIGVATTLGLGAQQINGGLTYLFGVPNNFTVQFTIIIIVTILFMLSAMSGLDKGIQLLSNVNIYVAGVLLILTLILGPTLFIMNNFTNSFGDYLQNIIQMSFQTAPDAPDARKWIDS

SEQ ID NO: 24229 - protein, 207 aa, Listeria monocytogenes
EPLSHYAVQAPGGEVGTQAAMKDALRYSFFHWGISAWSIYAIVALALAYFKFRKNAPGLISATLYPILGKHAKGPIGQLIDIIAVFATVIGVATTLGLGAQQINGGLTYLFGVPNNFTVQFTIIVIVTILFMLSAMSGLDKGIQLLSNVNIYVAGVLLVLTLILGPTLFIMNNFTNSFGDYLQNIIQMSFQTAPDAPDARKWIDSWT

SEQ ID NO: 24230 - protein, 192 aa, Listeria monocytogenes
APGGEVGTQAAMKDALRYSFFHWGISAWSIYAIVALALAYFKFRKNAPGLISATLYPILGKHAKGPIGQLIDIIAVFATVIGVATTLGLGAQQINGGLTYLFGVPNNFTVQFTIIVIVTILFMLSAMSGLDKGIQLLSNVNIYVAGVLLVLTLILGPTLFIMNNFTNSFGDYLQNIIQMSFQTAPDAPDARK

SEQ ID NO: 24231 - protein, 195 aa, Listeria monocytogenes
APGGEVGTQAAMKDALRYSFFHWGISAWSIYAIVALALAYFKFRKNAPGLISATLYPILGKHAKGPIGQLIDIIAVFATVIGVATTLGLGAQQINGGLTYLFGVPNNFTVQFTIIVIVTILFMLSAMSGLDKGIQLLSNVNIYVAGVLLVLTLILGPTLFIMNNFTNSFGDYLQNIIQMSFQTAPDAPDARKWID

SEQ ID NO: 24232 - protein, 193 aa, Listeria monocytogenes
PGGEVGTQAAMKDALRYSFFHWGISAWSIYAIVALALAYFKFRKNAPGLISATLYPILGKHAKGPIGQLIDIIAVFATVIGVATTLGLGAQQINGGLTYLFGVPNNFTVQFTIIIIVTILFMLSAMSGLDKGIQLLSNVNIYVAGVLLILTLILGPTLFIMNNFTNSFGDYLQNIIQMSFQTAPDAPDARKWI

SEQ ID NO: 24233 - protein, 206 aa, Listeria monocytogenes
AEPLSHYAVQAPGGEVGTQAAMKDALRYSFFHWGISAWSIYAIVALALAYFKFRKNAPGLISATLYPILGKHAKGPIGQLIDIIAVFATVIGVATTLGLGAQQINGGLTYLFGVPNNFTVQFTIIIIVTILFMLSAMSGLDKGIQLLSNVNIYVAGVLLVLTLILGPTLFIMNNFTNSFGDYLQNIIQMSFQTAPDAPDARKWIDS

SEQ ID NO: 24234 - protein, 206 aa, Listeria monocytogenes
EPLSHYAVQAPGGEVGTQAAMKDALRYSFFHWGISAWSIYAIVALALAYFKFRKNAPGLISATLYPILGKHAKGPIGQLIDIIAVFATVIGVATTLGLGAQQINGGLTYLFGVPNNFTVQFTIIIIVTILFMLSAMSGLDKGIQLLSNVNIYVAGVLLILTLILGPTLFIMNNFTNSFGDYLQNIIQMSFQTAPDAPDARKWIDSW

SEQ ID NO: 24235 - protein, 208 aa, Listeria monocytogenes
PLSHYAVQAPGGEVGTQAAMKDALRYSFFHWGISAWSIYAIVALALAYFKFRKNAPGLISATLYPILGKHAKGPIGQLIDIIAVFATVIGVATTLGLGAQQINGGLTYLFGVPNNFTVQFTIIVIVTILFMLSAMSGLDKGIQLLSNVNIYVAGVLLVLTLILGPTLFIMNNFTNSFGDYLQNIIQMSFQTAPDAPDARKWIDSWTIF

SEQ ID NO: 24236 - protein, 191 aa, Listeria monocytogenes
PGGEVGTQAAMKDALRYSFFHWGISAWSIYAIVALALAYFKFRKNAPGLISATLYPILGKHAKGPIGQLIDIIAVFATVIGVATTLGLGAQQINGGLTYLFGVPNNFTVQFTIIIIVTILFMLSAMSGLDKGIQLLSNVNIYVAGVLLVLTLILGPTLFIMNNFTNSFGDYLQNIIQMSFQTAPDAPDARK

SEQ ID NO: 24237 - protein, 157 aa, Listeria monocytogenes
IYAIVALALAYFKFRKNAPGLISATLYPILGKHAKGPIGQLIDIIAVFATVIGVATTLGLGAQQINGGLTYLFGVPNNFTVQFTIIIIVTILFMLSAMSGLDKGIQLLSNVNIYVAGVLLILTLILGPTLFIMNNFTNSFGDYLQNIIQMSFQTAPD

SEQ ID NO: 24238 - protein, 182 aa, Listeria monocytogenes
EVGTQAAMKDALRYSFFHWGISAWSIYAIVALALAYFKFRKNAPGLISATLYPILGKHAKGPIGQLIDIIAVFATVIGVATTLGLGAQQINGGLTYLFGVPNNFTVQFTIIVIVTILFMLSAMSGLDKGIQLLSNVNIYVAGVLLVLTLILGPTLFIMNNFTNSFGDYLQNIIQMSFQTALM

SEQ ID NO: 24239 - protein, 179 aa, Listeria monocytogenes
EVGTQAAMKDALRYSFFHWGISAWSIYAIVALALAYFKFRKNAPGLISATLYPILGKHAKGPIGQLIDIIAVFATVIGVATTLGLGAQQINGGLTYLFGVPNNFTVQFTIIVIVTILFMLSAMSGLDKGIQLLSNVNIYVAGVLLVLTLILGPTLFIMNNFTNSFGDYLQNIIQMSFQT

SEQ ID NO: 24240 - protein, 187 aa, Listeria monocytogenes
APGGEVGTQAAMKDALRYSFFHWGISAWSIYAIVALALAYFKFRKNAPGLISATLYPILGKHAKGPIGQLIDIIAVFATVIGVATTLGLGAQQINGGLTYLFGVPNNFTVQFTIIIIVTILFMLSAMSGLDKGIQLLSNVNIYVAGVLLILTLILGPTLFIMNNFTNSFGDYLQNIIQMSFQTAPDA

SEQ ID NO: 24241 - protein, 179 aa, Listeria monocytogenes
EVGTQAAMKDALRYSFFHWGISAWSIYAIVALALAYFKFRKNAPGLISATLYPILGKHAKGPIGQLIDIIAVFATVIGVATTLGLGAQQINGGLTYLFGVPNNFTVQFTIIIIVTILFMLSAMSGLDKGIQLLSNVNIYVAGVLLILTLILGPTLFIMNNFTNSFGDYLQNIIQMSFQT

SEQ ID NO: 24242 - protein, 193 aa, Listeria monocytogenes
GGEVGTQAAMKDALRYSFFHWGISAWSIYAIVALALAYFKFRKNAPGLISATLYPILGKHAKGPIGQLIDIIAVFATVIGVATTLGLGAQQINGGLTYLFGVPNNFTVQFTIIIIVTILFMLSAMSGLDKGIQLLSNVNIYVAGVLLILTLILGPTLFIMNNFTNSFGDYLQNIIQMSFQTAPDAPDARKWMT

SEQ ID NO: 24243 - protein, 172 aa, Listeria monocytogenes
EVGTQAAMKDALRYSFFHWGISAWSIYAIVALALAYFKFRKNAPGLISATLYPILGKHAKGPIGQLIDIIAVFATVIGVATTLGLGAQQINGGLTYLFGVPNNFTVQFTIIVIVTILFMLSAMSGLDKGIQLLSNVNIYVAGVLLVLTLILGPTLFIMNNFTNSFGDYLQNI

SEQ ID NO: 24244 - protein, 188 aa, Listeria monocytogenes
GGEVGTQAAMKDALRYSFFHWGISAWSIYAIVALALAYFKFRKNAPGLISATLYPILGKHAKGPIGQLIDIIAVFATVIGVATTLGLGAQQINGGLTYLFGVPNNFTVQFTIIIIVTILFMLSAMSGLDKGIQLLSNVNIYVAGVLLILTLILGPTLFIMNNFTNSFGDYLQNIIQMSFQTAPDAPDA

SEQ ID NO: 24245 - protein, 189 aa, Listeria monocytogenes
TQAAMKDALRYSFFHWGISAWSIYAIVALALAYFKFRKNAPGLISATLYPILGKHAKGPIGQLIDIIAVFATVIGVATTLGLGAQQINGGLTYLFGVPNNFTVQFTIIIIVTILFMLSAMSGLDKGIQLLSNVNIYVAGVLLVLTLILGPTLFIMNNFTNSFGDYLQNIIQMSFQTAPDAPDARKWMTH

SEQ ID NO: 24246 - protein, 180 aa, Listeria monocytogenes
TQAAMKDALRYSFFHWGISAWSIYAIVALALAYFKFRKNAPGLISATLYPILGKHAKGPIGQLIDIIAVFATVIGVATTLGLGAQQINGGLTYLFGVPNNFTVQFTIIIIVTILFMLSAMSGLDKGIQLLSNVNIYVAGVLLVLTLILGPTLFIMNNFTNSFGDYLQNIIQMSFQTAPDA

SEQ ID NO: 24247 - protein, 193 aa, Listeria monocytogenes
APGGEVGTQAAMKDALRYSFFHWGISAWSIYAIVALALAYFKFRKNAPGLISATLYPILGKHAKGPIGQLIDIIAVFATVIGVATTLGLGAQQINGGLTYLFGVPNNFTVQFTIIIIVTILFMLSAMSGLDKGIQLLSNVNIYVAGVLLILTLILGPTLFIMNNFTNSFGDYLQNIIQMSFQTAPDAPDARKW

SEQ ID NO: 24248 - protein, 170 aa, Listeria monocytogenes
TQAAMKDALRYSFFHWGISAWSIYAIVALALAYFKFRKNAPGLISATLYPILGKHAKGPIGQLIDIIAVFATVIGVATTLGLGAQQINGGLTYLFGVPNNFTVQFTIIVIVTILFMLSAMSGLDKGIQLLSNVNIYVAGVLLVLTLILGPTLFIMNNFTNSFGDYLQNII

SEQ ID NO: 24249 - protein, 182 aa, Listeria monocytogenes
GGEVGTQAAMKDALRYSFFHWGISAWSIYAIVALALAYFKFRKNAPGLISATLYPILGKHAKGPIGQLIDIIAVFATVIGVATTLGLGAQQINGGLTYLFGVPNNFTVQFTIIIIVTILFMLSAMSGLDKGIQLLSNVNIYVAGVLLVLTLILGPTLFIMNNFTNSFGDYLQNIIQMSFQTA

SEQ ID NO: 24250 - protein, 185 aa, Listeria monocytogenes
GGEVGTQAAMKDALRYSFFHWGISAWSIYAIVALALAYFKFRKNAPGLISATLYPILGKHAKGPIGQLIDIIAVFATVIGVATTLGLGAQQINGGLTYLFGVPNNFTVQFTIIIIVTILFMLSAMSGLDKGIQLLSNVNIYVAGVLLVLTLILGPTLFIMNNFTNSFGDYLQNIIQMSFQTAPDA

SEQ ID NO: 24251 - protein, 184 aa, Listeria monocytogenes
APGGEVGTQAAMKDALRYSFFHWGISAWSIYAIVALALAYFKFRKNAPGLISATLYPILGKHAKGPIGQLIDIIAVFATVIGVATTLGLGAQQINGGLTYLFGVPNNFTVQFTIIIIVTILFMLSAMSGLDKGIQLLSNVNIYVAGVLLVLTLILGPTLFIMNNFTNSFGDYLQNIIQMSFQTA

SEQ ID NO: 24252 - protein, 177 aa, Listeria monocytogenes
TQAAMKDALRYSFFHWGISAWSIYAIVALALAYFKFRKNAPGLISATLYPILGKHAKGPIGQLIDIIAVFATVIGVATTLGLGAQQINGGLTYLFGVPNNFTVQFTIIIIVTILFMLSAMSGLDKGIQLLSNVNIYVAGVLLVLTLILGPTLFIMNNFTNSFGDYLQNIIQMSFQTA

SEQ ID NO: 24253 - protein, 190 aa, Listeria monocytogenes
VGTQAAMKDALRYSFFHWGISAWSIYAIVALALAYFKFRKNAPGLISATLYPILGKHAKGPIGQLIDIIAVFATVIGVATTLGLGAQQINGGLTYLFGVPNNFTVQFTIIIIVTILFMLSAMSGLDKGIQLLSNVNIYVAGVLLVLTLILGPTLFIMNNFTNSFGDYLQNIIQMSFQTAPDAPDARKWMT

SEQ ID NO: 24254 - protein, 182 aa, Listeria monocytogenes
APEVGTQAAMKDALRYSFFHWGISAWSIYAIVALALAYFKFRKNAPGLISATLYPILGKHAKGPIGQLIDIIAVFATVIGVATTLGLGAQQINGGLTYLFGVPNNFTVQFTIIVIVTILFMLSAMSGLDKGIQLLSNVNIYVAGVLLVLTLILGPTLFIMNNFTNSFGDYLQNIIQMSFQTA

SEQ ID NO: 24255 - protein, 190 aa, Listeria monocytogenes
APGGEVGTQAAMKDALRYSFFHWGISAWSIYAIVALALAYFKFRKNAPGLISATLYPILGKHAKGPIGQLIDIIAVFATVIGVATTLGLGAQQINGGLTYLFGVPNNFTVQFTIIIIVTILFMLSAMSGLDKGIQLLSNVNIYVAGVLLILTLILGPTLFIMNNFTNSFGDYLQNIIQMSFQTAPDAPDA

SEQ ID NO: 24256 - protein, 180 aa, Listeria monocytogenes
EVGTQAAMKDALRYSFFHWGISAWSIYAIVALALAYFKFRKNAPGLISATLYPILGKHAKGPIGQLIDIIAVFATVIGVATTLGLGAQQINGGLTYLFGVPNNFTVQFTIIVIVTILFMLSAMSGLDKGIQLLSNVNIYVAGVLLVLTLILGPTLFIMNNFTNSFGDYLQNIIQMSFQTA

SEQ ID NO: 24257 - protein, 176 aa, Listeria monocytogenes
TQAAMKDALRYSFFHWGISAWSIYAIVALALAYFKFRKNAPGLISATLYPILGKHAKGPIGQLIDIIAVFATVIGVATTLGLGAQQINGGLTYLFGVPNNFTVQFTIIIIVTILFMLSAMSGLDKGIQLLSNVNIYVAGVLLVLTLILGPTLFIMNNFTNSFGDYLQNIIQMSFQT

SEQ ID NO: 24258 - protein, 195 aa, Listeria monocytogenes
APGGEVGTQAAMKDALRYSFFHWGISAWSIYAIVALALAYFKFRKNAPGLISATLYPILGKHAKGPIGQLIDIIAVFATVIGVATTLGLGAQQINGGLTYLFGVPNNFTVQFTIIIIVTILFMLSAMSGLDKGIQLLSNVNIYVAGVLLVLTLILGPTLFIMNNFTNSFGDYLQNIIQMSFQTAPDAPDARKWMT

SEQ ID NO: 24259 - protein, 187 aa, Listeria monocytogenes
GEVGTQAAMKDALRYSFFHWGISAWSIYAIVALALAYFKFRKNAPGLISATLYPILGKHAKGPIGQLIDIIAVFATVIGVATTLGLGAQQINGGLTYLFGVPNNFTVQFTIIIIVTILFMLSAMSGLDKGIQLLSNVNIYVAGVLLILTLILGPTLFIMNNFTNSFGDYLQNIIQMSFQTAPDAPDA

SEQ ID NO: 24260 - protein, 178 aa, Listeria monocytogenes
TQAAMKDALRYSFFHWGISAWSIYAIVALALAYFKFRKNAPGLISATLYPILGKHAKGPIGQLIDIIAVFATVIGVATTLGLGAQQINGGLTYLFGVPNNFTVQFTIIIIVTILFMLSAMSGLDKGIQLLSNVNIYVAGVLLVLTLILGPTLFIMNNFTNSFGDYLQNIIQMSFQTAP

SEQ ID NO: 24261 - protein, 181 aa, Listeria monocytogenes
GGEVGTQAAMKDALRYSFFHWGISAWSIYAIVALALAYFKFRKNAPGLISATLYPILGKHAKGPIGQLIDIIAVFATVIGVATTLGLGAQQINGGLTYLFGVPNNFTVQFTIIIIVTILFMLSAMSGLDKGIQLLSNVNIYVAGVLLVLTLILGPTLFIMNNFTNSFGDYLQNIIQMSFQT

SEQ ID NO: 24262 - protein, 179 aa, Listeria monocytogenes
EVGTQAAMKDALRYSFFHWGISAWSIYAIVALALAYFKFRKNAPGLISATLYPILGKHAKGPIGQLIDIIAVFATVIGVATTLGLGAQQINGGLTYLFGVPNNFTVQFTIIIIVTILFMLSAMSGLDKGIQLLSNVNIYVAGVLLVLTLILGPTLFIMNNFTNSFGDYLQNIIQMSFQT

SEQ ID NO: 24263 - protein, 184 aa, Listeria monocytogenes
APGGEVGTQAAMKDALRYSFFHWGISAWSIYAIVALALAYFKFRKNAPGLISATLYPILGKHAKGPIGQLIDIIAVFATVIGVATTLGLGAQQINGGLTYLFGVPNNFTVQFTIIVIVTILFMLSAMSGLDKGIQLLSNVNIYVAGVLLVLTLILGPTLFIMNNFTNSFGDYLQNIIQMSFQTA

SEQ ID NO: 24264 - protein, 176 aa, Listeria monocytogenes
APGGEVGTQAAMKDALRYSFFHWGISAWSIYAIVALALAYFKFRKNAPGLISATLYPILGKHAKGPIGQLIDIIAVFATVIGVATTLGLGAQQINGGLTYLFGVPNNFTVQFTIIVIVTILFMLSAMSGLDKGIQLLSNVNIYVAGVLLVLTLILGPTLFIMNNFTNSFGDYLQNI

SEQ ID NO: 24265 - protein, 174 aa, Listeria monocytogenes
QAAMKDALRYSFFHWGISAWSIYAIVALALAYFKFRKNAPGLISATLYPILGKHAKGPIGQLIDIIAVFATVIGVATTLGLGAQQINGGLTYLFGVPNNFTVQFTIIIIVTILFMLSAMSGLDKGIQLLSNVNIYVAGVLLVLTLILGPTLFIMNNFTNSFGDYLQNIIQMSFQ

SEQ ID NO: 24266 - protein, 144 aa, Listeria monocytogenes
YFKFRKNAPGLISATLYPILGKHAKGPIGQLIDIIAVFATVIGVATTLGLGAQQINGGLTYLFGVPNNFTVQFTIIIIVTILFMLSAMSGLDKGIQLLSNVNIYVAGVLLVLTLLLGPTLFIMNNFTNSFGDYLQNIIQMSFQT

SEQ ID NO: 24267 - protein, 182 aa, Listeria monocytogenes
GGEVGTQAAMKDALRYSFFHWGISAWSIYAIVALALAYFKFRKNAPGLISATLYPILGKHAKGPIGQLIDIIAVFATVIGVATTLGLGAQQINGGLTYLFGVPNNFTVQFTIIVIVTILFMLSAMSGLDKGIQLLSNVNIYVAGVLLVLTLILGPTLFIMNNFTNSFGDYLQNIIQMSFQTA

SEQ ID NO: 24268 - protein, 190 aa, Listeria monocytogenes
APGGEVGTQAAMKDALRYSFFHWGISAWSIYAIVALALAYFKFRKNAPGLISATLYPILGKHAKGPIGQLIDIIAVFATVIGVATTLGLGAQQINGGLTYLFGVPNNFTVQFTIIIIVTILFMLSAMSGLDKGIQLLSNVNIYVAGVLLVLTLILGPTLFIMNNFTNSFGDYLQNIIQMSFQTAPDAPDA

SEQ ID NO: 24269 - protein, 168 aa, Listeria monocytogenes
QAAMKDALRYSFFHWGISAWSIYAIVALALAYFKFRKNAPGLISATLYPILGKHAKGPIGQLIDIIAVFATVIGVATTLGLGAQQINGGLTYLFGVPNNFTVQFTIIVIVTILFMLSAMSGLDKGIQLLSNVNIYVAGVLLVLTLILGPTLFIMNNFTNSFGDYLQNI

SEQ ID NO: 24270 - protein, 172 aa, Listeria monocytogenes
EVGTQAAMKDALRYSFFHWGISAWSIYAIVALALAYFKFRKNAPGLISATLYPILGKHAKGPIGQLIDIIAVFATVIGVATTLGLGAQQINGGLTYLFGVPNNFTVQFTIIIIVTILFMLSAMSGLDKGIQLLSNVNIYVAGVLLVLTLILGPTLFIMNNFTNSFGDYLQNI

SEQ ID NO: 24271 - protein, 176 aa, Listeria monocytogenes
GTQAAMKDALRYSFFHWGISAWSIYAIVALALAYFKFRKNAPGLISATLYPILGKHAKGPIGQLIDIIAVFATVIGVATTLGLGAQQINGGLTYLFGVPNNFTVQFTIIVIVTILFMLSAMSGLDKGIQLLSNVNIYVAGVLLVLTLILGPTLFIMNNFTNSFGDYLQNIIQMSFQ

SEQ ID NO: 24272 - protein, 194 aa, Listeria monocytogenes
AAEPLSHYAVQAPGGEVGTQAAMKDALRYSFFHWGISAWSIYAIVALALAYFKFRKNAPGLISATLYPILGKHAKGPIGQLIDIIAVFATVIGVATTLGLGAQQINGGLTYLFGVPNNFTVQFTIIIIVTILFMLSAMSGLDKGIQLLSNVNIYVAGVLLVLTLLLGPTLFIMNNFTNSFGDYLQNIIQMSFQT

SEQ ID NO: 24273 - protein, 166 aa, Listeria monocytogenes
SFFHWGISAWSIYAIVALALAYFKFRKNAPGLISATLYPILGKHAKGPIGQLIDIIAVFATVIGVATTLGLGAQQINGGLTYLFGVPNNFTVQFTIIVIVTILFMLSAMSGLDKGIQLLSNVNIYVAGVLLVLTLILGPTLFIMNNFTNSFGDYLQNIIQMSFQTA

SEQ ID NO: 24274 - protein, 182 aa, Listeria monocytogenes
GGEVGTQAAMKDALRYSFFHWGISAWSIYAIVALALAYFKFRKNAPGLISATLYPILGKHAKGPIGQLIDIIAVFATVIGVATTLGLGAQQINGGLTYLFGVPNNFTVQFTIIIIVTILFMLSAMSGLDKGIQLLSNVNIYVAGVLLILTLILGPTLFIMNNFTNSFGDYLQNIIQMSFQTA

SEQ ID NO: 24275 - protein, 156 aa, Listeria monocytogenes
FHWGISAWSIYAIVALALAYFKFRKNAPGLISATLYPILGKHAKGPIGQLIDIIAVFATVIGVATTLGLGAQQINGGLTYLFGVPNNFTVQFTIIIIVTILFMLSAMSGLDKGIQLLSNVNIYVAGVLLVLTLILGPTLFIMNNFTNSFGDYLQNI

SEQ ID NO: 24276 - protein, 192 aa, Listeria monocytogenes
APGGEVGTQAAMKDALRYSFFHWGISAWSIYAIVALALAYFKFRKNAPGLISATLYPILGKHAKGPIGQLIDIIAVFATVIGVATTLGLGAQQINGGLTYLFGVPNNFTVQFTIIIIVTILFMLSAMSGLDKGIQLLSNVNIYVAGVLLVLTLILGPTLFIMNNFTNSFGDYLQNIIQMSFQTAPDAPDARK

SEQ ID NO: 24277 - protein, 176 aa, Listeria monocytogenes
QAAMKDALRYSFFHWGISAWSIYAIVALALAYFKFRKNAPGLISATLYPILGKHAKGPIGQLIDIIAVFATVIGVATTLGLGAQQINGGLTYLFGVPNNFTVQFTIIIIVTILFMLSAMSGLDKGIQLLSNVNIYVAGVLLVLTLILGPTLFIMNNFTNSFGDYLQNIIQMSFQTA

SEQ ID NO: 24278 - protein, 182 aa, Listeria monocytogenes
GGEVGTQAAMKDALRYSFFHWGISAWSIYAIVALALAYFKFRKNAPGLISATLYPILGKHAKGPIGQLIDIIAVFATVIGVATTLGLGAQQINGGLTYLFGVPNNFTVQFTIIIIVTILFMLSAMSGLDKGIQLLSNVNIYVAGVLLVLTLLLGPTLFIMNNFTNSFGDYLQNIIQMSFQTA

SEQ ID NO: 24279 - protein, 179 aa, Listeria monocytogenes
VGTQAAMKDALRYSFFHWGISAWSIYAIVALALAYFKFRKNAPGLISATLYPILGKHAKGPIGQLIDIIAVFATVIGVATTLGLGAQQINGGLTYLFGVPNNFTVQFTIIIIVTILFMLSAMSGLDKGIQLLSNVNIYVAGVLLILTLILGPTLFIMNNFTNSFGDYLQNIIQMSFQTA

SEQ ID NO: 24280 - protein, 178 aa, Listeria monocytogenes
QAPGGEVGTQAAMKDALRYSFFHWGISAWSIYAIVALALAYFKFRKNAPGLISATLYPILGKHAKGPIGQLIDIIAVFATVIGVATTLGLGAQQINGGLTYLFGVPNNFTVQFTIIIIVTILFMLSAMSGLDKGIQLLSNVNIYVAGVLLILTLILGPTLFIMNNFTNSFGDYLQNII

SEQ ID NO: 24281 - protein, 175 aa, Listeria monocytogenes
GGEVGTQAAMKDALRYSFFHWGISAWSIYAIVALALAYFKFRKNAPGLISATLYPILGKHAKGPIGQLIDIIAVFATVIGVATTLGLGAQQINGGLTYLFGVPNNFTVQFTIIIIVTILFMLSAMSGLDKGIQLLSNVNIYVAGVLLVLTLILGPTLFIMNNFTNSFGDYLQNII

SEQ ID NO: 24282 - protein, 176 aa, Listeria monocytogenes
APGGEVGTQAAMKDALRYSFFHWGISAWSIYAIVALALAYFKFRKNAPGLISATLYPILGKHAKGPIGQLIDIIAVFATVIGVATTLGLGAQQINGGLTYLFGVPNNFTVQFTIIIIVTILFMLSAMSGLDKGIQLLSNVNIYVAGVLLVLTLILGPTLFIMNNFTNSFGDYLQNI

SEQ ID NO: 24283 - protein, 183 aa, Listeria monocytogenes
LRYSFFHWGISAWSIYAIVALALAYFKFRKNAPGLISATLYPILGKHAKGPIGQLIDIIAVFATVIGVATTLGLGAQQINGGLTYLFGVPNNFTVQFTIIIIVTILFMLSAMSGLDKGIQLLSNVNIYVAGVLLVLTLILGPTLFIMNNFTNSFGDYLQNIIQMSFQTAPDAPDARKWIDSWT

SEQ ID NO: 24284 - protein, 204 aa, Listeria monocytogenes
PLSHYAVQAPGGEVGTQAAMKDALRYSFFHWGISAWSIYAIVALALAYFKFRKNAPGLISATLYPILGKHAKGPIGQLIDIIAVFATVIGVATTLGLGAQQINGGLTYLFGVPNNFTVQFTIIIIVTILFMLSAMSGLDKGIQLLSNVNIYVAGVLLILTLILGPTLFIMNNFTNSFGDYLQNIIQMSFQTAPDAPDARKWIDS

SEQ ID NO: 24285 - protein, 207 aa, Listeria monocytogenes
VFWGAAEPLSHFAVQAPGGEVGSQAAMKDALRYSFFHWGISAWSIYAIVALALAYFKFRKDTPGLISATLYPILGKHAKGPLGQLIDIIAVFATVIGVATTLGLGAQQINGGLTYLFHVPNNFTVQLIIIVIVTVLFLLSAMSGLDKGIQLLSNVNIYVAGVLLILTLILGPTLFIMNNFTNSFGDYLQNIIQMSFQTAPNAPDARK

SEQ ID NO: 24286 - protein, 208 aa, Listeria monocytogenes
AEPLSHYAVQAPGGEVGTQAAMKDALRYSFFHWGISAWSIYAIVALALAYFKFRKNAPGLISATLYPILGKHAKGPIGQLIDIIAVFATVIGVATTLGLGAQQINGGLTYLFGVPNNFTVQFTIIIIVTILFMLSAMSGLDKGIQLLSNVNIYVAGVLLILTLILGPTLFIMNNFTNSFGDYLQNIIQMSFQTAPDAPDARKWIDSWT

SEQ ID NO: 24287 - protein, 169 aa, Listeria monocytogenes
WGAAEPLSHYAVQAPGGEVGTQAAMKDALRYSFFHWGISAWSIYAIVALALAYFKFRKNAPGLISATLYPILGKHSKGPLGQLIDIIAVFATVIGVATTLGLGAQQINGGLTYLFGVPNNFGIQFTIIVIVTILFMLSAMSGLDKGIQLLSNVNIYVAGVLLVLTLILG

SEQ ID NO: 24288 - protein, 205 aa, Listeria monocytogenes
WGAAEPLSHYAVQAPGGEVGTQAAMKDALRYSFFHWGISAWSIYAIVALALAYFKFRKNAPGLISATLYPILGKHSKGPLGQLIDIIAVFATVIGVATTLGLGAQQINGGLTYLFGVPNNFGIQFTIIVIVTVLFMLSAMSGLDKGIQLLSNVNIYVAGVLLVLTLILGPTLFIMNNFTNSFGDYLQNIIQMSFQTAPDAPDARK

SEQ ID NO: 24289 - protein, 195 aa, Listeria monocytogenes
VFWGAAEPLSHYAVQAPGGEVGTQAAMKDALRYSFFHWGISAWSIYAIVALALAYFKFRKNAPGLISATLYPILGKHSKGPLGQLIDIIAVFATVIGVATTLGLGAQQINGGLTYLFGVPNNFGIQFTIIVIVTVLFMLSAMSGLDKGIQLLSNVNIYVAGVLLVLTLILGPTLFIMNNFTNSFGDYLQNIIQMS

SEQ ID NO: 24290 - protein, 194 aa, Listeria monocytogenes
GGEVGSQAAMKDALRYSFFHWGISAWSIYAIVALALAYFKFRKDTPGLISATLYPILGKHAKGPLGQLIDIIAVFATVIGVATTLGLGAQQINGGLTYLFHVPNNFTVQLIIIVIVTVLFLLSAMSGLDKGIQLLSNVNIYVAGVLLILTLILGPTLFIMNNFTNSFGDYLQNIIQMSFQTAPNAPDARKWIDS

SEQ ID NO: 24291 - protein, 859 aa, Coxiella burnetii RSA 493
MRIDKFTTAFQTALADAQSLAVGRDHQFIEPAHVMKVLLEQTQGTVAPLLEQSKVNLSRLIDGVNKAIDSYPQVEGTGGEVHVSRELSKILTLMDKFAQQNKDQYISSEWFIPAALEAKGQLRDVLIEAGADKKAIEKNIMNLRKGERVTEQSAEDQRQALAKYTIDLTEKAETGKLDPVIGRDEEIRRTVQVLQRRTKNNPVLIGEPGVGKTAIVEGLAQRIVNGEVPEGLKQKRLLALDMGALIAGAKFRGEFEERLKAVLKDIAKEEGRVILFIDELHTMVGAGKAEGAMDAGNMLKPALARGELHCVGATTLDEYRKYIEKDAALERRFQKVLVEEPSTEDAIAILRGLKERYEVHHGVEITDPAIIAAATLSQRYITDRNLPDKAIDLIDEAASQIRMEMDSKPVELDRLERRLIQLKIEREALKKETDEASKKRLSDLETEIKNVEKEYSDLEEVWKSEKASLHGTQQIKEELEQARIELEAAGRAGDLARMSELQYGIIPELDKKLKAASQKEEQFHDHKLLRSRVTEEEVAEVVSKWTHIPVSKMLEGEREKLLHMETELHKRVIGQDEAVNAVANAIRRSRAGLSDPNRPVGSFLFLGPTGVGKTELCKALAVFLFDTEDAMVRIDMSEFMEKHSVARLIGAPPGYVGYEEGGYLTEAIRRRPYSVILLDEIEKAHNDVFNVLLQVLDDGRLTDGQGRTVDFRNTVIVMTSNLGSDLIREFSGENYDKMKDAVMEVVAQHFRPEFINRIDEAVVFHSLKKEQIRNIAIIQIDRIKKRLKEKDYQLTISDDALDYLSELGYDPVYGARPLKRVLQQQLENPLSQKILEGKFVPGSLINIEKKGEQLEFKEA

SEQ ID NO: 24292 - protein, 339 aa, Coxiella burnetii RSA 493
MKFVDEAFVRVEAGNGGHGCLSFRREKFIPRGGPDGGDGGDGGSVYFVADKSVNTLVEFRYQRLLRAQNGQPGMGRLRSGKKGEDLIVPVPLGTTVYDKETSELIGDLIEAGDKLCVARGGRHGLGNTHFKSSTNRAPRRTTSGEEGEARELKLELKLLADVGLLGLPNAGKSTFIHAVSKATPKIADYPFTTLYPHLGVVRVEEYRSFVIADIPGLIEGASEGAGLGVQFLKHLERTQLLLHIVDIAPLDGSDPVQSIQAIISELEQFSQNLSQKPRWLVFNKIDLLPPDVAQARCQEIINRLNWKGPVYKISAIKRQGTELLCYDLMSFLETNQRSI

SEQ ID NO: 24293 - protein, 111 aa, Coxiella burnetii RSA 493
MLISVLKSKISYATITQKELFYIGSITIDEAIMERAQLTINEQVQIVNLNNGERLETYVIPGKRNSNIIALNGPAARKGEIGDQLFILSYALIDPTQEKLDPVLVDLKLND

SEQ ID NO: 24294 - protein, 359 aa, Coxiella burnetii RSA 493
MFAQVTYIWMDGAQPTQKLRSKVRIVKHPERDITLADFPEWGFDGSSTYQATGKDSDLILQPVHFVKDPILGDGNYLVLCEVMNPDGSPHASNTRARLRQIMANGAAEHEPWIGFEQEYTLFQGVQPLGWPDRGYPAPQGPFYCGIGADEVFGRPLVEEHATACIEAELMIFGTNAEVMPGQWEFQIGYRGADDETPDPLTVSDHLWLARWLLYRIGEDYGITATLQPKPVKGDWNGAGKHTNFSTKLMRDPATGREAIEQAIERLSKRHDAHIAVYGHGLEERLTGKHETAPITQFSSGVGNRGASVRIPSAVASRGCGYLEDRRPGANADPYQVAAILLETICGIQLPKNSGIETTV

SEQ ID NO: 24295 - protein, 560 aa, Coxiella burnetii RSA 493
MNNVHAYKRRIGPIGLMMSAVSAMIGSGWLFSSLYVGRLAGPASILAWIFGGILVMIVALTYAEIVTMLPITGGSTRFPQLTHGTFVSLFFGWITWFTLMTAPAIEVQAMIQYAANYWPTLIRHHGAGMHGLSPLGYLIATLMMIGFSLINIYSIRLITRLNNIFSFWKLIIPVLTAIVLMVVAFHPNNFNNPHYGGFMPNGWKGVFAALATGGILFAFNGFKQAVELAGEAENPNRTVIIGILGSLIIVLIIYLLLEIGFIGALSPESLSKGWFFVHFIGDAGPLAGLLMTFGVTWMAILLYIDAMIATSAAGLVYSTSSSRTLYGLSANRQLPKFLQEVNERGIPAKAVFVNFIVGMTFFLPFHGWYAMAEFMSSIIALSYITGPICCLSLRYQLPEHKRVFRLPLITVWSFFGFYICTLIVYWAGWSVVSKLGLSLFISFMLFVVYRLFSKRPRGIHMNWRAATWMWPYLVGLNVISYLGSYGGGINKIHFGWDFLYLAILCFCCLYLAVTFRASDKHVAETLVRFEEEVKTGIPSTVPDEEFENPSLVRKEVSYID

SEQ ID NO: 24296 - protein, 99 aa, Coxiella burnetii RSA 493
MRVHEEIQQQVTSNPVVLYMKGTPDFPQCGFSGRVVQILRQCKIDFTSFNVLESPELRQGIKEFSSWPTIPQLYIKGEFIGGCDIVGELFETGKLQELL

SEQ ID NO: 24297 - protein, 181 aa, Coxiella burnetii RSA 493
MVITSKPCVFLDRDGVIVVPEFRNGRTFAPKTLEGFSYFPDTKKTLVRLKTAGYLLIVVTNQPDVGNGITSLATIENMHNKMRQELPIDHIEVCYHSQKDNCHCRKPKAGMLLNSLKKFNIIVQKSFMIGDRSSDIEAGRKLNLKTIFIDHHYQEPITANPDYICQDLSQGVEIILREENA

SEQ ID NO: 24298 - protein, 293 aa, Coxiella burnetii RSA 493
MKCLPPEKAFLGLEPQKAVPYEKAKAVIIPFGLERSVSYGGGTAQGPAAMIEASFEVELFDEALWCEPYCDIGIVTLEEPKIEADMQSALKQLETLVQQVLDDEKFPFVFGGEHSITAGSIRPFVNAYDNLAILHFDAHADLRDGYEGEHYSHASAIRRCLDYPSVEVISVGIRNISAEEIPFFEANRNRIHIYWAKDKKTWDINEIIAPLKNRPIYLTFDLDGFDASLMPATGTPEPGGLFWNDAQEIITAAGQVGTIVGADINELAPIPGFHSCDFLAAKLAYKILSSAFK

SEQ ID NO: 24299 - protein, 324 aa, Coxiella burnetii RSA 493
MSNNENFYTLGKAVIATELRAIQSLHARIDEKFVTACNTLFNCKGRVVVLGVGKSGHIAKKIAATLASTGTPSFYVHPSEASHGDMGMVTPQDVALAISYSGETPEIINLLPTLKRLGVALIALTGKMQSTLARIADTVIDVSVEQEACPLGLAPTSSTTATLVMGDALAIALLEARGFTADDFARIHPGGSLGRRLLLHIADLMHPKDKMPIVKPDCLLDEALVEITKKSLGMTTVVSDSGQLLGVFTDGDLRRTLDKGYDIHRTPIEKVMTKNSITVPPKLLAAEALKMMQQNKITSLVVVDTDASPVGVIHMHDLLRAGVS

SEQ ID NO: 24300 - protein, 632 aa, Coxiella burnetii RSA 493
MCGIAGIFNLNGKPVAFDQIKAMTDSIAHRGPDGEGQFTDKYIGLGHRRLAIIDLSPAGHQPMQTKDGRYLITYNGEVYNFKILRKELETLGYSFFSNTDTEVVLNAYVQWGEKCLEKFNGMFAFAVWDRKEKTLFLARDRYGIKPLYYYQTNDCFVFASEIKAIIASGLYGAEINKEALVEYLTFQNFFTDRTLFKDVRIMPAGHFMMVKRENSSLHQYWDFNFTNDSALSEKMLLEKINDLFQQAVNRQLVSDVPVNSYLSGGVDSGSITMIAAKQLPHIRTFTVGFDLSSASGLELAFDERQAAEHLSYLAGTEHYEMVLKAGDMERCMQDLVWHLEEPRIGQSYPNFYAAKLASKFGKVVLAGTGGDELYAGYPWRYLCGQSSENFEDYIDKYYQYWQRLMSNKNLFKVLAPIAEEVKSIWTRDIFANVFRIKDTPIKTEDYINYSLYFEAKTFLHGLLVVEDKLSMAHGLETRVPCLDNDFVDFALQVPVKYKLSDFAFERVNENDTFSKREKRMNGKKILRKMMSRYVPDNVAHAPKQGFSAPDASWFKGESIEFVRSLLGDRNAKIFELLDYSVVNHLVNDHIQNHHNHRLLIWSLIYLEIFMQVHLSKGHKSNYHLFTPETVEL

SEQ ID NO: 24301 - protein, 637 aa, Coxiella burnetii RSA 493
MCGIVGFWDFRRSWKKEQYQKVAAKMADQITSRGPDSSGVWCDEKTGLAFGHRRLAVIDLSTAGHQPMLSHSGNTAIIYNGEIYNAPFIRRELENAGIYCCGHSDTEVLLEACELWGVKSAVKKMNGMFAFAYWNKLEKKLYLGRDRLGIKPLFWSLKNNIFYFSSQLKALAAHPVWNVEIDRTALTSYFRFNYIPAPLSIYKGVYKLKPGTILTIDPNQKIIEETFWSLETVCQKNINKKKIDDNEVLEKTETLLRDAVKCRMYSDVPLGAFLSGGIDSSAVVALMQAQSTNRIKTFSIGFYEKEYNEASYAKEVAQHLKTDHHELYLHVDEAARLIPQIPEWYDEPFADSSQIPTYLVSQLARQHVTVSLSGDGGDELFAGYNRYLLAENLWSKLVRFPLWMRQSGSKTINFFSPSAWDKFANVIPRKLRPSSVGDKAHKLAALLTQSSEDLYKGLVSLWERPAELVIDGSDISLWPEPLPDLNFTERMQYIDTLTYLPDDILTKVDRASMAVSLEARIPLLDYRLVEYIWSLPMRFKLERGETKWLLRRVLGKYVPEKLFTRPKMGFGVPIDHWLRCQLREWAEDLLSVPKLEKDGLLHSSLIRQRWQEHLSGKRNWQYSLWSVLMFQLWRERW

SEQ ID NO: 24302 - protein, 394 aa, Coxiella burnetii RSA 493
MENPIVIVSAARTPMGHYGGYFKEMPAPELGAAVIKAVVERAGLQPAEIDEVIMGCVLPAGQGQAPARQAALKAGLPVSTPCTTINKMCGSGMKAIMLAHDEILADSYPHIIAGGMENMSRAPYLMMKARFGYRLGHDRIYDHMMLDGLEDAYDKGKAMGVFAEKCVDKYQFTREALDKFAIESLLRAKKANENGSFAPEIVPITITHQRETLTVDHDENAMKANPEKIPQLKPVFKADGAVTAANSSSISDGAAAVTLMRLSEAKRLNIQPLAKIIGHFTYAEDPSWFTTAPIGAIRGLLKKISWKKEAVDLFEINEAFAAVTMAAMKEIGLAHNKVNIHGGACALGHPIGASGARILVTLLYALQKNNLQRGIASLCIGGGEATAIAIERGF

SEQ ID NO: 24303 - protein, 409 aa, Coxiella burnetii RSA 493
MALIVQKFGGSSVANLEGIQNVARLISEARQEGHSVVAVVSAMYGETDRLIKLAQSISGSNWREYDALISTGEQVSAALLSMALEARNCPAHSYTAAQIRLRTTNEHKKARIVDIDPEILHSDLKEGRVPVVAGFQGVSDAGDITTLGRGGSDLTAVALAAALEADECQIFTDVDGVYTSDPKIVPQARRIPKITFDEMMEMSSLGAKVLQNRCLEFAGKFKVPVRVLSSLRKGPGTLITFEWDSAEQPLVSGIAFDRRQAKLTIQGIPERPGLASYILGPISKANIEVDMIVQNVPTIDANIDFSFTLPRDDYKDAFSIMKQVANELAAGAVLGSDQVAKISLVGVGMRSHAGIASQMFSALGQEGIHIHLITATEVKISAVIDEKYLELGARTLHSAFKLNQEIKFT

SEQ ID NO: 24304 - protein, 369 aa, Coxiella burnetii RSA 493
MLIGVPKEVKIEEYRVGLTPYSVRELVLHGHQVIMERDAGNAINFTDEAYLAAGAKIVDTPVEVYQAEMIVKVKEPQSSEYALIREGQILFTYLHLAPDPQQAQALIKSGCIAIAYETVTDNEGGLPLLSPMSQVAGRLAIQAGAHCLEKPEGGSGILLGGVPGVYAGKVTVIGGGVVGSNAVRMAMGKKAQVTVLDKSLRRLQELDFQFGGRLNTAYSTESSIEHYVIDADLVVGAVLVPGHSAPKLVGQDVLKKMRPGSVMVDVAIDQGGCFETSKPTTHKKPTYVIDGIVHYCVANMPGAVPRTSTLALNNATLPYVIALADKGYRQAFLDDPHFLNGLNVYCGQITHKGVAQGLQQEFNPPLALL

SEQ ID NO: 24305 - protein, 396 aa, Coxiella burnetii RSA 493
MKLPFYFDYMATTPADPAVVGAMVASLTKEGVFGNSASENHRYGWEARQLIENARESVAKLINADPREIIWTSGATESNNLALKGAASFYRRQGKHIITMSSEHKSVLDTCAHLAFSGFEITTLTPEPNGLLNLEKFEAAIRPDTILASILHVNNETGVIQDIHAISEITRRHGILFHVDAAQSAGKIPIDLQAVSVDLMSFSAHKIYGPKGIGALYVRAKPRVRLEPLIHGGGHEKGLRSGTLATHQIIGMGKAFELAKLHLEDDNKHLTQLRDRLWNGLVKLGGLHINGANAPRIPGCLNIRFDGVEGESLLVSLQKVAISSGSACNSASSLPSHVLTAMGLTREEADNSIRISFGRFTTQEEVDGAVEHITEQVNRLRKMSPVWETVKAKVVA

SEQ ID NO: 24306 - protein, 151 aa, Coxiella burnetii RSA 493
MAKAVQKYPHSMLSHLQQDINRLFEPFGWATGGELWDAFSSEWSPHIDIKDEGQNYLICADIPGVDPKKIQVSMENNILTIKGERETEAKEKSEGYLRIERTKGAFLRQFTLPESVDAESIKAKSKHGVLEITIPKAQPPRTKKIEIEEQE

SEQ ID NO: 24307 - protein, 380 aa, Coxiella burnetii RSA 493
MPEIYLDNNATTSAAPEVMESLLAFFSKRYGNPSSLHRLGLQAERAVDEARRALSGLLGAHEDEIVFTSGGTESVNLAVKGAAQAFKRKGNHIITTPIEHDAVLGSIKQLEQAGFTVDFAKVDAQGKVSPESVVELIKPNTILVAVMHVNNELGSINPINAIAKAVKAKNKGIIFFSDGAQAFGKLEIDLTHIDLYSISGHKFHAPKGSGALYVKKKTPLQPLISGGGQEFDLRSGTQNVPTIVGLAKAARLAYGHLKETRECWRELMADFLQGLKNIPEVKINSPVNALENTLNVSFDSIPSQVMMNSLEEKGIYVSAGSACSGAKGKPSHVLKAIGLPAKRIQSAIRFSFSRYNTHEEIHYVLENLQSIIYKLKKILR

SEQ ID NO: 24308 - protein, 550 aa, Coxiella burnetii RSA 493
MVHEKTTVRSYFYLIFITVFAAIFVIAFFWLPILWFLIIALPLFFVGIYDIFQKDSNILRNYPVWGHWRYILLKIRPQIHAYFIEDEWGGAPFTHAQRFLVYDRSRKTVDTMPFGTQLDVHEVGYEWVNQSMAPKQPDFDSCTRVEIGGPQCTQPYSASRFNVSAMSFGAISAEAVRALNRGAKLGGFHQDTGEGGLSKYHLMEGGDLVWEIGTAYFGCRTKDGKFNPEQFKEKSRHPNVKMVEIKISQGAKPSHGAILPGVKVTQELAEARGVEAGVDCLSPPAHSTFSTPIGLLEFVQQLRELSGGKPTGFKLCIGILQEFMAVCKAMLETKIYPDFIVIDGSEGGTGAAPFEFSDSVGMPLNEGLIFAHNCLVGIDVRKHIRLIGSGKIITGFDMLTKIALGADILNSARGMMFALGCVQSRRCHLNTCPTGVTTQDPKRRYALDVNEKAVYVKNFHEATLKSFLEVLGATGLERPEELQPFHVHRRVSKDAALTYDEIFPYLEPNDILKGRVPEKYRNYMKLWKEADPHYFVARPKETHRADSQPT

SEQ ID NO: 24309 - protein, 656 aa, Coxiella burnetii RSA 493
MAEIIGIDLGTTNSCVAVMEGGKVRVIENAEGSRTTPSIVAYTKDGEVLVGASAKRQAVTNADRTLYAIKRLIGRRFDDNVVQKDIKMVPYKIIKADNGDAWVEVKDKEGKSQKLAPPQISAQVLIKMKKTAEDYLGHEVKDAVITVPAYFNDSQRQATKDAGKIAGLNVKRIINEPTAAALAYGMDKKKGDRKIAVYDLGGGTFDISIIEIAEVDGEHQFEVLATNGDTFLGGEDFDLRLIDYLAGEFKKDEGVDLHNDPLALQRLKEAAEKAKIELSSSQQTDVNLPYITADASGPKHLNIRLTRAKLESLVEDLVERTIEPCKVAIKDAGLKVSEIDDVILVGGQTRMPKVQEAVKNFFGKEARKDVNPDEAVAIGAAIQGAVLSGEVKDVLLLDVTPLSLGIETLGGVMTKLIEKNTTIPTKANQVFSTADDNQTAVTVHVLQGEREMASANKSLGRFDLSDIPPAPRGVPQIEVTFDIDANGILHVSAKDKATGKEQSIVIKASSGLSDEEVEKMVKDAEAHRDSDRKFHELVDARNQADAMIHAAEKSVKDLGSEVSADEKSAIEKAVNELKEAMKGNDKDAIEAKTKALTEHSSKLAERVYAKKGGAAGAPPGGEAEGEPQAQAGGKKEDVVDAEFEEVKDEKKKDEDK

SEQ ID NO: 24310 - protein, 647 aa, Coxiella burnetii RSA 493
MNSMIKNLLLWLVIAVVLITVFSNFGSRQSDVQPYSYSQFVQAVNNDKVSSVVIQGHEIKGVTKDNKHFTTYLPMEDQALLNQLMAKGVSVKGEPPKQQSMFLHILISWLPFLILIFVWILFMRQMQGGGRGGGPMSFGRSKARLLSQDQVKVTFDDVAGVDEAKEEVKELVEFLRDPGKFQRLGGKMPCGVLLVGPPGTGKTLLAKAVAGEAKVPFFTISGSDFVEMFVGVGASRVRDMFDQAKKQAPCIIFIDEIDAVGRHRGAGLGGGHDEREQTLNQLLVEMDGFEGKEGIIVMAATNRPDVLDPALLRPGRFDRQVVVPLPDIKGREYILKVHMNKLPLAKDVKASVIARGTPGFSGADLANIVNEAALFAARENKKDVSMSEFERAKDKIMMGAERRSMVMSDDEKKLTAYHEAGHAIVGLHMLEHDPVYKVTIIPRGRALGVTMFLPEHDRYSMTKRRLECQLAGLFGGRIAEEIIFGPDLVTTGASNDIEKATEIARNMVTKWGLSQKLGPLTYREEEGEVFLGRSVTQRKDISDATNKEIDSEVRRIVDTAYTTAKQTLEEHIEQLHLMAKALIKYETIGEAQIKEILAGKEPSPPPDWKEENGSASAHKENSEKELSEEKGEEKTVNPSRPRPAEDG

SEQ ID NO: 24311 - protein, 244 aa, Coxiella burnetii RSA 493
MLTIKNLHASVHNNQILRGVNLTINAGEVHAIMGPNGSGKSTLASVLAGREDYAIVDGDVRYFDEDLFELSPEDRAAKGLFLAFQYPVEIPGVNNLYFLKTAVNSIRKTRGEAPFDAIDLMGLVKEKLALVDMDDKFLKRSVNEGFSGGEKKRNEILQMLMLDPRLAILDETDSGLDIDALQTVAKGVNSLRNKERAILLVTHYQRLLDYIKPDFVHVLVNGRIVLSGDQSLALELEKKGYGWL

SEQ ID NO: 24312 - protein, 295 aa, Coxiella burnetii RSA 493
MKPTYCGYAAIIGRPNVGKSTLLNQLLEQKISITSRKPQTTRYQILGVKTFKDIQVIYVDTPGLHAGTERTINRYMNRTARGALRDVDAIVFVIEPHWESQDAWVLDNLKEIETPVFLVINKVDKIKNRAELLPLIEKVSSLYAFQKITPLSAKTGDQVGTLEQAVHQLMPESPFYFPPEQVTDRSDQFMASEIIREKLMRLLGQEIPYSLAVTLIEFRKEEKIIRISAVIWVEKKSQKGIVIGKGGERLKRVGTNARLDMEKWFGKRVFLQLWVKVKSGWADNERLLRELGFEE

SEQ ID NO: 24313 - protein, 444 aa, Coxiella burnetii RSA 493
MKTFQARYKLLFPLVLSGVIATIVLSYWFLPAVLAFYKVYWLFIFVAAIVVLTPLGNRRLGEMPPSKKLPHWILQVLIFEISLLAVFWGICVLVGLKMPLFSEAQPQLFTQTLSYLSTQLGIFSWAAIAVIACAMGTVSYRQQQDAYLSTTLRPLLRTQPNSAFELIVNALPRTATLFAFSGTFALYVLLIAGILVPQPLSSLTGLSLLSGIFFFLLVILTTNNFIKRKIYLFTINIRMPLLFRLICFLLLLTLLVIVLSLFLGSTFEKRPSMPGVVHAFLRHGWISNWRLFAIFWWLSWTPITAIFIAKLSRGRSLRSIILTVCALPMVLGILSYNDYLPLDKIPIWLSIVIALMGLFIFLAIISPDYAFDSIMQTYLPKPGVIKYRASDRFLINIFQFSALMICIYLATGIVLLGLLFFIFMLLLSVMLPAISAILLKKNTH

SEQ ID NO: 24314 - protein, 542 aa, Coxiella burnetii RSA 493
MLKRSISPFALLLTSVSAILGSGWLFAAYYTSELAGPSAILAWLIGGSAAIIIAFVFAELCAMLPITGSSTRIPYYTHGTLVSFLFAWIIWLTYASFASTEVQAVLQYFSYFFPSLVQSNAGLTGFGYFLATLLMLAISALNVFSLRWLLRCNNVLTLLKIAIPVIVALVILAVYFSPHQLLHPGHSSFMPYGMHGVFAAVSGGGIVFAFNGFKQACEMAGEAKKPARALPFAVIGSVIVCLIVYLLLQFAFLTSIIPSNLIHGWSHLALPGGTSPLTAVAHQGHLDILLPVLYAGAVIGPMAAALMYTSSAARSLYGMSKSHHIPPLFQRLLHGNPVVAIITNFLLGMSLFAPLPGWNSMITFLTSLIALTYGIGPICLLTLRKQLPDYQRPFKLPFVTVWATFAFYLCTLLTYWSGWAVISKLGIALVVGLLVLFIHRAFISPDERVPLNAKAALWVWPYLVGVTLISYLGDYGGGKGVIPPGWDFGVIGLFCIMIMWLALKFRLPTILTQHYMKDGDFTHQPPEQETDGTQEPAFAQHG

SEQ ID NO: 24315 - protein, 319 aa, Coxiella burnetii RSA 493
MPNVDDIRIFHGSANPSLAENVAKELNTTIGNALISRFSDGEIRFEIEENVRGRDIYLIQSTGHPTNEHVMELILMGDAFRRASAASITAVVPYFGYARQDRRVRSSRVPISAKVVADMMQKVGFSRLITVDLHADQIQGFFYMPVDNIYASITALEEYRLLDKLETPMIVSPDVGGVVRARAIAKRLNDSDLAIIDKRRPAPNQAEVMNVIGNVQNRHCVIVDDIVDTAGTLCHAASALKEKGALTVSSYCTHPVLSGNAVKNIMDSDIDELIVTDTIPLHEEAAKCRKITQISLSRLIAETISRINQKESVSSMFLD

SEQ ID NO: 24316 - protein, 566 aa, Coxiella burnetii RSA 493
MDIKRIILYVIVALLAIALFNAWQRDYPPTPKPTPTVEQPTANGDHPTAYTPPAFTPGAAEKTKKAGTIAFTSKVPEARLITVRTDVLDVEIDTQGGNIVSAKLPKYPVSLEEKQTPVQILSGEPNELYIAQSGLTNGNGQPTTVQFESEKKQYVLENGQNQLIVQLTGRAPDGLLVTKTYTFHRDDYAIHLAYQVKNNTSKPWQGSLYTQITRRQPPTEHHHFYVRSYNGASMGSPQTPYEKLSYESLDKQNIDRTSQSGWIAMQQHYFLSAWVPGNPELTYHYYSHVIPASDEPNVYVVGFVSPQMNVAAGSEAATHATLYVGPEIAKRLKGLAPGLERTIDYGWLWPISMLLFWILSAVHAVVKNWGWSIIITTILIKIVFYWFSAKSFRSMARMREMQPRIQALKERHGDDRQALSRATMELYRKEKINPLGGCLPMLIQVPVFIAFYYVIIESVQLRQAPFIFWIHDLSVKDPYYILPIIMGLSMLAQQWVSPTSPDPTQQKMMWILPVIFTVFFINFPAGLVLYWITNNVVQTLQQWYVNKTYESHKAKLKARRARKRKR

SEQ ID NO: 24317 - protein, 184 aa, Coxiella burnetii RSA 493
MLDEEKLIILDRDGVINYDSENYIKNPDEWIPIPGSLSAIARLNEVGYQVVIATNQSGVDRGYYSLDMLEAIHEKMRRELAKAGGRVAGIYFCPHAPQANCPCRKPKPGLLHLIAEDFPQKLKGTALVGDSLRDIQAARAAGCLPVLVKTGNGEKTIANGEGLEDVPIFEDLSDFVNHLTRKSL

SEQ ID NO: 24318 - protein, 476 aa, Coxiella burnetii RSA 493
MINCVSMLNNSKKRVLSVFSLVMINVIAIDSLRNLPTNADNGLTILLFYLIAAAIFLVPSVLVTAELATHRPKTGGVYVWVREAFGPQWGFFTIWLQWIYNVFWYPTILSFIAVNIAYFFNPALAADKAFMLPMILGMFVLATIANSYGMTISSVVSSISAIVGTIIPMALIILLGAVWLWMKKPLAISLNWHNFIPHFSHIPNLAFLVVVFFSLMGIEMSAVHAEEVKNPERDYPRALYYSALIIVISAALSSTAIALIVPQQALNIVSGLDQAFALFLNAFHLKWLLPVTIFIIILGGFGSMAAWVIGPTKGLMVAAEDGSLPAWMSYRNKRGAPLGVLLMQVILVVFLCLLFLLIPSFNTSYWILSDLTAQLALIFYIPFFAAAIRLRFKTERKEKCFRIPGGNFGIWLVGCVGIIACITAILVGFIPPAGVKIYSVKIYEMILVGGLILFSLPPFVIYAIQKRKSSATTISQ

SEQ ID NO: 24319 - protein, 658 aa, Arabidopsis thaliana
MGIELQNHQSHHEEASPAEEPMSRWLINTPEPPSMWQELIGYIRTNVLAKKKHKRNKTKNSSSNLVYSCLKSAFPILSWGRQYKLNLFKKDLMAGLTLASLCIPQSIGYANLAGLDPEYGLYTSVVPPLIYSTMGTSRELAIGPVAVVSLLLSSMVRDLQDPVTDPIAYRKIVFTVTFFAGAFQAIFGLFRLGFLVDFLSHAALVGFMAGAAIVIGLQQLKGLFGLTHFTNKTDVVSVLSSVFHSLHHPWQPLNFVIGSSFLIFILLARFIGKRNNKLFWIPAMAPLISVVLATLIVYLSNAESRGVKIVKHIKPGFNQLSVNQLQFKSPHLGQIAKIGLISAIIALTEAIAVGRSFATIKGYRLDGNKEMMAMGFMNIAGSLSSCYVATGSFSRTAVNFSAGCETVVSNIVMAITVMISLEVLTRFLYFTPTAILASIILSALPGLIDVSGALHIWKLDKLDFLVLIAAFFGVLFASVEIGLLLAVGISFARIMLSSIRPSIEALGRLSKTDIFGDINQYPMANKTAGLLTLRISSPLLCFANANFIRDRILNSVQEIEGEENEQEVLKENGLQVVILDMSCMMGVDTSGVFALEELHQELASNDIRLVIASPRWRVLHKLKRAKLDEKIKTENIYMTVGEAVDIYVRARSTSHELC

SEQ ID NO: 24320 - protein, 174 aa, Helicobacter pylori
THKQVLQKLQEYQQYDSQFLALVPLSAKKSQNLNAFLECISKHLSPSAWLFEKDLMSDEKMRDIYKEIIRESLFDFLSDEIPYESDVMIDKFIEEERIDKVYAHIIVEKESQKKIVIGKYGVNIKRIGTNARLKMQEVGEKKVFLNLQVIAQKSWSKEEKSLQKLGYIHKRGMD

SEQ ID NO: 24321 - protein, 313 aa, Ceratopteris richardii
MAMPCSDIDLLDSDNDNVDDQHISLELRQVHEDTDDGSHDEPRELSLLNHESNLCKIVNSKGKGAEAGNSLLPSTGTSRGKIQIRRIENTTSRQVTFSKRRNGLLKKAHELSVLCDAEIALIIFSSTGKLFEYSSSRGIKKILERYKRCSGILQDVGGTVIRDVEYWKQEAERLKERLTYMEEIQRNMLGESLGSLQIKDLQNLEAKLDSGLYKIRGAKTQLMARQVQELQKKEQILLQQNEALRAKLAELSCLQAPVSGLTTATTSQDVQESSSGRGSRQRETSLSAAETTLQLASHNEQTFLLRAVPHMRL

SEQ ID NO: 24322 - protein, 366 aa, Streptomyces avermitilis MA-4680
MDTSTPLTRPPDLYGRPRSDSFMQKLAALSDHAVTRLARRSTPPRHPQAAETPAIRELVVATKHQEAEDVVSLRLAAPDGGILPPWQPGAHIELHLPSGRKRQYSLCGDPADRHRYRIAVRRIANGQGGSAEVHDALSDGMRVAITGPRNAFPFAAEASILLIAGGIGITPILPMAREAARRGLDWRLVHTGRSRGSMPFAAELAELTAAAPGRVTIRPDDESGAPEAADLLSLSPATGAVYCCGPAPMIDGVRRAFGDSRASALHFERFAPAPITDGRPFELQLGETGRVLPVPYDRSALDVLHDALPDLPFSCRQGFCGTCRVQVAHGHVDHRDRRLTATERAAGAMLPCVSRAPEGERLVLEL

SEQ ID NO: 24323 - protein, 518 aa, Streptomyces avermitilis MA-4680
MSAQKPSHHPPRRIGVVAESVSGETRVAATPATVRLLLGLGYEVVVESGAGEASGFGDQAYADAGAGIGEAWDADVVLKVNAPSDAEICRLRKGATVVALLTPAQKPELLQALADAGVTALALDAVPRISRAQSMDVLSSMANIAGYRAVIEAAHAFGRFFTGQVTAAGKVPPAKVLVAGAGVAGLAAIGAASSLGAIVRATDPRPEVADQVKSLGGEYLPVEAVQESSTDGYAKATSADYDRAAAQLYHEQAEDVDMVITTALIPGRPAPRLLTAEDVAVMKSGSVIVDMAAAMGGNVEGTVPGRTVVTDNGVTIIGYTDLASRLPAQASQLFGTNLLNLLKLLTPGKDGQLTVDFDDVVQRAVTVVRDGDVTWPPPPVAVSAAPAAQPAAAPVAPEPKQSNLTPAWRFGLIGLGMLAMFLLVAFAPTQLAGNFTVFALAVVIGYYVIGKVHHALHTPLMSVTNAISGIVVIGALLQIGHESWIVTTLSFVAILLTSVNIFGGFAVTRRMLSMFSKG

SEQ ID NO: 24324 - protein, 205 aa, Streptomyces avermitilis MA-4680
MTDREPQALDVLDDAGRKVLFTEARTANTFAEVAVADDELAMIWELARWSPSAANGQPLRVLFVRTPEGKERLGRHLDEGNRAKTLSAPAVAILAYDVDFHEQMPTVFPARGEMLRAAFADQTEKRESLAAYNSALQTGVFLLAVRAAGLAAGPMAGFDRAGVDEEFFAGTSWRSHLVVNIGHPGADPWFPRLPRVPVEDAVAYA

SEQ ID NO: 24325 - protein, 305 aa, Streptomyces avermitilis MA-4680
MITPEPVTSLIGMTQNAVEKTPVTMLGLGAMGTALARTWLAAGHRLTVWNRTPARAAALAAEGARVADSAAEAVAANTLVIVCLLDDSSVDEVLAGIDLADTDLVNLTTSTPAQARARAEWANERGARYLDGGIMAVPPMIGVPEAGSYVFCSGSRELFERHQETLGIPAGTTYVGMDAGFAALHDMALLSAMYGMFAGVAHAFALIHKEDIDPTSLAPMLADWLVAMAPAVHQTADHLRSGDYTKGVVSTLAMQVAGTPTFLSTAEQQGVSPELLSPYFELMRRRLAEGSGEEDLTGVINLLVH

SEQ ID NO: 24326 - protein, 467 aa, Streptomyces avermitilis MA-4680
MHVTGTVPQSAPAPQETVAAPTPAEDSTGATSRHTRRFGLPVATALVMGNIIGGGIFLLPASVAPYGTVSLVAFGVLTVGAIALALVFGRLAERDPRTGGPYVYAREAFGDFAGFLAAWAYWITTWVSNAALAVAAVGYLDVLIPVNDHRWTACLAALTLQWLPALANFAGTRYVGAVQIVSTVLKFVPLLLVAVGGLFFFDPDNLGPFHASGGSVPGAVSACAALLLFSYLGVESAAVSAGEVKNARRNVGRATIIGTTGAALVYLLGTLSVFGTVAHDRLVQSTAPFSDAVNAMFGGTWGGWAVALAALVSMTGCLNGWTLLSAQTPYAAARDGLFPAAFARRRRGVPTVGVGVTVVLASLLTVYNYTSGSAKVFEILVLVTTFTATVPYLLATAAQIFHLLSGRRELVDRTRLVRDAVVTAVAAAFSMWLVAGAGYAAVYQGVLFLFAGVIVYAVLAARRQRAA

SEQ ID NO: 24327 - protein, 484 aa, Streptomyces avermitilis MA-4680
MSKVLTSLPAGERVGIAFSGGLDTSVAVAWMRDKGAVPCTYTADIGQYDEPDIASVPGRAKTYGAEIARLVDCRAALVEEGLAALTCGAFHIRSGGRAYFNTTPLGRAVTGTLLVRAMLEDDVQIWGDGSTFKGNDIERFYRYGLLANPHLRIYKPWLDADFVTELGGRKEMSEWLLAHDLPYRDSTEKAYSTDANIWGATHEAKTLEHLDTGVETVEPIMGVRFWDPAVEIATEDVTIGFDQGRPVTINGKELASPVDLVMEANAIGGRHGMGMSDQIENRIIEAKSRGIYEAPGMALLHAAYERLVNAIHNEDTLAQYHNEGRRLGRLMYEGRWLDPQALMVRESLQRWVGAAVTGEVTLRLRRGEDYSILDTTGPAFSYHPDKLSMERTEDSAFGPVDRIGQLTMRNLDIADSRVKLEQYAGLGLIGTGSPAIGAAQAAATGLIGTMPQMPEGSAEAIASRGEVSGDDEMLDRAAMEFGTD

SEQ ID NO: 24328 - protein, 67 aa, Streptomyces avermitilis MA-4680
MATGTVKWFNAEKGFGFIEQEGGGPDVFVHYSAINSAGFRELQEGQKVNFDVTQGPKGPQAENVTPA

SEQ ID NO: 24329 - protein, 67 aa, Streptomyces avermitilis MA-4680
MASGTVKWFNSEKGFGFIEQDGGGPDVFAHYSNIASSGFRELQEGQKVNFDVTQGQKGPQAENITPA

SEQ ID NO: 24330 - protein, 587 aa, Streptomyces avermitilis MA-4680
MARTVARVIVDALSELGVRQVFGVVGDALNPVTDAIRTTEDVEWVGCRHEEAAAFAASAQSQLSGTLGVCMGTVGPGSVHLLNGLYDAAKSRTPVLAIAGQVPLAELGSDYFQEVDNDALFSDVAVFRATITSPDQLPQLLETAVRNALGRKGVAVLTVPGDLGDRELSADRPTRFSLSTPVSRPEESAVRRAAELLDRAERITLLVGRGARAARADVLTLADRLAAPMVLTLKAKEGFEGEANPFQVGQTGLIGNPAAASALQDADTLLLLGTDFPYRDWYPDGRTVIQVDSEAAHIGRRVPVEVGLVGDTGATVRDLLGHLATAPPGTEGARDRSHLEDARKSFGKWRASQARLADPAHDKGLVGRVRSALDNRAHDIRPEALAAVVDRVADENAVFTSDTGMATVWLSRFVEMRGDRRLLGSYNLGSMANAMPQALGAQCLDRGRQVVAFCGDGGLSMLLGDLMTLKTSRLPVKLVVFDNRRLGMVKLEQEQAGLPEFGTVLDNPDFAAVATAMGITGIRVTDPAELEESVRRAFATPGPVLLDVLTNPDEIAVPAKPTVEQGWGFAVAKVKEVVRSHGDSDGH

SEQ ID NO: 24331 - protein, 251 aa, Streptomyces avermitilis MA-4680
MTETFVPPTRFAVPGRIAVSNRAAAVWQTATLTEIRRETPHAATFRFAVPGWQGHLPGQHLMLRLTAEDGYGAQRHYSIASPPEDAGHIELTLDHVEGGEVSGWFHTVAEPGDEVQVRGPLSGFFAWPGDRPALLIGAGSGVVPLMSMVRHHRAQGSTVPLRLLVSARSPQELIYAREYGDETTPVFTRDAAAGVPVGRMSAAHVAPLLDRAPPGGWEAYVCGSNGFAEHASRLLVEAGQPVHRIRIERFG

SEQ ID NO: 24332 - protein, 486 aa, Streptomyces avermitilis MA-4680
MSEQSLKGEAQGAIRTGTQPSRHVDAGDAGYAKSLKSRHVNMIAIGGAIGTGLFLGAGGRLADAGPSLFVAYAVCGIFAFLVVRALGELVLYRPSSGAFVSYAREFLGEKGAYTAGWMYFLNWATTGIADITAVAVYTHYWGMFSDIPQWVIALIALAVVLTVNLISVRMFGELEFWFAIIKVSALVVFMLIGIFLLVTQHPVDGHHPGPSLITDHGGIFPHGLLPMLLIIQGVVFAYASVELVGVAAGETENPEKIMPKAINSIMWRVGLFYVGSVVLLSMLLPWNKYTAGQSPFVTVLSNIGVPAAGGVMNLVVLTAAMSSLNSGLYSTGRILRSMAMSGSAPKFTGVMSRSQVPYGGILLTSGICILGVGLNFVVPADAFEIVLNFAAIGILATWGMIMLCHLMFWRKTRTGELSRPSYRLPGSPWTEIVTIGFLVSVLVLMYADGGAGRTTVLCLPLIAAALVAGWYGVRGRVARKASGADA

SEQ ID NO: 24333 - protein, 463 aa, Streptomyces avermitilis MA-4680
MVNHATGAPALARSLTLRAVTLFGLAYMTPLIVLGTFGVVAADTGGAVPTAYLLALVAMLFTAHSYGKMAAAYPVAGSAYTYVRKAIDGRLGFLVGWVTLLDYFFLPMVIWLIGGAYLQAQFPAVPSWIWIIGFIAVTTVLNIRGIKTAERVNDLLMVFQVLVIGIFVVLSLRHVLHIGGAGALASGAPFANGATTAAGISAGAAIAAYSFLGFDAVTTLTEETVDPKRTMPRAILLTALIGGGIFVLVAYTTQLAHPGSSFDDPSSAAFEIAKSIGGDLFSSVFLAGLVVAQFASGIAAQASTSRLLYAMGRDGALPRKVFARLHERYRTPALNIVLTGAVGLIALRLDVATSTSFINFGAFVAFTFVNVSVLAMYIRRRRAGDTLNPLSYVVAPAIGAVVDLYLLYNLDGRALTLGLIWLGLGVVYLAYLTRMFRVPPPEMSFTPADSDEAQVAGALQNTK

SEQ ID NO: 24334 - protein, 296 aa, Streptomyces avermitilis MA-4680
MTDTLTVSVLGTGIMGAAMARNLARAGHTVRAWNRTRAKAEPLAADGAHIADTPAEAVEGADVVLTMLHDGDAVLGVMRQAAPALRPGTAWIQSTTAGLDALTGLADFAREHRLAFFDAPVLGTRQPAEAGQLVVLAAGPTESRETVTPVFDAVGSRTLWTGEDGAAGSATRLKLVANSWVIAATNATGEVLALAKALGVDPQNFFDAIAGGPLDMGYLHAKADLVLNNGLTPASFAVSTAEKDARLIVQAGQEHGVRLDGAEASAERLHRAAAQGHADEDMAAVYYASFDETRTP

SEQ ID NO: 24335 - protein, 395 aa, Streptomyces avermitilis MA-4680
MRPVHFAAARRTPIGKLRGALSVVRPDDLAATVIRGLIADLPGLDPARIDDVYWGAANQAGEDNRNVARMAALLAGLPESVPGATVNRLCASGLEAVTTAARTIAAGEADIVLAGGSESMSRAPFVLPRPDEALPHRIETVDTRLGWRLVNPAMKELHGLLSMGETAEEVAERYAVPRERQDEFALRSHRRAADARKNGYFDDELLPVTRPDGVVVADDECVREDTSYEKLSRLKPVFRQGGTVTAGNASPMNDGAAGLLLVSEEALNELGLESLGQYVAGASAGVHPDVMGIGPVPATEKALARVGWTIGDIEEAEFNEAFAAQALACVDRLGIDPELVNPTGGAIALGHPLGCSGARILTTLLHRMRRTGAARGLATMCVGVGQGSAILVERH

SEQ ID NO: 24336 - protein, 305 aa, Streptomyces avermitilis MA-4680
MIRSTRVCLALALVLITALLATACGKEGSPPTKGPATDKLPDYQVAQGFQLNDSPTWKRAKKRGYLTVGVKEDQPYLGERDPASGAFSGFDIEIAKMMSASLGFDPGTIRFKTIASANRETALQNGQIDYYVGTYTINDKRKKLVGFAGPYYLAGQSLLVRKDEQGINGPQDLAGKRVCSAAGSTPYQRIQQDYPKVKLVAYDTYSVCVDNLLTYQVDAVTTDDAILIGYAAKVPEELKVVGKPFSEEPYGIGVPRNDNALRFALDDALEAREKDGDWKKAYEATLGLSGVPAPTPPAIDRYPAS

SEQ ID NO: 24337 - protein, 402 aa, Streptomyces avermitilis MA-4680
MEFRQSSKLSEVCYEIRGPVIEHANALEEAGHSVLRLNTGNPALFGFEAPEEILQDMIRMLPRAHGYTDSRGVLSARRAVAQRYQDRGLEVDVDDVFLGNGVSELVSMAVQALIEDGDEVLIPAPDFPLWTAVTTLAGGKAVHYLCDEQADWYPDLADMAAKITDRTRAVVIINPNNPTGAVYPKEIVEGILDLARRHGLMVFADEIYDQILYDDAVHHSAAALAPDLVVLTFCGLSKTYRVAGFRSGWLVVTGPKQHARSYLEGLTMLASMRLCANAPAQYAIQAALGGRQSIQELTAPGGRLYEQRDRAWQKLNEIPGVSCVKPKGALYAFPRIDPTVHKIHDDEKFVLDLLLREKIQVVQGTGFNWPRPDHFRILTLPHADDLDAAISRIGRFLSGYRQ

SEQ ID NO: 24338 - protein, 305 aa, Streptomyces avermitilis MA-4680
MSSNPAPSPRPARPLVAWIGLGIMGSPMSENLIKAGYDVTGFTLEQDKLDRLTAAGGTAAGSIAEAVRDADVVITMVPASPQVEAISYGPDGILENARSGALLIDMSSITPRTSVDLAEAAAAKGIRVLDAPVSGGEAGAVEAVLSIMVGGEQADFDEAKPVFEALGRTIVLCGPHGAGQTVKAANQLIVAVNIQACAEAVVFLEKSGVDLKAALDVLGGGLAGSTVLTRKKDNFLHRDFKPGFRIDLHHKDMGIVTDAARAVGAALPVGAVVAQLVAALRAQGDGGLDHSALLRSVERLSGARL

SEQ ID NO: 24339 - protein, 422 aa, Streptomyces avermitilis MA-4680
MTDAGTALTNWAGNITYSAKELHRPQSLDALRALVADSAKVRVLGSGHSFNEIAEPGADGVLLSLTALPPSVEVDTAARTVRVAGGVRYAELARVVHGHGLALPNMASLPHISVAGSVATGTHGSGVTNGSLASAVREVELVTADGSAVRIGRGDDRFDGAVTALGALGVVTALTLDLEPDYRVAQQVFTELPLAGLDFDAVAASAYSVSLFTGWRTSGFAQVWLKRRTDRPSADFPWAAPATEAMHPVPGMPAVNCTQQFGVPGPWHERLPHFRAEFTPSSGAELQSEYLLPRPYALDALHALDAVRETVAPVLQICEVRTVAADAQWLSPAYGRDTVALHFTWVEDLAAVLPVVRRVEEALDPFDPRPHWGKVFAVPARVLRGRYPRLGDFRALVDSLDPGGKFTNAFVREVLGSGDRPS

SEQ ID NO: 24340 - protein, 564 aa, Streptomyces avermitilis MA-4680
MAATPQNPAAAPRRKVSRHRGEGQWAVGHFTPLNGNEQFKKDDDGLNVRTRIETIYSKRGFDSIDPNDLRGRMRWWGLYTQRKPGIDGGKTAILEPEELDDKYFMLRVRIDGGRLTTEQLRVIGEISQEFARGTADITDRQNIQLHWIRIEDVPEIWQRLEAVGLSTTEACGDTPRVILGSPVAGIAEDEIIDGTPAIDEIHRRILGNKDFSNLPRKFKTAVSGSPLLDVAHEINDVAFVGVNHPEHGPGFDLWVGGGLSTNPKLGQRLGAWVPLDEVADVHVGVLSIFRDYGYRRLRTRARLKFLVADWGVEKFRQILEDEYLKRKLVDGPAPDQPVASWRDHVGVHRQKDGRFYVGFAPRVGRVDGTTLTKIAEVAAAHGSGRLRTTVEQKMIVLDVEEGQVESLVEGLEALDLTVKPSSFRRGTMACTGIEYCKLAIVETKARGASLIDELERRIPEFDEPITINLNGCPNACARIQVADIGLKGQLVLNDQGEQVEGFQVHLGGALGLEAGFGRKVRGLKVTSDELPDYIERVLKRFQAEREDGERFATWAARASEEALS

SEQ ID NO: 24341 - protein, 507 aa, Streptomyces avermitilis MA-4680
MSSTLFRTKKVEQSIQDTEEPEHALKKSLSALDLTVFGVGVIIGTGIFVLTGKVAKENAGPAVSLAFVAAGIACGLAALCYAEFASTVPVAGSAYTFSYASLGELPAWIIGWDLVLEFALGTAVVAVGWSGYVRSLLDNAGWHLPDYLSGREGATGFGFDILAAALVLVLTVILVIGVKLSARVTTVVVAIKVTVVMIVIIAGAFFISGDNYKPFVPKAEHVAAGSGVKSPLVQLMFGWAPTNFGVLGIFTAASVVFFAFIGFDVVATAAEETKNPQRDMPRGILGSLLICTTLYVAVSIVVTGMQKYTRLSIDAPLADAFKATGHPWYAGVISFGAAVGLTTVCMILLLGQTRVFFAMSRDGLLPRFFSRVHPRFRTPHRPTILLGVIIAIVAGFTSLSELAELVNIGTLFAFVVVAIGVIILRHTRPDLHRAFRTPLVPLVPILSVLASLWLMLNLPAETWIRFAVWMVIGFVVYFLYGRSHSRLGREQAAAAGRTPTPSGGDIE

SEQ ID NO: 24342 - protein, 480 aa, Streptomyces avermitilis MA-4680
MPALRIKSPELLVAESGADLEGHGLKRTMGLFQLICFGVGAIVGTGIFVGLSDSVAQAGPAVVVSFVLAAITCVFTAFAFAELGGAIPVSGSSYSFAYAGLGERTAFLVGWCLLLEYGVSVSAVAVGWSQYVNELLDSLTGLELPAALSAGPGDGGVINLPAVVVIALASVLLVRGVRESARATAAMAVLKLAILVVFCAIGFSAFKDGNLTPFSPAGLGGIGAGTTAAFFSYIGFDAITTAGEEARNPRRDIPIAILVCLGLATLLYCAVALAAIGAIGGDQVGGRPAALSYVVNEVTGSTAGGAVIAFGAVVAIASVVLAVMYGQTRILMSMARDGLVPRVFERVSPKTSTPVTGTLLVALVFAVPAAFASLDAVVNLCTIGTLAIMAVVNVTVIALRRREPGLTRSFRVPLYPVIPVLGVGFCLYLMYETGWTTWIQFAAFLAAGCLVYALYGRRNSRLAKSAAATRTDAEAVSQAV

SEQ ID NO: 24343 - protein, 597 aa, Streptomyces avermitilis MA-4680
MNKTYPPPSAAIDPDPSRSWLWRAWPLVRAHRWMFSAALVMSGASMLVVVQVPRLIQDAVDNSIVSDRVPLSHYMWWLVGMSVIMLVVGYLSKQLLFRAAARIEYDLRNIVYEHLTAMSFPFYDRMQSGQLISRANSDIRAVQMYLAFAPYLLVQSGISLVSFAYMLAIDVPLAILAMLPMPLMFVASRRMQRSLFPVSWLIQARLADVATVVDENVNGVRVVKSFAAERSQLASLQKAATSVAWANVKDADLRARWTPLVQNLPRVGMAIVLLYGGYLVIHGELGVGAILAFNAYLLMLQVPFQVIGNLIMLGQRSSAAAKRLYEVLDEKPEIADAPDAREITGPRGDVRFDDVTFGYGDGLDVLKGFSLQLRPGETVALVGRTGTGKSTAARLLPRFYDVRAGSVSVDGHDVRDLTLRSLRDTVGVVLDEPFLFSASVRDNIAYGRPDADFTDIERVARLAGAHEFITELSEGYDTVIGERGYTLSGGQRQRIAIARTLLLNPPVLVLDDATSAIDVQVEQEIHAGLRSLFAGRTTLIVAHRLSTISLADRVVLLDGGRIVADGTHKELLASTPLYAEVLAQADETIEELGSVGR

SEQ ID NO: 24344 - protein, 439 aa, Streptomyces avermitilis MA-4680
MSTTVSGKSGTWRNWAGNVTARPVREVTPASVEELSAAVRKAADEGLRVKAVGTGHSFTAAAATDGVLIRPQLLTGIRGIDREAGTVTVEAGTPLKRLNVALAREGLSLTNMGDIMEQTVSGATSTGTHGTGRDSASIAAQIKGLELVTADGSVLTCSEKENPEVFAAARIGIGALGVVTAITFSVEPVFLLTAREEPMSFDKVTADFDELFAENEHFEFYWFPHTGNCNTKRNNRSAGPERPVGQLSGWIEDEFLSNGVFQVANLLGRAVPATIPTLARVSSRALSARTYTDIPYKVFTSPRRVRFVEMEYAVPREALVETLRELKSMVDRSPLRVSFPVEVRTAPADDITLSTASGRDSAYIAVHMFRGTPYQAYFTAAERIFTAHEGRPHWGKVHTRDAEYFSGVYPRFGEFTALRDRLDPERRFGNDYLRRVLGS

SEQ ID NO: 24345 - protein, 347 aa, Streptomyces avermitilis MA-4680
MERAGPAEPRNVPSPGPRDECVSIRNLVARLRADYPSADAVTVEVTVRTAYDVFGVANLAAGLFQGFPVSTSGSRTAVAERAGARSQLTGVVGAALIVLMLVLAPGLFRNLPQPALAAVVITASLSLADIPGAVRLWRQRRTEFLLCIAAFAGVALLGVLEGIAIAVALSVLNVFRRAWWPYNTVLGRVQGLEGYHDVRSYPQAGQLPGLVIYRFDAPLIFANAKAFRDEIRRLADADPRPSWIVIAAEPMTDVDTTAADVLEELDETLNANHVHLVFAELKDPVRRKIERYGLTRTIDPRHFFPTVEAAVAAFRLRTGAEWTPLTTAEQPARPKPDTAAPPPADER

SEQ ID NO: 24346 - protein, 529 aa, Streptomyces avermitilis MA-4680
MSSKPVVLIAEELSPATVDALGPDFEIRHCNGADRAELLPAIADVDAILIRSATKVDAEAVAAAKKLKVVARAGVGLDNVDVSAATKAGVMVVNAPTSNIVTAAELACGLLLATARNIPQANSALKNGEWKRSKYTGVELAEKTLGVVGLGRIGALVAQRMSAFGMKVVAYDPYVQPARAAQMGVKVLSLDELLEVSDFITVHLPKTPETLGLIGDEALRKVKPTVRVVNAARGGIVDEEALFSALKEGRVAGAGLDVYAKEPCTDSPLFELDEVVCTPHLGASTDEAQEKAGISVARSVRLALAGELVPDAVNVQGGVIAEDVKPGLPLAEKLGRIFTALSGEVAVRLDVEVYGEITQHDVKVLELSALKGVFEDVVDETVSYVNAPLFAQERGVEVRLTTSSESSDHRNVITVRGTLGNGEEVSVSGTLAGPKHHQKIVAVGEYDVDLALADHMVVLKYTDRPGVVGTLGRILGGAGINIAGMQVSRAVAGGEALAVLTVDDTVSQNVLTELAEEIGATSARSVNLV

SEQ ID NO: 24347 - protein, 616 aa, Streptomyces avermitilis MA-4680
MTEQATGAHHPQPRPRSGGQQSAPEHVTGAQSLIRSLEEVGAETVFGIPGGAILPAYDPLMDSKRVRHVLVRHEQGAGHAATGYAQATGKVGVCMATSGPGATNLVTPIADAHMDSVPLVAITGQVASKAIGTDAFQEADIVGITMPITKHNFLVTKAEDIPRTIAEAFHIASTGRPGPVLVDIAKDALQAQTTFQWPPTPDLPGYRPVTKPHAKQIREAAKLITQAKRPVLYVGGGVLKAKATAELKVLAELTGAPVTTTLMALGAFPDSHKLHVGMPGMHGAVTAVTALQKADLIVALGARFDDRVTGKLDSFAPYAKIVHADIDPAEIGKNRAADVPIVGDAREVIADLVQAVQKEHSEGHAGDYTAWWKDLNRWRDTYPLGYEQPDNGSLSPQQVIERIGQLAPEGTIFAAGVGQHQMWAAHYVKYEQPATWLNSGGAGTMGYAVPAAMGAKAGQPDRTVWAIDGDGCFQMTNQELTTCALNNIPIKVAIINNGALGMVRQWQTLFYNQRYSNTVLHSGPGADGKQPSAGTRVPDFVKLSEAMGCYAIRCESPDDLDKVIAEANSVNDRPVVIDFIVHEDAMVWPMVAAGTSNDEVMFARDVRPDFGDNEDD

SEQ ID NO: 24348 - protein, 389 aa, Streptomyces avermitilis MA-4680
MAYLDHAATTPMLPEAVEALTAQLSVTGNASSLHASGRRARRTVEEARETLAEALAARPSEVVFTSGGTEADNLAVKGLYWSRRDADPVRTRVLASPVEHHAVLDAVHWLGEHEGATVEYLPVDTYGRVHPEALREAIARNPDDVALATVMWANNEIGTVMPVRELADVAGEFGVPLHADAVQAFGQVPVDFGASGLAAMTVSGHKVGGPYGIGALLLGREYSPVPVLHGGGQERHVRSGTLDVPAIASFAVAGRLAAEQREWFAREIGALRDDLVDAVRGAVPEAILGGDPSGAGRLPANAHFTFPGCEGDSLLLLLDAQGIECSTGSACTAGVAQPSHVLLATGTDPDLARGTLRFSLGHTSTEADVEAVAKAIGPAVERARTAGLS

SEQ ID NO: 24349 - protein, 696 aa, Streptomyces avermitilis MA-4680
MTRSVYVTGIDRGDGRQVVELGVMELLTRQVDRVGVFRPLVHDGPDRLFELLRARYRLAQDPATVYGMDYHEASALQAEQGTDELMSTLVDRFHLVARDYDVVLVLGTDFADTQFPDELALNARLANEFGAAVIPVVGGRGQTAESVRAETRNAYRAYEGLGCDVLAMVVNRVAREDREELAARLDSLLAVPCYVLPDEPALSAPTVAQITHALGGKVLLGDDSGLARDALDFVFGGAMLPNFLNALTPGCLVVTPGDRADLVVGALAAHSAGTPPIAGVLLTLDERPSDEVLTLAARLAPGTPVVSVAGTSFPTAAELFSLEGKLNAATPRKAETALGLFERYVDTGDLLKRVSAPSSDRLTPMMFEHKLLEQARSDKRRVVLPEGTETRVLHAAEVLLRRGVCDLTLLGPVDQIRKKAADLGIDLGGSQLIDPVTSQLRDSFAEKYAQLRAHKGVSVELAYDVVADVNYFGTLMVQEGLADGMVSGSVHSTAATIRPAFEIIKTKPDTKIVSSVFFMCLADKVLVYGDCAVNPDPNAEQLCDIAVQSAATARQFGVEPRIAMLSYSTGTSGSGADVDKVREATELVRLRRDDLKIEGPIQYDAAVEPSVAATKLPGSDVAGQASVLIFPDLNTGNNTYKAVQRSAGAIAVGPVMQGLRKPVNDLSRGALVQDIVNTVAITAIQAQSPHEKATAQ

SEQ ID NO: 24350 - protein, 405 aa, Streptomyces avermitilis MA-4680
MSPTRVLVLNSGSSSVKYQLLDMRDSSRLAVGLVERIGEGTSRLKHTPLTTGVSRELTSPVADHAAALKTVAEELAKDGLGLDSPELAAIGHRVVHGGRSFTEPTVIDDDVLAEIERLIPVAPLHNPANLTGIRTAMALRPDLPQVAVFDTAFHTTMPESAARYAIDVKTADEHRVRRYGFHGTSHAYVSRATAKLLGRAPKDVNLIVLHLGNGASASAVRGGRCVDTSMGLTPLEGLVMGTRSGDMDPAVIFHLMRVGGMSTDEVDTLLNTKSGLIGLCGDNDMREIRRRVDEGDEQAALAFDIYIHRLKKYIGAYYAVLGRVDAVAFTAGVGENAAPVRAAAIAGLEELGLVVDSERNAVRSDEPRIVSPEDARVAVAVVPTDEELEIAQQTYALVGTAHHLT

SEQ ID NO: 24351 - protein, 400 aa, Streptomyces avermitilis MA-4680
MSGTNSTTSVIVAGARTPMGRLLGSLKSFSGADLGGFAIKSALDRAGIGGDQVQYVIMGQVLQAGAGQIPARQAAVKAGIPMSVPALTINKVCLSGLDAIALADQLIRAGEFDVVVAGGQESMTNAPHLLPKSREGYKYGAVQMIDAMAYDGLTDAFENIAMGESTEKHNTRLGIGRADQDAVAALSHQRAAAAQKNGIFEAEITPVEIPQRRGEPVVFSQDEGIRGETTAESLGKLRPAFTKDGTITAGSSSQISDGAAAVVVMSKAKAQELGLEWIAEIGAHGNVAGPDNSLQSQPSNAIQHALKKEGLAVDDLDLIEINEAFAAVAVQSMKDLGVSTEKVNVNGGAIALGHPIGMSGARLVLHLALELKRRGGGVGAAALCGGGGQGDALIVRVPKV

SEQ ID NO: 24352 - protein, 429 aa, Streptomyces avermitilis MA-4680
MRTRPLKVALLGCGVVGSEVARIMTTHADDLAARIGAPVELAGVAVRRPSKVREGIDPALVTTDATALVKRGDIDVVVEVIGGIEPARALITTAFEHGASVVSANKALLAQDGAALHAVAEEHGRDLYYEAAVAGAIPLIRPLRESLAGDKVNRVLGIVNGTTNFILDKMDSTGAGYQEALDEATALGYAEADPTADVEGFDAAAKAAILAGIAFHTRVRLDDVYREGMAEVTAADFASAKNMGCTIKLLAICERAADGGSVTARVHPAMIPLTHPLASVRGAYNAVFVESDASGQLMFYGPGAGGSPTASAVLGDLVAVCRNKLSGTTGPGESAYAALPVSPMGEVVTRYHISLDVADKPGVLAQVATVFAEHGVSIDTVRQQGKDGEASLVVVTHRASDASLSGTVEALRSLDTVRGVASIMRVEGE

SEQ ID NO: 24353 - protein, 384 aa, Streptomyces avermitilis MA-4680
MSAVVAYLDVAATTRVDPRVAEVVLHWMTEDFGNAGSRTHEYGARAKKAVQQARSYLADTVGAKTEEVIFTSGATESNNIALLGLAPHGERTGKKHIITSAIEHKAVLEPLLHLAETRGFTVDVLEPGASGRITVEQVMEHVRPDTLAVSLMHVNNETGVIQPVAELAERLRSTPTYLHVDAAQGYGKIAGDLTAPIDLISISGHKIGAPKGVGALITRRRGWDKAPLEPIMFGGGQERKLRPGTLPVPLIMGLHEAARIFHESRDNWEREARAMREQILEALGKTRFRVNGDQAHTVPHILNVSFDQLNAEALIVRLKDQVAIATGSACTSASYTPSHVLQAMGLPDDVAANGLRFSWFPPQARDFDPLPIAETIARMQPQEG

SEQ ID NO: 24354 - protein, 538 aa, Streptomyces avermitilis MA-4680
MNGVALGVFVFFFLAVTVLGFLAARWRKAENEHSLDEWGLGGRSFGTWVTWFLLGGDLYTAYTFVAVPAAIYAAGAAGFFAVPYTILVYPLIFTFLPRLWSVSHKHGYVTTSDFVRGRFGSKGLSLAVAVTGILATMPYIALQLVGIQAVLDVMGVGGGEGTNWFVKDLPLLIAFGVLAAYTYSSGLRAPALIAFVKDGLIYLVIAVAIIYIPIKLGGFDDIFAKAGEAFSQTNPATGKPRGALAPAEAGQWTYATLALGSALALFMYPHSITATLSSRSRDVIRRNTTILPLYSLMLGLLALLGFMAIAAGIKVQNGQLAIPQLFETMFPDWFAGVAFAAIGIGALVPAAIMSIAAANLFTRNIYKDFIKPDATPAQETKVSKLVSLLVKVGALVFVLTMDKTVAINFQLLGGIWILQTFPALVGGLFTRWFHRWALLAGWAVGMVYGTLAAYGVASPTQKHFGGSSKEIPGIGEIGYIGLTAFVLNVVVTVVLTFALKALKAPDGIDETSPEDYTADAGDPGVEVELPPATAGATH

SEQ ID NO: 24355 - protein, 759 aa, Streptomyces avermitilis MA-4680
MTLPVALSGSDVIGQAKTGTGKTLGFGLPLLERVTVPADVEAGRARPEQLTDAPQALVVVPTRELCTQVTNDLLTAGKVRNVRVLAIYGGRAYEPQVEALKKGVDVIVGTPGRLLDLAGQKKLDLKHIKALVLDEADEMLDLGFLPDVEKIINMLPARRQTMLFSATMPGAVIGLARRYMSQPTHIRATAPDDEGATVRNTAQFIYRAHNMDKPEMVSRILQADGRGLAMVFCRTKRTAADLADQLQQRGFASGAVHGDLGQGAREQALRAFRNGKVDVLVCTDVAARGIDVEGVTHVINYQSPEDEKTYLHRIGRTGRAGAKGIAITLVDWDDIPRWQLINKALDLGFNDPPETYSTSPHLFEELNIPAGTKGVLPRSERTRAGLAAEKVEDLGETGGRGARGRGGRPSSADRDRDRDRDRDRERTPRRRRRTRNGETVDAAAVTPVTPAEAPADSADSPASTEPRTPRRRRRTRGGATGEPVASVNGTAVTEAVVTEAARTAVDTAEGTEAAESAKPRRRRTRKTAETPVAAPEVTLEAPATDAAEAPAAPRRRTRKAAETVVDTAEAVATTEEPEAKPRRRTRKAAEAAVDTAEAVATTEEPEAKPRRRTRKAAEAAVDTAEGAAAAAPEAVEAPAAPRRRTRKTAEAAVDTAEAVATTEEPEAKPRRRTRKAAETAVDTAEGVAAEPTEAKPRRTRKTAVAADAEPTEAKPRRTRKTAVAAEAAIPAQTAEEAAEPAKPRRRTRKATAAAEPAES

SEQ ID NO: 24356 - protein, 196 aa, Streptomyces avermitilis MA-4680
MSLVLDPAAQDLLFREARTANTFSDEPVTDEQVQAIYDLVKYGPTAFNQSPLRITLVRSAEARERLVQHMAEGNQPKTATAPLVAILSADNEFHEELPALFPHFPQAKDVFFAERPAREGAAALNAALQAAYFIIGVRAAGLAAGPMTGLDFAGVQKEFLDDDHTPLMVVNIGKPGEDAWFPRSPRLEFDQVVTTV

SEQ ID NO: 24357 - protein, 324 aa, Streptomyces avermitilis MA-4680
MTGIKTTGEKKMMFFSGRAHPELAEEVAHKLGVGVVPTKAFDFANGEIYVRYQESARGADCFLIQSHTAPINKWIMEQLIMIDALKRASARSITVIVPFYGYARQDKKHRGREPISARLIADLMKTAGADRILTVDLHTDQIQGFFDGPVDHLFALPILADYVGAKVDRSKLTVVSPDAGRVRVADRWCDRLDAPLAIVHKRRDKDVANQVTVHEVVGDVKGRVCVLVDDMIDTGGTICAAADALFAHGAEDVIVTATHGVLSGPAADRLKNSKVSEFVFTDTLPTPGELELDKITVLSIAPTIANAVREVFEDGSVTSLFDEQ

SEQ ID NO: 24358 - protein, 127 aa, Streptomyces avermitilis MA-4680
MPTGKVKWFNSEKGFGFLSRDDGGDVFVHSSVLPAGVEALKPGQRVEFGVVAGQRGDQALSVVLLDPTPSVAAAQRRKPDELASIVQDLTTLLENITPMLEKGRYPEKTSGKKIAGLLRAVADQLDV

SEQ ID NO: 24359 - protein, 68 aa, Streptomyces avermitilis MA-4680
MAQGTVKWFNAEKGYGFIAVDGGADVFVHYSAIQMDGYRTLEEGQRVDFEISQGQKGPQADMVRLATG

SEQ ID NO: 24360 - protein, 463 aa, Streptomyces avermitilis MA-4680
MASTRGAQILVASNRGPVSYTLDETGTLTSKRGGGGLVSGLSAIGPDAGALWVCSALGEGDREAVRRGVGEPGVRMLDVDAEVHADAYNGIANSVLWFVHHMLYQTPLEPVFDAEFRRQWAAYETYNHAFAAALAEEAAEGAAVLVQDYHLTLVPRMLRELRPDLRIGHFSHTPWAPSEYFRMLPDDIAAQVLGGILGADRAAFLTQRWADAFTDCCHAVLGPGIPSGTRIGVHGLGADADFLRERAHRPDVEERMAALREEVGEGRKTIVRVDRTELSKNIVRGLLAYRELLASRPDWRERVVHVAFAYPSRQDLAVYRDYTAAVQRLADEINAEYGTPGWTPVVLHVKDDFARSLAAYRLADVALVNPIRDGMNLVAKEVPVVSDEGCALVLSREAGAYEELGEDAITVNPYDVVGTAVALHEALSMPAGERAERTKRLAGAATALPPARWFLDQLHALDT

SEQ ID NO: 24361 - protein, 747 aa, Streptomyces avermitilis MA-4680
MPKNSGRFAFRMSVSSTDHIVVPENNEGDTNEGVQAIETVEIVETVESAPELTFGDLGLPEGVVRKLAQNGVTAPFPIQAATIPDALAGKDILGRGRTGSGKTLSFGLPTLARLAGGHTDKKKPRAVILTPTRELAMQVADALQPYGDVLGLKMKVVCGGTSMGNQIYALERGVDVLVATPGRLRDIINRGACSLANVEVAVLDEADQMSDLGFLPEVTELFDQIPAGGQRMLFSATMENEISTLVKRYLTNPVTHEVDSAQGNVTTMSHHILVVKPKDKAPVTAAIASRKGRTIIFVRTQLGADRIAEQLRDAGVKADALHGGMTQGARTRTLADFKDGYVNALVATDVAARGIHVDGIDLVLNVDPAGDHKDYLHRSGRTARAGRSGTVVSLSLPHQRRQIFRLMEDAGVDAARHIINSGTAFEPEVAEITGARSMTEVQAQSAGDAAQQAEREVTQLTKELERAQRRAAELRGEADRLVARAARERGEDPEAAVAAAAEAVAEQAVVAQAPAEAPVSEQPAERPAYEQSRQRRDERGNYERRDDRGGRSFERRDDRGGFNRDRRDNDRGGFRRDDRRDDRGGRSFERRDDRGGFNRDDRGGFNRDRRDDRGGRSFERRDDRGGAGRDDRGGFNRDRRDDRGGAGRDDRGGRSFERRDNDRGGFRRDNDRGGRTFERRDERGGHRGSDRPFNRDRQDNRPSSGARSGSHDRPYARRDDHRGTTGTGTSTGSFGRRDDKPRWKRNG

SEQ ID NO: 24362 - protein, 67 aa, Streptomyces avermitilis MA-4680
MATGTVKWFNAEKGFGFIEQDGGGPDVFAHYSNIAAQGFRELQEGQKVNFDIAQGQKGPTAENIVPA

SEQ ID NO: 24363 - protein, 502 aa, Streptomyces avermitilis MA-4680
MNRTRTNDRFDRTRTKSSGAARGGSRFGAAKSGSPSRSGGHGRRPSAPQGEFALPVTTTPALPAAEKFADLAMPSQLLAALSSEGVTTPFPIQAATLPNSLAGRDVLGRGRTGSGKTLAFGLALLARTAGQRAEPRQPLALVLVPTRELAQQVTDALAPYARSVKLRLTTVVGGMSIGRQSGALRAGAEVVVATPGRLKDLIDRGDCRLDQVGITVLDEADQMADMGFMPQVTALLDQVRPEGQRMLFSATLDRNVDLLVRRYLTDPVVHSVDPSAGAVTTMEHHVLHVHGADKHQATTEIAARDGRVIMFLDTKHAVDRLTEHLLSSGVRAAALHGGKSQPQRNRTLSQFKTGHVTVLVATNVAARGIHVDNLDLVVNVDPPSDHKDYLHRGGRTARAGQSGSVVTLVTPHQRRDMSRLMTVAGIVPQTTQVRSGDAELNRITGAQAPSGVPVTISVPVVERPRRSASSSRGRRSRTAQNRRNGQAARGSSQRQTTVSAAA

SEQ ID NO: 24364 - protein, 565 aa, Streptomyces avermitilis MA-4680
MFEARHTMDAPTTTSADNGTSGGTGGAGWFTPRKQPETPQGGGQEAPEGSRLAAMRPVGRPSAGEGTEQQRIPPTEEAVVAPTQPMSGEPLRSLPDPAAPAPARHLGATLTEETRPAPAPIAASQPESAHEALRPLAGQPQFGQPQSGPVQPQPAAALPERGIPQREPGPPEPGSPRPGPDPQVPTPGPAPGPEASPDAVLIRRTMAEVGPVAGKVTSYFYALLFVRHPDLRSLFPAAMDTQRDRLLKALLTAAEHIDNTEVLVAYLQNLGRGHRKYGTRPEHYPAVGECLIGALSRYASGIWDEETEAAWVRAYTTISQVMIDAAAADELRAPAWWYAEVVSHDLRTPDIAVITVRPDQPYPFLAGQYTSLETPWWPRIWRHYSFASAPRSDGLLSFHVKAVPAGWVSNALVHRARPGDIIRLGPPAGSMTVDHTTESGLLCLGGGTGIAPIKALVEDVAEHGERRPVEVFYGARRDHDLYDIDTMLRLQQSHPWLSVRPVVDQRAHLQLPDVIREYGPWNEYDAYLSGPPGMIRSGVDALRGIGIPPDRIRHDSVEELVAAGD

SEQ ID NO: 24365 - protein, 428 aa, Streptomyces avermitilis MA-4680
MDTIASLFSFITIPVSWVIVQFHSVYGKVFGADTGWAWGLSIVSLVILIRICLIPLFVKQIKATRAMQTLQPEMKKIQERYKNDKQRQSEEMMKLYKESGTNPLSSCLPILAQSPFFFALYHVLNGIATGKTIGVIDDQLLASARKAHIFGAPLAAKFTDSADKVTQLGATLMDVRVVTAIMIVLMSASQFYTQRQLMTKNVDTTVKTPFMQQQKMLMYVFPVMFAIFGINFPVGVLVYWLTTNVWTMGQQMYVIRNNPTPGSKAQAAFLERLQKHVLHHGKTRSRGQRAVVKAIVAKGRDRNEFERKFINALTKAGLAAQSDGTIGKGEATAVAETEDGTQTTGGAPRRQQPKRQSKSQRQSGSAKAAGESEPKSTPLSLSKSDEPDDAKPAAKPAGGANKPSTGTRSKAQSGQRKGPQRPKSPSKK

SEQ ID NO: 24366 - protein, 354 aa, Streptomyces avermitilis MA-4680
MARFHPLPVAAVDRLTDDSVALTFAVPPALREEYRHAAGQHLALRRTADGTEIRRTYSICSPAPAAADEGPRTLRVGVRLVEGGSFSTYALKEIAAGDEVEVMTPAGRFTLEPAPGLYAAVVGGSGITPVLSIVTTLLAREPGARFCLIRSDRTSASTMFLEEVADLKDRFPERFQLVTVLSREEQQAGLPSGRLDQERLTELLPALLPVNRVAGWFLCGPFGLVQGAERALRGLGVARSRVHEEIFHVDGGAATVPAGPAPTHSTVTARLDGRGGTWPVQDGESLLEAVLRNRPDAPYACKGGVCGTCRAFLVSGEIRMDRNFALEPEETEAGYVLACQSHPATEKVELDFDR

SEQ ID NO: 24367 - protein, 67 aa, Streptomyces avermitilis MA-4680
MASGTVKWFNAEKGFGFIEQDGGGADVFAHYSNIATSGFRELQEGQKVNFDVTQGQKGPQAENIVPA

SEQ ID NO: 24368 - protein, 622 aa, Streptomyces avermitilis MA-4680
MARAVGIDLGTTNSVVSVLEGGEPTVITNAEGARTTPSVVAFAKNGEVLVGEVAKRQAVTNVDRTVRSVKRHMGTDWKINLDGKDFNPQQMSAFILQKLKRDAEAYLGEKVTDAVITVPAYFNDSERQATKEAGEIAGLNVLRIVNEPTAAALAYGLDKDDQTILVFDLGGGTFDVSLLEIGDGVVEVKATNGDNHLGGDDWDQRVVDYLVQQFKAGHGVDLAKDKMALQRLREAAEKAKIELSSSTETSINLPYITASAEGPLHLDEKLTRAQFQQLTADLLERCKTPFHNVIKDAGINLSEIDHVVLVGGSTRMPAVAELVKELTGGQDANKGVNPDEVVAIGAALQAGVLKGEVKDVLLLDVTPLSLGIETKGGIMTKLIERNTTIPTKRSEIFTTAEDNQPSVQIQVYQGEREIAAYNKKLGMFELTGLPPAPRGVPQIEVAFDIDANGIMHVTAKDLGTGKEQKMTVTGGSSLPKDEVDRMRQEAEQYADEDHRRREAAETRNQGEQLVYQTEKFLKDNEDKVPGEVKTEVEASIEELKAALKGESAEGDNTAEIRTATEKVAAVSQKLGQAMYADAQAAQAAGGAEGAAGGEHAKAADDDVVDAEIVDEDRKDGAA

SEQ ID NO: 24369 - protein, 398 aa, Streptomyces avermitilis MA-4680
MAAMTSSARPLLNRRLAEFGTTIFAEMSALAMSTGAINLGQGFPDTDGPEEIREAAVRALRDGRGNQYPPGPGVPELRTAIAAHQQRRYGLTYDPDTEVLVTAGATEAIAATLLALLEPGDEVIAFEPYYDSYAACIAMAGGTRVPVTLRPHPEDGRFRLDLDELRDAVTDRTRLLLVNTPHNPTGTVLTREELTAIAELAVERDLLVVTDEVYEHLVFDDAEHLPLATFPGMRERTVSISSAGKTFSFTGWKVGWVTGAPGLVTAVRSAKQFLTYVASGPFQYAVAEALALPDTYFEAFRADMLAKRDLLAAGLTAAGFEVFRPAGTYFITTDIRPLGERDGFAFCRALPERAGVVAIPNAVFYDHREAGAPFVRFAFCKRTDVLEEAAKRLGTLRG

SEQ ID NO: 24370 - protein, 430 aa, Streptomyces avermitilis MA-4680
MGLVVQKYGGSSVADAEGIKRVAKRIVEAKKNGHQVVVVVSAMGDTTDELIDLAEQVSPMPSGREFDMLLTAGERISMALLAMAIKNLGHSAQSFTGSQAGVITDSVHNKARIIDVTPGRIRTALDEGNIAIVAGFQGVSQDKKDITTLGRGGSDTTAVALAAALDAEVCEIYTDVDGVFTADPRVVKKAKKIDWIAFEDMLELAASGSKVLLHRCVEYARRYNIPIHVRSSFSGLQGTWVSNTPLVQKAQQQGEQKVEQAIISGVAHDTSEAKVTVVGVPDKPGEAASIFRAIADAEVNIDMVVQNVSAASTGLTDISFTLPKTEGRKAIDALEKAKSVIGFDSLRYDDQIGKISLVGAGMKTNPGVTAGFFEALSDAGVNIELISTSEIRISVVTRADDVPEAVRAVHTAFGLDSDSDEAVVYGGTGR

SEQ ID NO: 24371 - protein, 224 aa, Streptomyces avermitilis MA-4680
MDDVLRRAPLFAALDDEQAAELRASMSEVTLARGDALFHEGDPGDRLYVVTEGKVKLHRTSPDGRENMLAVLGPGELIGELSLFDPGPRTATATALTEVKLLGLGHGDLQPWLNVRPEVAAALLRAVARRLRKTNDQMSDLVFSDVPGRVARALLDLSRRFGVQSEEGIHVVHDLTQEELAQLVGASRETVNKALADFAGRGWLRLEARAVILLDVERLAKRSR

SEQ ID NO: 24372 - protein, 255 aa, Streptomyces avermitilis MA-4680
MTHASNAQDSRAALSGDGRAALGGDGRAAFGEDGQVALRKDGMPDWLDPVVRAAETVEPLQLSRFLPPKDGAGRQSAVLILFGEGDRGPELLLMERAGSLRSHAGQPSFPGGALDPEDGDPGADGPLRAALREAEEETGLDPSGVQLFGVLPKLYIPVSEFVVTPVLGWWRRPTPVGVVDPNETARVFTVPVADLTDPANRATTVHPSGHRGPAFLVESALVWGFTAGVIDRLLHYAGWERPWDRDKQVPLDWRA

SEQ ID NO: 24373 - protein, 67 aa, Streptomyces avermitilis MA-4680
MATGTVKWFNAEKGFGFIEQDGGGADVFAHYSNIATQGFRELQEGQKVTFDVTQGQKGPQAENIVPA

SEQ ID NO: 24374 - protein, 67 aa, Streptomyces avermitilis MA-4680
MATGTVKWFNAEKGFGFIAQEGGGPDVFVHYSAINASGFRSLEENQSVSFDVTQGPKGPQAENVTPL

SEQ ID NO: 24375 - protein, 422 aa, Streptomyces avermitilis MA-4680
MTQSGAGPSGGFGLRRTLGVGDAVVVGLGSMVGAGIFAALGPAARAAGSGLLLGLAVAAVVAYCNAMSSARLAALYPASGGTYVYGRERLGAFWGYLAGWAFIVGKTASCAAMALTVGAYVWPGQAHAVAVAAVVALTAVNYGGMQKSALLTRAIVAVVLAVLASVVVVCLGSGAADAGRLAVGLSGGAGGVLQAAGLLFFAFAGYARIATLGEEVRDPERTIPRAIPLALGIALVVYAAVAVGVLSVLGADALGHAPAPLADAVRAAGVPGLVPVVRVGAAVAALGSLLALILGVSRTTLAMARDRQLPGALAAVHPRFQVPHRAELAVGAVVAALAATVDVRGAIGFSSFGVLAYYAVANASAWTLSSAPASRAVPAVGLLGCVTLAFALPAVSVGVGAAVLGLGAAAYGMRRWGASRRP

SEQ ID NO: 24376 - protein, 408 aa, Streptomyces avermitilis MA-4680
MSAATPPTERRVSARVGAISESATLAVDAKAKALKAAGRPVIGFGAGEPDFPTPDYIVQAAIEACSNPKYHRYTPAGGLPELKAAIAAKTLRDSGYEVDASQVLVTNGGKQAIYEAFAAILDPGDEVIVPAPYWTTYPESIRLAGGVPVDVVADETTGYRVSVEQLEAARTENTKVLLFVSPSNPTGAVYTREQIEEIGRWAAEKGLWVLTDEIYEHLVYGDAEFHSLPVVVPELADKCIVVNGVAKTYAMTGWRVGWVIGPKDVIKAATNLQSHATSNVSNVAQVAALAAVSGDLTAVAEMREAFDRRRKTIVRMLNEIGGVLCPEPEGAFYAYPSVKALLGKEIRGKRPQDTVELAALILEEAEVAVVPGEAFGTPGYLRLSYALGDEDLVEGVSRIQKLLSEAKD

SEQ ID NO: 24377 - protein, 483 aa, Streptomyces avermitilis MA-4680
MTSSQVDKQYDGNGAVGGDAPEEGYERGLGSRQVQMIAIGGAIGVGLFLGAGANIAKAGPSLILMYALAGVIIFFIMRALGELLLYRPVSGSFAEYSREFLGPFFGYFTGWTYWLMWVVTGMAELTAAAIYVHYWFPAVPQWVTALVFLVVLFVANLISVKLFGEIEFWFSMVKVTALIGMIVIGLGVLTFGFSSAGDTASVANLWQFDGFFPKGIGSSLMTLQGVMFAYLAVELVGVTAGESEDPEKTLPKAINTLPWRIALFYVGALTVILCVVKWTEFAPGVSPFVKAFAMIGIPAGAGIVNFVVLTAALSSCNSGMYSTGRMLRTLADNGEAPRVFSKLSASKTPAFGITISVLFMGIGVILNYVVPEKAFGYVTSVATAAGIWTWLMILVSHVLYRRAVDAGRLPASSFPAPGGAKCSWVAIVFLLFVTGLIAYDADSRVCLYVMAVWAAALAIGWYVLKARNPQVAERHEPKFEKVG

SEQ ID NO: 24378 - protein, 243 aa, Streptomyces avermitilis MA-4680
MSVFAGLVEQLADVLQPLFHASAAAAAIVLFTALVRLLVHPLSRASARGQRARARLQPQVAELRKKHGKNPEKLQKALLELHAEEKVSPLSGCLPGLFQLPAFFLLYHLFSNTTIGGEGNELLTHTLFTAPLGDRWADALGDGGPFGTQGLVYLGLFAIVAAVATFNYRRTKRTMAANPLPVGDGEQQVPGLGAINRFMPLMSFFTLFTVAFVPLAAALYVVTSTTWSAVERAALYPVPERSS

SEQ ID NO: 24379 - protein, 486 aa, Streptomyces avermitilis MA-4680
MAVDYTVIVVYLAGMLAMGWWGMRRAKSKSDFLVAGRRLGPAMYSGTMAAIVLGGASTIGGVGLGYKYGLSGAWMVFAIGLGLLALSVFFSARIARLKVYTVSEMLDLRYGGRAGVISGVVMWAYTLMLAVTSTIAYATIFDVLFDMNRTLAIILGGSIVVAYSTLGGMWSITLTDMVQFVVKTIGVLLLLLPIAIVKAGGFSAMKAKLPTEYFDPLGIGGETIFTYVLIYTFGMLIGQDIWQRVFTARSDTTAKWGGTVAGTYCLVYALAGAVIGTAAKVLYPTLPSADSAFATIVKDELPVGVRGLVLAAALAAVMSTSSGALIACATVANNDIWSRLRGVSSRKGDDHDEVRGNRLFILVMGVAVICTAIALNDVVEALTVAYNLLVGGLLVPILGGLLWKRGTVHGALASVIVGGLAVIGLMATFGILANEPVYYGLLSSLAAYVIVSLATPATDAAVLAAWRERLAGRTPEPLAEPVPAPQ

SEQ ID NO: 24380 - protein, 322 aa, Streptomyces avermitilis MA-4680
MSSNETPRGPVDSSRVPRYAGPATFARLPRLDEVGTADVAVVGVPFDSGVSYRPGARFGGNAIREASRLLRPYNPAQDASPFALAQVADAGDIAANPFNINEAVETVEAAADELLGTGARLMTLGGDHTIALPLLRSVAKKHGPVALLHFDAHLDTWDTYFGAEYTHGTPFRRAVEEGILDTEALSHVGTRGPLYGKQDLTDDEKMGFGIVTSADIYRRGADEVADQLRQRIGDRPLYISIDIDCLDPAHAPGTGTPEAGGMTSRELLEILRGLASCNLVSADVVEVAPAYDHAEITAVAASHTAYELTTIMSRQIAEARNK

SEQ ID NO: 24381 - protein, 561 aa, Streptomyces avermitilis MA-4680
MTHDHDLVLRPTAAETSAALNPPPGRNGGDLVVETLTGLGATTVFGLPGQHALGMFDALRRSDLRYIGLRVENNAGFAADAYGRITGEAAPLLLSTGPGALTSLAALQEAAAASAPVLAISSQIPTAGLGGGRHGYLHELPDQQASFRGVVKSVHTVRTQSQIPSAIAAAWESALTVPHGPVWVEIPQDVLLAETSLPVVTALDATPEDVVPRPELTAVAAHLLSNAARPAIIAGGGVVRADAAGKLRALAEKLDAPVITTFGGKGAFPWEHPLSLQSWLEDRHTTDFLEDADVLLVVGSGLGELSSNYHTFKPRGRVIQIEADLGKLESNHPALGIHADARLALSALLETVGERTDPTAADRVRTVLTRVRERIAAQELTLEQDVLASVRRALPDDSPSFWDMTILAYWAWSAFDPRGSNSMHSAQGAGGLGYGFPAALGAAAADPTRPVLAVSGDGGALYSIAELATAKQYDLNVTWLIVDDGGYGILREYMTDTFGEATATELSRPDYVALAESFGVSGVRTTRETLEVDLAKALATPGPSVVLLPAVLRMFAPTHLG

SEQ ID NO: 24382 - protein, 335 aa, Streptomyces avermitilis MA-4680
MTARRLRASLKGWGGVGAMAVACLLTAVFVLLPLTRASGEGGAGVGGQGVAEGTQVRDETCDHPERKSPPASNDESGAAIKAIKKRGYLSVGVDQNSYRWGYRDPNSTKKGSDLEGFDIDLAHRIADEILGKPNADVRFHAIPTNQRIEAIRSGQVDMVVRTMTITCKRLADVAFSDPYFRTGQQVLAPKKSGITGYDKSLAHKRICTAASSTAFDTLTADRKAGRLVVSARMSEPVPNQLDCLVRLQLGQVDAVVTDGALAASQAAQDPTVELKGAAFTDEYYGVAMKLDAKDLVRRVNQVLVDYRRSGWQASYDTWLSPTLGKNSGPSKPPAS

SEQ ID NO: 24383 - protein, 479 aa, Streptomyces avermitilis MA-4680
MTTFVDRVELHVAAGSGGHGCASVHREKFKPLGGPDGGNGGRGGDVILVVDQSVTTLLDYHHKPHRSATNGKPGEGGNRSGKDGQDLILPVPDGTVIQDKAGNVLADLVGHGTSYVAAQGGRGGLGNAALASARRKAPGFALLGEPGDFQDIVLELKTVADVALVGYPSAGKSSLISVLSAAKPKIADYPFTTLVPNLGVVTAGSTVYTIADVPGLIPGASQGKGLGLEFLRHVERCSVLVHVLDTATLESDRDPVSDLDIIEEELTQYGGGLNNRPRMVVLNKIDVPDGKDLAEMVRPELEARGYRVFEVSAVAHMGLKELSFALAELVGAARAAKPKEEATRIVIRPKAVDDAGFTVVLEEDGLYRVRGEKPERWVRQTDFNNDEAVGYLADRLNRLGVETELMKAGARAGDGVAIGPEDNAVVFDWEPTVMAGAEMLGRRGEDHRLDEPRPAAQRRRDKQAERDDAEKEYDDFEPF

SEQ ID NO: 24384 - protein, 330 aa, Streptomyces avermitilis MA-4680
MGAMSVRTQSSEPSEGGGTSHATKAVGDHRAGFACFVGRPNAGKSTLTNALVGQKVAITANQPQTTRHTVRGIVHRPDAQLILVDTPGLHKPRTLLGERLNDIVRTTWAEVDVIGFCLPANEKLGPGDRFIAKELASIKKTPKIAIVTKTDLVDGKTLAEQLIAIDQLGQELGFEWAEIIPVSAVGDKQVDLLADLIVPLLPEGPALYPEGDLTDEPEQVMVAELIREAALEGVRDELPHSIAVVVEEMIPREDRPADKPLLDIHAFVYIERPSQKGIIIGPKGKRLKEVGIKSRKQIEALLGTPVFLDLHVKVAKDWQRDPRQLRKLGF

SEQ ID NO: 24385 - protein, 642 aa, Streptomyces avermitilis MA-4680
MAGPMGRMMAGGGPDQHSMDFKGSGKRLLSQFKPERATMAGMLVAVVVSVGLSVVGPKILGRATDLVFAGIIGRQMPAGATKEQVLQSMRERGEGGVADMLSGTDFTPGKGIDFTAVGNVLLLALCTFLVAGLLMAVATRLVNRAVNKTVYRMREDLQSKLSRLPLSYFDKRQRGEVLSRATNDIDNIGQTLQQSMGQLINSLLTIVGVLAMMFWVSWLLALVALVTVPLSFFVATRVGKRSQPHFVQQWRTTGKLNAHIEEMYTGHTLVKVFGRQEESAAQFAEENEKLYEAGFKAQFNSGVMQPLMMFVSNLNYVLVAVVGGLRVASGSLSIGDVQAFVQYSRQFSMPLTQVASMANLVQSGVASAERIFELLDADEQQADPVPGVRPKELRGRVALENVSFRYDPEKPLIEDLSLKVEPGHTVAIVGPTGAGKTTLVNLLMRFYEVSGGRITLDGVDVAKMSRDELRAGIGMVLQDTWLFGGTIADNIAYGAARDVTRGEIEEAARAAHADRFIRTLPDGYDTVIDDEGSGVSAGEKQLITIARAFLSDPVILVLDEATSSVDTRTEVLIQKAMAKLAHGRTSFVIAHRLSTIRDADTILVMENGSIVEQGAHAELLAADGAYARLYQAQFAQAVAEVD

SEQ ID NO: 24386 - protein, 400 aa, Streptomyces avermitilis MA-4680
MLSEQSAATVRATLPAVGAAVGEITARFYDRLFAARPELLRDLFNRGNQAAGTQRQALAGSIAAFATYLVEHPDERPDAMLDRIAHKHASLGIAPGQYAVVHEHLFAAIAEVLGDAVTPEVAAAWDEVYWLMANALIAIERRLYAQHENTGDTGGRRPWRVVERVDETADVAAFRLRPADGRPLPDFRPGQYVSVRVELPDGARQTRQYSLVGAPGSPELRIAVKRVHGGTTPDGEVSNHLHARVREGSVLELSAPYGDLALEATDVPLLLASAGIGVTPMIAMLEHLALTGHRAPVTVVHADRSPAEHALRADHEAYAAKLADAAVHFWYEHPEPGHPADRTGLVDLTGVPVSAGTRAYLCGPLPFMRAVRTQLIEKGVAPADIHYEVFGPDLWLARES

SEQ ID NO: 24387 - protein, 342 aa, Streptomyces avermitilis MA-4680
MTFKAEYIWIDGTEPTAKLRSKTKILADDAKGAELPIWGFDGSSTNQAEGHASDRVLKPVATYPDPIRGGDDVLVMCEVLNIDMTPHESNTRATLAEVEEKFGAQEPIFGIEQEYTFFKGSRPLGFPEGGFPAAQGGYYCGVGSDEIFGRDVVEAHLENCLKAGLGISGINAEVMPGQWEFQVGPLAPLEVSDQLWVARWLLYRTAEDFGVSATLDPKPVKGDWNGAGAHTNFSTKAMREGYDAIITACESLGEGSKPLDHVKNYGAGIDDRLTGLHETAPWNEYSYGVSNRGASVRIPWQVEKDGKGYIEDRRPNANVDPYVVTRLLVDTCCSALEKAGQV

SEQ ID NO: 24388 - protein, 460 aa, Streptomyces avermitilis MA-4680
MSYFDAASAAPLHPVARQALQASLDEGWADPARLYREGRRARLLLDAAREAAAEAVGCRPDELVFNSSGTRAVHSGVAGALAGRRRVGRHLIVSAVEHSSVLHSAEVFETEGGTVTRVAVDRTGTVAPASYAEALRPDTALACLQSANHEVGTEQPVAAVADVCRAAGVPLLVDAAQSLGWGRVAGDWSLLTASAHKWGGPSGVGLLVVRKGVRFAPQGPTDERESGRAAGFENLPAIVAAAASLRAVRAEAAEEAVRLRELTDRIRVRVPELVGDVEVVGDPVRRLPGIVTFSCLYVDGETLLHELDRAGFSVSSGSSCTSSTLTPSHVLRAMGVLSEGNVRVSLPLGTPAEDVDRFLEVLPGTVSAVRDKLGAPVSAPATAVRAESLVVDSLGKRCPIPVIELAKVIGDVPVGGTVRVLSDDEAARLDIPAWCEMRGQEYVGEEPADHGSAYVVRRLS

SEQ ID NO: 24389 - protein, 385 aa, Streptomyces avermitilis MA-4680
MAEAYIVEAVRTPVGRRRGGLAGVHPADLGAHALTALVARSGIDPAAVEDVVFGCLDTVGPQAGDIARTCWLAAGLPEEVPGVTVDRQCGSSQQAVHFAAQAVLSGTQDLVVAGGVQNMSQIPIAFASRQAAEPLGLTQGPFAGSEGWRARYGDLPVNQFHGAELIAAKWGITRRDQEEFALRSHRRAVRASDEGRFDRETVAYGKVTADEGPRRDTSLEKMAALAPVIEGGTITAACSSQVSDGAAAMLLASERALREHGLTPRARVHHLSVRGEDPIRMLSAPIPATAHALKKTALAIDDIDLVEINEAFAPVVLAWLKETGADPEKVNVNGGAIALGHPLGATGVRLMTTLLHELERTGGRFGLQTMCEGGGQANVTIIERL

SEQ ID NO: 24390 - protein, 591 aa, Streptomyces avermitilis MA-4680
MTTPATSTEKTAAGLIPLPQAAARLLIVIGALATIASAFMSWTWTAAFPGDLTVYGYPAGLQTLAIVGAVITLLLGLTRWDIPALRWANPANAASPIALAAASAFTVCWYTGIAIAVDLGGLANLDPGAYVAMAASLIALLGALALPTPGGTWRDYLAKAENIPPAGELAPWVQRLVITLATLLALIVFTYGIGVNDDESETFIGFLFLVVFGAWALFAAGLLDRFSTINAQHKGFATTLAFLAAAIFPFTQSDDHNANLGVNILIVGTVALGLNIVVGLTGLLDLGYVAFLGVGAYAAALVSGSEFSRFAGVQFPFWAAALTGMGASLVFGVLIGAPTLRLRGDYLAIVTLGFGEIFRIAVNSLDGSSGPNLTNGPNGISRIPDLEIFGFNLGISHDVGSFTVGRFANYFFLMLIITALVVLVFTRASDSRIGRSWIAIREDETAATAMGINGFRVKLIAFALGASLAGLAGTVSAHVGYSVNPAPYQFAGSVPPNSAFLLAAVVLGGMGTVNGPILGATLLYLIPEKLSFLKEYQLLAFGIALVLLMRFRPEGIIANRRRQLEFHETDQIDVPEQRLTEPTVGVTKAGA

SEQ ID NO: 24391 - protein, 260 aa, Streptomyces avermitilis MA-4680
MATLEIHDLHVTVEADNATKEILKGVDLTVKQGETHAIMGPNGSGKSTLAYSLAGHPKYTITGGTVTLDGEDVLEMSVDERARAGLFLAMQYPVEVPGVSVSNFLRTSATAIRGEAPKLRTWVKEVKEAMERLNMDPAFAERNVNEGFSGGEKKRHEILQLELLKPKIAILDETDSGLDVDALRIVSEGVNRVRETGEVGTLLITHYTRILRYIKPDFVHVFSGGRIVESGGAELADKLENEGYEAYAKHEVDTKGGVSA

SEQ ID NO: 24392 - protein, 371 aa, Streptomyces avermitilis MA-4680
MKVGIPREVKNNEFRVAITPAGVHELVRYGHQVFIEQNAGVGSSITDDEYVSAGAQILPTADEVWAIADLLLKVKEPIAEEYHRLRKDQTLFTYLHLAASQECTDALLESGTTAIAYETVELPSRALPLLAPMSEVAGRLAPQVGAYHLMRANGGRGVLPGGVPGVLPAKAVVIGGGVSGWNAAQIAIGMGFQVTLLDRDINKLKEADKIFGTKIQTVVSNAFELEKACLEADLVIGAVLIPGAKAPKLVTNELVSRMKPGSVLVDIAIDQGGCFEDSRPTTHAEPTFRVHNSVFYCVANMPGAVPNTSTYALTNATLPYILELANRGWAEALRRDPALAKGLNTHDGKVVYREVAESLGLEYVEIESLLG

SEQ ID NO: 24393 - protein, 404 aa, Streptomyces avermitilis MA-4680
MQCEEKPVTERVVLAYSGGLDTSVAIGWIAEETGAEVIAVAVDVGQGGEDLDVIRKRALACGAVEAEVADAKDEFADEYCLPAVKANALYMDRYPLVSALSRPTIVKHLVAAAQKHGATTVAHGCTGKGNDQVRFEAGIVALAPGLKCIAPVRDYAMTRDKAIAFCEEKRLPIATTKKSPYSIDQNVFGRAVETGFLEDIWNAPIEDIYEYTSNPAEPREADEVVISFKEGVPVAIDGRPVTVLQAIQQLNERAGAQGVGRIDMVEDRLVGIKSREVYEAPGAIALITAHQELENVTVERELARYKRQVEQRWGELVYDGQWFSPLKRALEGFIDEANQHVNGDIRMTLHGGRAVVTGRRSETSLYDFNLATYDTGDSFDQAAAKGFIDIYSLSSKIAAKRDLA

SEQ ID NO: 24394 - protein, 492 aa, Streptomyces avermitilis MA-4680
MLDQGAPPQSRSHPSAPGLGARLMRRKPVENLVAEGGQGEGGTLRRSLGLWQLTMISIGATLGTGIFVVLGEAVPKAGPAVTLSFVIAGLTALFSALSYAELAGTIPVSGSSYSYAYATMGELIAWICGWCLVLEYGVSVAAVAVGWGEYLNELLDGTIGVTIPDALSAPPGDGGIFNLPALIVVLLAMAFLLGGAKESARANTIMVIVKIAALLMFCAIGIQGFKSGNYENFMPLGMAGVSAAGATLFFSYIGFDAASTAGEEAKNAQRDLPRAIMLSLVIVTALYVLVAAVAVGAKPWKGFNDSEAALAGIMKDVTGQTFWGTLLAACAVIAIASVVLTVLYGQTRILFAMARDGLVPKVFARVHPKTGAPRANTVIVSLFCGVLAAAIPLGQLADATSIGTLFAFGLVNIAVVVLRRTRPDMRRTFRVPLSPVLPAIGFALCVWMMGSLSAVTWVVFGVWMAVGLVFYFSYGHRRSRLATADTAVSAQK

SEQ ID NO: 24395 - protein, 565 aa, Streptomyces avermitilis MA-4680
MTSTVPNAVQHADAQQPPITMFGPDFPYAYDDFLAHPAGLGQIPATEHGTEVAVIGGGLSGIVAAYELMKMGLKPVVYEADQIGGRLRTVGFDGCDPALSAEMGAMRFPPSSTALQHYIDLVGLETRPFPNPLAETTPSTVVDLKGESHYATTVDDLPQVYRDVMNAWNACLEEGADFSDMNRAMRERDVPRIREIWAKLVEKLDNQTFYGFLCESESFKSFRHREIFGQVGFGTGGWDTDFPNSILEILRVVYTEADDHHRGIVGGSQQLPLRLWEREPEKIVHWPYGTSLKSLHVNGEPRPAVTRLNRTSGNRITVTDANGDIRTYRSAIFTAQSWMLLSKIACDDSLFPIDHWTAIERTHYMESSKLFVPVDRPFWLDKDEQTGRDVMSMTLTDCMTRGTYLLDDGPDKPAVICLSYTWCDDSLKWLPLSASERMEVMLKSLGEIYPNVDIRKHIIGNPVTVSWENEPYFMGAFKANLPGHYRYQRRLFTHFVQDRLPEDKRGIFLAGDDISWTAGWAEGAVQTALNAVWGVMHQLGGTTDATNPGPGDVYDEIAPVELPED

SEQ ID NO: 24396 - protein, 389 aa, Streptomyces avermitilis MA-4680
MRDAVIVEAVRTPIGKGKPNGSLAHVHPVELLAHTLRTLVERSGVDPALIDDVIGGTVDQVGEQAMNTTRYAVLSAGFPETVPATTVDRQCGSSQQAVHFAAQGVMSGAYDLVVACGVESMSRVPMWSNVPAGQDPFGPGVARRYPEGLVPQGISAELIAAKWSITRDQMDAFAVSSHQKAAAAWAGGLFDAEVTPLEGVRRDECVRPASTTEILAGLKPAYYDPNFAERFPGIEWNVTAGNASPVNDGASAVLITSSETAARLGLRPIARLHSFAVTGSDPLLMLTGVVPATEKVLRKAGLTIDDIDLFEVNEAFSSVVLAWRQETGADLSRVNVHGGAIAIGHPLGASGTRLTTTLVHAMRARGARYALQTMCEAGGLANAMVLETV

SEQ ID NO: 24397 - protein, 543 aa, Streptomyces avermitilis MA-4680
MTDSAAAVFSSGVVVSSGVIDEFTLRLTLVLFVSVVVVTLFAALLTAPQRDEISEFYLGNRNMSPLRNGLAMCGDYVSAATLLGSTGLVALTGYDGLLYLGGTTVAWVLVLLVIAEPLRNSGRFTLGDTLALRLPHHQRPVRLALAVTTLVVTTLYLVAQLVGSVALLTQFVGEPSGTTRTLCVVAIGTVVVVYASLGGMPGATFIQVVKAVMLVSGVAITAFMVLHHYRWNVDALLAAAADNSGVGERFLASGLRYGGGTTSKLDFFSLQLAIVLGLAALPHVAMRLLAPRTGRVLRASVVWAMGLVGFVCLAAGVLGLGATAVVGRDAIARIDPKGDAAVLLLAQSLGGGVLTALISSLAFVTLLAVAAGLTLAAASSLAHDLYGQVIRKGRATQAEELGVARLSGVVVGVLGMLLALVSWEISTATLAFLAFAIAASAILPVLVYSLFWRRFTGRGALLSLYGGLICSVLLVVFSPVVSSTPASLYPDVDFAWFPLQNPGIVSIPAGFLLGWLGSVPGRHQDSARYADFEVRALVGTDHE

SEQ ID NO: 24398 - protein, 635 aa, Streptomyces avermitilis MA-4680
MSMETTAWTQLHSVMNAQRETRPFARATLRRIAAFARPHRRRIAQFVVLSVVTALLAVATPVLAGRVVDAIVSGGDESTVVRLAVLIAVIALAEAGLGLVSRLLSATLGEGLILDLRTAVFDHVQRMPVAFFTRTRTGALVSRLNNDVIGAQRAFSNTLSGVVGNVVTLLLTLAVMLTLSWPITLLALALLPVFVLPARRMGSRMAKLQREAADLNAAMGTRMTERFSAPGATLVKLFGRPDEESAEFAARARRVRDIGVRTAMAQWAFITALTLVSALALALVYGLGGWFALRGRLEPGAVVSLALLLTRLYAPLTSLAGARVEVMSALVSFERVFEVLDLKPLIEEKADARAVPDGPASVEFDNVRFGYPAADKVSLASLEEVAALDTRGGAEVLHGVSFRAEPGQTVALVGSSGAGKSTIAQLLPRLYDADEGTVRIGGVDVRDLSAPSLRATLGMVTQDGHLFHDSVRANLLLARPSAAEDELWDVLRRARLDELVRSLPDGLDTVVGERGYRLSGGERQRMTIARLLLARQRVVILDEATAHLDNTSEAAVQEALAEALAGRTAVVIAHRLSTVRAADVILVVEAGRIVERGTHEQLLAADGRYAELHRTQFGKPVPGAAEVAEAGEAVA

SEQ ID NO: 24399 - protein, 633 aa, Streptomyces avermitilis MA-4680
MAKAVGIDLGTTNSVIAVWEGGEPSVVPNSEGNRTTPSVVAFTDTGERLVGQLARRQAILNPKGTIYSAKRFIGRHFDEISDEARAVTYDVVEGDGGAARFKVRDKLYAPEEISAQVLRKLADDASKQLGERVTEAVITVPAYFNDAQRTATKDAGRIAGLEVLRIINEPTAAALAYGMDKKEHETVLVFDLGGGTFDVSILDVGDGVVEVRSTAGDSHLGGDDFDRRLVDYLADDFQQENGIDLRKDPQALQRLFEAAEKAKTELSSVTQTQVSLPFITADASGPKHLTDTVMRSTFEQITSDLVERCLGPVQQAMADAKVGESDIDEVILVGGSTRIPAVQALVRRLTGGKDPNMSVNPDEVVALGAAIQAGVLKGEVKDVLLLDVTPLSLGVETRGGVMTKIIERNTTIPVRRSETFSTAEDNQPAVDVVVLQGERERAADNRVLGRFQLTDIRPAPRGEPQVEVTFDIDANGILNVTARDKDTGKEQGITISESSNLDRSEVERMVQEAERNQGQDQALREAVDARNELDAVAYQVEKRLAELGDAAPAHEKARAEMLVSDARAAVKEEAGVERVRPLTSELQQVLAGLAAHQGAATADGGPAQHAATGGPTSGGGGGDDVIDAEFDKG

SEQ ID NO: 24400 - protein, 139 aa, Streptomyces avermitilis MA-4680
MLRTMFKSKIHRATVTQADLHYVGSVTIDADLLDAADLLPGELVHIVDITNGARLETYVIEGERGSGVVGINGAAAHLVHPGDLVIIISYAQVSDAEARALRPRVVHVDRDNRVVALGADPAEPVPGSDQARSPQAVTA

SEQ ID NO: 24401 - protein, 472 aa, Streptomyces avermitilis MA-4680
MAGIRMGEGVLRRKPIEQIEETEAGTQLERTLGLWQLTAIGVGGIIGAGIFTLAGTVANGTAGPAVLVSFLIAGFASAAAALSYAEFAGLIPKAGSAYTYGYAVLGELAGWFIGWDLLLEYTAIVAVVAIGISGYFGFLVGELGADLPAWMLGAPGTGGGHRVDLFAAILCLLIAYLLNLGIKSAARFETVVVALKVLVVLLVIGVGVFHIDTGNYHPFFPYGVGGAFTGAATVFFAVFGYDAMSTAAEESKDAQRHMPKAIIYSLAISMVLYVAACLVLTGMQNYKDIDKESGFSTAFKSVGLGGLADVIAVGAIIGILTVMFTFMLGVTRVWFSMSRDGLLPKWFAKTHPTRHVPTRVTWIVGFASAAIAGFLPIGQAAELTNIGILLAFVVVCVAVIVLRYRQPDLPRTFRTPWMPYVPALGVIFSIWLITFLQWRTWVRFGVWLVIGLVIYFGYSYKRSELAKGVNSP

SEQ ID NO: 24402 - protein, 317 aa, Streptomyces avermitilis MA-4680
MRDIAVFSGSAHPELVAEVCAHLGVPLSPSRVSRFANDCLEVQLQANCRERDVFLVQPLVAPVQEHLVELLLMCDAARGASAGRITVVMPHYSYARSDKKDAPRISIGGRLVADLLVAAGASRVLAMTLHSPQVHGFFSVPVDHLHALRELAAHFRGHDLSRTTVVSPDLGNAKEAAAFARMIGAQVAAGAKQRFADDRVSISAVIGDVVDRDVIVLDDEIAKGSTVLELLDRLRELGPRSIRVACTHGLFAAGALKRLSEQPDVLEIVCTNTVPVAALERTGKLRVLSIAPALAEAVRRIHNGESVSALFDAPQGE

SEQ ID NO: 24403 - protein, 325 aa, Streptomyces avermitilis MA-4680
MTVTKNVLAVVPPHVGGRGAGAALASVFPGQARVTVVEATDEDPAALREAHVIITGLGPVTAEHIAAAPELQLIQCASHGFDYVDLDAARARGLPVCNIGSSGAEQQNVAEQTFALMLALAKQLVPAHTALVDADWALPRLQRSITELSGKTLGIVGLGHIGEEVARRAVAFDMRIVYAGRERVGAEREARLGGARHVGLDELLRTADYVTLHAPLTEATRHLLDADRLALLKPTAFVINTARGALIDQDALADALEKGALAGAGIDVFDPEPPTSALRLLRAPNVVLSPHVAGVTRETLVRIALAAVQNAADFVAGETPRDLVS

SEQ ID NO: 24404 - protein, 313 aa, Eucalyptus globulus
ANLFAMQLATASVLPAVLTAAIELDLLEIMARAGPGAYLTPGEVASQLPTQNPDAPVMLDRIFRLLASYSVLTCTLCDLPEGKVERLYGLAPLCKFLVKNEDGVSLAPLRLIDQDRVFLESWYYMKDAILEGGIPFHKAHGMTAFDYPGTDPRFNKIFNRAMSDHSTIMMKKILETYNGFEGLKTVVDVGGGTGAILNMIVAKYPSIKGINFDLPHVIEDAPSYPGVEHVGGDMFVNIPNGDAVFMKWICHDWSDEHCAKLLKNCYDALPVNGRVIVAEYILPAYPDQSLSTKGVIHMDCIMLTHFSGGKERT

SEQ ID NO: 24405 - protein, 255 aa, Chlamydophila caviae GPIC
MLHIQNLHVCCEDVKILDDLNLHISPGELHIIMGPNGAGKSTFAKVLSGDDSVSIISGDIRLLDQDLLDKAPEERAQMGLFMGFQQPPEIPGVNNRLFLKDAYNACRRSRQEEEIAEAEFDMLLSSVSETYEFESFNHFLERNINEGFSGGERKKNEIWQMLVLEPEMILLDEPDSGLDVDALRFICKTIEKYREIHPKSAVCIVTHNPKLGNLLQPDHVHILLEGRIACSGGVSLMRELEEKSYHEVLSCSSRG

SEQ ID NO: 24406 - protein, 106 aa, Chlamydophila caviae GPIC
MKSYAIIQTGSKQYQVSEGDVIDVELLDGISEGQEIVFDQVLFTFDGSKVSLGTPIVKDAVVKGQLLSQVRGEKVTAYKYKRRKNYHRKTGHRQNYLRVKISNLVI

SEQ ID NO: 24407 - protein, 335 aa, Chlamydophila caviae GPIC
MFLDQITIELRAGKGGNGVVAWRKEKYLPKGGPYGGNGGVGGSIIIESATHVYSFESYRNIRFLKAEDGQSGATNNRSGRNGKDLVLVVPEGTLLRDVETREIIYDFAKDGERLVICRGGKGGKGNTFFKTSTNRAPTKATPGKPGEVRQVELELKLIADIGLVGFPNAGKSTLFNTLAKTEVKVGAYPFTTLQPVLGLVPCREKLYQKPWIIADIPGIIEGAHQNRGLGLDFLRHIERTRLLLFVVDICGCERSSPEEDLRILMDELLHYKEDLADKGRIIALNKIDDLLPDERQERLENFQRLFPSEQFVMLSGLTGEGVDLLNSLFTNRLSV

SEQ ID NO: 24408 - protein, 329 aa, Chlamydophila caviae GPIC
MGSPATAIDLCQDIITKQKESLERFFATFQCEGTWLLAEKILNHQGSIFFSGVGKSGCIARKIAATLQSFGERAFFLCSGDLLHGDFGVVRPGDIVCLFSKSGETRELLEWIPYFKERGVFIAGITSSAYSSLAILCDHVVILPMIEELDPFNLVPTTSTTCQLLFGDLLSITLLRSRGISLADYGKNHPGGQIGLKVVGKIRDYMFPKTEVPFCSPDNTVADSLDIFSSYGCGCVCVVNELFEILGIFTDGDLRRALSRHGGDILLQKLKDIMTPSPRVISEDADVLLGLQMMETGNPVSILPVVDAKDQKYVVGLLQMHTLAKAGLI

SEQ ID NO: 24409 - protein, 664 aa, Chlamydophila caviae GPIC
MSEQKKSSKIIGIDLGTTNSCVSVMEGGQAKVITSSEGTRTTPSIVAFKGNETLVGIPAKRQAVTNPEKTLASTKRFIGRKHSEVESEIKTVPYKVASGSNGDVVFLVDGKQYTPEEIGAQVLIKMKETAEAYLGEPVTEAVITVPAYFNDSQRASTKDAGRIAGLDVKRIIPEPTAAALAYGIDKAGDKKIAVFDLGGGTFDISILEIGDGVFEVLSTNGDTHLGGDDFDEVIIKWMIEEFKKQEGIDLSKDNMALQRLKDAAEKAKIELSGVSSTEINQPFITMDASGPKHLTLTLTRAHFEKLASTLLERTKAPCQKALADAKLSASDIDDVLLVGGMSRMPAVQEVVKSIFGKEPNKGVNPDEVVAIGAAIQGGVLGGEVKDVLLLDVIPLSLGIETLGGVMTPLVERNTTIPTQKKQIFSTAADNQPAVTIVVLQGERPMAKDNKEIGRFDLTDIPPAPRGHPQIEVTFDIDANGILHVSAKDAASGREQKIRIEASSGLKEDEIQRMINDAEKHKEEDKKRREASDARNEADSMIFRAEKAISDYKDNIPESLVKEIEERIEKVRTVLKEEAPVEKIKDASEELSRHMQKIGEAMQSQSASAAASSAANAQGGPNINTEDLKKHSFSTKPPAGNSASSNSNNENIEEADVEIVDKPND

SEQ ID NO: 24410 - protein, 371 aa, Chlamydophila caviae GPIC
MIYLDNNAMASLEPGLLQFLQQLFCEGIYANPSSVHSAGKKSRKIIHDTTALIQKVLSFSGQVIYTANATESLNLAIASLPKGSHVITCSCEHPAIIEPLKNANLSVSYLDPDLGSCTLSPEKVEAAITPATSALVFGWVNSEIGAKIDIEAMANIAREHNLQFIVDATAIIGREKVAIPQGVTMVAFSGHKFHALSGIGALLISPRVKVSPLFFGGGQQGGLRSGTENLWGIASLYYIFNILNEKQEEIASTLAQYRNDFEACLKKRIPDIKIHCEHQPRVNNVSAIAFPPLEGEVMQIALDVEGVACGYGSACSSGATTAFKSLVAMKIDQDIALATLRFSFSHLLTQEDLNLAIEKIVKVTTHLKNAW

SEQ ID NO: 24411 - protein, 794 aa, Chlamydophila caviae GPIC
MNKRSLLFVSLIGIAFVGCQIFFGYNDFRSCRTLTEKQKTITEQVLAATKSMGLSVSPWTTSLEEETNKNHYAVRVGDKLLLLNQGGSASSVYSSGVRWNFIEETTACDNIHVALYGEANETTTPSNMGKVFLPVTNEDLPVLVVEFRNNQEPVVFLGQYKQEQGKVYNKDSAVYGTSLVFWRSGNEYLPLGIYNSKEERLESLDLPITKAAVFSDSKSANAGANSAQYFVLSNEYMQLIVSQESGSIEGINLPFSSEDNKSIVNEIGFDRELKAQVPSEASFPGLPSVGANNQPVSDTVGGYYPLLRRGILSDAKKRTPSSYHALNIVSGRELTNSVASGYRVSTFNSTMLELESNDGSIKKTYKLPQQQPYAFEVEVGVNRASDDLWITSGIPEVEIMSNAFTPAIKYHVIKKNKGQLDKVKLPKAKDPLALRSGVYPQWILNSNGYFGIILSPLTDIPAGYAASYVPGSSVPTRLSLLSPKNQAYPASKYPGYETLLPLPQKEGTHRFLVYAGPLADPTLRVLDKAYTNSKGESPQYLDCITFRGFFAFITEPFAALLFIIMKFFRMITGSWGISIILLTVFLKLLLYPLNAWSIRSMRRMQKLSPYIQEIQQKYKKEPKRAQMEVMALYKTNKVNPITGCLPLLIQLPFLIVMFDLLKSSFLLRGASFIPGWIDNLTAPDVLFSWTTPVWFLGNEFHLLPILLGIVMFAQQKISASKKKGPATDQQRQQETMGTMMALLFTFMFYNFPSGLNIYWFSSMLLGLIQQWFTNKILDSKHLKNEISVNKKKQR

SEQ ID NO: 24412 - protein, 301 aa, Chlamydophila caviae GPIC
MNKQPILLSGSSNLILAQNVCAELKIKLGRMELNQFPDGETHVKVLEDVRGRDVFIMQSIVGQPNHYLFELLIIADALKRSSAKSITAIIPYLGYCRQDRRNKTGEPITAKLVADVLTTAGITNLITCDLHADQIEGFYKTHVDHLHCQQLFVDTIKSCISQDCIAIAPDIGSIKIAERIARMLDTGLAVIKKERLNSFEVSMQLIGEVQDKNVVIIDDLCSTANTLVEAANLCKQKGAKKIIATVTHGLFVGDAIQKIETSALESLFVTDTIHLQSTSTCIKTLSTAPMIASAIKAALSF

SEQ ID NO: 24413 - protein, 864 aa, Chlamydophila caviae GPIC
MDKISDAVSEALEKAFELAQSAKNPYVSENHFLKCLLENTESLFYLIIKDIHNNPKLLTSAVDEALSLEPSVIEGSAMPKPSPGLQSLLLDAKQEAKDLGDEYLSGDHVLLAFWKSNKEPFASWKKTVKISLDDLKKLIINIRRGNRMDSPSAENNLRGLEKYCKNLTLLAKEGKLDPVIGRDEEIRRTVQVLSRRTKNNPMLIGEPGVGKTAIAEGLALRIVQGDIPESLKGKQLYVLDMGALIAGAKYRGEFEERLKSVLKDVESVDGESILFIDEVHTLVGAGATDGAMDAANLLKPALARGTLHCIGATTLNEYQKYIEKDAALERRFQPIFVTEPSLEDAVFILRGLREKYEIFHGVRITEGALNAAVLLSYRYIPDRFLPDKAIDLIDEAASLIRMQIGSLPLPIDEKERELAALIVKQEAIKREKAPSYQEEAAAMQQSIEQLKEELAALRLRWDEEKKLITGLKEKKNSLENMKFSEEEAERVADYNRVAELRYSLIPALEEEIREDEEALNQRDNRLLQEEVDERLIAQVVANWTGIPIQKMLEGEAEKLLVLEESLEERVVGQPFAISAVSDSIRAARVGLSDPQRPLGVFLFLGPTGVGKTELAKALADLLFNKEEAMVRFDMTEYMEKHSVSKLIGSPPGYVGYEEGGSLSEALRRRPYSVVLFDEIEKADKEVFNILLQIFDEGILTDSKKRKVNCKNALFIMTSNIGSQELADYCAKKGSRVSKETVLSVVAPTLKKYFSPEFINRIDDILPFVPLNTEDIVKIVGIQMRRVAQRLLERRVTLTWDDSVILYLSEQGYDSSFGARPLKRLIQQKVVTLLSKALLKGDIKSDTSIELTMSKDVLLFKKIEG

SEQ ID NO: 24414 - protein, 440 aa, Chlamydophila caviae GPIC
MSPVVYKFGGTSLGTAESIRKVYAIVCKNTPRFIVVSAVAGITDLLDMFCCVSSEYREQIVLDIAKKHDEIIHELQLAFSLSPWIEKLNKWVDKKEISLGDRAEILALGEDISASLFQAFCHSNNFPIEFLEARTVILTDDEYHRATPDISRMRENWHTLNLKGDACYITQGFIGASTSGKTTVLGRGGSDYSGALIAEMSCAEEVRIYTDVNGIYTMDPRIIEDAQLIPELSFEEMQNLATFGAKILYPPMLSPCVRAGIPIFVTSTFDVSKGGTWIYAMDKTVSYEPRVKALSLRQHQRLWSVDCGILGAVSLDKILPILDTYRILPGLITSQDAKVSFTTDDDDISEEIIQDLYSQLSNIGTVHMLYDLALITMIGSGLASTKVVTTVTDKLRNYPAPVFCCCQSCMALSLVVPENLAGSIVEQLHNDYVKQKFSVV

SEQ ID NO: 24415 - protein, 566 aa, Chlamydophila caviae GPIC
MKVALSFKHLVPKLYTCIKDGYTFNTFKKDFLAGLTVGVLAFPFAIAIAIGVGVSPIQGLLASIIGGFIASALGGSRVLISGPTSAFISILYCISAKYGVEGLFTITLMGGVFLVAFGLTGLGTFIKYMPYPVVTGLTTGLAVIIFSSQIKDFFGLQMGDSVPTDFIAKWIAYWDYLWTWDSKAFAVGLFTLLIMIYFRNYKPRYPGVMIAIIVASTLVWLLNIDIPTIGSRYGALPKSIPMPSFPHLSLTKILQLMPEALTIAVLSGIETLLAAVVADGMTGWRHQSNCQLVAQGIANIGTSFFAGMPITGSLSRTAASIKSGATTPIAGLVHSAFICVILLALAPLTVKIPLTCLAAVLILIAWNMSEIHHFIHLFTAPKKDVVVLLTVFILTVMTNITSAVQVGMMLAAFLFMKQMSDLSDVISTAKYFDENKQAKDDNFFSKSEVPAHTEIYEINGPFFFGIADRLKNLLNEIEMPPKIFILCMSRVPTIDASAMHALEEFFLECDRQGTLLLLAGVKKTPLSDLKRYHLDELIGVDHIFSNTKSALLFAQALINLESKASH

SEQ ID NO: 24416 - protein, 188 aa, Synechococcus sp. PCC 7002
  misc_feature (166)..(166): Xaa can be any naturally occurring amino acid
  unsure (1)..(188): unsure at all Xaa locations
TALAEPEITTQLKYKDHLVNLDAFPVGTNPTQIRAQVEKASTQERIRKIREELGSNKLILSAGRVDYVKGTKEMLVCYERLIERRPELQTKVNLVVAAAKAASGMRVYKNAQSEIERLVGRINGRFAKLNWTPILLFTSALSYEELLGFFGAADIAWITPLRDGLXLVAKEYVVAHGCDAGVLILSEF

SEQ ID NO: 24417 - protein, 167 aa, Treponema pallidum
  misc_feature (18)..(18): Xaa can be any naturally occurring amino acid
  unsure (1)..(167): unsure at all Xaa locations
IQERYKGNTQKIHEEMAXLYREAQYNPLSGCLPTLVQMPIIFAMYRLFNNYFEFRGAMFIPYWIPDLSLADSVWTLPFALPVTQWTQMRMLPVLYVVSQIMFSKLTQVPHTEQQKTSMTIMTYVMPLFFFFFFYDAPSGLLVYWTAMNGVTLVQQLVMKRTANKNKT

SEQ ID NO: 24418 - protein, 134 aa, Mesembryanthemum crystallinum
MKRNGGNYASLCYLRNVMAVIMVGMIWMNEAMASNSASAFVNNVIYSNRIAVFSKSYCPYSVRAKRVFSDLQERPFVVELDLRDDGSEIQDVLLELVGRRTVPQVFVNGKHIGGSDDLHSAVMSGLLQKHLSTS

SEQ ID NO: 24419 - protein, 435 aa, Hordeum vulgare
GVGFVANLSNEPSFNVVRDALTALGCMEHRGGCGADNDSGDGAGLMSGIPWDLFDDWASKEGLVPFERTHTGVGMVFLPQNENSMEEAKAAVEKVFTDEGLEVLGWRPVPFNLSVAGRNAKETMPNILQIFVRIAKEDDADDIERELYICRKLIERATKSASWADELYFCSLSSRTIIYKGMLRSEVLGQFYLDLQNELYKSPFAIYHRRFSTNTSPRWPLAQPMRLLGHNGEINTIQGNLNWMRSREATIQSPVWRGRENELRPFGDPKASDSANLDNAAELLLRSGRSPAEAMMMLVPEAYKNHPTLSVKYPEVIDFYEYYKGQMEAWDGPALLLFSDGRTVGACLDRNGLRPARYWKTSDGFVYVASEVGVIPMDESKVVMKGRLGPGMMITVDLETGQVLENTEVKKNVASAKPYGTWLQESTRSIKPVNF

SEQ ID NO: 24420 - protein, 303 aa, Nicotiana tabacum
MRRDDNEVSQPRPSVKRAGDVEVSQPNVKRARVSVRTKCDYPTINDGCQWRKYGQKISRGNPCPRSYYRCSVAPLCPVRKQVQRCVEDMSVLITTYEGTHNHSLPIEATAMASTTSAAASMLLSGSSSSQSANKDLRNLPNNSKTTPLYLSNPPSNSNPFPTITLDFTTFPTTSSFTSFNFPSNFQSNTGFLSNSLNFSSPESDTLSKILGSGYVDYDPTTSLPYSKSLTNIGSSNLGKPSPAPKQFDQPVLGKSKNSISNNLKEESSQQAPTETLTKAIASDPSFQSVLAAAISSMVGATKT

SEQ ID NO: 24421 - protein, 413 aa, Nicotiana tabacum
MPEKPLFGKYELGKLLGCGASAKVYHAREINNGQSVAIKMINKNNKDNIPNENIEREISILRQLRHPYIVKLYEVLATKSKIYFVMEYVKGGELFTKIADHGRFSEDLSRKYFQQLISALNYCHSRGIYHRDLKPENILIDENGDLKISDFGLSATTDQIQKFDGLLHTVCGSPAYVAPEILTIKGYDGAKTDIWSCGIILYVMIAGYLPFYDQNLMLMYKKIYKGEFKCPKWMSPDVIRILSRLLDTNPATRITIDEIIKDPWFRKGLKFIKFAGEEEDKYSLSSNCLNAFDLISFSQGLDISGLFKSNNPANDLERTVVEQSPESVIERVEEMAKKENFRLRKKKEWGIEMKVQNGKLTMSVDIYRLTERFVIVEVKREAGNGDLYTDLWRNKLKAVILGQQIAEIQDSGS

SEQ ID NO: 24422 - protein, 394 aa, Nicotiana tabacum
MSCAVAISNSPAFSPASRVPVTKSLCKSASFSSSSPNSSKTLTKFPSFTSSSSSSSSSSSSSPSSPSLQFQILRLQKPLQASASTNRIRNSTECSTSAPVLKRKRPAKLDIPVVSTTFGNFPATPAAATADFVEVEGDGYYVCCKRGRRGPMEDRYSALVDLQGDSKEGIFGIFDGHGGAKAAEFAAENLNKNIMDELVNRKDDDVVEALKNGYLKTDSEFLNQEFRGGSCCVTALVRNGDLVVSNAGDCRAVVSRGGIAETLTSDHKPSRKDEKDRIKTSGGYVDCCNGVWRIQGSLAVSRGIGDRYLKQWIIAEPETKVVGLHPELEFLVLASDGLWDKVSNQEAVDAARPLCTGISKPQPLSASKSLIDLAVSRGSVDDISVMIIQLQRFC

SEQ ID NO: 24423 - protein, 445 aa, Nicotiana tabacum
MISTWRKRRTEKRVAKRGLVEDITNMELVIPRHFTCPISLDLMKDPVTLSTGITYDRENIEKWIEAGNQTCPITNQTLRNGEPIPNHSIRKMIQQWCVENKDHGIERIPTPRIPVTSSEVVELLAKISKEIHDLELCGELVSKVKKLVNESERNKRCFVTNGTAQVLSAAFVAFSEEINMRNASTGEVILSTLTTILPLDGESKLNLGSISSLRCMVWFLKNGSLSSRRNAVFVLKDILKMEEQDKVEILLGMEGALEGLVKLVKEPICPTTTKASLLAIYHMVNSSHLSSSFANKKAQSRFVDLGLVELLVEMLVDCEKSICEKALGVLDGICSSIEGRKRAYSYALTVPVLVKKLLRVSDLATEFSVSILWKIGKNEKRENGGDVLVEALKLGAFQKLLLLLQVGCSETTKEKASELLKLLNVHRDRAECVDSLDFKSLKRPF

SEQ ID NO: 24424 - protein, 473 aa, Bacillus cereus ATCC 14579
MNQNRMPLYEALIEFKERGPLSFHVPGHKNGLNFPQEAIREFKGILSIDVTELAGLDDLHSPFECIDEAQQLLAEVYNTKRSYFLINGSTVGNLAMILSCCGEHDIVLVQRNCHKSIINGLKLAGANPIFLDPWIDEAYNVPVGVRNEIIKNAIGKYPNAKALILTHPNYYGMGMDLEASIAFAHAHKIPVLVDEAHGAHLCLGEPFPKSALTYGADIVVHSAHKTLPAMTMGSYLHINSHLVDEDKVTTYLSMLQSSSPSYPIMASLDIARFTMARIKEEGHSEIVEFLRRFKEQLRSIPQIAILEYPLQDELKVTVQTRCQLSGYELQSVFEKVGIYTEMADPYNVLFILPLQVNEGYMKVIEMIRVALQHYEVKDKRESIRYTYNGEFSLLPYTYKQLDGYETKIVSIEEAVGMIAAEMVIPYPPGIPLIMYGERITSEHKEQIMYLERAGARFQGNTKYMKVYDIESRF

SEQ ID NO: 24425 - protein, 317 aa, Bacillus cereus ATCC 14579
MSTQYLNSNLKVFSLNSNKELAEQIAKHIGVGLGKCSVDRFSDGEVQINIEESIRGCDVFIIQSTSFPVNEHIMELLIMIDALKRASAKTINIVIPYYGYARQDRKARSREPITSKLVANLLETAGATRVITLDLHAPQIQGFFDIPIDHLMGVPILSDYFETKGLKDIVIVSPDHGGVTRARKMADRLKAPIAIIDKRRPRPNVSEVMNIIGNIEGKTAILIDDIIDTAGTITLAANALVENGASEVYACCTHPVLSGPAIERIQNSNIKELVVTNSIVLPEEKKIDKVHELSVAPLIGEAIIRVYEEESVSVLFN

SEQ ID NO: 24426 - protein, 633 aa, Bacillus cereus ATCC 14579
MNRIFRNTIFYLLIFLVVIGIVSYFNGSTQKTTSVSYDKFITKLESGEVRNVQLQPKNGVFEVKGQFNNSSQGEQFVTYAPNTEELQKKINDKAKGAEVKYQPAEETSAWVTFFTSIIPFVIIFILFFFLLNQAQGGGSRVMNFGKSKAKLYNDEKKKVRFRDVAGADEEKQELVEVVEFLKDPRKFSEVGARIPKGVLLVGPPGTGKTLLARAVAGEAGVPFFSISGSDFVEMFVGVGASRVRDLFENAKKNAPCIIFIDEIDAVGRQRGAGLGGGHDEREQTLNQLLVEMDGFGANEGIIIVAATNRPDILDPALLRPGRFDRQITVDRPDVNGREAVLKVHARNKPLDEHINLRAIATRTPGFSGADLENLLNEAALVAARQDKKKIDMSDIDEATDRVIAGPAKKSRVISEKERNIVAFHEAGHTVIGVVLDEADVVHKVTIVPRGQAGGYAVMLPKEDRYFMTKPELLDKITGLLGGRVAEEIVFGEVSTGAHNDFQRATGIARRMVTEFGMSDKLGPMQFGSSQGGQVFLGRDFHSEQNYSDAIAHEIDMEMQSIMKECYARAKQILTENRDKLDIIAQTLLEVETLDAEQINHLCDYGRLPERPTSSDDVKVNINMKKDDEDKEDK

SEQ ID NO: 24427 - protein, 471 aa, Bacillus cereus ATCC 14579
MVIVAYTVLLATSVHTYKKQIDHPIMSDVGKLLPTKIKRVESATEEHSLIKLVRDAKVSGEKISIAGMQHSQGGQTYYPNGTMLDMKGYNKILEFDPEKKQITVQSGVTWNDIQKKINPYGLAVQVMQSQNIFTVGGSLSVNVHGRDIRHEALIDTVDSFRLLMADGTVRNVSREENAELFPYVIGGYGLFGVILDVTLKLTDDELYEMHTRMIDYKEYVSYFKEKVKRDENVRMHLARISVAPNSFLKEMYVTDYTLAQNQNMREEYSELKEENIIAVPKFLLGLSRYSDWGKNTFWDIQRGYFERTDGKYETRNNVMRSDSAFMEYENPNRTEVLQEYFVPIDAFTEYIDDLRNVLNEEEFNLLNITIRYVEKNENAVLSYAKDDMFALVLLINQGRSESEIKKTEDVIRKMIDVTLKHNGSYYLPYYSYPTKEQLKRAYPRIEEFLKKKKEVDSEERFVNLFYREYTK

SEQ ID NO: 24428 - protein, 471 aa, Bacillus cereus ATCC 14579
MKQIFQKKPIAKLMQESKQKTLARTLGALDLTMLGIGAIVGTGIFVLTGVVAAKHSGPAIILSFAIAALACAFAAFCYAEFASSVPVSGSVYTYTYATMGEVFAFLIGWDLMLEYLLATSAVANGWSAYFQSLLNGFGIHIPTILSSAPGTGKGGIIDLPAVLIILVMTVLLSRGVRESARVNNIMVFIKIAVVLIFIFAGFNYVKPENWTPFMPFGLNGVMAGAATVFFAFIGFDAVSTAAEEVKRPQRDLPIGIIASLLICTVLYIVVSLILTGIVPYGQLNISDPVAFALQFIGQDGLAGVISVGAITGITTVMLVMMYGQVRVSYAMSRDGLLPKRLAKVHPKFKTPFLNTWTTGIIAALISGLIDLNVLAHLVNMGTLSAFALVAVAVIVMRRTHPDLPRAFKAPLVPFLPALTVIFCLYLMLQLSGTAWISFGIWMVIGIAVYFLYSRKHSALNNSKKEEDVANL

SEQ ID NO: 24429 - protein, 223 aa, Bacillus cereus ATCC 14579
MKDLKQFELFAHLTEKKLKGLTEFVYWRTYKKGQFLFLEGDSRERIYFMLDGFVKLERVNQNGNLLYDDYVKRYSIFPYGGMFTDRGYNYTAEAMTDVEVYYIPTVIFEDMVKSSRTQLMYVVQQLSSILKLNENRVQNITIPNAQDRVIQTLNYLMQDLGEQSGEKIVISCPLTTIEISKISGTSRETVSSVLKQLKNDSIVTILDKKITIHDPTYFEEISM

SEQ ID NO: 24430 - protein, 578 aa, Bacillus cereus ATCC 14579
MQGIKRYLQFVKPYRWLIAITIIIGLVKFGIPLIMPWLLKYIIDDVIQGAGSLQDKTSQLITAIGIAFFIFAVLRPPIEYYRQYFAQRIANTILYDLRKHIFGHLQKLSLRYYSNTKTGEIISRVIHDVEQTKDFVITGLMNVWLDTATIAIAIIVMFSMNIKLTFVALLILPIYVIAVKYFFGRLRKLTKERSQALATMQGYLHERIQGMQVTRSFALEEYEGKQFEKRNNEFLTKALTHTSWTARTFSAVNTLTDLGPLLVIGFAAYEVIQGQLTLGTMVAFVGYMDSLYSPLRRLVNSSTTLTQSFASMDRVFELLDEKYDIVNVPNAVQTKKLNGEIVFDNVSFRYNVDEKEILHNLSLTMQPGEKVALVGASGGGKSSLASLIPRFYDVSEGTVYVDGIDVRKYNMRNLRSHIGIVLQDNLLFSDTIGANILYGNPKATEKEVIAAAKAAQIHDFIIDLPDGYNTVVGERGVKLSGGQRQRVAIARVFLKNPSVLILDEATSALDLENERYIQEALQTLAADRTTIIIAHRLATITHVDTIIYIEDGEIKETGSHEELMQKEDFITIYINFNI

SEQ ID NO: 24431 - protein, 1478 aa, Bacillus cereus ATCC 14579
MLNKKNTWTPSLFRDYRNAEHDACGIVSVMEKRKIATKENIDLCIQSLVKMNHRAGFINGEGDGIGIHIDIPKTLWNEKLKSSGYNPTIVDHPHFIVGHFFLNKKENITALKDYIRTQLNNKNFTIIFESDDATNSDALGPLGKQEEPLFWQVALIAENEIINIEQTLFSVTIKIEENEAIHVASLSHDHVVYKVLGAGDTLVAYYNDLQHPLIASTMTLGHNRYSTNTLSNFFRVQPFSILGHNGEINTIAKLRDQAEMIDVPLTAGGSDSQDLNRTLETLLVQYGYSLFEAMEILFPPIINEIKLYETPLQDLYTYIREAWGHFAQGPAGIISRFKDEAVFSVDSLGLRPVWKVETESSYIFSSEPGVVSPTKYVAEPKPLAPGEKVGLKWNEQDELVLYEYDKYQIQVYNRFKKRIDTTNYHLNLSIPETKKIQGLCDSVQVETKEYVAFGWDREHIQLLEQMATKGVEPIRSLGHDSPLAALDTDRRNIADFIKESVAVVTNPAIDRDREIEHFSTRTVLGERPSLLSGAKRPFVVEMLSPIILEGSVAQPIAEELHTITYEQLIELFKTHNSIATISATFSSSETLQCALSRISSEAIAAVNNGASLLVLDDAKAHLNERLWIDPHLVTAKVHQALSENKLRRNCSLVIRSGALRSLHDIVTLYGLGADGINPYLLFATVNDGTKTPITNLYTALNKGLEKVISTIGIHELRGYGRLYSSIGLHEEIANILQITNFFGSNDLAFSLESLVEDAKIRAEDYNNPKIRMRKSFHIFPRIWKAIGDVAKGNSYDDYRDKLSELEENNPIAIRHLVQTKQTKHVVPTEEVSIGIKNHNLPFIISSMSFGSQNEIAFRAYAEAADQLNMISLNGEGGEIKDMIGKYPHTRGQQVASGRFGVNAELLNSSNLIEIKIGQGAKPGEGGHLPGSKVTAKIAEARNATIGSDLISPSNNHDIYSIEDLAQMITEIKTANQLAKVAVKVPVVPNIGTIAVGIAKAGADFINISGFDGGTGAARIHALQHVGLPVEIGVKAAHNALLEASMRHKVEIWADGGIRSVNDALKIMLLGANRIGFGTLSMIAIGCTTCRGCHLDTCHVGIATQIESEAQAKEHGLRRFVPRELESAVAGLLNLFTSFGVELKRLTGQLGYTNLQAIVGRSDLLEQVRGENLLNLRNLLQIIEHPSVTTTEGVSEKQFKTVHSADSKELVGVGVEQRVMGGLESCYRVRSKLYEATQLEPLTLKYTNGSIPGNGLGAYNSENLFIHVNGGAQDGIGKTSFGGGIYITKSKGKDGVYYNGSVGKGFGYGAQKGALYVQGNADARAGIRLSGADMIIGGRITKPLREKEQGNIGAYSNIKGFAFEYMTNGRALVLGDPGPWICAGMTGGVVYLRRDSNLGLTEQALKRRIAKGANVTLQPISKNGLKDVTELLLDYIRVLNEHEQYEEVALLTPLLDDIQNKFFEIIPKKEQADPSISTE

SEQ ID NO: 24432 - protein, 516 aa, Bacillus cereus ATCC 14579
MIKKENSVFYISFLLTTLFIIWGITPASWIQDYDLQSVTSSLNSFILNKFGWFYSLLMTTMIILAAYLAFSKYGSIRLGKDGEKPKYNYPSWLSMLFGAGMGIGLLFYGIAEPISHFTDPLTGKAGTEESAKLAMQYSFFHWGLFPWSLYAMVALTIAYFTFRKQKGSTIGATVTPLFNRSKNSRIGKTVDILAVLATVFGIVPSVGIGAQQIAGGLSYLFPSIHNTLLTQLVLIAIFAVLYLTSAQTGLDRGIKYLSNLNFSLAGILLISFLLLGPTVFIMKYFTSTLGSYIGALPSMGLNLGAFSEKSSSWIENWTIFYWGWWISWSPFVGTFIARISKGRTIKEFIFGVVLVPTLICTFWFAVFGGTAIHMEMFQSLGIADEIAKNGTEIGLFAVISHLPFSTFLTIIGLILVATFFVTSADSATFVVSMQTSNGSLSPKNSLKLIWGLTIAIIAAILLQAGGLNALQIAAIIAALPFSIVVVLMVISLFKELRKEDVNLQTKEVSQKIKKVM

SEQ ID NO: 24433 - protein, 377 aa, Bacillus cereus ATCC 14579
MRIGVPAEIKNNENRVAMTPAGVVHLIRNNHEVFIQKGAGLGSGFTDAQYVEAGAKIVDTAEEAWNMEMVMKVKEPIESEYKHFSEGLILFTYLHLAPEPELTKALIEKKVVSIAYETVQLENRSLPLLAPMSEVAGRMAAQIGAQFLEKNKGGKGILLAGVPGVKRGKVTIIGGGQAGTNAAKIAVGLGADVTIIDLSAERLRQLDDIFGNQVKTLMSNPYNIAEAVKESDLVIGAVLIPGAKAPKLVTEEMIKSMEPGSVVVDIAIDQGGIFETTDRITTHDNPTYEKHGVVHYAVANMPGAVPRTSTLALTNVTVPYAVQIANKGYKEACLGNSALLKGINTLDGYVTFEAVAEAHGVEYKGAKELLEAETVSC

SEQ ID NO: 24434 - protein, 471 aa, Bacillus cereus ATCC 14579
MANLFKKKSVTQLLGESKSKTLTKTLGAFDLTMLGIGAIIGTGVLVLTGLVAARDAGPAVIFSFMIAAIVCGFAALCYAEVASTLPVSGSVYTYSYATIGEFVAHLMGWTLLSVYVVTTAAVAGGWTGYFHNLVSGLGLEIPKALLTIPSQGGMVNLPAVIVTLIITWLLSRGTKESKRVNNIMVLIKIGIVVLFIAVGVFYVKPENWIPFAPYGLSGVFAGGAAVFFAFLGFDALATSAEEVKNPQRDLPIGIIASLVICTIIYVVVCLVMTGMVSYKELDVPEAMAYVLEVVGQDKVAGVIAIGAVIGIMAVIFAYIYATTRVFFAMSRDGLLPESFAKINKKTEAPTFTVWLTGIGSALIAGFIDLKELSNLANIGALLTFAMVGVSVIILRKTHPKLQRGFMVPLVPILPIISIACCLFLMVNLPLKTWMYFGAWLAIGVVVYFVYSKKHSHLKDDGSSQDNLEQAN

SEQ ID NO: 24435 - protein, 276 aa, Bacillus cereus ATCC 14579
MLKMKKLFTLIVFSCLFVLVVAGCGSKKDEAKETNTKQGGAVEQIKKRGKLVVGVKNDTNLFGLKNPSTGQVEGFDVDVAKALAKKILGDEKKLELKEVTSKTRIPLLKNGDIDAIIATMTITEERKKEVDFSDVYFKAGQSLLVKKGSEIKSIDDVKKGVKVLAVKGSTSTNNIRQKSPEATVLEFENYSEAFTALKAGKGDVLTTDNAILYGMAKQDSNYEVVGKIFTDEPYGIAVQKGADDLTKEINSLLKDMKENGEYDKLYEKWIGQKQEK

SEQ ID NO: 24436 - protein, 215 aa, Bacillus cereus ATCC 14579
MKFFIDTANINEIKEANELGVLAGVTTNPSLVAKEGVDFHERIREICNVVEGPVSAEVISLEADKMIEEGKELAKIAPNVVVKVPMTTEGLKAVKAFSDLGIRTNVTLVFSAVQALLAARAGATYVSPFLGRLDDIGHNGMDLIRQIAEIFAIHGIETEIIAASVRHSVHVTDAALNGAHIATIPANVIASLVKHPLTDQGIEKFLADWEKTQEK

SEQ ID NO: 24437 - protein, 438 aa, Bacillus cereus ATCC 14579
MLSIKGKKWRNWTGNVEGTPHYTMYPESIQDVVEVVGLARKKGKKIRVVGSGHSFTPLVQTEEVLVSLDELKGIVNIDAEKMVAEVWAGTKLYDLGKLLEEKGYAQENLGDIDSQSIAGAISTGTHGTGITFGSLSTQVIEITAVLSNGESIVCSETENVEYWRAFQLSLGMLGIIVKIKLKVIPAYSLVYESEKQSLSTVMNKLEEYKKHRHFEFFVFPYSDEVQVKLTNETTNTGSDLKWHKLKVELLENRMFSLLSKGCKWFPSISKGVSRLSAKAVPNTKIIGPSYEVFATSRTVPFYEMEYSIPSKYMRTVVEEISNLIEKKKYKVHFPIECRYVKGDDIWLSPAYGRDSAYIAVHMYKGMKYAAYFGEVEKIFLKYEGRPHWGKMHTLSYEQLQDIYPEFHSFLQARKSLDELGMFFNPYAEKLFIPLFAGQ

SEQ ID NO: 24438 - protein, 463 aa, Bacillus cereus ATCC 14579
MQHTNKSGTLNRGLKERHITLMSLGSAIGVGLFLGSASAIKLAGPSILLGYMIAGLVIFFIMRALGEMAIEQPVAGSFSKYAYDYIGPLAGYITGWNYWFLWVVTCMAEITAAGIYMQYWFPDIPRWTWALLALLLMSAFNFLSVKVFGELEFWFALIKIVTIICMIVVGAGIILFGFGNGGIATGISNLWSHGGWFPNGFSGLLLSMQMVLFAYLGVELIGVTAGEAQNPKKTLAKAIDNVFWRILLFYVGALFVMMAIYPWNELGEKGSPFVLTFQQIGIAKAAGIINFVVLTAALSSCNGGLFSTGRMLYTLAQQKKAPERFGRLNKNGIPSQGIVATAIVLLIGVILNYLVPAKVFTWLTSISTFGAIWTWGIILVAQIKFRKSLPTQNKQKLSYKMPLYPLSSYFSLVFLVLVLGIMAYSEDTRIALIVGPIWLIGLAIVYYMKGFHKIDETPNSKIS

SEQ ID NO: 24439 - protein, 490 aa, Bacillus cereus ATCC 14579
MTALLIIILFLFLALFLGIRAQHGKDMNLEQWSVGGRGFGTIFVFLLMAGEIYTTFTFLGGSGWAYSKGAPTFYILGYGALAYLLSYFLLPPIWKYAKEHNLVSQSDFFAKKYRSKALGLIVSIVGVVSIIPYLVLQLKGLGIIVSEASYGRVSPVVAVWIGAIVITIYVMVSGIHGSAWTAALKDIMILFIVMFLGIYLPYHYYGGFQPMFEAVEAANPGFLSLPEEGMSISWFVSTIILTALGFYMWPHTFASAFSAKNEKVFRKNAAIMPLYSLVLLFVFFAGFAAILQVPGLKGADVDLSLFRLALQTFDPWFIGIIGSAGVLTALVPGSMLVMAASTLLAKNIYRTIVPSASDRQVAKMAKLFVPVVTLVAVLFTFKGGETIGALLLMGYSIVTQLFPALVCSLFPRQIITKQGAIAGMGVGLLVVAYITLSGSTIATMFPSFPQYIKDLNVGIVALLINIIVMFVVSGFTKGVFIKKNTIIVEK

SEQ ID NO: 24440 - protein, 562 aa, Bacillus cereus ATCC 14579
MSTGVKANDVKTKTKGADLVVDCLIKQGVTHVFGIPGAKIDSVFDVLQERGPELIVCRHEQNAAFMAAAIGRLTGKPGVCLVTSGPGTSNLATGLVTANAESDPVVALAGAVPRTDRLKRTHQSMDNAALFEPITKYSVEVEHPDNVPEALSNAFRSATSTNPGATLVSLPQDVMTAETTVESIGALSKPQLGIAPTNDITYVVEKIKSAKLPVILLGMRASTNEVTKAVRKLIADTELPVVETYQAAGAISRELEDHFFGRVGLFRNQPGDILLEEADLVISIGYDPIEYDPKFWNKLGDRTIIHLDDHQADIDHDYQPERELIGDIALTVNSIAEKLPKLVLSTKSEAVLERLRAKLSEQAEVPNRPSEGVTHPLQVIRTLRSLISDDTTVTCDIGSHSIWMARCFRSYEPRRLLFSNGMQTLGVALPWAIAATLVEPGKKVVSVSGDGGFLFSAMELETAVRLNSPIVHLVWRDGTYDMVAFQQMMKYGRTSATEFGDVDLVKYAESFGALGLRVNTPDELEGVLKSALAADGPVIIDIPIDYRDNIKLSEKLLPNQLN

SEQ ID NO: 24441 - protein, 247 aa, Bacillus cereus ATCC 14579
MSELLRVENVTGGYTKRPVLKDVSFSVNKGELVGLIGLNGAGKSTTIKHIIGLMEPKKGTVTINGKTIRDDMTAYRSSFSFIPETPVLYDELTLEEHLKLTAMAYGVDEKQYEERVGQLLQEFRMKNRLKWFPSHFSKGMKQKVMIMSAFLVEPSLYIVDEPFVGLDPLAIQSLLQMMDQMKKSGAGILMSTHILATAERYCDSFIILHQGEVRAKGTLSELQSQFNMPGATLDDIYIALTKEEDYE

SEQ ID NO: 24442 - protein, 67 aa, Bacillus cereus ATCC 14579
MAVTGQVKWFNNEKGFGFIEVPGENDVFVHFSAIETDGFKSLEEGQKVSFEIEEGNRGPQAKNVIKL

SEQ ID NO: 24443 - protein, 335 aa, Bacillus cereus ATCC 14579
MCGITGWVDYKRSLEGERDVVTKMAETLAKRGPDDNKVWIKGNVAFGHKRLIVVDPEGGKQPMTCLKDETNYAICYNGELYNTEDIRKELLRRGYRFKGHSDTEVLLASYIEWKEECVDHLNGIYAFAVWDEQKEQVFIARDRLGVKPLFYKYDSGRLLFGSELKAILSHPDVKAEVTLEGLSEIFGLGPSRTPGHGIYAGIKELRPGHAMTFSKNGLCIWRYWNVESKKHEDSFEETVEKTRFLLQDAITRQLVSDVPLCTFLSGGVDSSAITAIAAKEYERSGKGQLHTYSIDYEDNDKYFKANAFQPNSDAPFINLMTETFQTNPSSLRHFE

SEQ ID NO: 24444 - protein, 492 aa, Bacillus cereus ATCC 14579
MSTQMLTLTSISIYMLGMLVIGYFAYKRTSNLTDYMLGGRTLGPAVTALSAGASDMSGWLLMGLPGAMFSVGLSSSWIAIGLTLGAYANWLYVAPRLRTYSEIANNSITIPEFLEHRFHDKSHMLRLVSGLVIMIFFTFYVASGLVSGAVLFENSFGMNYHVGLFIVAGVVVAYTLFGGFLAVSWTDFVQGIIMVVALILVPIVTIMNSNGLGPAFDTIRSVDPTRLDIFKGASTLGMISLFAWGLGYVGQPHIIVRFMAIASVKELKSARRIGMSWMIFSVVGAMFTGLIGIAYYSQQELTLSNPETIFLELGKILFHPLITGFLLAAILAAIMSTISSQLLVTSSAVTEDLYRTFFKRSASDKELVFVGRMAVLGIALVGCALAFKQNDTILALVGYAGAGFGSSLGPAILLSLYWKRMTKWGALAGMISGAATVIIWTQFKFLRDFLYEMIPGFAISLLAIVIVSLLTQPSKEVEEQFEDFEKQHRHNL

SEQ ID NO: 24445 - protein, 283 aa, Bacillus cereus ATCC 14579
MLEQGLDYVVKLAKSKKKILDTNPMQYFIRAALAGIYIGFIIVLCFKLGNFFHIADSPATYLAASMFFGIALVLIIYGGAELFTGNTMYFTVATLRKETTISDTLRNWVACYAGNLAGALFFALLFYATGIFEAIDHGHLMSKVVEGKMNTPTMQLFFKAILCNWLVCLACFLPSQVKGDTAKIIVMMLLVFTFFLSGYEHSIANLSLFALSLVSPHPETISFSGAIHNLIPVTIGNIIGGSVFVGMVYHYLTKKTPEVQQEETEIAAAQQEEIIPLQAHMKH

SEQ ID NO: 24446 - protein, 323 aa, Bacillus cereus ATCC 14579
MAKILVAGKIPEIGLELLKDHNVEMYNKEELISIDELTERVKDKDALLSLLSTKVPKEVIDAAPHLKIVANYGAGYDNIDYTYAGEKGIAVTNTPKVSTEATAELTFALLLAAARRIPEGDTLCRTTGFNGWAPLFFLGREVHGKTIGIIGLGEIGKAVAKRAKAFGMDVLYTGPNRKLEAESELGATYVTLEELLQTADFITINCAYNPKLHHMIDEEQFKMMKKTAYIVNASRGPIMNEAALAHALKTNEIEGAALDVFEFEPKITEELKELKNVVLAPHVGNATFETRDAMAEMAVRNILAVLNGEEPVTPVNQKVLVTK

SEQ ID NO: 24447 - protein, 540 aa, Bacillus cereus ATCC 14579
MSYEKVWANNEKLNQTEKNKLEKDGLEIFNDIPYYAENGFESIPKEEWDAFKWAGLYLQRPKEAGYFMMRVNIPSGIITNAQAEVLASIAEDYGRNVIDITTRQAIQFHWLEIQQIPDIFKRLARVGLSSAGACGDITRNITGNPLAGIDANELFDTTHIVKEVYDYFQHNEEFSNLPRKFKMSISSNIYNSANAEINCVAFTPATKEIDGEKKVGFHIKVGGGLSARPYLADELDVFVLPEEVKAVAIAIATIFRDFGYREKRHLARLKFLVADWGAEKFKEKLIEYTGPLQSKGESALKGWNAGYFYGVQDQKQKGLKYVGFNVPVGRLHAEEMFEIARIAKQYGNGQIRTCNSQNFIIPNVPPENVKGLLSEPLFEAISASPKSFIGHAVSCTGIEYCNLALVETKERLRKIAEYLDTQIALDVPVRIHMVGCPNSCGQRQIADIGLQGVKMKTKEKGIVEAFEIYVGGTLLDGGAYNQKLKGKIDGEDLPDVLASFISYFKENKLPAETFYDFVGRVGVDTLQIALNNVLEEVIAS

SEQ ID NO: 24448 - protein, 402 aa, Bacillus cereus ATCC 14579
MLSAKTIEIVKSTVPLLQEKGVEITTRFYQILFSEHPELLNIFNHTNQKKGRQQQALANAVYAAATYIDNLEAIIPVVKQIGHKHRSLGIKAEHYPIVGTCLLRAIKEVAGAPDEVLNAWGEAYGVIADAFISIEAEMYEEAAHKEGGWKDFRNFVIVKKVKESDVITSFYLKPEDGGKVSSFIPGQYVTIQINIEGETYTHNRQYSLSDAPGKEYYRISVKKEKGVDTPDGKVSNYLHGHVKEGDVLPVSAPAGDFVLNMDSTLPVVLISGGVGITPMMSMLNTLIEQDSKRNVYFVHAAINSNTHAMKEHVKAVENEYEQVKAYTCYSAPTEKDLEMKNFDKEGFIESEWLKTIIPTTEAEFYFCGPVAFMKHINAALTDLSVKQEHIHYEFFGPATSLQ

SEQ ID NO: 24449 - protein, 127 aa, Bacillus cereus ATCC 14579
MFRTMMRAKLHRATVTEANLNYVGSITIDEDLMDAVNIVENEKVQIVNNNNGARLETYVIKGERGSGVVCLNGAAARLVQPGDKVIIICYGLVTEEEIHTQEPKIAVLDDNNQIIEMLGAEKAGTIL

SEQ ID NO: 24450 - protein, 395 aa, Bacillus cereus ATCC 14579
MKLAKRVAALTPSSTLEITAKAQALKAEGHDVIGLGAGEPDFNTPEHIMDAAHKAMLEGHTKYTPTGGLQSLKQEIVKKFTRDQGIAYDPSEIIVCNGAKHALYTLFQVLLDEGDEVIIPTPYWVSYPEQVKLAGGKPVYVEGLEDNEYKITAKQLREAITEKTKAVIINSPSNPTGMIYSKEELQQLGEVCLEHDILIVSDEIYEKLIYGGVEYTSIAQLSNALKEQTLIINGVSKSHSMTGWRIGYAAGNKQLIKAMTNLASHSTSNPTSIAQYGAIAAYTGSQEPVETMRQAFEERLNIIYDKLIQIPGFTCIKPQGAFYLFPNVKEAVALSGYATVDDWAKALLEEEKVALVPGTGFGAPNNVRLSYATSLEQVEKALERIHTFMKSKVQA

SEQ ID NO: 24451 - protein, 65 aa, Bacillus cereus ATCC 14579
MQGKVKWFNNEKGFGFIEMEGADDVFVHFSAIQGDGYKALEEGQEVSFDITEGNRGPQAANVVKL

SEQ ID NO: 24452 - protein, 609 aa, Bacillus cereus ATCC 14579
MCMCGITGWVDWKEDLSNQHVILKKMANSIEHRGPDAEGFWFSPHAAFAHRRLIVIDPEGGTQPKTFRAGDYTYALTYNGEIYNFRELKEQLQKCGHAFETHSDTEVLLHAYLEWKEDCVQHLNGIFAFALWDDQKQQLFLARDHLGVKPLFYTERNDSIIFGSEIKALLAHPSVPAEIDADGINEIFGLGLFRTPGCGVFKHIQEVRAGHSITFTRHKKVVTKYWNLESKFHTDSIEDTSSHILSILQDTVKRQLIADVPLVCMLSGGLDSSGITALAGKEFAAENKTLHTYSVDFVNSAKDFELTFARTGLDAPWVKRVSEHVGTAHHDIIVNAEELANHLFVPLHAKDLPSAGEMETSLYLLFCEMKKDATVALSGESADEVFGGYPWFHQEELLYVDKFPWLTNWKNTSPLLLNEVSNQCNLENYIDTRFQEAILEVPTLEGESKKSAKQRQMFYLFLTRFLPFLLDRKDRMSMAVGFEVRVPFCDYRLVEYLWNVPFNIKSIDNIEKGILRRALQPALPDDVRNRRKSAYPTSQDPHYLQTIRNLTLDMCSHKNNPIFSLINHSILLSIADQSNKEINNFEARSAMEYMLQVNEWLKTYHIHIA

SEQ ID NO: 24453 - protein, 327 aa, Bacillus cereus ATCC 14579
MYQSLMTVRETQIAIKEVKTFFEDQLAKRLELFRVSAPLFVTKKSGLNDHLNGVERPIEFDMLHSGEELEIVHSLAKWKRFALHEYGYEAGEGLYTNMNAIRRDEELDATHSIYVDQWDWEKIVQKEWRTVEYLQKTVQTIYGIFKDLEDHLFEKYPFLGKYLPEEIVFVTSQELEDKYPELTPKDREHAIAKEHGAVFIIGIGDALRSGEKHDGRAADYDDWKLNGDILFWHPVLQSSFELSSMGIRVDSKSLDEQLTKTGEDFKREYDFHKGILEDVLPLTIGGGIGQSRMCMYFLRKAHIGEVQSSVWPDDLREACKKENIHLF

SEQ ID NO: 24454 - protein, 409 aa, Bacillus cereus ATCC 14579
METIVQKFGGTSVGSVERIQHVANLIIEEYERGHSIVSVVSAMGKSTDELVALANAITENPSKREMDMLLSTGEQVTISLLTMALQAKGYHAISLTGWQAGITTESVHSSARITDIHTDRIQSYLAEGTIVIVAGFQGVSEDFEITTLGRGGSDTTAVALAAALKAKKCDIYTDVTGVYTTDPRVVKDAYKLDEISYDEMLELANLGAGVLHPRAVEFAKNHNVVLEVRSSMEQENGTIVKGECNMEQQSIVKGIAFEDNITRVTIKGLEQGSLSTVFSTLAAAHINVDIIIQSITNEGTVHLSFSIHSNDLRETLEVLEQNQEALHYEAVEYENHLAKVSIVGSGMVSNPGVAANMFTTLKEEDIHIKMVSTSEIKVSVVIDRLHLVTGVEALHQSFMAKIEPFVQMS

SEQ ID NO: 24455 - protein, 573 aa, Bacillus cereus ATCC 14579
MEMKQQYTAYEKLQYEEMTGAGHVIQCLKKLGVTTVFGYPGGAILPVYDALYESGLKHVLTRHEQAAIHAAEGYARASGKVGVVFATSGPGATNLVTGLADAYMDSIPLVVITGQVATPLIGKDGFQEADVVGITVPVTKHNYQVRDVNHVSRIVQEAFYIAKSGRPGPVLIDIPKDVQNAKVTSFFNEEVDIPGYKPEFVPDSMKLREVAKAISKSKRPLLYIGGGVIHSGGSDELFEFARENRIPVVSTLMGLGAYPPDDSLFLGMLGMHGTYAANMAVTECDLLLALGVRFDDRVTGKLELFSPNSKKVHIDIDSSEFHKNVTVEHPIVGDVKKALHMLLHMSIYTQTDEWLQKVKTWKEEYPLSYKQKESELKPQHVINLVSELTNGEAIVTTEVGQHQMWAAHFYKARKPRTFLTSGGLGTMGFGFPAAIGAQLAKKEELVICIAGDASFQMNIQELQTIAENNIPVKVFIINNKFLGMVRQWQEMFYENRLSESKIGSPDFVKVAEAYGVKGLRATNSTEAKQVMLEAFAYEGPVVVDFCVEEGENVFPMVPPNKGNNEMIMKRWEE

SEQ ID NO: 24456 - protein, 247 aa, Bacillus cereus ATCC 14579
MLETKNLSVSFGEHQVIKDVNLTVQKGKLISIIGPNGAGKTTLFNLLSGQISPTTGEVYFKGQDITKLSISDRTRLGIGRSFQLTNIFPELTVLENVRLSVQSFVQDYYSFFPSSAKLKQQVGEARRFLKTVLLHEKENVLAKDLAHGEKRKLELAMLLALKTDVLLLDEPTAGISVEEVPAILQVIENIKKHPESTIVLIEHKMDMILGLSDHLIVLFHGELLAEGLPEEIMKDERVQSAYLGGII

SEQ ID NO: 24457 - protein, 333 aa, Bacillus cereus ATCC 14579
MVNNTSDRIKVYFGVCMLICLSVFPFVNDSRSLLILFTQIFIFAIFAMSFDVLLGYTGIVSFGHCMFFGIGAYGVALLFDRQGVSITNFLIGIVAAIIVSAIVSYIIGLLSLRLKSHFYAMLTLAISQLFFVLAEKWRGLTHGGDGFTFGVPDVFRDRFTFYYVTLICLLIIFVLLRLFTKSSIGKVLKAISQNEQRVEALGYKVLHYKIIASIVAGVVAAISGGLFVITLRFVNTTVFSIEMTLNALLMTMIGGVGTLIGAIAGAGIIESLKYYLSELATEYPIFERWTIILGLLYIIVLLVFPKGLVGTVKGLKNMKRNKKEKSAEVEQNV

SEQ ID NO: 24458 - protein, 538 aa, Bacillus cereus ATCC 14579
MLTKGLVDNFSLSSISAGQIVGLVAFFVMQTIAAGLSIYLLNYIGQKIVAGLRERLWKKVLILPVSYSDQNRTGDTITRMTNDTGVVKTLISEHLSNLLTAGISIVGSLIVLFVLDWKMTALLLTVIPLSVLILVPLGRKMYKISKALQDETASFTSVLTQVLSEIRLVKSSNTEKREYETGNTGIQKLLQFGLKEGKVQALISPVMSFVLMALLVIIVGYGGMRVSSGALTTGELVAFILYLVQIVMPMSQLSMFFTQFQKAIGATERISTILEYEVEDHETGVKVTNAKQPIVLENVHFEYNEEEQVLKNIDFTIESGKVTAIVGPSGSGKTTLFSLLERFYEPTSGAIKLGEESITSYSLESWRRQIGYVSQDSPLIDGTIRDNICYGVEGEVTDEEIEKVAAMAYVDAFIHDLPNGYATEVGERGVKLSGGQRQRIAIARALLRNPQILMLDEATSSLDSKSESVVQKALNNLMKGRTTLVIAHRLSTVVDADKIIFIEKGNLTGSGTHDELLQTHDMYREFATQQLKIKEGAL

SEQ ID NO: 24459 - protein, 482 aa, Bacillus cereus ATCC 14579
MYNTEMDEALKVIDKGLNKTTSPKQIIVVGAGMAGLVSASLLKAAGHDVKIFEANNRVGGRIETVRMEDTGLYLDVGAMRIPYSHTLTMTYIRKFGLQVRPFINRNETDIIYVNGRKTTLKQYEKDPSILRYPVEMNEVGKTSEELLLLAVQPIINFIKKNPEKNWDVVVKDFGRYSTGQFLKYHPYEYNTYFSPVTIEMIGVLLDLEGFLERSFVETLRFLYIMQEESGFCEIVGGNDRLPKSFLPQLEENIIYNQKLMKLHQHDNGVTAFYRNEETFEYSSITGDLVIVTIPFSTMRFVEVDPFDSISHEKWKAIRELHYMPATKIGIQFKSRFWEEQGQLGGRIITDLPIRYAYYPSYGIGQKGPAMMLGSYTWSYDALLWDGLSKGDRIYYALHNLATILGGQVYDEFISGISKSWTLDPYALGGFALFQAGQESELQPAIVKPEGRIFFAGDHTTLYHGWIQGAIESGIRVAVEVNE

SEQ ID NO: 24460 - protein, 230 aa, Bacillus cereus ATCC 14579
MANSMTLSQDLKELLASVEYKMQIKKGSFIFQEGMEATELYIIHSGKVQISKLSADGQELTLRICSAYDIIGELTLFTDNAKYLLNSKCLEDVEVGVIKREALEKELLQKPALVFEFMKWISEHLRRMQTKFRDLVLHGKKGALYSTLIRMTNSYGILKENGILIDLPLTNQELANFCATSRESVNRMLNELKKQGTISIHKGKITIHDLQFLKCEIACEDCSASVCSID

SEQ ID NO: 24461 - protein, 175 aa, Bacillus cereus ATCC 14579
MTNIKAIFIDRDGTIGGDTTIHYPGSFTLFPFTKTSLRKLKAKNIKIFSFTNQPGIADGIATVADFVQELEGFGFDDIYVCPHKHGDGCECRKPSTGMLLKAAKKHGLNLTQCAVVGDRGTDIVAGAKVNATTILVRTGAGYDALHTYRDKWAHIEPNYIADNFEDATNWVLNQL

SEQ ID NO: 24462 - protein, 633 aa, Bacillus cereus ATCC 14579
MCGFVGCLCENPREFSETEKHQFENMNTMIFHRGPDDEGYFRDEHVQFGFRRLSIIDLEAGHQPLTYENDRYVIIFNGEIYNYVELREMLLEKGATFATQSDTEVIIALYAHMKEKCVDYLRGMFAFMIWDREEKKLFGARDHFGIKPLYIAQQGDTTFFASEKKSIMHVMEDKGVNPTSLQHYFTYQYGPEPETLTIDVNKIEPGHYFVKEIGKEMEIHRYWKPYFNASSATKEEHIQAIRDVLYDSVKVHMRSDVPVGSFLSGGIDSSIIASIAREMNPNLLTFSVGFEQRGYSEVDVAKETAEKLGVKNHNVFISAKEFMDEFPKNHWHMDDPLADPAAVPLYFVAKEARKHVTVVLSGEGADELFGGYNIYREPNSLKMFSYIPSPGKSVLKALSGALKEGFKGKSFLERGCTPIEERYYGNAKIFREEEKAELMKYYNESVNYMDITKPLYNEIKDYDDVSKMQYIDMFTWLRGDILLKADKMTMANSLELRVPFLDKEVFDVASKIPTEFKIANGTTKAILREAARGIVPDHVLDRKKLGFPVPIRHWLKDEMHDWAINIINESKTEHLIDKQYVLNLLEAHCADKGDYSRKIWTVLAFMVWHQIYVEHKYDTNKFHEETKRAYSLV

SEQ ID NO: 24463 - protein, 566 aa, Bacillus cereus ATCC 14579
MFGKTASEALVDLLIDWGVEHIYGMPGDSINSIIEALRKKQDKIKFIQVRHEEAGALAAAAYAKLTGKLGVCMAIAGPGAIHLLNGLYDAKLDKAPVLAISGQVETDLLGTDFFQEVNLERMFDDVAVYNQRIMSAEQLPAVVNQAIRMAYTKKGVSVLTIPDDVPKFEVKSGARVTNTSFTLPDLFPQEEDLDAAKLAITEAKKPVILAGKGTKHARESLLALAEHIGAPIVLTLPAKGIIPDEHPLCIGGLGLIGTKPSYEAMKHADTLIMVGTSYPFTGFLPEKAKTIHIDTDPAQIGKRYATDIGLAGDADKTLRWLIENVEEHTDHSFLEHHQEMMKKWEEKLHDQEEDSSIPIKPQRVMHALQQVAHDDAILSVDVGNVTVWTARHFRMTNQQFVISSWLATLGCGLPGALAGKIAFPDKQVFAVCGDGGFGMTMNDFVTAVKYKLPIVVVVLNNNKIAMIKFEQEVMGNIEFETDLTNPDFAKYAEACGGIGYRVENLDELLPAFQNAVKQNKPCIIDVVVDANEAPMPAKITFGQAAGYTKHMIKELFEEGKIDLPPL

SEQ ID NO: 24464 - protein, 67 aa, Bacillus cereus ATCC 14579
MTLTGKVKWFNSEKGFGFIEVADGNDVFVHFSAITGDGFKSLDEGQEVSFEVEEGNRGPQAKNVVKL

SEQ ID NO: 24465 - protein, 598 aa, Bacillus cereus ATCC 14579
MRNFQGQFANKGGRNKPKMGKAKNAQGTVMRIWNYMGYQKAALMFVIFLVVVTTLLGLLGPYFMGVIIDQYIVPKDLSGTARMCMLLIAIYGVTVLLTWLQTFVMINVALKTIQKIRQDIFEKIQTLSLRFFDVRSQGDLMSRVTNDIDNLNQALTQSVVQIISSALTFIGVTIAMFALNWILAIVTLITVPIMFYVTKKLVAYSGKNFAKRQKDLGELNGFIEEAITGADVTTLYGKEKETVQNFNKINEQLRVSATKADTFSAFIFPSMNFINNLGMGLVIGTGSVMVLNGMTTVGVIAAFINYSRQFSRPLSQFATLMNTIQAAVAGGERVFEIMDEVPEIQNKKDAFVVQNLQGHVALENVSFGYAENKTILKEVSLKAQPGETIALVGPTGSGKTTIINLLTRFYDIQQGQIHIDGKDIKDYDINSLRSKIGVVLQDTYLFAGSIMDNIRYGRLDATDEEVITAAKAASAHSFIKHLPNQYETEIASEGSNLSQGQKQLLAIARAILADADILILDEATSNIDTRTELQIQAGLNNLMRGRTSFVIAHRLKTIEKADQILVIKDGNILERGNHESLMEDRGFYFDLYTSQFKI

SEQ ID NO: 24466 - protein, 558 aa, Bacillus cereus ATCC 14579
MKKQYTVSTYLLDRLHELGIEHIFGVPGDYNLAFLDDVVAHENLKWIGNCNELNAAYAADGYARIKGIAALITTFGVGELSAINGIAGSYAENVPVIKITGTPPTKVMENGAIVHHTLGDGKFDHFSNMYREITVAQTNVTPEHAAEEIDRVLRACWNEKRPVHINLPIDVYNKPINKPTEPIINKPILSNKEALNKMLLHAISKINSAKKPVILADFEVDRFHAKENLHQFVEKTGFPIATLSMGKGIFPEKHPQFIGIYTGDVSSPYLRKRIDESDCIISIGVKLTDTITGGFTQGFTKEQVIEIHPYTVKIIDKKYGPVVMQDVLQHLSDSIEHRNKDTLDVKPFILESSPFTEEFIPKAQMVTQKRFWQQMYHFLQENDVLIVEQGTPFFGSSAIPLPNNTAYVGQPLWGSIGYTLPALLGTQLANLSRRNILIIGDGSFQVTAQELSTILRQNLKPIIFLINNNGYTVERAIHGQNQLYNDIQMWDYNKLSMVFGAEEKSLTFKVENEAELAAVLTNITFNKNQLIFIEVIMSQSDQPELLAKLGKRSGQQNS

SEQ ID NO: 24467 - protein, 471 aa, Bacillus cereus ATCC 14579
MSNLLKKKSVTQLLEHNQSKTLTKTLGAFDLIMLGVGSIVGTGVLVLTGLVAARNAGPAVVFSFILAAIICGFIALCYAEIASTLPASGSVYTYSYATIGEFVAHLVGWSLLLIYIVATAAVAAGWTGYFHNLIKGFGLEIPKALVTIPSHGGIVNLPAVIITLILAWMLSRGTRESKRINNIMVLIKIGMILLFITVGIFYVKPMNWIPIAPYGLSGVFTGGAAILFAFTGFDILATSAEEVKDPKRNLPIGIIASLIICTIIYVMVCLVMTGMVSYKELNVPEAMAYVMEVVGQGKVAGAIAAGAVIGLMAVIFSNMYAATRVFFAMSRDGLLPKSFAKVNKKTGAPTFITGLAGIGSSIIAGFIDLKELVNLVNIGSLVTFALVCLSVIILRKSHPNLKRGFMVPFVPVLPCVAIVCCVFLMLNLPLRTWVYFSIWITIGVVVYFLYSIKYSNLNEETISKLHDKIAR

SEQ ID NO: 24468 - protein, 431 aa, Bacillus cereus ATCC 14579
MTQQSLKRSITWVQGTALTIGAVLGCGILILPSITANSAGPASILSWVIMSILAFPIVATLARLAKMIPSAGGITAYVQMAFNANTSAILGWIMLGSIPIGVPIIALTGAHYIGYVFPISNLSVIGIAALILITSLLLHIKGIELSSKVSVFVICIISLLIVVAVIVSIPYVKLSSFTPFVPNGWSSVGASSVIIFFSFVGWEMITPLAEEFKRPAKDISISLFLGAICISIMYIAISFVTIGTHSYGDKDQIASLSILISKGLGPIGTYITTILAIFISFSAVHANIAGFSRMIYAQAREGHFPSFFAKLHSQFQTPTRVLLVLGGIFSCILIFYGMARPNLEMLLKGPSVIFITSYIFTMLAALKLLKVRDIGWWMAFLSLIICIIVYSFSGWAIFYPVILSVIGWIYIVMNKKYSTITNHSINTSNEN

SEQ ID NO: 24469 - protein, 222 aa, Bacillus cereus ATCC 14579
MRFFIDTANLEDIKKAYKLGVLAGVTTNPSLVAKEGVKFEDRIAEICQAVPKVESVSAEVTPDAVTAEEMIAQAEELIKINGGDKNVTIKLPMTLAGLEACRYLTEKGVKTNVTLIFTVNQALLAARAGATYVSPFLGRLDDISEDGVLLVAKIAELFDVHQLDTQIIAASVRHPDHVTRVAMAGAHIATIPYKVIEQLAMHPLTDQGIEKFAADWAKAPKL

SEQ ID NO: 24470 - protein, 66 aa, Bacillus cereus ATCC 14579
MQNGKVKWFNSEKGFGFIEVEGGEDVFVHFSAIQGEGFKTLEEGQEVTFEVEQGNRGPQATNVNKK

SEQ ID NO: 24471 - protein, 477 aa, Bacillus cereus ATCC 14579
MNWYVIIPMIISFIVEFLIGVYASKRVQATAHNKFLQEYFLGGRELGGLLLAMTMIATYGSASSFIGGPGIAYNMGLGWVLLSAIQVVTGYIVLTVIGKKFAIIARKMEAITLIDYLKGRYNNKAVVILSALCIIIFLFSATVAQWVGGGRLIESLTGLSYTTALFLFTFSVLVYVLIGGFRAVALSDTLLGIIMLVGTTIILIATVIAGGGIEKIMQELVQINPKLITPFGADGSLTKSYVTSFWILIGIGVVGLPQISVRAMSYKNSKAMHQALIIGTVVVGTIMIGMHLTGVFARVVLPGITVPDKVMPLLAMEVLPPWLAGVFLAAPMAAIMSTVNSLLLLVSSSIIKDIYVNYINKDAADSTIKKGSLWITGIVGLLVYAAAIKPPDFLIWLNLFSFGGLEAAFIWPIVLGLYWRKGNATGALASILVGVGSYMCIHLFYPNPFGIHTVVFPICFAFIAYVIGSMSAVKKTV

SEQ ID NO: 24472 - protein, 267 aa, Bacillus cereus ATCC 14579
MEKMEEWVMAFHKPEQIAELVIEAGVQKVRQTLPAMLILGFLGGAFIAIGFLLNIRVLGNLPERWGSLVNVLGGAVFPVGLMLVVLAGGELITGNMMSLSMALYAKKITLISVLNNWVWITLMNFIGAIFVAYCFGHLGGLTEGEYLNKTVAIAEGKLHESFGRTLILAIGCNWLVCLALWLAYGTSDFVGKIIGIWIPIMAFVVIGFQQVVANMFVISAVIFAGHLTWMDLAKNFVPVFIGNVIGGAGFVGFAYFACYQKQHSNMK

SEQ ID NO: 24473 - protein, 444 aa, Bacillus cereus ATCC 14579
MNQTLGAIDLTLLGIGAIIGTGIFVLTGIVAAKHAGPAIVLSFVLAAIICACVAFCYAEFASTVPVSGSVYSYTYMTLGEIFAFIVGWCVMLEYLLVTSAVAAGWSAYFQSLLLGFNIHIPTIFASAPGMGKGGIIDLPAVLIILVVTFLLSRGAKESARINNIMVIIKLAVIVGFIVVGTQYVRPENWQPFLPFGFHGVVGGAATVFFAFLGFDAVATAAEEVKRPQRNVPIGLLVSLFICTVLYVGVSFVLTGMVPFTELNVADPVAYALRTVGEDRIAGLLSVGAIAGLTTVLLVAMFAFVRVSYSMSRDGLLPKRLSSVHKRLQTPFFNTWVTGILAALLAGLVDLNLLANLVNMGTITAFVFVSIAVIVLRKTHPNMKRPFRAPLVPFLPIVSIVSCIYLALNLSKLTLISFVAWIIVGVFIYFVYAKKHSNVRNRNKV

SEQ ID NO: 24474 - protein, 493 aa, Bacillus cereus ATCC 14579
MVKIEIMVSLAIYMAGMLYIGYWSYKKTSDLSDYMLGGRGLGPAVTALSAGASDMSGWMLMGLPGAMYATGLSSVWIAIGLLIGAYANYLIIAPRLRTYTEVANDSITIPDFLENRFKDRTKILRFVSAIVILVFFTFYASAGLVSGGRLFENSFNLDYKIGLFVTVGVVVAYTLFGGFLAVSWTDFVQGCIMFIALVLVPIVAFTDVGGVTETFNTIKQVDASHLDMFKGTTVLGIISFLAWGLGYFGQPHIIVRFMAITSIKDLKTSRRIGIGWMTISIIGAMLTGLIGIAYYAKNNAILQDPEMVFVTFSNILFHPYITGFLLSAILASIMSSISSQLLVISSAVTEDFYKTFFRRNASDKELVFIGRLSVLVVAMIAVVLAYHPSDTILTLVGYAWAGFGSAFGPAILLSLYWKRTNKWGVLAGMIVGAVVVIAWVQIPSLKAIMYEMVPGFFCSLLTVIVVSLLTKEPVKAVHREFNEMEAVLEEETK

SEQ ID NO: 24475 - protein, 524 aa, Bacillus cereus ATCC 14579
MSETLLVIISILLFLMLLLIVFFIITFFIKKRTHHSILKLHPYLGRMRYLLEKIGPEFRQYWFDHDTDGKPFSRYDFQSVMFLAKYRSEILGFGSKRDFEASGYYIANTLFPILTEELSVNLTQEREGKKYVIHKEGLFSRREKLTADTTNLWLYEEDDAIIVGENRKYPWKLHGMFGASATSYGAIGENYILASGLGAKMAGGSWINTGEGGVIPEHLHTGANIVAQIGPGLFGYRDEDGNFSMGKFMEKVKESNIRAFELKFGQGAKIRGGHLEGQKVNEKIAFVRNVRKGETINSPNRFSFLKNAADTLYFIQQLQESGGKPVGMKIVIGQQKPLEDLIKTMKELNIYPDFITIDGSEGGSGATYKSMADCMGLPLIPALLTFIDTANHYGVRNKFKVFASGKLITPDKVAIALAIGADAVSSARGFMMASGCIMALQCNSGQCPSGVATTNPHYQKALDPYEKKWRVMNYIISMRYSLFSLAAAAGVKSPRHLNREHIVFKDEVGRVVPLSELFPIVNQT

SEQ ID NO: 24476 - protein, 271 aa, Bacillus cereus ATCC 14579
MSVFTPEEITELAANSGRKKAHLSLLPMLILGFFGGAFIALGYLLDIHVIGTMPKYWGSFTSFLGAAVFPIGLILVILAGGELVTGNMMTVSMAWLQKKITLFHFIRNLVIVTFSNFIGAVFVAYFFGHIVGLTEGAFLAKTISIAQAKLQDTPLQAFISAIGCNWLVCLAVWLSMGSKEFIGKIIGIWFPVMTFVAIGFQHVVANMFVIPAAIFAGHFTWAEYFPNFIFVFFGNLVGGMLFVALPYFISYNKKLASYQEKTEMKNKSLSA

SEQ ID NO: 24477 - protein, 410 aa, Bacillus cereus ATCC 14579
MKIIVQKFGGTSVRDDNGRKHALHHIKKSLAAGYKVVTVVSAMGRKGEPYATDTLLSLVNQEESTISKREQDLLLSCGELISAIVFSNMLNENGIKAAALNGAQAGFVTNDDFTNAKIIEMNCDRIHEELENVDVIVVTGFQGQTKKGDTTTLGRGGSDTSASALGVALHAEYIDIFTDVEGVMTADPRIVKDARHLQTVTYNEICNMAYQGAKVVHPRAVEIAMHAKVPLRVRSTYSDSEGTLISAYDGATRGRDVEERPVTGIAHVSNVTQIKVLAKETAYDLQQHVFKEMANEGISVDLINISPTGVAYTVSDNVSSHAVKLLQNLGYEPIVTEHCAKVSIVGAGMAGYPGVTAKIVTALAEKGIQILQSADSHTTIWVLVKETDLVEAVNALHSAFELSKEKQLEQ

SEQ ID NO: 24478 - protein, 460 aa, Bacillus cereus ATCC 14579
MSQYETPLFTALVEHSKRNPIQFHIPGHKKGQGMDPTFREFIGHNALAIDLINIAPLDDLHHPKGMIKEAQDLAAAAFGADHTFFSIQGTSGAIMTMVMSVCGPGDKILVPRNVHKSVMSAIIFSGAKPIFMHPEIDPKLGISHGITIQSVKKALEEHSDAKGLLVINPTYFGFAADLEQIVQLAHSYDIPVLVDEAHGVHIHFHDELPMSAMQAGADMAATSVHKLGGSLTQSSILNVKEGLVNVKHVQSIISMLTTTSTSYILLASLDVARKRLATEGTALIEQTIQLAEHVRDAINSIEHLYCPGKEMLGTDATFNYDPTKIIVSVKDLGITGHQAEVWLREQYNIEVELSDLYNILCLITLGDTESDTNTLIAALQDLAATFRNRADKGVQVQVEIPEIPVLALSPRDAFYSETEVIPFENAAGRIIADFVMVYPPGIPIFTPGGNYYTRKLRVYS

SEQ ID NO: 24479 - protein, 387 aa, Bacillus cereus ATCC 14579
MEQFINPRVKDIQISGIRQFSNMIQNYDNLISLTIGQPDFPTPSLVKEAAKRAITENYTSYTHNAGLLELRKAACNFVKDNYDLHYSPENETIVTIGASEAIDVAFRTILEPGTEVILPAPIYPGYEPIIRLCGATPVFVDVRETGFRLTAEALKNAITEKTRCIVLPYPSNPTGVTLSTEELKDIVDVLKDKNIFVLSDEIYSELVYEQKHTSIAHFPEMREKTIVINGLSKSHSMTGWRVGLLFAPSYLAGHILKVHQYNVTCATSIAQYAAIEALTAAKDAPKMMRHQYKKRRDYVYNRLTQMGLTVEKPTGAFYLFPYVGHLTSSSFDFALDLVKEAGLAVVPGTAFSEYGEGYLRLSYAYSIETLKEGCDRLEAFLMKKAKS

SEQ ID NO: 24480 - protein, 391 aa, Bacillus cereus ATCC 14579
MHNVVITAAVRSPIGTFGGALKNVTPVELAVPVLQEAVKRGGVEPHEVDEVILGHCIQRTDEANTARTAALAAGFPDTVTGYTIQRQCSSGMQAIMSAAMQIQLGVSDVVVAGGVEAMSSSPYALKQHRWGQRLQHGEIRDTVWEVLEDPIHHIMMGETAENLVKQYEITREEQDEVALRSHTLALKAIESGYFDDQIVPITIKERRKEVVFSKDEHPRADITAEKLAGLKPAFRKDGSVTAGNASGLNDGSAVLVLMSEEKAKEKGLQPLARIVGYSVAGVDPKIMGIGPAPAIRKGLEKVDWSLEDADLLEINEAFAAQYLAVEKELGLDREKVNVNGSGVGLGHPIGCTGARITVSLIHELKRRGLEKGIASLCVGGGIGVALFIEAL

SEQ ID NO: 24481 - protein, 292 aa, Bacillus cereus ATCC 14579
MEHKTLSIGFIGIGVMGKSMVYHLMQDGHKVYVYNRTKAKTDSLVQDGANWCNTPKELVKQVDIVMTMVGYPHDVEEVYFGIEGIIEHAKEGTIAIDFTTSTPTLAKRINEVAKRKNIYTLDAPVSGGDVGAKEAKLAIMVGGEKEIYDRCLPLLEKLGTNIQLQGPAGSGQHTKMCNQIAIASNMIGVCEAVAYAKKAGLNPDKVLESISTGAAGSWSLSNLAPRMLKGDFEPGFYVKHFMKDMKIALEEAERLQLPVPGLSLAKELYEELIKDGEENSGTQVLYKKYIRG

SEQ ID NO: 24482 - protein, 376 aa, Bacillus cereus ATCC 14579
MNLLVEVATLSVNRILVINPGSTSTKIGVFDNERPVLEETIRHDVEQIGKYKRIIDQYEFRKETILEVLHSHGINISKLNAVCGRGGLLRPIEGGTYTVNDAMLEDLKNGFSGHHASNLGGILAYEIASGLNIPAFIVDPVVVDEMEPVARISGIAGMERKSIFHALNQKAVARKVAEQLNHKYEDLNLLVTHMGGGITVGAHKKGRVIDVNNGLNGEGPFSPERAGTVPVGQLVEMCFSGEYYRDEMIKKLVGQGGLVSLIGTNDAIKVEQMVEKGDPEATLIYKAMAYQVAKEIGGASAVLHGKIDAIVLTGGLAYSKILVDEIKERVDWIADVIVHPGEDELEALAEGALRVLREEEAPKEYVVREKETVARG

SEQ ID NO: 24483 - protein, 301 aa, Bacillus cereus ATCC 14579
MNRKGYKSGFVSIIGRPNVGKSTFLNRIIGQKIAIMSDKPQTTRNKIQGVYTENDAQVIFIDTPGIHKPKHKLGDFMVKMAQTTLKEVDIVLFMVNAVEGFGRGEEFIIEKLKETKQPVFLVINKIDQLHPEQLLELIDQYRKLHEFAEIVPISALDGNNVDALIGTIKKYLPEGPQYYPENQVTDHPERFIIAELIREKVLHLTREEVPHSVAVVIDAIQKREGGAVYINATIVVERASQKGIIIGKQGKMLKEVGKRARFDIEALLGSKVFLEVWVKVQKDWRNKMSQLRDLGFREDEY

SEQ ID NO: 24484 - protein, 611 aa, Bacillus cereus ATCC 14579
MSKIIGIDLGTTNSCVAVMEGGEPKVIPNPEGNRTTPSVVAFKNEERQVGEVAKRQAITNPNTIMSVKRHMGTDYKVEVEGKDYTPQEISAIILQNLKASAEAYLGETVTKAVITVPAYFNDAERQATKDAGRIAGLEVERIINEPTAAALAYGLEKQDEEQKILVYDLGGGTFDVSILELADGTFEVISTAGDNRLGGDDFDQVIIDHLVAEFKKENNIDLSQDKMALQRLKDAAEKAKKDLSGVTQTQISLPFISAGAAGPLHLELTLTRAKFEELSAGLVERTLEPTRRALKDAGFAPSELDKVILVGGSTRIPAVQEAIKRETGKEPYKGVNPDEVVALGAAVQGGVLTGDVEGVLLLDVTPLSLGIETMGGVFTKLIERNTTIPTSKSQVFSTAADNQPAVDIHVLQGERPMSADNKTLGRFQLTDLPPAPRGIPQIEVTFDIDANGIVNVRAKDLGTSKEQAITIQSSSGLSDEEVERMVQEAEANADADQKRKEEVELRNEADQLVFQTDKVVKDLEGKVDAAEVAKATEAKEALQAAIEKNELEEIRAKKDALQEIVQQLTVKLYEQAQAAAGQAEGAQGAQDAGAKKDNVVDAEFEEVKEDK

SEQ ID NO: 24485 - protein, 358 aa, Bacillus cereus ATCC 14579
MTETIKCIGCGVEIQTENKNEVGYAPASSLEKEQVICQRCFRLKHYNEIQDVSLTDDDFLRILNGIGKSDALVVKIVDIFDFNGSWLPGLHRFVGNNKVLLVGNKADLIPKSVKHDKVKHWMRYSAKQLGLKPEDVFLISAAKGQGIAELADAIEYYRGGKDVYVVGCTNVGKSTFINRMIKEFSDETENVITTSHFPGTTLDLIDIPLDEESSLYDTPGIINHHQMAHYVGKQSLKLITPTKEIKPMVFQLNEEQTLFFSGLARFDYVSGGRRAFTCHFSNRLTIHRTKLEKADELYKNHAGDLLSPPTPEELANMPELVKYEFNIREPKTDVVFFGLGWAPPPNQEQKLLHTYQKE

SEQ ID NO: 24486 - protein, 353 aa, Bacillus cereus ATCC 14579
MERIYLDHAATSPTHPEVVEKMIPYMTEIFGNPSSIHFYGRQTRHAVDEARRVCARSIHANPNEVIFTSGGTEADNLALIGVARANRHKGNHIITTQIEHHAILHTCELLEREGFEVTYLPVDETGLIQVSDIQKALTEETILVSVMFGNNEVGTMQPIVEIGKLLKDHQAYFHTDAVQAYGLVEINVKEFGIDLLSISAHKINGPKGVGFLYAGANVKFEPLLIGGEQERKRRAGTENVPSIAGLQHAILIAEKTREQKNAQYEEFKDIMVSVFKNEGITFEVNGNLEHRLPHVLNVSFTGMNIEPFLVNLDLAGIAVSSGSACTAGSIDPSHVLVAMFGKDSESNTFIRTL

SEQ ID NO: 24487 - protein, 380 aa, Bacillus cereus ATCC 14579
MMIYLDYAATTPMSEEALQTYMKAASQYFGNEQSLHDIGGTASSLLQVCRKTFAEMIGGKEQGVFFTSGGSESNYLAIQSLLNARNKKHIITTPMEHASIRSYFQSLKSKGYTITEIPVDKNGLICLVDLEAAITEDTVLASIQHGNSEIGTVQNITEIGALLKKYNVLFHTDCVQTFGKLPIHVFEMGIDSLSVSAHKIYGPKGVGACYINPQTRWEQVFPGTSHEKGFRPGTVNVPGIASFLTAAENILKTQWEESLRFKELRSYFLEQIQTLPLEIEVEGHSTSCLPHIVGVTIKGIEGQYTMLECNRHGIAISTGSACQVGKQEPSKTMLAIGKTYEEAKQYVRFSFGQQTTKDQIDTTIHALHTIGNQFYRGVKS

SEQ ID NO: 24488 - protein, 428 aa, Bacillus cereus ATCC 14579
MFVDQVKIYVKGGDGGNGMVAYRREKYVPKGGPAGGDGGKGADVVFVVEEGLRTLMDFRYQRHFKADRGQHGMSKGQHGRKSEDLLVKVPPGTVVKDEKTGQILADLVTHGQTAVIAKGGRGGRGNSRFATATNPAPEIAENGEPGQERDVILELKVLADVGLVGFPSVGKSTLLSVVSSARPKIAEYHFTTIVPNLGVVETGDNRSFVMADLPGLIEGAHAGVGLGHQFLRHIERTRVIVHVIDMSGLEGRDPYEDYVTINNELKEYNLRLTERPQVVVANKMDMPDAEENLQAFKEKVGDEVKIFPISAVTRQGVRDLLFEVANLIETTPEFPIHEVADESDTSVMYKFDTEGVKFEITRESDGTFVISGYDIEKTFKMTDFSRDESVRRFARQMRGMGIDEALRARGAKDGDIVKILEYEFEFID

SEQ ID NO: 24489 - protein, 102 aa, Bacillus cereus ATCC 14579
MYAIIETGGKQIKVEAGQAIYIEKLDVEAGETVTFDKVLFVGGENVKVGSPVVEGATVTAKVEKQGRAKKIIVFKYKAKKNNRKKQGHRQPYTKLVVEAINA

SEQ ID NO: 24490 - protein, 377 aa, Bacillus cereus ATCC 14579
MRIGIPTEIKNNENRVAMTPAGAVHLVQNGHEVFVQKGAGLGSGFTDEEYVQAGAKLVETAEEAWNQDMVMKVKEPVASEYGYFREGLILFTYLHLAPEPQLTKALIDNKVASIAYETVQLDNRSLPLLAPMSEVAGRMSAQIGAQFLEKNKGGKGILLAGVPGVKRGKVTIIGGGQAGTNAAKIAVGLGADVTIIDLSAERLRQLDDIFGNQVKTLMSNPYNIAEAVKESDLVIGAVLIPGAKAPKLVTEEMIQSMEPGSVVVDIAIDQGGIFETTDRITTHDNPTYEKHGVVHYAVANMPGAVPRTSTLALTNVTVPYAVQIANKGYKEACLGNTALLKGINTLDGYVTFEAVAEAHGLQYADAKELLEKAPALS

SEQ ID NO: 24491 - protein, 401 aa, Bacillus cereus ATCC 14579
MEKKKVVLAYSGGLDTSVAIKWLQEKNYDIIALCLDLGEGKDLAFVKEKALSVGAIKSYMIDVQEEFANEYALMAMQAHTLYEGKYPLVSALSRPLIAKKLVEIAEQEGATAVAHGCTGKGNDQVRFEVSIQALNPYLEVIAPVREWKWSREEEIAYAKENDVPIPINLDSPFSIDQNLWGRSNECGILEDPWAAPPEDAYEMTLALEDTPNKPEFVEIGFEAGVPTTLNGTAYSLAELIKTLNALAGKHGVGRIDHVENRLVGIKSREVYECPAAMTLITAHKELEDLTHVKEVAHFKPVIEQKITELIYNGLWFSPLKQALHAFLQETQKNVTGTVRVKLFKGHAIVEGRKSEYSLYDEKLATYTAQDEFNHDAAVGFISLFGLPTKVYSQVNQKKVEA

SEQ ID NO: 24492 - protein, 397 aa, Bacillus cereus ATCC 14579
MSKIIAINAGSSSLKFQLFEMPSETVLTKGLVERIGLEDSIFTITVDGEKQKEITNIPDHAVAVNMLLKKLTENGIVKSLDEIGGIGHRVVHGGEKFADSVLITDEVLADIEELSDLAPLHNPANVVGIKAFQEVLPNVPAVAVFDTAFHQTMPESAFLYSLPYEYYEKFGIRKYGFHGTSHKYVTERAAELLGRPIESLSLLSCHLGNGASIAAVEGGKSIDTSMGFTPLAGVTMGTRSGNLDPALIPYIMEKTGQTVEEVVNVLNKKSGMLGLTGYSSDLRDIIAKEEEGDHRAKVALDVFVSRIHKYIGSYTARMKGVDAIIFTAGVGENSAIIRERVLEGLEYMGVYFDAKRNNVFGEEAFISFPHSPVKIIVIPTDEEVMIARDVLRLGDIG

SEQ ID NO: 24493 - protein, 380 aa, Bacillus cereus ATCC 14579
MIYFDNSATTKPYPEALQSYVTVAGKYFGNPSSIHSLGGEAERLLTQSRTIAAQLLRVKPSEIIFTSGGTEGNNLAIKGIAMRNRSRGKHIITTNIEHASVFEAYKQLEELGFDVTYLPVNEHGVVSVEDVKRALREDTILVSIIHVNNETGAIQPVAEIGTLLSNHPKIRFHVDHVQGIGKVPLDLYASHIDLCSISGHKFHSVKGTGLLYVRDGVRLDPILSGGQQELKYRSGTENLPGIVAMVKALRMTMEQVKEKVAHLQSLQAELVRFFKEMEDVTINTSLAYAAPHILNVSFVGLKPEVVVHALEEHGVYVSTKSACSSKANEVSRVLVSMGVPHAAAASAIRISLAPENTMEEVKQFEGIVKETMPKLYEVMR

SEQ ID NO: 24494 - protein, 66 aa, Bacillus cereus ATCC 14579
MQTGKVKWFNSEKGFGFIEVEGGDDVFVHFSAIQGDGFKTLEEGQEVSFEIVEGNRGPQAANVTKN

SEQ ID NO: 24495 - protein, 396 aa, Bacillus cereus ATCC 14579
MKQFELSRSAESLKPSGIRKFFDLAANMKGVISLGVGEPDFVTPWNVRQACIRSLEQGYTSYTANAGLLELRQEIAKYLKKQFAVSYDPSDEIIVTVGASQALDVAMRAIINPDDEVLIVEPSFVSYAPLVTLAGGVPVPVETKLENEFKVQPEQIEAAITAKTKAILLCSPNNPTGAMLNKSELEEIAVIVEKYNLIVLSDEIYAELVYDEAYTSFASIKNMREHTILISGFSKGFAMTGWRLGMIAAPVQFSELMLKIHQYSMMCAPTMSQFAALEALRAGNDEVIRMRDSYKKRRNFMTTSFNEMGLTCHVPGGAFYVFPSISSTGLSSAEFAEQLLLEEKVAVVPGSVFGESGEGFIRCSYATSLEQLMEAMKRMERFVENKKRTKRNTFCP

SEQ ID NO: 24496 - protein, 320 aa, Bacillus cereus ATCC 14579
MKPKIYIAEPVPTFVENYLSEHFDYEKWDQNEKVPRDVLLEKIQDKDGLLNFGSAINEELLTVAPNLKVVSNISVGYDNFDLQAMKNRKVIGTNTPYVLDDTVADLVFALMLSAGRRVCELDSYVKNGEWNAEIGKEHFGLDVHHSTIGIIGMGRIGEAVAKRAKFGFDMNVLYYNRRRKEEAEQKFDATYCDLQTLLKQSDFIVLLTPLTDETYHLIGEKEFSLMKETAIFINASRGKTVDEEALIHALTEKKIFAAGIDTFTQEPIQKDNPLLSLQNVVTLPHIGSATLKTRQQMAMTAAENLVAGLQGKTPPNIVRG

SEQ ID NO: 24497 - protein, 261 aa, Bacillus cereus ATCC 14579
MAGSTLTVKDLHVSIDGKEILKGVNLEVKGGEIHAIMGPNGTGKSTLSSAIMGHPKYEVTEGSIIIDGEDVLEMEVDERAQAGLFLAMQYPSEISGVTNADFLRSAINARREEGDEISLMKFIRTLDKNMEFLEMDPEMAQRYLNEGFSGGEKKRNEILQLMMIEPKIAILDEIDSGLDIDALKVVSKGINEMRGEEFGCLMITHYQRLLNYITPDFVHVMMNGRIVKSGGPELAQRLEAEGYDWIKKELGIEDETTEQEA

SEQ ID NO: 24498 - protein, 390 aa, Bacillus cereus ATCC 14579
MREAVIVAGARTPIGKAKRGSLKTVRPDDLGALVVKETLKRANYEGPIDDLIFGCAMPEAEQGLNMARNIGGLAGLSYDVPAITINRYCSSGLQSIAYGAERIMLGHSEAVLSGGAESMSLVPMMGHVVRPNSRLVEAAPEYYMGMGHTAEQVAVKYGISREEQDAFAVRSHQRAAKALAAGNFADETVPVDVTLRSVGSNNKLQEETITFAQDEGVRAETTLDILGKLRPAFNVRGSVTAGNSSQMSDGAASVLLMDREKAVSDGMKPLAKFRSFAVAGVPPEVMGIGPIAAIPKALKLAGLELSDIGLFELNEAFASQSIQVIRELGLDEEKVNVNGGAIALGHPLGCTGAKLTLSLIHEMKRRNEQFGIVTMCIGGGMGAAGVFELL

SEQ ID NO: 24499 - protein, 436 aa, Bacillus cereus ATCC 14579
MHHDEKNKIGLTVALSIVVGTIIGSGVFMKPGSVLDYSGSSNMAILAWIIGGLLTLASGLTVAEIGAQIPKNGGLYTYLEEIYGSFWGYLSGWMQTIVYGPAIIGTLGLYFSSLMINFFYLDKVWNLPIAIGTVVFLGVVNSMGTKYGGIVQTITTIGKMIPIVLIVVLGFWKGNSDIFNVVVPISQNQSIGMAILATLFAYDGWILLASIGGEMKNPTKLLPKAMTVGILIVTAAYVLINLALLNVLPAAKIVDLGENATATAAGMLLGEYGGKIISIGIIVSIFGCLNGKILTFPRIPMSMAERGQLPFSKFIAKESPRFKTPANAITVEIILGIILMIISDPNKLSEISVFIIYIFYVMTFIGVFILRKRNKNKERAYSVPLFPIVPIVAILGSFFVIGSAIINDPVSCFLSIGIVFTGLPVYWYLNKKKETE

SEQ ID NO: 24500 - protein, 571 aa, Bacillus cereus ATCC 14579
MLRKFFSYYKPYKGLFILDFSCAVVAGLLELGFPLIVNQFIDKLLPGQNWTLILWACFGLLAVYMLNAGLQYVVTYWGHMLGVNIETDMRQKLFDHIQKLSFRFFDNNKTGHLISRLTNDLMEIGEIAHHGPEDLFIAVMTLVGAFSFMMMINWKLALLTFFVIPFLLWLALYFNKKMTGTFRRLFSDVADFNACIENNVGGIRVVQAFGNEKFEKEQFAVNNARFRTTKLMAYKIMALNSSISYMLMRLVTLFVLICGTWFVLQGELTYGGFIGFVLLTNIFFRPIEKINAVIESYPKGIAGFKRYVELLETEPDIVDSKDAMEVKHVHGDIQYNNITFGYENKEPILNDISLKIHAGETVAFVGPSGAGKTTLCSLLPRFYEQSSGSIQIDGIDTKDMTLSSLRKQIGIVQQDVFLFSGTIRENIAYGNLKASEAEIWQAVKRAQLEDLIYSQPDGLDTVIGERGVKLSGGQKQRLAIARMFLKNPPILILDEATSALDTETELAIQKSLAELSVGRTTLVIAHRLATIKNADRIVVVNKDGIAEQGSHNELIEQGGGYSRLYEAQFSS

SEQ ID NO: 24501 - protein, 67 aa, Bacillus cereus ATCC 14579
MNMQGRVKWFNAEKGFGFIEREDGDDVFVHFSAIQQDGYKSLEEGQQVEFDIVDGARGPQAANVVKL

SEQ ID NO: 24502 - protein, 505 aa, Bacillus cereus ATCC 14579
MMRKLTKTFIVSLTLCIAFTIWGIIPESIIGKGSLGNVTTAIQTALVSKFGWFYIISVSIILGVSIFLIVSKYGSIRLGKDDDEPDYSYMTWFAMLFSAGMGIGLVFWGVAEPLNHLYAPPFGDSATEESARLALRFSFFHWGLHPWGLYAFVALCIAYFTFRKGKASTISATVGPLFKGGEHGRIAHSFDVLAVFATVFGVATSLGLGAKQIAGGVSYLTSIPNSLTTQLVIIAIVTVLFMLSAQTGLDKGIKYLSNTNIIFAFALMIIVLFAGPTNFIMNYFTSTIGSYIQELPSMSFRLSPLDEGGNQWIQSWTIFYWAWWIAWSPFVGTFIARVSRGRTIREFVIGVLLVPTVIGALWFSVFGGTGIHMELFGDAHIFDKVKEMGTEVGLFAMFDQMGSFGSALSVLGILLIATFFITSADSATFVLGMLTTHGSLNPPNRIKMIWGIVLAAIASTLLYIGGLEALQTAAIIAAFPFVFVIFFMMAALFKELQKEGRMKRH

SEQ ID NO: 24503 - protein, 393 aa, Bacillus cereus ATCC 14579
MSKTVILSAARTPVGKFGGSLKDVKATELGGIAIKAALERANVAASDVEEVIFGTVIQGGQGQIPSRQAARAAGIPWEVQTETVNKVCASGLRAVTLADQIIRTGDQSLIVAGGMESMSNSPYILRGARWGYRMGNNEVIDLNVADGLTCAFSGTHMGVYGGEVAKEDGISREAQDEWAYRSHQRAVSAHKEGRFEEEIVPVTIPQRKGDPIVVAKDEAPREDTTIEKLAKLKPVFDKTATVTAGNAPGLNDGGAALVLMSEDRAKQEGRKPLATILAHTAIAVESKDFPRTPGYAINALLEKTGKTIEDIDLFEINEAFAAVAIASTEIAGIDPEKLNVNGGAVAMGHPIGASGARIIVTLIHALKQRGGGIGIASICSGGGQGDAVMIEVH

SEQ ID NO: 24504 - protein, 290 aa, Bacillus cereus ATCC 14579
MRFDEAYSGKVFIKSHPSFEESKVVIYGMPMDWTVSYRPGSRFGPARIREVSIGLEEYSPYLDRELEEVKYFDAGDIPLPFGNAQRSLDMIEEYVSKLLDADKFPLGLGGEHLVSWPIFKAMAKKYPDLAIIHMDAHTDLRESYEGEPLSHSTPIRKVCDLIGPENVYSFGIRSGMKEEFEWAKEVGMNLYKFDVLEPLKEVLPKLAGRPVYVTIDIDVLDPAHAPGTGTLEAGGITSKELLDSIVAIANSNINVVGADLVEVAPVYDHSDQTPVAASKFVREMLLGWVK

SEQ ID NO: 24505 - protein, 323 aa, Bacillus cereus ATCC 14579
MSNLFTTVKEKVQGKGISIVLPEGTDERILGAAERLAKEELVKPILVGNKEEISAKAASMNLTLAGVDIYDPATYEEMDAMVASFVERRKGKATEEDARKILKDENYFGTMLVYMGKAHGLVSGAAHSTADTVRPALQIIKTKPGVTKTSGVFIMVREEEKYVFADCAINIAPNSQDLAEIGIESAKTAELFGIDPRVAMLSFSTKGSAKSPETEKVVEATRIAKEMAPELTLDGEFQFDAAFVPSVAEKKAPGSTIKGDANVFVFPSLEAGNIGYKIAQRLGNFEAVGPILQGLNMPVNDLSRGCNEEEVYKLALITAAQAL

SEQ ID NO: 24506 - protein, 522 aa, Bacillus cereus ATCC 14579
MRMKSRKTDWPVFIISGGSLLLFVIAVFLNKDYVESAINKSFAFSIKYFGAFWQVLLLGTFIVAMCMAFSKYGRVKLGGLEKPEISTAKWLAIIMSTLLAGGGVFWAAAEPMYHLMTVPPIHDGISAGTKEAVMPALAQSYMHWGFLAWTILGTISAVVMMYGHYHKDMPLKPRTLLYPIFGEKLRKSLLGTIIDAAAIIAVAAGTIGPIGFLGLQASYGLQELFGISDVFTTQLAIIVCVVAVSTISAVTGIDKGIQIISNLNVRLAIVLMAFILLFGPGGFIIDSFVSSFGFYVNEFIPMSTYRGDTSWLGSWTIFFWGWFIGYGPMMAILVSRISRGRTIREIIVAIGIIAPIITTFWFTILGGSGVFYELMNPGSISDALSESGMPAAMIAITGQLPLSNIIGPAFLLLTILFVVTTGDSMAYSISMAVTGDGDPRISLRIFWSLIMGAVAAILLYMGEGSINALQSFIVVTAVPVSILLFPMLWLAPKVAGELALKQGIVKEEDKTAFLFQKASKSK

SEQ ID NO: 24507 - protein, 397 aa, Lactococcus lactis subsp. lactis Il1403
MGNKKIVLAYSGGLDTSVAVKWLTDKGFDVIADCMDVGEGKDLNFIHDKALQVGAVESVVLDCKEEFAKIFVGAALKGNLMYENKYPLVSALSRPLIAQKLVEVAKEKGATAIAHGCTGKGNDQVRFEVAIHSLAPELEVIAPVREWHWAREEEIEYANQNGVPIPADLDNPYSIDMNLWGRAIEAGVLENPWNTCPEDAFFMTNSVENAPNEAEFIEVEFKEGLPIALNGKSLELHEIIKKVNIIAGKHGIGRIDHIENRLVGIKSREFYECPAAITLLKAHKDLEDLTFVRELAHFKPVLENELANLIYNGLWFNPATKALIAYLDETQKVVNGIVKIKLYKGLATPVGRKSTNSLYSEKLATYTAADEFDQAAAVGFIKLWGLPTQVNAQVNLK

SEQ ID NO: 24508 - protein, 608 aa, Tetragenococcus halophilus
MRKEEARARKEAIENRPPFRGLQINPTTSLFDEEGKEEIGERNWKGWGVDIHPQVTIPATIILLLFIILLSIFSQEANVVFDYILDAVTNYTGWFMILATAIFIGAGLFFAFSRYGKIVIGGNDAKPEFSRWGWFAMLLSAGMGIGLVFWSVAEPISHLGEPSPMFNVDPNSAGAVKTALTSSFFHWGIHPWAIYAIVGLGLAFFSYNKGLPLTIRSLFYPLIGNKIYGWWGNIIDILSVLATMTGLATSLGLGVSQVNAGLNYLFGISISPGIQIVLIIVITAFATTSVVLGLDKGVQKLSEINMVLAAIFALFILLVGPTVFILSGFTQNLGYYAANFIEMSFWTETFTSTNWQGSWTLFYWAWWISWSPFVGMFIARISKGRSVKEFIIGVVLVPTIISAIFMSILGGTALYQQINGINDLASVVNVDESLALFSLSDSLPLSSILSVVGIILVTVFFITSSDSGSLVIDHLTSGGKLDTPLAQRIFWAIIEGAVAAVLLIGGGLTALQTASIITGLPFTFVLLAMVYSLYLGLRQEFLIERAVREKLRKVRNDHIITEVVQSNVEDKALVENVAEKLAEEEDPEEDTNEETNEDDYNTESQSSQ

SEQ ID NO: 24509 - protein, 602 aa, Shigella flexneri 2a str. 2457T
MSLAANCLSKIGRLMCFTHFFRQTVRQAMEMLSGAEMVVRSLIDQGVKQVFGYPGGAVLDIYDALHTVGGIDHVLVRHEQAAVHMADGLARATGEVGVVLVTSGPGATNAITGIATAYMDSIPLVVLSGQVATSLIGYDAFQECDMVGISRPVVKHSFLVKQTEDIPQVLKKAFWLAASGRPGPVVVDLPKDILNPANKLPYVCPESVSMRSYNPTTTGHKGQIKRALQTLVAAKKPVVYVGGGAIMAGCHQQLKETVEALNLPVVSSLMGMGAFPATHRQALGMLGMHGTYEANMTMHNADVIFAVGVRFDDRTTNNLAKYCPNATVLHIDIDPTSISKTVTADIPIVGDARQVLEQMLELLSQESAHQPLDEIRDWWQQIEQWRALQCLKYDTHSEKIKPQAVIETLWRLTNGDAYVTSDVGQHQMFAALYYPFDKPRRWINSGGLGTMGFGLPAALGVKMALPEETVVCVTGDGSIQMNIQELSTALQYELPVLVVNLNNRYLGMVKQWQDMIYSGRHSQSYMQSLPDFVRLAEAYGHVGIQISHPHELESKLSEALEQVRNNRLVFVDVTVDGSEHVYPMQIRGGGMDEMWLSKTERT

SEQ ID NO: 24510 - protein, 308 aa, Shigella flexneri 2a str. 2457T
MLELQEASRLPERLGDDFVRAANIILHCEGKVVVSGIGKSGHIGKKIAATLASTGTPAFFVHPAEALHGDLGMIESRDVMLFISYSGGAKELDLIIPRLEDKSIALLAMTGKPTSPLGLAAKAVLDISVEREACPMHLAPTSSTVNTLMMGDALAMAVMQARGFNEEDFARSHPAGALGARLLNKVHHLMRRDDAIPQVALTASVMDAMLELSRTGLGLVAVCDAQQQVQGVFTDGDLRRWLVGGGALTTPVNEAMTTGGTTLQAQSRAIDAKEVLMKRKITAAPVVDENGKLTGAINLQDFYQAGII

SEQ ID NO: 24511 - protein, 402 aa, Shigella flexneri 2a str. 2457T
MNEFPVVLVINCGSSSIKFSVLDASDCEVLMSGIADGINSENAFLSVNGGEPAPLAHHSYEGALKAIAFELEKRNLNDSVALIGHRIAHGGSIFTESAIITDEVIDNIRRVSPLAPLHNYANLSGIESAQQLFPGVTQVAVFDTSFHQTMAPEAYLYGLPWKYYEELGVRRYGFHGTSHRYVSQRAHSLLNLAEDDSGLVVAHLGNGASICAVRNGQSVDTSMGMTPLEGLMMGTRSGDVDFGAMSWVASQTNQSLGDLERVVNKESGLLGISGLSSDLRVLEKAWHEGHERAQLAIKTFVHRIARHIAGHAASLRRLDGIIFTGGIGENSSLIRRLVMEHLAVLGVEIDTEMNNRSNSFGERIVSSENAHVICVVIPTNEEKMIALDAIHLGKVNAPAEFA

SEQ ID NO: 24512 - protein, 1522 aa, Shigella flexneri 2a str. 2457T
MRGARMTRKPRRHALSVPVRSGSEVGFPQSLGEVHDMLYDKSLERDNCGFGLIAHIEGEPSHKVVRTAIHALARMQHRGAILADGKTGDGCGLLLQKPDRFFRIVAQERGWRLAKNYAVGMLFLNKDPELAAAARRIVEEELQRETLSIVGWRDVPTNEGVLGEIALSSLPRIEQIFVNAPAGWRPRDMERRLFIARRRIEKRLEADKDFYVCSLSNLVNIYKGLCMPADLPRFYLDLADLRLESAICLFHQRFSTNTVPRWPLAQPFRYLAHNGEINTITGNRQWARARTYKFQTPLIPDLHDAAPFVNETGSDSSSMDNMLELLLAGGMDIIRAMRLLVPPAWQNNPDMDPELRAFFDFNSMHMEPWDGPAGIVMSDGRFAACNLDRNGLRPARYVITKDKLITCASEVGIWDYQPDEVVEKGRVGPGELMVIDTRSGRILHSAETDDDLKSRHPYKEWMEKNVRRLVPFEDLPDEEVGSRELDDDTLASYQKQFNYSAEELDSVIRVLGENGQEAVGSMGDDTPFAVLSSQPRIIYDYFRQQFAQVTNPPIDPLREAHVMSLATSIGREMNVFCEAEGQAHRLSFKSPILLYSDFKQLTTMKEEHYRADTLDITFDVTKTTLEATVKELCDKAEKMVRSGTVLLVLSDRNIAKDRLPVPAPMAVGAIQTRLVDQSLRCDANIIVETASARDPHHFAVLLGFGATAIYPYLAYETLGRLVDTHAIAKDYRTVMLNYRNGINKGLYKIMSKMGISTIASYRCSKLFEAVGLHDDVVGLCFQGAVSRIGGASFEDFQQDLLNLSKRAWLARKPISQGGLLKYVHGGEYHAYNPDVVRTLQQAVQSGEYSDYQEYAKLVNERPATTLRDLLAITPGENAVNIADVEPASELFKRFDTAAMSIGALSPEAHEALAEAMNSIGGNSNSGEGGEDPARYGTNKVSRIKQVASGRFGVTPAYLVNADVIQIKVAQGAKPGEGGQLPGDKVTPYIAKLRYSVPGVTLISPPPHHDIYSIEDLAQLIFDLKQVNPKAMISVKLVSEPGVGTIATGVAKAYADLITIAGYDGGTGASPLSSVKYAGCPWELGLVETQQALVANGLRHKIRLQVDGGLKTGVDIIKAAILGAESFGFGTGPMVALGCKYLRICHLNNCATGVATQDDKLRKNHYHGLPFKVTNYFEFIARETRELMAQLGVTRLVDLIGRTDLLKELDGFTAKQQKLALSKLLETAEPHAGKSLYCTENNPPFDNGLLNAQLLQQAKPFVDERQSKTFWFDIRNTDRSVGASLSGYIAQTHGDQGLAADPIKAYFNGTAGQSFGVWNAGGVELYLTGDANDYVGKGMAGGLIAIRPPVGSAFRSHEASIIGNTCLYGATGGRLYAAGRAGERFGVRNSGAITVVEGIGDNGCEYMTGGIVCILGKTGVNFGAGMTGGFAYVLDESGDFRKRVNPELVEVLSVDDLAIHEEHLRGLITEHVQHTGSQRGEEILANWSTFATKFALVKPKSSDVKALLGHRSRSAAELRVQAQ

SEQ ID NO: 24513 - protein, 820 aa, Shigella flexneri 2a str. 2457T
MRVLKFGGTSVANAERFLRVADILESNARQGQVATVLSAPAKITNHLVAMIEKTISGQDALPNISDAERIFAELLTGLAAAQPGFPLAQLKTFVDQEFAQIKHVLHGISLLGQCPDSINAALICRGEKMSIAIMAGVLEARGHNVTVIDPVEKLLAVGHYLESTVDIAESTRRIAASRIPADHMVLMAGFTAGNEKGELVVLGRNGSDYSAAVLAACLRADCCEIWTDVDGVYTCDPRQVPDARLLKSMSYQEAMELSYFGAKVLHPRTITPIAQFQIPCLIKNTGNPQAPGTLIGASRDEDELPVKGISNLNNMAMFSVSGPGMKGMVGMAARVFAAMSRARISVVLITQSSSEYSISFCVPQSDCVRAERAMQEEFYLELKEGLLEPLAVTERLAIISVVGDGMRTLRGISAKFFAALARANINIVAIAQGSSERSISVVVNNDDATTGVRVTHQMLFNTDQVIEVFVIGVGGVGGALLEQLKRQQSWLKNKHIDLRVCGVANSKALLTSVHGLNLENWQEELAQAKEPFNLGRLIRLVKEYHLLNPVIVDCTSSQAVADQYADFLREGFHVVTPNKKANTSSMDYYHQLRYAAEKSRRKFLYDTNVGAGLPVIENLQNLLNAGDELVKFSGILSGSLSYIFGKLDEGMSFSEATTLAREMGYTEPDPRDDLSGMDVARKLLILARETGRELELADIEIEPVLPAEFNAEGDVAAFMANLSQLDDLFAARVAKARDEGKVLRYVGNIDEDGVCRVKIAEVDGNDPLFKVKNGENALAFYSHYYQPLPLVLRGYGAGNDVTAAGVFADLLRTLSWKLGV

SEQ ID NO: 24514 - protein, 457 aa, Shigella flexneri 2a str. 2457T
MESKNKLKRGLSTRHIRFMALGSAIGTGLFYGSADAIKMAGPSVLLAYIIGGIAAYIIMRALGEMSVHNPAASSFSRYAQENLGPLAGYITGWTYCFEILIVAIADVTAFGIYMGVLFPTVPHWIWVLSVVLIICAVNLMSVKVFGELEFWFSFFKVATIIIMIVAGFGIIIWGIGNGGQPTGIHNLWSNGGFFSNGWLGMVMSLQMVMFAYGGIEIIGITAGEAKDPEKSIPRAINSVPMRILVFYVGTLFVIMSIYPWNQVGTAGSPFVLTFQHMGITFAASILNFVVLTASLSAINSDVFGVGRMLHGMAEQGSAPKIFSKTSRRGIPWVTVLVMTTALLFAVYLNYIMPENVFLVIASLATFATVWVWIMILLSQIAFRRRLPPEEVKALKFKVPGGVATTIGGLIFLLFIIGLIGYHPDTRISLYVGFAWIVVLLIGWMFKRRHDRQLAENQ

SEQ ID NO: 24515 - protein, 458 aa, Shigella flexneri 2a str. 2457T
MKNASTVSEDTASNQEPTLHRGLHNRHIQLIALGGAIGTGLFLGIGPAIQMAGPAVLLGYGVAGIIAFLIMRQLGEMVVEEPVSGSFAHFAYKYWGPFAGFLSGWNYWVMFVLVGMAELTAAGIYMQYWFPDVPTWIWAAAFFIIINAVNLVNVRLYGETEFWFALIKVLAIIGMIGFGLWLLFSGYGGEKASIDNLWRYGGFFATGWNGLILSLAVIMFSFGGLELIGITAAEARDPEKSIPKAVNQVVYRILLFYIGSLVVLLALYPWVEVKSNSSPFVMIFHNLDSNVVASALNFVILVASLSVYNSGVYSNSRMLFGLSVQGNAPKFLTRVSRRGVPINSLMLSGAITSLVVLINYLLPQKAFGLLMALVVATLLLNWIMICLAHLRFRAAMRRQGRETQFKALLYPFGNYLCIAFLGMILLLMCTMDDMRLSAILLPVWIVFLFVAFKTLRRK

SEQ ID NO: 24516 - protein, 554 aa, Shigella flexneri 2a str. 2457T
MCSIFGVFDIKTDAVELRKKALELSRLMRHRGPDWSGIYASDNAILAHERLSIVDVNAGAQPLYNQQKNHVLAVNGEIYNHQALRAEYGDRYQFQTGSDCEVILALYQEKGPEFLDDLQGMFAFALYDSEKDAYLIGRDHLGIIPLYMGYDEHGQLYVASEMKSLVPVCRTIKEFPAGSYLWSQDGEIRSYYHRDWFDFDAVKDNVTDKNELRQALEDSVKSHLMSDVPYGVLLSGGLDSSIISAITKKYAARRVEDQERSEAWWPQLHSFAVGLPGSPDLKAAQEVANHLGTVHHEIHFTVQEGLDAIRDVIYHIETYDVTTIRASTPMYLMSRKIKAMGIKMVLSGEGSDEVFGGYLYFHKAPNVKELHEETVRKLLALHMYDCARANKAMSAWGVEARVPFLDKKFLDVAMRINPQDKMCGNGKMEKHILRECFESYLPASVAWRQKEQFSDGVGYSWIDTLKEVAAQQVSDQQLETARFRFPYNTPTSKEAYLYREIFEELFPLPSAAECVPGGPSVACSSAKAIEWDEAFKKMDDPSGRAVGVHQSAYK

SEQ ID NO: 24517 - protein, 243 aa, Shigella flexneri 2a str. 2457T
MKKLVLAALLASFTFGASAAEKINFGVSATYPPFESIGANNEIVGFDIDLAKALCKQMQAECTFTNHAFDSLIPSLKFRKYDAVISGMDITPERSKQVSFTTPYYENSAVVISKKDTYKTFADLKGKRIGMENGTTHQKYIQDQHPEVKTVSYDSYQNAFIDLKNGRIDGVFGDTAVVNEWLKTNPQLGVATEKVTDPQYFGTGLGIAVRPDNKALLEKLNNALAAIKADGTYQKINDQWFPQ

SEQ ID NO: 24518 - protein, 285 aa, Shigella flexneri 2a str. 2457T
MKADNPFDLLLPAAMAKVAEEAGVYKATKHPLKTFYLAITAGVFISIAFVFYITATTGTGTMPFGMAKLVGGICFSLGLILCVVCGADLFTSTVLIVVAKASGRITWCQLAKNWLNVYFGNLVGALLFVLLMWLSGEYMTANGQWGLNVLQTADHKVHHTFIEAVCLGILANLMVCLAVWMSYSGRSLMDKAFIMVLPVAMFVASGFEHSIANMFMIPMGIVIRDFASPEFWTAVGSAPENFSHLTVMNFITDNLIPVTIGNIIGGGLLVGLTYWVIYLRENDHH

SEQ ID NO: 24519 - protein, 66 aa, Shigella flexneri 2a str. 2457T
MTGLVKWFNADKGFGFITPDDGSKDVFVHFTAIQSNEFRTLNENQKVEFSIEQGQRGPAAANVVTL

SEQ ID NO: 24520 - protein, 315 aa, Shigella flexneri 2a str. 2457T
MPDMKLFAGNATPVLAQRIANRLYTSLGDAAVGRFSDGEVSVQINENVRGGDIFIIQSTCAPTNDNLMELVVMVDALRRASAGRITAVIPYFGYARQDRRVRSARVPITAKVVADFLSSVGVDRVLTVDLHAEQIQGFFDVPVDNVFGSPILLEDMLQLNLDNPIVVSPDIGGVVRARAIAKLLNDTDMAIIDKRRPRANVSQVMHIIGDVAGRDCVLVDDMIDTGGTLCKAAEALKERGAKRVFAYATHPIFSGNAANNLRNSVIDEVVVCDTIPLSDEIKSLPNVRTLTLSGMLAEAIRRISNEESISAMFEH

SEQ ID NO: 24521 - protein, 461 aa, Shigella flexneri 2a str. 2457T
MAINSPLNIAAQPGKTRLRKSLKLWQVVMMGLAYLTPMTVFDTFGIVSGISDGHVPASYLLALAGVLFTAISYGKLVRQFPEAGSAYTYAQKSINPHVGFMVGWSSLLDYLFLPMINVLLAKIYLSALFPEVPPWVWVVTFVAILTAANLKSVNLVANFNTLFVLVQISIMVVFIFLVVQGLHKGEGVGTVWSLQPFISENAHLIPIITGATIVCFSFLGFDAVTTLSEETPDAARVIPKAIFLTAVYGGVIFIAASFFMQLFFPDISRFKDPDAALPEIALYVGGKLFQSIFLCTTFVNTLASGLASHASVSRLLYVMGRDNVFPERVFGYVHPKWRTPALNVIMVGIVALSALFFDLVTATALINFGALVAFTFVNLSVFNHFWRRKGMNKSWKDHFHYLLMPLVGALTVGVLWVNLESTSLTLGLVWASLGGAYLWYLIRRYRKVPLYEGDRTPVSET

SEQ ID NO: 24522 - protein, 330 aa, Shigella flexneri 2a str. 2457T
MQSDKVLNLPAGYFGIVLGTIGMGFAWRYASQVWQVSHWLGDGLVILAMIIWGLLTSAFITRLIRFPHSVLAEVRHPVLSSFVSLFPATTMLVAIGFVPWFRPLAVCMFSFGVVVQLAYAAWQTAGLWRGSHPEEATTPGLYLPTVANNFISAMACGALGYTDAGLVFLGAGVFSWLSLEPVILQRLRSSGELPTALRTSLGIQLAPALVACSAWLSVNGGEGDTLAKMLFGYGLLQLLFMLRLMPWYLSQPFNASFWSFSFGVSALATTGLHLGSGSDNGFFHTLAVPLFIFTNFIIAILLIRTFALLMQGKLLVRTERAVLMKAEDKE

SEQ ID NO: 24523 - protein, 515 aa, Shigella flexneri 2a str. 2457T
MEGNIMRIGIPRERLTNETRVAATPKTVEQLLKLGFTVAVESGAGQLASFDDKAFVQAGAEIVEGNSVWQSEIILKVNAPLDDEIALLNPGTTLVSFIWPAQNPELMQKLAERNVTVMAMDSVPRISRAQSLDALSSMANIAGYRAIVEAAHEFGRFFTGQITAAGKVPPAKVMVIGAGVAGLAAIGAANSLGAIVRAFDTRPEVKEQVQSMGAEFLELDFKEEAGSGDGYAKVMSDAFIKAEMELFAAQAKEVDIIVTTALIPGKPAPKLITREMVDSMKAGSVIVDLAAQNGGNCEYIVPGEIFSTENGVKVIGYTDLPGRLPTQSSQLYGTNLVNLLKLLCKEKDGNITVDFDDVVIRGVTVIRAGEITWPAPPIQVSAQPQAAQKAAPEVKTEEKCACSPWRKYALMALAIILFGWLSSVAPKEFLGHFTVFALACVVGYYVVWNVSHALHTPLMSVTNAISGIIVVGALLQIGQGGWVSFLSFIAVLIASINIFGGFTVTQRMLKMFRKN

SEQ ID NO: 24524 - protein, 355 aa, Shigella flexneri 2a str. 2457T
MSQKYLFIDRDGTLISEPPSDFQVDRFDKLAFEPGVIPELLKLQKAGYKLVMITNQDGLGTQSFPQADFDGPHNLMMQIFTSQGVQFDEVLICPHLPADECDCRKPKVKLVEGYLAEQAMDRANSYVIGDRATDIQLAENMGINGLRYDRETLNWPMIGEQLTKRDRYAHVVRNTKETQIDVQVWLDREGGSKINTGVGFFDHMLDQIATHGGFRMEINVKGDLYIDDHHTVEDTGLALGEALKIALGDKRGICRFGFVLPMDECLARCALDISGRPHLEYKAEFTYQRVGDLSTEMIEHFFRSLSYTMGVTLHLKTKGKNDHHRVESLFKAFGRTLRQAIRVEGDTLPSSKGVL

SEQ ID NO: 24525 - protein, 400 aa, Shigella flexneri 2a str. 2457T
MSSKLVLVLNCGSSSLKFAIIDAVNGEEYLSGLAECFHLPEARIKWKMDGNKQEAALGAGAAHSEALNFIVNTILAQKPELSAQLTAIGHRIVHGGEKYTSSVVIDESVIQGIKDAASFAPLHNPAHLIGIEEALKSFPQLKDKNVAVFDTAFHQTMPEESYLYALPYNLYKEHGIRRYGAHGTSHFYVTQEAAKMLNKPVEELNIITCHLGNGGSVSAIRNGKCVDTSMGLTPLEGLVMGTRSGDIDPAIIFHLHDTLGMSVDAINKLLTKESGLLGLTEVTSDCRYVEDNYATKEDAKRAMDVYCHRLAKYIGAYTALMDGRLDAVAFTGGIGENAAMVRELSLGKLGVLGFEVDHERNLAARFGKSGFINKEGTRPAVVIPTNEELVIAQDASRLTA

SEQ ID NO: 24526 - protein, 490 aa, Shigella flexneri 2a str. 2457T
MVPVVALVGRPNVGKSTLFNRLTRTRDALVADFPGLTRDRKYGRAEIEGREFICIDTGGIDGTEDGVETRMAEQSLLAIEEADVVLFMVDARAGLMPADEAIAKHLRSREKPTFLVVNKTDGLDPDQAVVDFYSLGLGEIYPIAASHGRGVLSLLEHVLLPWMEDLAPQEEVDEDAEYWAQFEAEENGEEEEEDDFDPQSLPIKLAIVGRPNVGKSTLTNRILGEERVVVYDMPGTTRDSIYIPMERDGREYVLIDTAGVRKRGKITDAVEKFSVIKTLQAIEDANVVMLVIDAREGISDQDLSLLGFILNSGRSLVIVVNKWDGLSQEVKEQVKETLDFRLGFIDFARVHFISALHGSGVGNLFESVREAYDSSTRRVGTSMLTRIMTMAVEDHQPPLVRGRRVKLKYAHAGGYNPPIVVIHGNQVKDLPDSYKRYLMNYFRKSLDVMGSPIRIQFKEGENPYANKRNTLTPTQMRKRKRLMKHIKKNK

SEQ ID NO: 24527 - protein, 404 aa, Shigella flexneri 2a str. 2457T
MKLPIYLDYSATTPVDPRVAEKMMQFMTMDGTFGNPASRSHRFGWQAEEAVDIARNQIADLVGADPREIVFTSGATESDNLAIKGAANFYQKKGKHIITSKTEHKAVLDTCRQLEREGFEVTYLAPQRNGIIDLKELEAAMRDDTILVSIMHVNNEIGVVQDIAAIGEMCRARGIIYHVDATQSVGKLPIDLSQLKVDLMSFSGHKIYGPKGIGALYVRRKPRVRIEAQMHGGGHERGMRSGTLPVHQIVGMGEAYRIAKEEMATEMERLRGLRNRLWNGIKDIEEVYLNGDLEHGAPNILNVSFNYVEGESLIMALKDLAVSSGSACTSASLEPSYVLRALGLNDELAHSSIRFSLGRFTTEEEIDYTIELVRKSIGRLRDLSPLWEMYKQGVDLNSIEWAHH

SEQ ID NO: 24528 - protein, 393 aa, Shigella flexneri 2a str. 2457T
MKDVVIVGALRTPIGCFRGALAGHSAVELGSLVVKALIERTGVPAYAVDEVILGQVLTAGAGQNPARQSAIKGGLPNSVSAITINDVCGSGLKALHLATQAIQCGEADIVIAGGQENMSRAPHVLTDSRTGEQLGNSQLVDSLVHDGLWDAFNDYHIGVTAENLAREYGISRQLQDAYALSSQQKARAAIDAGRFKDEIVPVMIQSNGQTLVVDTDEQPRTDASAEGLARLNPSFDSLGSVTAGNASSINDGAAAVMMMSEAKARALNLPVLARIRAFASVGVDPALMGIAPVYATRRCLERVGWQLADVDLIEANEAFAAQALSVGKMLEWDERRVNVNGGAIALGHPIGASGCRILVSLVHEMVKRNARKGLATLCIGGGQGVALTIERDE

SEQ ID NO: 24529 - protein, 328 aa, Shigella flexneri 2a str. 2457T
MSHVELQPGFDFQQAGKEVLAIERECLAELDQYINQNFTLACEKMFWCKGKVVVMGMGKSGHIGRKMAATFASTGTPSFFVHPSEAAHGDLGMVTPQDVVIAISNSGESSEITALIPVLKRLHVPLICITGRPESSMARAADVHLCVKVAKEACPLGLAPTSSTTATLVMGDALAVALLKARGFTAEDFALSHPGGALGRKLLLRVNDIMHTGDEIPHVKKTASLRDALLEVTRKNLGMTVICDDNMMIEGIFTDGDLRRVFDMGVDVRQLSIADVMTPGGIRVRPGILAVEALNLMQSRHITSVMVADGDHLLGVLHMHDLLRAGVV

SEQ ID NO: 24530 - protein, 483 aa, Shigella flexneri 2a str. 2457T
MQLEVILPLVAYLVVVFGISVYAMRKRSTGTFLNEYFLGSRSMGGIVLAMTLTATYISASSFIGGPGAAYKYGLGWVLLAMIQLPAVWLSLGILGKKFAILARRYNAVTLNDMLFARYQSRLLVWLASLSLLVAFVGAMTVQFIGGARLLETAAGIPYETGLLIFGISIALYTAFGGFRASVLNDTMQGLVMLIGTVVLLIGVVHAAGGLSNAVQTLQTIDPQLVTPQGADDILSPAFMTSFWVLVCFGVIGLPHTAVRCISYKDSKAVHRGIIIGTIIVAILMFGMHLAGALGRAVIPDLTVPDLVIPTLMVKVLPPFAAGIFLAAPMAAIMSTINAQLLQSSATIIKDLYLNIRPDQMQNETRLKRMSAVITLVLGALLLLAAWKPPEMIIWLNLLAFGGLEAVFLWPLVLGLYWERANAKGALSAMIVGGVLYAVLATLNIQYLGFHPIVPSLLLSLLAFLVGNRFGTSVPQATVLTTDK

SEQ ID NO: 24531 - protein, 305 aa, Shigella flexneri 2a str. 2457T
MQCGISDGLPRFSYADADGKFSGIDVDVCRGVAAAVFGDDTKVKYTPLTAKERFTALQSGEVDLLSRNTTWTSSRDAGMGMAFTGVTYYDGIGFLTHDKAGLKSAKELDGATVCIQAGTDTELNVADYFKANNMKYTPVTFDRSDESAKALESGRCDTLASDQSQLYALRIKLSNPAEWIVLPEVISKEPLGPVVRRGDDEWFSIVRWTLFAMLNAEEMGINSQNVDEKAANPATPDMAHLLGKEGDYGKDLKLDNKWAYNIIKQVSNYSEIFERNVGSESPLKIKRGQNNLWNNGGIQYAPPVR

SEQ ID NO: 24532 - protein, 562 aa, Shigella flexneri 2a str. 2457T
MASSGTTSTRKRFTGAEFIVHFLEQQGIKIVTGIPGGSILPVYDALSQSTQIRHILARHEQGAGFIAQGMARTDGKPAVCMACSGPGATNLVTAIADARLDSIPLICITGQVPASMIGTDAFQEVDTYGISIPITKHNYLVRHIEELPQVMSDAFRIAQSGRPSPVWIDIPKDVQTAVFEIEAQPAVAEKAVAPAFSEESIRDAATMINAAKRPVLYLGGGVINAPARVRELAEKAQLPTTMTLMALGMLPKAHPLSLGMLGMHGVRSTNYILQEADLLIVLGARFDDRAIGKTEQFCPNAKIIHVDIDRAELGKIKQPHVAIQADVDDVLAQLIPRVEAQPRAEWHQLVADLQREFPCPIPKACDPLSHYGLINAVAACVDDNAIITTDVGQHQMWTAQAYPLNRPRQWLTSGGLGTMGFGLPAAIGAALANPDRKVLCFSGDGSLMMNIQEMATASENQLDVKIILMNNEALGLVHQQQSLFYEQGVFAATYPGKINFMQIAAGFGLETCDLNNEADPQAALQEIINRPGPALIHVRIDAEEKVYPMVPPGAANTEMVGE

SEQ ID NO: 24533 - protein, 548 aa, Shigella flexneri 2a str. 2457T
MDSQRNLLVIALLFVSFMIWQAWEQDKNPQPQAQQTTQTTTTAAGSAADQGVPASGQGKLISVKTDVLDLTINTRGGDVEQALLPAYPKELNSTQPFQLLETSPQFIYQAQSGLTGRDGPDNPANGPRPLYNVEKDAYVLAEGQNELQVPMTYTDAAGNTFTKTFVLKRGDYAVNVNYNVQNAGEKPLEISSFGQLKQSITLPPHLDTGSSNFALHTFRGAAYSTPDEKYEKYKFDTIADNENLNISSKGGWVAMLQQYFATAWIPHNDGTNNFYTANLGNGIVAIGYKSQPVLVQPGQTGAMNSTLWVGPEIQDKMAAVAPHLDLTVDYGWLWFISQPLFKLLKWIHSFVGNWGFSIIIITFIVRGIMYPLTKAQYTSMAKMRMLQPKIQAMRERLGDDKQRISQEMMALYKAEKVNPLGGCFPLLIQMPIFLALYYMLMGSVELRQAPFALWIHDLSAQDPYYILPILMGVTMLFIQKMSPTTVTDPMQQKIMTFMPVIFTVFFLWFPSGLVLYYIVSNLVTIIQQQLIYRGLEKRGLHSREKKKS

SEQ ID NO: 24534 - protein, 324 aa, Shigella flexneri 2a str. 2457T
MKPSVILYKALPDDLLQRLQAHFTVHQVANLSPQTVVQNAAIFAEAEGLLGSNENVDAALLEKMPKLRATSTISVGYDNFDVDALTARKILLMHTPTVLTETVADTLMALVLSTARRVVEVAERVKAGEWTASIGPDWYGTDVHHKTLGIVGMGRIGMALAQRVHFGFNMPILYNARRHHKEAEERFNARYCDLDTLLQESDFVCLILPLTDETHHLFGAEQFAKMKSSAIFINAGRGPVVDENALIAALQKGEIHAAGLDVFEQEPLSVDSPLLSMANVVAVPHIGSATHETRYGMAACAVDNLIDALQGKVEKNCVNPHVAD

SEQ ID NO: 24535 - protein, 161 aa, Fagus sylvatica
GWNWETILIGVAFLSFLLFAKFIGKKNKKFFWVPAIAPLISVILSTFFVYITHADKRGVEIVKHIEKGINPPLVNEIYFNGEYLGKGFKIGVVAAMIALTEAIAIGRTFASMKDYQLDGNKEMVALGATNVVGSMTSCYVATGSFSRSAVNYMAGCQTAVS

SEQ ID NO: 24536 - protein, 213 aa, Brassica rapa subsp. pekinensis
MVRGKTQMKRIENATSRQVTFSKRRNGLLKKASELSVLCDAEVSLIIFSPKAKLYEFASSNMQDTIDRYLRHTKDRVSTKPVSEENLQHLKHEAANMMKKIEQLEASKRKLLGEGIGSCSIEELQQIEQQLEKSVKCIRARKTQVFKEQIEQLKQKEKALAAENKKLTEKWGSHEIEVWSNKNQESGKGDEESSPSSEVETELFIGLPCSSRK

SEQ ID NO: 24537 - protein, 213 aa, Cardamine flexuosa
MVRGKTQMKRIENATSRQVTFSKRRNGLLKKAFELSVLCDAEVSLIIFSPKGKLYEFASSNMQDTIDRYLRHTKDRVSSKPVSEENMQYLKFEAANMMKKIEQLEASKRKLLGEGIGTCSIEELQQIEQQLEKSVKCIRARKTQVFKEQIEQLKQKEKALAAENGKLSEKWGSHETEVWSNKNQESGRGDEESSPSSEVETQLFIGLPCSSRK

SEQ ID NO: 24538 - protein, 175 aa, Draba nemorosa var. hebecarpa
MVRGKTQMKRIENATSRQVTFSKRRNGLLKKAFELSVLCDAEVSLIIFSPKGKLYEFASSNMQDTIDRYLRHTKDRISSKPVSEENMQHLKHEAANMMKKIEQLEASKRKLLGEGIGTCSIEELQQIEQQLGKSVKCIRARKTQVFKEQIEQLKQKEKALAAENEKLSEKWGSNE

SEQ ID NO: 24539 - protein, 1035 aa, Pichia pastoris
MSDTSNDEVIKDILKKIERERNIAQGASNIRKKTNNAEIIQNCNTSIREAQQNIEYLEQTLSKLQLEQHNRAARGSNQGELTQQKVLKTSPPTFTFLDLLKYDCPSLGHRIHYMLQLLEFKLQVEKQYREANEKISRLYQVDGDRRSIAAAEGGKVESDMKIHLMKMALKNYHDVHVNIDEVARDTEVMNTFRKKPLSGTLSITINSIRDILHVSSIFSKKLETLVSIRLMTVEKARTKPTKNQRVNDSFQIHVEKGNELSLIVYDKVGDTLTPVAMIWFLLSDIVEEIRKKKVDRELNATGWMSASNLAGRPEQQQPQQLGSHPFDNQQGNLQSLQTHTSHSNGDTDPAQLSASAWFVLAPAGQILLTMGFNKTNDAGQKKEFMGGLGRHGAIRQRKEEVLEQHGHKFVPRQFCNIMMCAMCGDFLPYSGYQCEDCRFLCHKKCYQKVITKCISKSSIDVDPEETKLNHRIPHKFEPFSNHGTKWCCHCGYILPWSRKNVYKCSECGVVCHAQCTHLVPDFCGMSMEMASKILSTIKETTATRQQRQAMSMSSKSSGKSDTHISQKQLPPVPSAAQRLSQSDEAPKTKPIRRPPPPPPPVSNEQRVLPQREEPQVEPERTPNQAIAEAEYALEKQISSTSSSKETDHHHQHHHYHPQQQPQQQVKTVKTAVASDVSPTKVAVKKQEAARRSSERHHGRHRQKYGLDDFRFIAVLGKGNFGKVMLAESIHTGQLCAIKVLKKDFIIKNDEVASTKSEKRVFIIANRGKHPFLLNLHQCFQTENRIYFVMEYVSGGDLMWHAQQRTFSPSRAKFYAAEVLLALQYFHENGVVYRDLKLDNILLTADGHIKLADYGLCKEEMWYGSTTATFCGTPEFMAPEILKEQKYDKAVDWWAFGVLLYQMMLGKSPFKGEDEDEVFNSILTDEPRYPIQMDRESVDILQQLLTKDPYKRLGASEEDAEEIKRHPYFHGINWDDIMQCKVPPPLIPTIKDRHDVSNFDVEFTTEAPKLTPVNSVLSLSMQEQFRGFTYVNDDHT

SEQ ID NO: 24540 - protein, 408 aa, Heliobacillus mobilis
MKGALGMSKKVVLAYSGGLDTSIIIPWLKENYGYEVIAMAADLGQGEELEPLNEKAINTGATKIYIEDVKEEFVTEFIWPTLKAGAVYEGKYLLGTSFARPLIAKRLVEIARKEGAEAIAHGATGKGNDQVRFELTVKALAPDLKIVAPWREWDIRSREDAIDYAQARNIPVPVKKDRPYSMDRNLWHLSHEGADLESPWNEPQNDLFMICTPPEQAPDKPEYVEIEFEKGIPVKLNGEALGPVEMIEKLNAIAAAHGVGICDMVENRLVGMKSRGVYETPAGTVLYAAHRELEYLCLDRATMHYKEMVALRYAELVYDGVWYHPLRKAIDAFVDVTQETVTGLVRMKLFKGSVTPAGAKSPYSLYNEEFSTFGRDEVYNQKDAEGFINLFGLPMKVRALMEQKSGLK

SEQ ID NO: 24541 - protein, 233 aa, Dianthus caryophyllus
MGRGRVELKRIENKINRQVTFAKRRNGLLKKAYELSVLCDAEVALIVFSNRGKLYEFCSTSCMNKTLERYQRCSYGSLETSQPSKETESSYQEYLKLKAKVDVLQRSHRNLLGEDLGELSTKELEQLEHQLDKSLRQIRSIKTQHMLDQLADLQKKEEMLFESNRALKTKLEESCASFRPNWDVRQPGDGFFEPLPLPCNNNLQIGYNEATQDQMNATTSAQNVHGFAQGWML

SEQ ID NO: 24542 - protein, 618 aa, Streptomyces griseus
MARAVGIDLGTTNSVVSVLEGGEPTVITNAEGARTTPSVVAFAKNGEVLVGEVAKRQAVTNVDRTIRSVKRHMGTDWKIDLDGKSFNPQQMSAFILQKLKRDAESYLGEKVTDAVITVPAYFNDSERQATKEAGEIAGLNVLRIVNEPTAAALAYGLDKDDQTILVFDLGGGTFDVSLLEIGDGVVEVKATNGDNHLGGDDWDQRVVDYLVKQFANGHGVDLSKDKMALQRLREAAEKAKIELSSSTETTINLPYITASAEGPLHLDEKLTRSQFQQLTADLLDRCKTPFHNVIKDAGIQLSEIDHVVLVGGSTRMPAVAELVKELTGGQEANKGVNPDEVVAIGASLQAGVLKGEVKDVLLLDVTPLSLGIETKGGIMTKLIERNTTIPTKRSEIFTTAEDNQPSVQIQVYQGEREIAAYNKKLGMFELTGLPPAPRGVPQIEVAFDIDANGIMHVAAKDLGTGKEQKMTVTGGSSLPKDEVNRMREEAEKYAEEDHARREAAESRNQGEQLVYQTEKFLKDNEDKVPADVKTEVETAVGELKEKLKGEDSAEIRTATEKVRGRLPRIWARRCTANAQAEGAAPGADAPGDAQAKADDDVVDAEIVDDEKDTKGGAA

SEQ ID NO: 24543 - protein, 274 aa, Methanothermobacter thermautotrophicus
MGSSFKSPADTAKACSAIAELKEKAPLGKVIVLSFLAGAYIAFGGLLAEVVTGGMAKAGYPAGLVKLVFGAVFPVGLMLVVIAGSELFTGNCMYMPLGILDKRASIMGLIRNWVTSWVFNLVGAVFVAYFLAVATGILTADPWQAGALTVAKTKALGGASFIAAGKVTKSLTWAQAFWRAVGCNWLVCLAVYLAIASDDIIGKIWGIWFPIFAFVAIGFEHSVANMFFIPVGIFLGGVTWSQFFMNNLIPVTLGNIVGGAIFVACLYWYTYLKE

SEQ ID NO: 24544 - protein, 160 aa, Solanum tuberosum
MSDEEHHFESKADAGASKTYPQQAGTIRKSGYIVIKGRPCKVVEVSTSKTGKHGHAKCHFVAIDIFNGKKLEDIVPSSHNCDVPHVNRTDYQLIDISEDGFVSLLTENGNTKDDLRLPTDDALLNQVKGGFEEGKDLVLSVMSAMGEEQICAVKDIGTKS

SEQ ID NO: 24545 - protein, 160 aa, Solanum tuberosum
MSDEEHHFESKADAGASKTYPQQAGTIRKNGYIVIKGRPCKVVEVSTSKTGKHGHAKCHFVAIDIFNGKKLEDIVPSSHNCDVPHVNRTDYQLIDISEDGFVSLLTESGNTKDDLRLPTDESLLKQVKDGFQEGKDLVVSVMSAMGEEQINAIKDIGTKN

SEQ ID NO: 24546 - protein, 159 aa, Solanum tuberosum
MSDEEHQFESKADAGASKTYPQQAGTIRKSGYIVIKGRPCKVVEVSTSKTGKHGHAKCHFVAIDIFTGKKLEDIVPSSHNCDVPHVNRTDYQLIDISEDGFVSLLTDNGNTKDDLRLPTDDSLLSQIKDGFAEGKDLVVSVMSAMGEEQINALKDIGPK

SEQ ID NO: 24547 - protein, 159 aa, Solanum tuberosum
MSDEEHHFESKADAGASKTYPQQAGTIRKSGHIVIKNRPCKVVEVSTSKTGKHGHAKCHFVAIDIFTGKKLEDIVPSSHNCDVPHVNRTDYQLIDISEDGFVSLLTENGNTKDDLRLPTDDTLLAQVKDGFAEGKDLVLSVMSAMGEEQICGIKDIGPK

SEQ ID NO: 24548 - protein, 319 aa, Pseudomonas pseudoalcaligenes
MSAAATMAPVSLRIHAIAYGADDVLLFDLRAPARDGLAPFDAGAHIDLRLPRGITRSYSLLNDPAERHRYVIGVKREPESRGGSAWLHADARVGALIEVDGPSNHFALDESAPHAVFIAGGIGITPLWSMVQRLEHLGTPWTLHYRARSRRGAALLDELAGHGDRVHLSFSDEGAPSLDLAAIVAAAPEGAHFYCCGPVPMLEAFEAACVGLDPARVHLEYFAAKEAPATEGGFVVHLARSGRTIPIAAGCTILDALQAGGVAVPSSCQQGVCGICETAVLAGVPDHRDLVLSDQERAAGRTMMICCSGSKTAELTLDL

SEQ ID NO: 24549 - protein, 385 aa, Nitrosomonas europaea ATCC 19718
MQFNKSEWHERFRASMIIGLPKETKADEYRVGLTPGSVHTLVGRGHRVLVETGAGAGSVISDQDYRAAGAEIVTHAGDAWAAELVVKVKEPTEPEYQYLRKGLLLFTYLHLASNRTLTEKLLATGVSAIAYETVQTASGALPLLTPMSEVAGRMAVQIGATYLLKTQGGRGVLMGGVPGVAPANVVILGAGVVGTNAATVAAGMGAMVTALDINHDRLKALDDRFSGRLQTRYCDTVNVRQAVYEADLVIGAILIPGGRSPWLVTREMLPQMRTGSVIVDVAVDQGGCVETTRPTTHSNPIFEIDGVLHYCVANMPGAVPRTSTFALNNQTASYVATLADNGLAALQNNQALMNGLNTHRGQVTHPAVAEAFGLSYASPLEVLVA

SEQ ID NO: 24550 - protein, 398 aa, Nitrosomonas europaea ATCC 19718
MDLWHICRLVCLMTQIYFDHNATTKVDDAVLDRMLPYFREYYGNASSSHSVGLAARRAIDRAREQVAQAVGVQPAQVIFTSGGSEANNLFIRGVSDSLKPSVLAVSTIEHPCIMRPARGLTRKNGEKWQLHYLAVDAAGRVKVNDAVDVLTATRSAMVSMMLANNETGVIQEVAPVAEVARAQGAWMHTDAVQAFGKIPVNFTELGVHALTLSAHKIYGPKGAAALIIDPRLPVRPLIDGGGHENGLRSGTENVPAIVGFGAACELAMSRMAESSVKTAMLRDRLEHGLLAMGATVFGLNAPRLPNTCYFALPDIEGDTLVVRLDKKGFSVASGAACSSATPGKSHVLEAMNVPPIVARCAVRVSLGMDNTMAEVDSFLAAVKHITDELKNMSALFNV

SEQ ID NO: 24551 - protein, 695 aa, Nitrosomonas europaea ATCC 19718
MHTFFVTSTGFGVGLTSTSLGLVRALEYGGLKAGFYKPVAQQHPGNSKLEYSTELISRTLGLAPPAPLPLATVEHLLGEGQIDDLMEDIVRRFKQASEGYDVMVVEGMVPTRHVSYASRVNTRLASSLDADIILVSSAEDDALQAITDRIEIQAQFFGGAQNPRLLGVILNKIRTDHSDDLFEQLKNHSTLFHQSSFQILGCIPWEDSLNAPRMADVVTQLQAQIVNAGDSEKRRVQDIVLFASAAPNSVTLLRPGVLVVTPGDRDDIVMAASLAVLNGVPLAGLLLCSDFPPDPRVLELCKGALTKGLPVCTVTTNSYDTAANLHRMNREIPLDDHERAERITNFVANHIRQELLVKRCGEPQEQRLSPPAFRYRLVKRAQEADCRIVLPEGYEPRTIQAATICQERGIARCVLLAKPDAVKAVASARGITLPEGLEMIDPEKVRRNYVAAMVELRKHKGLNEPMALAQLEDNVVLGTMMLATGEVDGLVSGAINTTANTIRPALQLIKTAPGFKLVSSVFFMLLPEQVVVYGDCAVNPNPTAEELADIALQSAASAQALGIEPRVAMLSYSTGDSGSGQEVEKVREATRLARLARPDLLIDGPLQYDAAAIASVGRQKAPGSPVAGRATVFIFPDLNTGNTTYKAVQRSANVVSVGPMLQGLRKPVNDLSRGASVEDIVYTIALTAVQAASQR

SEQ ID NO: 24552 - protein, 223 aa, Nitrosomonas europaea ATCC 19718
MRILVVEDDSLVASGIKQGLTNAGYTVDVARNAASAERHLREENFDLAVVDIGLPDIDGLTLVQRLRHRKMCLPVLVLTARGSMEDTIAGLDIGADDYMTKPFRLPELIARIRALIRRAHSITSTELQHDRLVLNTGSYTATLNDQPLLLTRREWTILETLLMASPRVVSKDKLLQNLTGWDKNITPNAIEVHVSRLRAKIAPGGIEIRTVRGIGYRIDQSHS

SEQ ID NO: 24553 - protein, 614 aa, Nitrosomonas europaea ATCC 19718
MDNKKIVLLIIFSTSLLFLWDAWIKEQEKFNNPPAITQADSSAGSTQSRNDDSLPVPGSELTSSQASPDTNGIPASGGNGDSVTPRLLPSGEQIRVVTDKVIAEIDTIGGDLRRLELLQQPSSEDKDTPYALLYSEAARTYIAQSGLVGEGLPNHKTTFRAESDIRNYELSSGEDKIVIRLLAPEAQGVQVIKTYTFHRDSYVIDVGFEVENKGDATVRPFAYFQMLRDGNPPPAKTMMIPTFLGAAVYTEEGKYQKIPFSDLDKNKADYPANANNGWIAMLEHYFLTAWLPQQQTPREFFAKRQSDNLYSAGVIVPAGVIAPGEIAATTMPFYAGPEEQDNLEGLAPGLDLTVDYGWLTVIAKPLFRLLSFYHSWTDNWGVAIILLTMTVKLLFFPLSAAGYRSMAKLRLVTPKLKRIQDQYKGDRQRMHQAMMEFYKEEKINPMGGCFPILVQIPVFIALYWTILAAVELRYAPLALWIDDLSSPDPFYMLPLLMGISMFVQTKLNPTPTDPLQAKIMQIMPVAFSAIFFFFPAGLVLYSLVNNILSIAQQWKITKMYGTAPSKDTPEPPVSKQVNSSENPETTANSPADSPKQPQTPANNPRKMYKRTRKK

SEQ ID NO: 24554 - protein, 520 aa, Nitrosomonas europaea ATCC 19718
MIFWRVKSLDAILATAEKKSLHRSLGVWQLTLLGVGAIIGTGIFVLTAEAAQKAGPGMMIAFVIAGFVCAVAALCYSELSSMVPVSGSAYTYSYAVLGELIAWMVGWALILEYSVAAGAVAVGWSGYFVGLLNNASLGFEIPYVLANGPFAGGIINLPAVVICLLVVGLLIIGTRESAMFNAILVAVKIIALTAFIALALPATDMNHFDPFLPLGTSGVVAAAASIFFAYVGFDAVSTAAEETKDPQRNLPIALISSLLLCTLFYLLVSAGVIGAVGAQPLVDAAGEGLAPGSREMAAQCKSLAAAGQQPVVCSHEALAHVLREIGWEKIGNLLGLAAFLALPSVILMMLFGQTRIFFVMSRDGLLPEVLSRIHPRFKTPYIVTLVTGVGVMAAAAFLPVGKLANISNSGTLFAFLVVALTVMILRVRDKNRPRPFRTPMIWLVGPLAIGGCLILFLFLPMDAKLVFPVWTGIGLIFYFLYGYRRSHVLLGIDTPSGGENLIEPIRSLADGSDETEVKVK

SEQ ID NO: 24555 - protein, 306 aa, Nitrosomonas europaea ATCC 19718
MTTIGFIGLGIMGKPMAGHLIRGGYPVYLNSRSGIPAELTVPGGLACPTPRAVAEQADIIILMLPDTPDVEKVLFAENGVAQGLSANPPRSKIIIDMSTISPIRTRDFVTRIRQLGHEYADAPVSGGDIGAQNATLTIMVGATEAVFAEIEPILALMGKTVTRIGDPGTGQVCKAANQIIAALTLEAVAEALVLASRAGADPNKVRQALLGGFAASRILEVHGERMIKHAFTPGFRVDLHRKDLGIALDCATELGVSLPGTALVQSLYNASIAQGDAQQDSSAIVRILEQLAGHTLDTSTESAHEH

SEQ ID NO: 24556 - protein, 331 aa, Nitrosomonas europaea ATCC 19718
MAKFRPPCSFCARLDHHQFPQLTHLKNMKESEQPSIILNERVIQSSIAAETMSTGGSVASAPVKVSNEPTAVIDSVSPIQMGHDLVEDATKKKKFKVGQILIRGFLCTPFLAYATALCALLVSQGWPTAAAGLLFPAGYVMLSILGLEMATGSFSVMPMGLFAGRFGLGSVIRNWSWTFVANLIGGVFFAYLLWFSLTKGGAVEPPGVLTTLAHLAEKKASYAGYGVNGWFAAIGMGILCNWLVSLAPVFAKGSRSVPGKIMLMWLPLATFFSLGFEHAVVNMFVFPIGILSGADVTISQWWLWNQIPVTIGNMLGAVIFNSTLWYRTHRA

SEQ ID NO: 24557 - protein, 595 aa, Nitrosomonas europaea ATCC 19718
MSNHSSAPLIRLLRYGHAFRGRIWLATLFSILNKLFDLAPPVLIGMAVDIVVNQQSSVFARLGFPEVSTQLWILATITLIVWGFESIWEYLLKLCWRNLAQSIQHTLRLDAYDHVQKLELAYFEARSTGGMMAILNDDINQLERFLDVGANDLIQLLTTVITVGGMFIYLTPGVAWMALLPMPFVVAGSYLFQKRIAPRYMAVREQVSILNSYLSNNLGGIATIKSYTTEPYELRQIERESQIYQEKNQHAIALSAAFVPIIRMVIALGFSAIMIAAGLMAAGGELNVGAYSILVFMTQRLLWPLTRLGETLDLYQRAMASTHRVLDLLQAQPTITDGPQTLPAAQVSGEIIFDDISFNYERRASTLNHLSLTVHAGQTIALVGATGSGKSTIVKLLLRFYEPQQGRILLDGHDIRDLRLHDLRKSIGLVSQDVYLFHGTVYENIAYGSSGAHMEDVIAAARTAEAHDFIMELPDDYQTIVGERGQKLSGGQRQRISIARAVLKNPPVLVLDEATSAVDNETEAAIQRSLERITVGRTTIVIAHRLSTIRNAHCIYVLDKGEVVETGTHEALLARNGLYTNLWQVQTGEKMRAHG

SEQ ID NO: 24558 - protein, 397 aa, Nitrosomonas europaea ATCC 19718
MKLSQRVQAIKPSPTLAVTAKAARLKAEGKNIIGLGAGEPDFDTPLHIKDAAITAIRNGFTKYTAVGGTASLKQAIISKFKRENSLEFMPGEILVSSGGKQSFFNLVLATIDPGDEVIIPAPYWVSYPDIVLIAEGKPVFIDTGIEEKFKISPDQLEKAITPRTRMFVVNSPSNPSGSVYSLEELQALGAVLRKYPDILIATDDMYEHILLSGDGFVNILNACPDLKARTVVLNGVSKAYAMTGWRIGYCGGPAAIITAMENIQSQSTSNPNSIAQVAAEAALNGDQSCMVPMIEAFRERNQFLTNALNSIAGIHCLLSEGAFYAFVDVRQAISRLNTQQILQNSSDIAFCNYVLEKAEVAAVPGSAFGCEGYMRLSFATSMDNLQEAVKRIASLLS

SEQ ID NO: 24559 - protein, 375 aa, Nitrosomonas europaea ATCC 19718
MHIGIPAETRAGETRVAATPETVKKLTAKGLHTVLVQAGAGAGASIPDSAYQEAGATIISTASQLYEQSQIVLKVRGPEADELVLMKKDAVLVGLLTPHHTEEIESVARHGLTAFAMEKLPRISRAQSMDVLSSQANIGGYKAVILAADIYQKFFPMLMTAAGTVKAARVLVLGAGVAGLQAIATAKRLGAVIEAFDVRPAVKEQVESLGAKFVEVPLTDEEKAKAETAGGYATEMSEDYKRRQGELIQERAAAADIIITTALIPGRPAPVLITEETVKAMKPGSVIVDMAVEAGGNCPLSELGKTVVKYGVHLVGVANLPGLVAADASALYARNLLNFLNLILDAQTGELNVNREDEIIDGSLVCMAGEVISKS

SEQ ID NO: 24560 - protein, 761 aa, Nitrosomonas europaea ATCC 19718
MQSNISDLPHTVPPDFPSHWQTWIGPILNEHEQIHAWLETDLDGQLNFSSGLVVITTHRIFSRMANDENWQVWPCRQDMKLTYQDHAGVCSIELSDTHARLACWHCTLGRHQAVDQLITHFSRLITAHDAATELTGSNVADNESASESSPASDQEATATPPSTWTLFRLWRFARPYKWQLLIGFILMLGSTAAALVPPYLTMPLMDNVLIPYQNGHPIDVDLVTFYLSGLLAAAILAWILGWLRTYTLARVSERIGADLRTTTYEHLLSLSQAYFGGKRTGDLMARIGAETDRINLFLSLNLLDFATDVLMITLTVIILVSINPWLALITLLPLPIIAWLIHLVRDRLRVGFEKTNRVWAEVNNVLADTLPGIRVVKAFAQEEREIERFRTVNQRNVEINDRVNKVWALFTPTVTLLTECGLLVVWIFGIWQVSQDHITVGVLTAFLAYIGRFYLRLDSMSRIVSATQKAAAGTKRIFDILDHVSSVPEPVKPVHLPVMKGHIELRNVSFRYGTRRVIQNLDFTIEPGEMIGLVGHSGSGKSTLINLICRFYDVTDGSILIDGVDIRALPIAEYRKHIGLVLQEPFLFFGTIAENIAYGKPGASRKEIIAAARAAHAHEFILRLPYGYDSLVGERGQALSGGERQRISIARALLIDPRILILDEATSSVDTQTEQEIQGALDNLVSGRTTIAIAHRLSTLQEASRLVVLDHGRIVETGNHEELMARQGHYYQLYQSQSRSSDDENRPDTSEKIMDIRGNRV

SEQ ID NO: 24561 - protein, 420 aa, Nitrosomonas europaea ATCC 19718; identical to SEQ ID NO: 371

SEQ ID NO: 24562 - protein, 323 aa, Nitrosomonas europaea ATCC 19718
MSDDDQIRIDGAIARKTPYGMLREPTFSGMLSFMRCNFRKDLTGAELVISGIPLDLAVSYRSGARFGPLGIRQASAEVASLKPYPWGFDPFEHLAVIDSGDCFLDVHNPLTIHGAIVDHARHILASGARMLTFGGDHSISYPLLQAHVEKTGAPLSLIHFDAHCDTWPDDSLASLNHGSMFYKAVREGLIDVKRSVQIGIRTWNDDFMGINILDADRIHRQGTDAVVAEIERIVGTQPAYLTFDIDCLDPAYAPGTGTPVCGGLSTAQALAIIRGLTAINLIGMDIVEVSPPYDHSQITALAAAHIACDLICLLAKRKADGLL

SEQ ID NO: 24563 - protein, 180 aa, Nitrosomonas europaea ATCC 19718
MKLIILDQNGVINYGSETYIRAPGEWKSIPGSLQAIARLTHAGYRVVTATNQSGIGRGLLDMTTFNSINDRMLRAVQQEGGRIDSLFFCPHTQHDKCSCRKPGIGMFKEIRQRYGIELSHVLAVGDSLRDLQAAAKVGAIPVLVLTGKGQVTLAEGNLPAGTQIYPDLSAVADSLEVEAV

SEQ ID NO: 24564 - protein, 343 aa, Nitrosomonas europaea ATCC 19718
MKFIDEVKIQISAGDGGNGVASFRREKFIPRGGPDGGDGGHGGSIYALADHNLNTLIDYRFTPVFRAKRGENGRGSDCYGKGAEDIVLRMPVGTIITNDLTGELVADLEHDQQKVLLAKGGRGGLGNLHFKSSTNRAPRQFTHGEAGEQFELRLELRVLADVGLLGLPNAGKSTLIRAVSAARPKVADYPFTTLYPNLGVVRVDAGHSFVMADIPGLIEGAAEGAGLGHRFLKHLGRTRLLLHVIDVAPFDENVDIVHSARALVDELRKFDETLYRKPRWLVFNKVDMLPEDEQQAVCTRLLQAMNWQERWFAISALTGRGCQALIYAIMGHLQQLQSDSEET

SEQ ID NO: 24565 - protein, 103 aa, Nitrosomonas europaea ATCC 19718
MYAVIKTGGKQYRVEVGNKLKVETLPAEVGSDIQLDQVLMIADGEAISAGAPLLDQAKVSATVVSHGRHDKIRIFKMRRRKHYRKQQGHRQNYTEIQITGISA

SEQ ID NO: 24566 - protein, 67 aa, Nitrosomonas europaea ATCC 19718
MTTGTVKWFNDAKGFGFITPDDGSEDLFAHFSAINMNGFKTLREGQKVSFDVTQGQKGKQASNIQAP

SEQ ID NO: 24567 - protein, 404 aa, Nitrosomonas europaea ATCC 19718
MDKVKKAVLAFSGGLDTSVILKWLQDTYQCEVVTFTADIGQGEEIEPARAKAVQFGIREIFIEDLREEFVRDYVFPMFRANTIYEGEYLLGTSIARPLIAKRQVEIAQQTGADAVSHGATGKGNDQVRFELGYYALQPDIRVIAPWREWDLTSREKLLTYAEKQGIPIEMKQKAGSPYSMDANLLHISYEGRALEDPAAEPEESMWRWTVSPETAPSEPEYLDLEYERGDIVALNGERLSPAAILTRLNQLGGKHGIGRLDLVENRYVGMKSRGCYETPGGTIMLRAHRAIESITLDREVAHLKDDLMPRYAALIYNGYWWSPERKLLQVLIDESQVNVNGRVRVKLYKGNVMVVGRDSRTDSLFDPDIATFEEDGGAYHQADAAGFIKLNALRMRIAKALRRC

SEQ ID NO: 24568 - protein, 263 aa, Nitrosomonas europaea ATCC 19718
MINANSKVLLEVRDLHATVGGAEILKGVNLTVRSGEIHAIMGLNGSGKSTFAKVLAGHPSYEVTQGTVLFDGQDLSVLAPEERAQAGLFLAFQYPVEIPGVANDQFLRLAYNTVQGHRGKEELDPLEFDDFVREKMKLLKMNPDFLDRSVNEGFSGGEKKRNEILQMALLEPRLALLDETDSGLDIDALRIVANGVNQLSSKDNAMILVTHYQRLLDYIVPDYVHVMEAGRIIRTSGKELALALETHGYDWIHANDQATGAQP

SEQ ID NO: 24569 - protein, 400 aa, Nitrosomonas europaea ATCC 19718
MTRQVQDAYIVAATRSPVGKAPRGMFKNVRPDDLLVHVLQAVLKQCEGLDPAAIEDVIVGCAMPEAEQGINVARVALLLAGLPVSVPGVTINRFCASGLQAVAMAADRIRLGEADVIIAGGTESMSMVPMMGNKVAMNPALFKPGSEQVAIAYGMGITAEKVAEQWKVSREEQDAFALESHHRAIRAIEQGEFRDEISPYPVQENRPDLNTHEIQNTAIVRDTDEGPRADTSAEALARLRPVFAAQGSVTAGNSSQMSDGAGAVMVVSEAALQRFNLTPIGRFIGYTVAGVPPEIMGVGPVKAIPKVLEQTGIQQDALDWIELNEAFAAQSLAVINDLGLDRAKVNPLGGAIALGHPLGATGAIRVATLLSGLRRHKLKYGMVTMCIGGGMGAAGVFEAL

SEQ ID NO: 24570 - protein, 311 aa, Nitrosomonas europaea ATCC 19718
MSKIVVSTSSFGFDHNPAIQQLRAQGFTITGNPYQRKLTEDEIITLLGNDTVALLAGVEPLTEHVLTSASALRVIARCGTGMDNVDLEAARRLNIQVSNTPEAPAQAVAELTLGLMLDCLRQINRIDRSVRQGEWPRSQGRLLAARTVGIVGLGHIGRRVAKLCQAFGAQVIAHDPHLQLAPDGVELVALTTLLEQADLVTLHLPYSPAVHYLIDAEAIDRMKPGTILINAARGGLVDETALCAALNTGHLEAAALDSFEQEPYHGPLCECKQAILTSHIGSLARETRQRMEIEAAENLKQGLIEAGLIDE

SEQ ID NO: 24571 - protein, 67 aa, Nitrosomonas europaea ATCC 19718
MATGTVKWFNDSKGFGFITPDDGSEDLFAHFSAINMTGFKTLKEGQKVSFEVTQGPKGKQASNIQSA

SEQ ID NO: 24572 - protein, 582 aa, Nitrosomonas europaea ATCC 19718
MTSNRWQAVLKTAAFLKPYKLSLSFSLAALFLTAGITLSLGQGIRLMVDRGFATQSPDLLTRYVLVFLLLVVLLAIGTFTRYYWVTWLGERVIADIRRKVFAHLIELHPGFFEANRSLEIQSRLTADMTLLQSVVGSSISVALRNLIMLAGGIVWLFITNVKLTVIVMLSIPLVIVPILLFGRRVRVLSRQSQDRVAAVGAYVGEMLGQIKTVQAYNHQAMDKMHFDQYVEDAFHIARQRTLQRAWLIAVVIVLVFGAIGMMLWVGGMDVIEGKISGGELAAFVFYSIIIGSAVGSISEVLGELQRAAGAAERTMELLEEPSQISSPVDPRQLPAVTGNIVFQRVCFAYPSRPEIQVINDFSLAVRPGETLALVGLSGAGKSTLFDLLLRFYDVRSGCISLEGVNIRDLDLSDLRRSFALVSQNPVLFHGSIEQNLRYACPDASDAEIEMAAKAAFIHDFIVSLPQGYQTSLGDTGLGLSGGQKQRLAITRAILADAPVLLLDEATSALDSQSEHWVQQAITRLSTGRTTIVIAHRLSTILTSDRIALIHHGRLEALGTHVELMESSELYARLAIAQFQIPG

SEQ ID NO: 24573 - protein, 644 aa, Nitrosomonas europaea ATCC 19718
MCGITGVFDTRSTSEIDRNLLHRMNETLTHRGPDEGEVYVESGLGLGHRRLSIMDVSSGQQPLFNEDGSVVVVFNGEIYNFQKLVGELTALGHRFRTHCDTEVIVHAWEEWGERCVERFSGMFAFGVWDRNRQTLFMARDRLGIKPFYYTLLDNGLFLFASELKALLVHPDFDKTFDHRAIEDYFAYGYIPEPKTIFKNAFKLNPGHLLSLQRGQQTVQSREYWDIPFTPHGSLSEEEAAEELILRLRNAVDSHLMSEVPLGAFLSGGVDSSAVVAMMGGLMKEPVNTCSIAFSDPAFDESDYARLVAERYQTRHFTEQVQQDDFDLIDRLAALYDEPFADSSAIPTYRVCELARKRVTVALSGDGGDENFAGYRRYRWHMIEERLRSKLPLGLRKPLFGLLGSVYPKADWAPKFLRAKTTFESLARDSVEGYFHSVSILDNKLRMQLFTRDFYRDLQGYRAVEVLRDYADKSPTKDALSLIQYLDMKTYLVGDILTKVDRASMAHSLEVRVPLLDHELVEWVSGLPASMKLRQQEGKYILKRSLEPYLPNEVLYRNKMGFSVPLASWFRGPLRERVRTALLGNTLAGTGIFDMGFIKKMLDQHQSGRRDYSAPIWTLLMFEAFLRNILSMGNMSYTGQDKKVA

SEQ ID NO: 24574 - protein, 457 aa, Nitrosomonas europaea ATCC 19718
MSFENLNLHPAIVKAVLAAGYTAPTPIQQQAIPDLIAGHDVMASAQTGTGKTAAFMLPALHRLATPAQIRGRGPRILVLTPTRELALQVSDAASKYGKFLPRINVVSILGGMPYPLQNKLLSQTVDVLVATPGRLIDHIERGRIDFSRLEMLVLDEADRMLDMGFIQDVERIALSTPATRQTLLFSATLDVAIEKIATRLLKAPKRIQVAAQHTKLDHIEQRMHYVDDLTHKNRLLDHLLRDTTIKQAIVFTATKRDADSLADNLSSQGHKAAAMHGDMTQRERTRTLTGLRQGRLKILVATDVAARGIDIADITHVINFDLPKFAEDYVHRIGRTGRAGASGIAVSFASGKDVAHLKRIERFTGNRFEFHVIPGIEPRTKPRFGRSDDKPGRRPSSSAAAHKTRRSWSDNPNTRTASPGHRGDKDAGFGQPFGRETRKRPFRDSKFNSADRFARTE

SEQ ID NO: 24575 - protein, 316 aa, Nitrosomonas europaea ATCC 19718
MSYDSLMVFTGTANPKLAHDVVKYLNINLGRANVGRFSDGEVMVEILENVRGNDVFVLQSTCTPTNDSLMEILVIVDALKRASASRVTAAIPYFGYARQDRRTRSARVPITAKVVANMLTSVGVDRVLTMDLHSDQIQGFFDIPVDNVYGMPILLGDIWKHDYQNLIVVSPDVGGVVRARHLAKRLECDLAIIDKRRPKPNESKVMNIIGDVRGRTCVIIDDMVDTANTLCEAASALKREGAASVIAYSTHAVLSGKAVERVQTSDLDKLVVTDTIPLREDASKCNRIHQLSVASLLGESMLRISNESSLSSLFIE

SEQ ID NO: 24576 - protein, 102 aa, Nitrosomonas europaea ATCC 19718
MDVVDSIEKQVSSHPVVLYMKGTPQQPQCGFSANAIRILNACGVEDFFAVNVLADPEIRQGIKDYSSWPTIPQLYVNGEFIGGSDIMSEMYQNGELQKLFEK

SEQ ID NO: 24577 - protein, 644 aa, Nitrosomonas europaea ATCC 19718
MAKIIGIDLGTTNSCVAVMEGNKPKVIENAEGARTTPSIVAYAEDNEILVGASAKRQAVTNPENTLFAIKRLIGRRFDEEVVQKDISVTPYKIVRADNNDAWIEARGRKIAPPEVSAQVLIKMKKTAEDYLGEPVTEAVITVPAYFNDSQRQATKDAGRIAGLEVKRIINEPTAAALAFGLDKKEGDRKIAVYDLGGGTFDISIIEIAEVEGEHQFEVLATNGDTFLGGEDFDSRVIEYLVDEFRKESGIDLKKDMLALQRLKDAAEKAKIELSSSQQTEVNLPYITADASGPKHLAVKITRAKLESLVEELIERTAGPCRTALKDAGLSVSDINDVILVGGQTRMPKVQEKVKEIFGKEPRKDVNPDEAVAIGAAIQGGVLKGDVKDVLLLDVTPLSLGIETLGGVMTKLIQKNTTIPTKAQQVFSTADDNQTAVTIHVLQGEREVASGNKSLGQFNLTDIPSAPRGMPQIEVIFDIDANGILHVSAKDKATGKENKIKIQASSGLSEDEIQKMVKDAEAHAEEDKKALDLVNSRNQCDAMIHSVRKSLAEYGDKLEGDEKSRIEAALKEAEEALKSGDKQTIDAKTQALTEASHKLAEKMYAQEQAQAGQQAGAGTASDQSQDKPVEGEVVDAEFEEVKDKK

SEQ ID NO: 24578 - protein, 498 aa, Nitrosomonas europaea ATCC 19718
MSNDVTFAQLGLSSEILHAVNDEGYVNPTPIQAQVIPSILAGKDVMASAQTGTGKTAGFTLPLLYRLQAYANTSVSPARHPVRALIMAPTRELAMQIDESVRKYGKYLALRTAVVFGGINIEPQIAALQAGVEILVATPGRLLDLVEQKAVNFSKTEILVLDEADRMLDMGFLPDIKRVMALLSPQRQSLMFSATFSGEIRKLADSLLKQPVRIEAAVQNTVNESISHVIHWVKPDSKFALLLHLIRQQNLKQALIFVKTKHGASHLAQMLSRHEISAVAIHGDRNQQQRTQALAEFKHGDVQILVATDVAARGIDIEKLSHVINYELPGNPEDYVHRIGRTGRAGSKGKAISLVSEHEKELLANIEKLLNAKLETEQIAGFDAEQFARSLPDRKNRMSAGNSRYGNKPMENGSEKSRSEKHRKLPSSQKYSGSRRGGTQKYSDPIFTQPYVPQANSTQSTTPKQPEIQSLFLTYRQEKKTIPALFTALSKSKAGQEN

SEQ ID NO: 24579 - protein, 497 aa, Nitrosomonas europaea ATCC 19718
MPDSLIDLIIYSVGTILGLIVVGAIVTFFIRDVTQKEHAILRNYPIIGRLRYFFEIQGKYFRQYFFSGDRDEMPFNRATRKWIYKNAKNRGGIIGFGSTYDLREPGAFIFVNAAFPILEEDQLPTPALSIGEGYCDQPFLARSIINISAMSYGAISTPAVRALSRGAAKAGCWLNTGEGGLAPCHLEGECDRIMQIGTAKYGIRDIQGNFSATRAKEIAQSVKAFEIKLSQGAKPGKGGVLPASKVNPEIAAIRGIPPYQDSISPNRHHDIGNIDELLDQVAFIRELTGRPVGVKTAIGGWHFINELCDTILRRGLEYAPDFLTIDGGEGGSGAAPQTLLDHAGLPITEALPRVVDALIESGLKQRIRVVAAGKLVTSAQGAWALCVGADFINTARGFMFALGCIQAMRCHLNTCPTGITTHNPRLQRGLVVEEKYLRVANYALNVNHEINMIAHSCGLKHARELRREHIRIVEKAGISVALNILHPYPETKSTVRN

SEQ ID NO: 24580 - protein, 415 aa, Nitrosomonas europaea ATCC 19718
MAFLVQKYGGTSVGSTERIKQVAHRVAEFRAQGHELVVVVSAMSGETNRLISLAKEIQPNPDPRELDVILSTGEQVTIGLLAMALRELGIKAKSYTGPQVSITTDSAHTKARILKIDEDPIRADLAAGYVIIVAGFQGVDETGDITTLGRGGSDTTAVALAAALKADECQIYTDVNGIYTTDPRVVPEARKLDTITFEEMLEMASLGSKVLQIRSVEFAGKYKVKLRVLSSFEEGEGTLITFEEDNKMEQPIISGIAFNRDESKITVVGVPDHPGIAYQILGPVADANIDVDMIIQNVGHDDTTDFSFTVHRNEYARTMDVLKQQVLPHIGAREVIGGDKIAKVSVIGVGMRSYAGIASKMFRVLAEEGINIRMIATSEIKISVVVDEKYMELAVRVLHKAFDLDQVNNTSTKTC

SEQ ID NO: 24581 - protein, 416 aa, Nitrosomonas europaea ATCC 19718
MIYRVKSKIAQIDNDTRQLFFRRITMNKTILVLNAGSSSLKFALYQTTHESISMICRGKIEIGGNASSRFQVKDSRGELLWQQSLHITHHENAIEVLLQWLETRTDKRQPIVAGHRVVHGGMLFNRPVLIDEQVITRLLQLVPLAPLHQSDSLAGISALRRLRPDLPQVACFDTSFHRTMPDEEQIYALPGHLTDQGIRRYGFHGLSYEYIAHILPNHLGDRATGRIVVAHLGNGASLCALRQGKSIATTMGFTPLEGLPMGTRCGNLDPAVLLYLMREQQMDHDTLTNLLHRQAGLLGVSGISADMRTLLASDDPGAKRAVDLFVWQVCRQLGAMVALLEGIDGLVFTAGIGEHASQIRTRICARLKWLSIELDESANQANAIRISTADSHTPVLVLPTDEETIIARHTLRLIAA

SEQ ID NO: 24582 - protein, 392 aa, Nitrosomonas europaea ATCC 19718
MRNVVVLSGARTAIGDYGGALKDLAPATLAAITVREAITRASVDSDKIGHLVAGHVIPTEAQDMYLARVAALEAGLPQSVAALTLNRVCGSGLQAIISAAQAVMLGDTEVAIAAGAESMSRGGYLLPALRWGQRMQDSTAVDMMVGALTDPFDRVHMGITAENIAERWSITREQQDRFALESHRRAIHAVHNGYFREQIVPVEVSTREGVAMFDTDQHPRDNISMETLGKLRPVFREDGTVTAGNASGINDGAAALVLMEERAAERNHHQPMARLVAYGHAGVNPRYMGIGPVPAVKQALNRAGLDLAEMDVIESNEAFAVQACAVARELNFDPDKVNPNGGAVALGHPIGASGCILAIKAIYELQRINGRYALVTLCIGGGQGIAAIFEKL

SEQ ID NO: 24583 - protein, 296 aa, Nitrosomonas europaea ATCC 19718
MNAPGYKTGYISIVGRPNVGKSTLLNHLIKQKISITSRKAQTTRHRIHGILTDAQSQFIFVDTPGFQTRHRSQLNQVMNRVVLQSMQDVDVVVFVVEAGRFGREDEQVLEQLPRNLPVVLVINKIDLLPDKLQLLPFMQKMADVFEFSAIVPVSALQNRQLSALIEAIRQHLPGNPFLFAEDEITDRSERFLAAELLREKVFRQIGEEVPYSVSVVIEQFTVEGNLRRIHACILVERENQKAIIIGKQGKKLKDMATQARKDMEMLFGSKVYLEVWVKVKSGWADDITALKSLGYE

SEQ ID NO: 24584 - protein, 556 aa, Nitrosomonas europaea ATCC 19718
MNTPSSPAHFIRNIIEEDNRTGKWNGRVETRFPPEPNGYLHIGHAKSICLNFGLALEYGGVCHLRFDDTNPEKEAQEYVDAIIESVRWLGFDWKEHLYYASDYFDQLYEFAEYLITQGKAYVDSLSADEIRRLRGTLTEAGTNSPYRDRSAEENLDLFRRMRAGEFPDGVHVLRARIDMASPNINLRDPVIYRIRHIHHQRTGDKWCIYPMYDYTHCISDALERITHSLCTLEFEDHRPLYDWVLDQLAEKIPCHPQQIEFARLNLTYSVMSKRKLIDLVENKLVDGWNDPRMNTLAGLRRRGYTPESIRLFAERIGISKADSWIDMTILEDCLREDLNERALRRIAVLDPVSLIIDNFPDGHEETCYAPNHPQKPELGTRELRLTKQLYIDREDFMEIPNKGFFRLAPGAEVRLRYAFIIKCTHVVKDDQGKILEIHCVYDPDTKSGTAGAETRKVRGNIHWLSATYAKAVEIRLYDRLFIDSHPDTEGKDFKISLNPNSKEVITGYVEPSLCEAQPEQRFQFERHGYFVADLADTGPGKPIFNRTVSLRNTWKK

SEQ ID NO: 24585 - protein, 408 aa, Nitrosomonas europaea ATCC 19718
MQPIKKSSKLDNVCYDIRGPVLDRARQMEDEGQRVIKLNIGNPASFGFEAPDEILQDVIRNLSAASGYCDSKGLFAARKAIMHYTQEKNIANVQMDDIYIGNGVSELIMLATQALLENGDEILVPSPDYPLWTAAISLAGGVARHYTCDEQSSWLPDPENIKAQVSSRTRAIVIINPNNPTGALYPDDLLREIIEIARRNNLIIFADEIYDKILYDSASHTSVASLADDVLFVTFNGLSKNYRAAGFRSGWVVVSGNKTHARDYITGLNMLASMRLCANVPAQFGIQTALGGYQSIHDLTMPTGRLKRQRDLAWKLLTDIPGVTCFKPQSALYLFPRLDPDYYPVKDDEQFALDLLLEEKVLVVQGTGFNWSQPDHFRIVFLPNSDDLTEAIGRIAKFLDRYRTRHGS

SEQ ID NO: 24586 - protein, 438 aa, Nitrosomonas europaea ATCC 19718
MKPIYVGLLGVGTVGGGTYTVLKRNQQEITRRTGRNIVIRMIADLDQEKVRHLTAGDDVIVTSDALEVARHPEIDIVIELMGGQTIAKQAILEAIAHGKHVITANKALLAIHGNEIFAAAQQRNVIVAFEAAVAGGIPIIKALREGLAANHIEWIAGIINGTSNFILSEMRSKGLDFTTVLAEAQQLGYAEADPTYDIEGIDAAHKITIMSALAFGIPVRFDQTYIEGITKLANDDIRYAEELGYRIKLLGITRRTANGIELRVHPALIPVKRLIANVEGVMNAIIVKGDAVGPTLYYGAGAGAEPTASAVIADLVDVTRLLTSGPEHRVPVLAFLPELLSDTPIVPMEAVETAYYLRLQVLDKPGVLADITRILADNHISINAMIQKEHADKEDKVNIIMLLHKTREKNVNTAIEKIQNLPAMTDKIIRIRLEELGS

SEQ ID NO: 24587 - protein, 863 aa, Nitrosomonas europaea ATCC 19718
MRFDKFTTKFQQALADAQSMALGQDHPYIEPQHLLLALMQQDDGSITSLLQRAGVNAQPLRQALTQSLKLLPKVEGTGGEINVSRDLANLLNLTDKEAQKRGDQYIASEMFLLAALEDKGETGRLLKQYGATRAALEQAVDSVRGGEKVTDAEAEGSREALKKYTLDLTERARSGKLDPVIGRDDEIRRTIQVLQRRTKNNPVLIGEPGVGKTAIVEGLAQRIVNGEVPETLKNKRVLSLDMAALLAGAKYRGEFEERLKAVLKELAQDEGRTIVFIDELHTMVGAGKAEGAMDAGNMLKPALARGELHCVGATTLDEYRKYVEKDAALERRFQKVLVDEPGVEATIAILRGLQEKYELHHGVEITDPAIVAAAELSHRYITDRFLPDKAIDLIDEAAARIRMEQDSKPEVMDKLDRRLIQLKIEREAVRKEKDDASKKRLALLEEEISKLEREYADLDEILKAEKSRAKGSQEIKEELDKLRREEEAARRKGDLQRASELLYGRIPQLEAQLAEQLHHAESAEEAVQPKLFRTQVGAEEIAEVVSRATGIPVSKMMQGEREKLLFMEDKLHERVIGQDEAVRLVSDAIRRSRSGLADPNRPYGSFLFLGPTGVGKTELCKALAGFLFDSEEHLIRVDMSEFMEKHSVARLIGAPPGYVGYEEGGYLTEQVRRKPYSVILLDEVEKAHPDVFNVLLQVLDDGRMTDGQGRTVDFKNTVIVMTSNLGSQMIQQMSGDDYQVIKLAVMGEVKTYFRPEFINRIDEVVVFHALGEAHIKSIARIQLSNLGKRLAQMEMKLVVSEPALTKLAEVGFDPVFGARPLKRAIQAQIENPLAKELLEGHFSAGDTILVEYSNGHMQFTAQR

SEQ ID NO: 24588 - protein, 473 aa, Bacillus anthracis str. Ames
MNQNRIPLYEALIEFKERRRLSFHVPGHKNGLNFPQEVVEEFKDILSIDVTELSGLDDLHSPFECIDEAQQLLADVYGVNKSYFLINGSTVGNLAMILSCCGEHDIVLVQRNCHKSIINGLKLAGANPIFLDPWIDEAYNVPVGIHDEIIKEAIEKYPNAKALILTHPNYYGMGMDLEASIAYAHTHKIPVLVDEAHGAHFCLGGAFPQSALAYGADMVVHSAHKTLPAMTMGSYLHINSRLVKEEKVSTYLSMLQSSSPSYPIMASLDIARFTIARIKEKGHDEIVEFLQEFKEELSTIPQIAILQYPLQDGLKITVQTRCRLSGYELQSVFEKVGIYTEMADPYNVLFILPLQVNKKYMKAIEMIRVALQYYEVKDKTESIRYTYKGEISPLPYTYKQLEEYETKVVPIEEAVGMVAAEMVIPYPPGIPLIMYGERITSGHKEQIMYLEKAGARFQGSRKYMKVYDIESRF

SEQ ID NO: 24589 - protein, 633 aa, Bacillus anthracis str. Ames
MNRIFRNTIFYLLIFLVVIGIVSYFNGSTQKTTSVSYDKFITKLEKGEVRNVQLQPKNGVFEVKGQFNNSSQGEQFVTYAPNTEELQKKINDKAQGAEVKYQPAEETSAWVTFFTSIIPFVIIFILFFFLLNQAQGGGSRVMNFGKSKAKLYNDEKKKVRFRDVAGADEEKQELVEVVEFLKDPRKFAEVGARIPKGVLLVGPPGTGKTLLARAVAGEAGVPFFSISGSDFVEMFVGVGASRVRDLFENAKKNAPCIIFIDEIDAVGRQRGAGLGGGHDEREQTLNQLLVEMDGFGANEGIIIIAATNRPDILDPALLRPGRFDRQITVDRPDVNGREAVLKVHARNKPLDENINLRAIATRTPGFSGADLENLLNEAALVAARQDKKKIDMSDIDEATDRVIAGPAKKSRVISEKERNIVAFHEAGHTVIGVVLDEADVVHKVTIVPRGQAGGYAVMLPKEDRYFMTKPELLDKITGLLGGRVAEEIVFGEVSTGAHNDFQRATGIARRMVTEFGMSDKLGPMQFGSSQGGQVFLGRDFHSEQNYSDAIAHEIDMEMQTIMKECYARAKQILTDNRDKLDLIAKTLLEVETLDAEQINHLCDYGRLPERPTSSADVKVNINMKKDDEESEDK

SEQ ID NO: 24590 - protein, 471 aa, Bacillus anthracis str. Ames
MVTVAYTVLLATSVHTYKKQLDHPIMSDVGKLLPTKIKRVESATDEHSLIKLVQDANVSGEKISIAGMQHSQGGQTYYPHGTMLDMKGYNKILEFDPEKKRITVQSGVTWNDIQKKVNPYGLAVQVMQSQNIFTVGGSLSVNVHGRDIRHEALIDTVESFRLLMADGIVRNVSREENADLFPYVIGGYGLFGVILDVTLKLTNDELYETHTKMLDYKEYTSYFKEKVKKDANVRMHLARISVAPNSFLREMYVTDYTLAQNQNMREEYSELKEETIIAAPKFLLGLSRYSDWGKNTFWDIQRSYFERTDGKYETRNNVMRSDSTFMEYENPNRTEVLQEYFVPIDSFTEYIDDLRNVLNEEEFNLLNITIRYVEKNENAVLSYAKDDMFALVLLINQGRSENEIKKTEGVIQKMIDVTLKHNGSYYLPYYSYPTKEQLKRAYPRIEEFLGKKKEADPKERFVNLFYREYTK

SEQ ID NO: 24591 - protein, 586 aa, Bacillus anthracis str. Ames
MQGIKRYLQFVKPYRWLIAITIMIGLVKFGIPLIMPWLLKYIIDDVIQGAGSLQDKTSQLVTAIGIAFFIFAVLRPPIEYYRQYFAQRIANTILYDLRKHIFGHLQKLSLRYYSNTKTGEIISRVIHDVEQTKDFVITGLMNVWLDTATIAIAIIVMFSMNIKLTFVALLILPIYVVAVKYFFGRLRKLTKERSQALATMQGYLHERIQGMQVTRSFALEEYEGKQFEKRNNEFLTKALTHTSWTARTFSAVNTLTDLGPLLVIGFAAYEVIQGQLTLGTMVAFVGYMDSLYSPLRRLVNSSTTLTQSFASMDRVFELLDEKYDIVNVPSAVQTKKLNGEVIFDNVSFRYNADEKEILHNLSLTMLPGEKVALVGASGGGKSSLASLIPRFYDVSSGAVYVDGIDVRKYDMRNLRSHIGIVLQDNLLFSDTIGANILYGNPKATEEEVIAAAKAAQIHDFIIELPDGYDTVVGERGVKLSGGQRQRVAIARVFLKNPSLLILDEATPALDLENERYIQEALQTLAADRTTIIIAHRLATITHVDTIIYIEDGEIKETGSHEELMKKRGYYYNLYQLQHITETAPLA

SEQ ID NO: 24592 - protein, 1478 aa, Bacillus anthracis str. Ames
MLNKTNTWTPSLFRDYKNAEHDACGIVSVMEKRKIPTKENIDLCIQSLVKMNHRAGFINGEGDGIGIHIDVPKALWNEKLKSSGYNPTIVDHPHFIVGHFFLNKNENIVDLKNHIRTQLNNENFAILFESDNVINSDALGPLGKQEEPLFWQVALIAENEVVNIEQTLFSVTIKIEENEAIHVASLSRDHVVYKVLGAGDTLVAYYNDLQHPLIASTMTLGHNRYSTNTLSNFFRVQPFSILGHNGEINTIAKLRDQAEMIHVPLTAGGSDSQDLNRTLETLLVQYGYSLFEAMDILFPPIINEIKLYETHLQDLYTYIREAWGHFAQGPAGIISRYKDEAVFSVDSLGLRPVWKVEIESSYIFSSEPGVVSPTEYVAEPKPLAPGEKVGLKWNEQDELVLYEHDDYQTQVYNRFKKKVDVTNYHLHLSIPKTKEIPDACDSMQVETKQYVAFGWDREHIQLLEQMATKGVEPIRSLGHDSPLAALDTDRRNIADFIKESVAVVTNPAIDRDREVEHFSTRTILGERPSLLSDAKKPFVVEMLSPIILEGSVAQSIAQELHTITYEQLIELFNTHSSIATISATFSQAETLQCALSRISSEAITAVNDGASLLLIDDADAHLNERLWIDPHLVTAKVHQVLSENKLRRNCSLVIRSGALRSLHDIVTLHGLGADSINPYLLFATVNDGTKTPITNLYNALNKGLEKVISTIGIHELRGYGRLYSSIGLHEEIANILQITNFLGSNDLAFSLESLAEDAQMRADDYNDPKVRIRKSFHIFPRIWKAIGDVAKGNSYDDYRDKLSELEENNPIAIRHLIQTKETKHVIPTEEVSISIQNHDLPFIISSMSFGSQNEIAFRAYAEAADQLNMISLNGEGGEIKDMIGKYPHTRGQQVASGRFGVNAELLNSSNLIEIKIGQGAKPGEGGHLPGSKVTAKIAEARNATIGSDLISPSNNHDIYSIEDLAQMITEIKTANQLAKVAVKVPVVPNIGTIAVGIAKAGADFINISGFDGGTGAARIHALQHVGLPVEIGVKAAHNALLEANMRHNVEIWADGGIRSVNDALKIMLLGANRIGFGTLSMIAIGCTTCRGCHLDTCHVGIATQIESEAQAKEHGLRRFVPRELESAVAGLLHLFTTFGEELKRLTGNLGYTNLQEIVGRSDLLEQVRGKNLLNLCNLLQTIEHPSVIKTEHVLEKQFEPIHSPHSKELVGVGVEQRVMGGLESCYRVRSKLYEDTKLEPLTLKYTNGSIPGNGLGAYNSENLFIHVNGGAQDGIGKTSFGGGIYITKAKGKDGLYYNGSVGKGFGYGAQKGALYVQGNADARAGIRLSGADMIIGGRMTKPLREKEQGNIGAYSNIKGFAFEYMTNGRALVLGDPGPWICAGMTGGVVYLRHDSSLGLTEQALKRRIAKGANVTLQPISKNGVRDVNELLLDYIRVLNEHEQYEEVALLTPLLDDMQQQFFEIIPKKEQADPSISTE

SEQ ID NO: 24593 - protein, 516 aa, Bacillus anthracis str. Ames
MIKKENSVFYISILLTTLFIIWGITPASWIQGYDLQSVTSSLNSFILNKFGWFYSLLMTAMIILATYLAFSKYGSIRLGKDGEKPKYSYPSWLSMLFGAGMGIGLLFYGIAEPISHFTDPLTGKAGTEESAKLAMQYSFFHWGLFPWALYAMVALTIAYFTFRKQKGSTIGATVTPLFNRSKNSPIGKTVDILAVLATVFGIVPSVGIGAQQIAGGLSYLFPSIHNTLLTQLVLIAIFAVLYLTSAQTGLDRGIKYLSNLNFSLTGILLVSFLLLGPTVFIMKYFTSTLGSYIGALPSMGLNLGAFNEKSSSWIENWTIFYWGWWISWSPFVGTFIARISKGRTIKEFIFGVVLVPTLICTFWFAVFGGTAIHMEMFQSLGVADEIAKNGTEIGLFAVISHLPFSTFLTIIGLILVATFFVTSADSATFVVSMQTSNGSLSPKNSLKLIWGLTIAIIAAILLQAGGLNALQIAAIIAALPFSIVVVLMVTSLFKELRKEDINSQTKEVPKKIKKVM

SEQ ID NO: 24594 - protein, 471 aa, Bacillus anthracis str. Ames
MANLFKKKSVTQLLGESKSKTLTKTLGAFDLTMLGIGAIIGTGVLVLTGLVAARDAGPAVIFSFMIAAIVCGFAALCYAEVASTLPVSGSVYTYSYATIGEFIAHLMGWTLLSVYVVTTAAVAGGWTGYFNNLVSGFGLEIPTELLKIPSQGGIVNLPAVVITLVLTWLLSRGTKESKRVNNIMVLIKIGIVILFIAVGAFYVQPENWTPFAPYGISGIFAGGAAVFFAFLGFDALATSAEEVKNPQRDLPIGIIASLVICTIIYVVVCLVMTGMVSYKELDVPEAMAYVLEVVGQDKVAGVIAVGAVIGIMAVIFAYIYATTRVFFAMSRDGLLPKSFAKINKKTEAPVFSTWLTGIGSALIAGFIDLKELSNLANIGALLTFAMVGVSVIILRKTHPNLKRGFMVPLVPTLPLISIACCLFLMFNLPLTTWIYFGIWLAIGVVVYFVYSKKHSHLKDDGSSQDNLEQAN

SEQ ID NO: 24595 - protein, 276 aa, Bacillus anthracis str. Ames
MLKMKKLFTLIVFSCLFVLVVAGCGSKKDEAKETNTKQGGAVEQIKKRGKLVVGVKNDTNLFGLKNPSTGQVEGFDVDVAKALAKKILGDEKKLELKEVTSKTRIPLLKNGDIDAIIATMTITEERKKEVDFSDVYFKAGQSLLVKKGSDIKSIDDVKKGVKVLAVKGSTSTNNIRQKSPEATVLEFENYSEAFTALKAGKGDVLTTDNAILYGMAKQDSNYEVVGKIFTDEPYGIAVQKGADDLTKEINSLIKDMKANGEYDKLYEKWIGQKPEK

SEQ ID NO: 24596 - protein, 475 aa, Bacillus anthracis str. Ames
MQQTTNEKLHRTMKSRHLFMIALGGVIGTGFFLGSGYTINQAGPGGAILSYLVGGFIMYLTMLCLGELTVAMPVSGSFQKYATKFIGPGTGFMIGWLYWLGWAVTVGLELTSIGLMMKRWFPNVDVWVWCLVFGVILYASNAISAKSYAELEFWFSSIKVITILAFVVLGGSALLGFISYDGKEAAPLFSNFVSEGGLFPNGLAAVLLTMITVNFSFQGTELIGIAAGESENPEKTIPRAIRNTVWRIMLFFILTMTILVGLISWKEAGVIESPFVVVFDKIGIPYAADIMNFVIITALLSVANSGLYAATRILWSLANEGMAPTSFQKVNKRGIPITALVVTIAVAGLSLFTSFLAEDTVYMYLLSIAGLSAVSSWIIIALSQLRFRSQYIKGGGKLEDLKYRTPLYPIVPILALITNSIVVISLAFIPEQRMALYCGIPFIIFCYIYYYINKKRQKPMKVEMEKANETNNQTR

SEQ ID NO: 24597 - protein, 215 aa, Bacillus anthracis str. Ames
MKFFIDTANINEIKEANALGVLAGVTTNPSLVAKEGVDFHERIREICNVVEGPVSAEVISLEADKMIEEGKELAKIAPNVVVKVPMTTEGLKAVKAFSDLGIRTNVTLVFSAVQALLAARAGATYVSPFLGRLDDIGHNGMDLIRQIAEIFAIHGIETEIIAASVRHSVHVTDAALNGAHIATIPANVIASLVKHPLTDQGIEKFLADWEKTQEK

SEQ ID NO: 24598 - protein, 437 aa, Bacillus anthracis str. Ames
MLSIKGQKWRNWTGNVEGTPHYTMYPESIQDVVEVIELARKKGKKIRVVGSGHSFTPLVQTEEILVSLDEMKGIVNIDTEKMIAEVWAGTKLHELGKLLEEKGYAQENLGDIDSQSIAGAISTGTHGTGITFGSLSTQVIEITAVLSTGETIVCSEMENVEYWRAFQLSLGMLGIIVRIKLNIIRAYSLVYESEKQSLATVMNKLEEYKKNRHFEFFVFPYSDEVQVKVTNETTGKKSDLKWHKLKVELLENKMFSLLSKGCKWFPSISKGVSRLSAKAVPNTKIIGPSYEVFATSRAVPFYEMEYSVPSKYMQAVVEEISNLIEKKKYKVHFPIECRYVKRDDIWLSPAYGRDSAYIAVHMYKGMKYAAYFGEVEKIFLKYEGRPHWGKMHTLTYEKLQNIYPELHSFLKVRKLLDEAEMFSNPYTEKLFTIMKKS

SEQ ID NO: 24599 - protein, 463 aa, Bacillus anthracis str. Ames
MQHSNKSGTLNRGLKERHITLMSLGSAIGVGLFLGSASAIKLAGPSILLGYMIAGLVIFFIMRALGEMAIEQPVAGSFSKYAYDYLGPLAGYITGWNYWFLWVVTCMAEITAAGIYMQYWFPDIPRWTWALLALLLMSAFNFLSVKVFGELEFWFALIKIVTIICMIVVGAGIILFGFGNGGIATGISNLWSHGGWFPNGFSGLLLSMQMVLFAYLGVELIGVTAGEAQNPKKTLAKAIDNVFWRILLFYVGALFVMMAIYPWNELGEKGSPFVLTFQQIGIAKAAGIINFVVLTAALSSCNGGLFSTGRMLYTLAQQKKAPERFGRLNKNGIPSQGIVATAIVLLIGVILNYLVPAKVFTWLTSISTFGAIWTWGIILVAQIKFRKSLPTQNRQKLSYKMPLYPLSSYFSLAFLVLVLGIMAYSEDTRIALIVGPIWLIGLAIVYYMKGFHKIDETPNSKIS

SEQ ID NO: 24600 - protein, 490 aa, Bacillus anthracis str. Ames
MTALLIIILFLFLALFLGIRAQHGKDMNLEQWSVGGRGFGTIFVFLLMAGEIYTTFTFLGGSGWAYSKGAPTFYILGYGALAYILSYFLLPPVWKYAKEHNLVSQPDFFVKKYKSQALGLIVSIIGVISIIPYLVLQLKGLGIIVSEASYGRVSPVIAVWIGAIVITIYVMVSGIHGSAWTAALKDIMILFIVMFLGIYLPYHYYGGFQPMFEAVEAAKPGFLSLPDEGMSISWFVSTIILTALGFYMWPHTFASAFSAKNEKVFRKNAAIMPLYSLVLLFVFFAGFAAILQVPGLKGGDVDLSLFRLALQTFDPWFIGIIGSAGVLTALVPGSMLVMAASTLLAKNIYRTMVPSASDRQVAKVAKLFVPVVTLVAVLFTFKGGETIGALLLMGYSIVTQLFPALVCSLFPRQTITKQGAIAGMGIGLLVVAYITLSGSTIATMFPGFPQYIKDLNVGIVALLMNMIVMFIVSGFTKNVSIKKDNIIVEK

SEQ ID NO: 24601 - protein, 467 aa, Bacillus anthracis str. Ames
MKSLLRKKALSTESPRQLQRTLTALDLTFLGIGAVIGTGIFVLTGIVAAKHSGPGIMLSFLIAAFTCACVAFCYAEFASSIPVSGSVYTYAYMTVGEVVAFIVGWCLMLEYLLAVAAVAVGWSGYLQSLLQGFNIHLPAIIASAPGVGKGGLIDLPAVCILLIITVLLSFGIRESARINNIMVLIKLAVIIAFIVAGAKYVKPENWTPFIPFGYDGIITGAATVFFAFLGFDAIATAAEETKKPQRDLPIGIIGSLLICTVLYMIVSFVLTGMVPYTQLDVSDPVAFALHFVGEDTIAGLLAVGAMTGMTTVLLVVMYGQVRVSYAMSRDGLLPKALARVNKRVKIPLLNTWITGVVAALLAGLLDLHVLANLVNIGTLTAFTFVCCAVLILRKTHPDLKRGFRTPFVPVLPVVAILCCLYLMINLSKTTWISFAIWLIVGLCFYFFYSRKHSHLATEKTNDEQKKA

SEQ ID NO: 24602 - protein, 562 aa, Bacillus anthracis str. Ames
MSTGVKANDVKTKTKGADLVVDCLIKQGVTHVFGIPGAKIDSVFDVLQERGPELIVCRHEQNAAFMAAAIGRLTGKPGVCLVTSGPGTSNLATGLVTANAESDPVVALAGAVPRTDRLKRTHQSMDNAALFEPITKYSVEVEHPDNVPEALSNAFRSATSTNPGATLVSLPQDVMTAETTVESIGALSKPQLGIAPTHDITYVVEKIKAAKLPVILLGMRASTNEVTKAVRALIADTELPVVETYQAAGAISRELEDHFFGRVGLFRNQPGDILLEEADLVISIGYDPIEYDPKFWNKLGDRTIIHLDDHQADIDHDYQPERELIGDIALTVNSIAERLPKLVLSTKSEAVLERLRAKLSEQAEVPNRDSEGVTHPLQVIRTLRSLISDDTTVTCDIGSHSIWMARCFRSYEPRRLLFSNGMQTLGVALPWAIAATLVEPGKKVVSVSGDGGFLFSAMELETAVRLNSPIVHLVWRDGTYDMVAFQQMMKYGRTSATEFGDVDLVKYAESFGATGLRVNTPDELEGVLKSALAADGPVIIDIPIDYRDNIKLSEKLLPNQLN

SEQ ID NO: 24603 - protein, 247 aa, Bacillus anthracis str. Ames
MSELLRVENVTGGYTKRPVLKDVSFSVNKGELVGLIGLNGAGKSTTIKHIIGLMEPKKGTVTINGKTIRDDMTAYRSSFSFIPETPVLYDELTLEEHLKLTAMAYGVDEKQYEERVGQLLQEFRMKNRLKWFPSHFSKGMKQKVMIMSAFLVEPSLYIVDEPFVGLDPLAIQSLLQMMDQMKKSGAGILMSTHILATAERYCDSFIILHQGEVRAKGTLSELQLQFNMPGATLDDIYIALTKEEDYE

SEQ ID NO: 24604 - protein, 592 aa, Bacillus anthracis str. Ames
MAETLAKRGPDDNKVWIKGNVAFGHKRLIVVDPEGGKQPMTCLKDEANYAICYNGELYNTEDIRKELLRRGYTFKGHSDTEVLLASYIEWKEECVDHLNGIYAFAVWDEQKEQVFIARDRLGVKPLFYKYDSGRLLFGSELKAILAHPDVKAEVTLEGLSEIFGLGPSRTPGHGIYTGIKELRPGHAMTFSKNGLCIWRYWNVESKKHEDSFEETVEKTRFLLQDAITRQLVSDVPLCTFLSGGVDSSAITAIAAKEYEKSGKGQLHTYSVDYEDNDKYFKANAFQPNSDAPFIHLMTETFQTIHHRCVISNEQLAQYLTEAVLVRDLPGMADIDSSLLWFCREIKQDFVVGLSGECADEIFGGYPWFYREDDLQSSAFPWMRSTEAREQLLKKEWRNKLNLQQYVQQRYEESIQEVPILDGESPLEAKRRQLFYLNMVWFMTTLLDRKDRMSMGASLEVRVPFADHRLVEYAWNIPWEMKMYKNREKGLLRKALEGLLPNDILYRKKSPYPKTHNPHYTKAVTVWIQDLLTDKGSILHELFDKEQLSGLIESGGSAFQTPWYGQLMTGPQLLAHLAQIHVWFKEYGVNIKE

SEQ ID NO: 24605 - protein, 492 aa, Bacillus anthracis str. Ames
MSTQMLTLTSISIYMLGMLVIGYFAYKRTSNLTDYMLGGRTLGPAVTALSAGASDMSGWLLMGLPGAMFSVGLSSSWIAIGLTLGAYANWLYVAPRLRTYSEIANNSITIPEFLEHRFQDKSHMLRLVSGLVIMIFFTFYVASGLVSGAVLFENSFGMNYHVGLFIVAGVVVAYTLFGGFLAVSWTDFVQGIIMVIALILVPTVTIMNVNGLGPAFSTIKSIDPTLLDIFKGTSVLGIISLFAWGLGYVGQPHIIVRFMAISSVKEIKSARRIGMSWMIFSVVGAMFTGLIGIAYYSDKGLKLSNPETIFLELGKILFHPLITGFLLAAILAAIMSTISSQLLVTSSAITEDLYRTFFKRSASDKELVFVGRMAVLVIALVGCALAFKQNDTILALVGYAWAGFGSSFGPAILLSLYWKRMTKWGALAGMISGAATVIIWTQFKFLKEFLYEMIPGFTISLLVIVIVSLLTQPSKEIEEQFENFEKQHSDNL

SEQ ID NO: 24606 - protein, 283 aa, Bacillus anthracis str. Ames
MLEQGLDYVVKLAKSKKQILDANPMQYFIRAALAGIYIGFIIVLCFKLGNFFHIADSPATYLAASMFFGIALVLIIYGGAELFTGNTMYFTVATLRKETTISDTLRNWVACYAGNLAGALFFALLFYATGIFEAIDHGHLMNKVVEGKMNTPTMQLFFKAILCNWLVCLACFLPSQVKGDTAKIMIMMLLVFTFFLSGYEHSIANLSLFALSLVSPHPETISFAGAIHNLIPVTIGNIIGGSVFVGMVYHYLTKKVPDVKQEDTELVAAQQEEIIPLQAHMKH

SEQ ID NO: 24607 - protein, 566 aa, Bacillus anthracis str. Ames
MSSKTEEKLATGAQLLLEALEKEGVEVIFGYPGGAVLPLYDALYDCEIPHILTRHEQGAIHAAEGYARITGNPGVVIATSGPGATNVITGLADAMIDSLPLVVFTGQVATTLIGSDAFQEADIMGLTMPVTKHNYQVRKASDLPRIIKEAFHIARTGRPGPVVIDLPKDMVVEQGERCSDVQMDLPGYNPNYEPNLLQINKLLQAIQVANKPLILAGAGVLHAKASKELTSFARKYEIPVVHTLLGLGGFPPDDELFLGMGGMHGSYTANMALYECNLLINIGARFDDRLTGNLAYFAKEATVAHIDIDPAEIGKNVPTEIPIVASAKQALQVLLQPEGRKENHHEWISLLKNRKEKYPFSYKRNSESIKPQYAIDMLYEITKGEAIVTTDVGQHQMWAAQYYPLKTPDKWVTSGGLGTMGFGFPAAIGAQIAKPDELVIAIVGDAGFQMTLQELSVLKEHSLPVKVFILNNEALGMVRQWQDEFYNQRYSHSLLSCQPDFVALANAYGIKGVRIDDPLLAKKQLQHAIELQEPVVIDCRVLQSEKVMPMVAPGKGVHQMEGVEKR

SEQ ID NO: 24608 - protein, 323 aa, Bacillus anthracis str. Ames
MAKILVAGKIPEIGLELLKDHDVEMYDKEELISLDELTERVKDKDALLSLLSTKVTKEVIDAAPSLKIVANYGAGYDNIDYTYAGEKGIAVTNTPKVSTEATAELTFALLLAAARRIPEGDTLCRTTGFNGWAPLFFLGREVHGKTIGIIGLGEIGKAVAKRAKAFGMNILYTGPNRKPEAESELEATYVTLEELLQTADFITINCAYNPKLHHMIDEEQFKMMKKTAYIVNASRGPIMHEAALAHALKTNEIEGAALDVFEFEPKITEELKGLKNVVLAPHVGNATFETRDAMAEMAVRNILAVLKGEEPVTPVNQKVFVTK

SEQ ID NO: 24609 - protein, 540 aa, Bacillus anthracis str. Ames
MSYEKVWANNEKLNQTEKNKLKKDGLEIFNDIPYYAENGFESIPKEEWDAFKWAGLYLQRPKEAGYFMMRVNIPSGIITNAQAEVLASIAEDYGRDVIDITTRQAIQFHWLEIHQIPDIFKRLARVGLSSAGACGDITRNITGNPLAGIDANELFDTTHIVKEVYDYFQHNEEFSNLPRKFKMSISSNIYNAANAEINCVAFTPAKKEIDGEKKVGFHIKVGGGLSARPYLADELDVFVLPEEVKAVAIAIATIFRDFGYREKRHLARLKFLVADWGAEKFKEKLIEYTGPLQSKGESALKGWNAGYFYGVQDQKQEGLKYVGFNVPVGRLHAEEMFEIARIAKQYGNGQIRTCNSQNFIIPNVPPENVTGLLTEPLFEAISANPKSFIGHAVSCTGIEYCNLALVETKERLRKIAEYLDTQIALDVPVRIHMVGCPNSCGQRQIADIGLQGVKMKTKEKGIVEAFEIYVGGTLLDGGAYNQKLKGKIDGEDLPDVLASFISYFKENKLPAETFYDFVGRVGVETLQIALNNVLEEVIAS

SEQ ID NO: 24610 - protein, 402 aa, Bacillus anthracis str. Ames
MLSEKTIEIVKSTVPLLQEKGVEITTRFYEILFSEHPELLNIFNHTNQKKGRQQQALANAVYAAATYIDNLEAIIPVVKQIGHKHRSLGIKAEHYPIVGTCLLRAIKEVAGAPDEVLNAWGEAYGVIADAFISIEAEMYEEAAHKEGGWKDFRNFVVVKKVKESDVITSLYLKPEDGGKVSSFIPGQYVTVQINIEGETYTHNRQYSLSDAPGKEYYRISVKKEKGVDTPDGKVSNYLHDHVKEGDMLPVSAPAGDFVLNMDSTLPVVLISGGVGITPMMSMLNTLIEQDSKRNVCFVHAAINSNTHAMKEHVEAVDNEYEQVKAYTCYSAPTEKDLEMKNFDKEGFVEREWLQTIIPTTEAEFYFCGPVPFMKHINAVLTDLGVKQEHIHYEFFGPAASLQ

SEQ ID NO: 24611 - protein, 127 aa, Bacillus anthracis str. Ames
MFRTMMRAKLHRATVTEANLNYVGSITIDEDLMDAVNIVENEKVQIVNNNNGARLETYVIKGERGSGVVCLNGAAARLVQPGDKVIIICYGLVAEENIHKQEPKIAVLDDDNQIIEMLGAEKAGTIL

SEQ ID NO: 24612 - protein, 395 aa, Bacillus anthracis str. Ames
MKLAKRVAALTPSATLEITAKAQALKAEGHDVIGLGAGEPDFNTPEHIMDAAHKAMLEGHTKYTPTGGLQALKQEIVKKFTRDQGIAYDPSEIIVCNGAKHALYTLFQVLLDEGDEVIIPTPYWVSYPEQVKLAGGKPVYVEGLEGNEYKITAEQLREAITEKTKAVIINSPSNPTGMIYSKEELQQLGEVCLEHDILIVSDEIYEKLIYGGAEYTSIAQLSNALKEQTLIINGVSKSHSMTGWRIGYAAGNKQLIKAMTNLASHSTSNPTSIAQYGAIAAYAGSQEPVETMRQAFEERLNIIYDKLIQIPGFTCIKPQGAFYLFPNVKEAVALSGYETVDEWAKALLEEEKVALVPGTGFGAPNNVRLSYATSLEQVEKALERIHTFMKSKVQA

SEQ ID NO: 24613 - protein, 65 aa, Bacillus anthracis str. Ames
MQGKVKWFNNEKGFGFIEMEGADDVFVHFSAIQGEGYKALEEGQEVSFDITEGNRGPQAANVVKL

SEQ ID NO: 24614 - protein, 607 aa, Bacillus anthracis str. Ames
MCGITGWVDWKEDLSNQHVILKKMANRIQHRGPDAEGFWFSPRAAFAHRRLIVIDPEGGAQPKTFRAGDYTYALTYNGEIYNFRELREQLQKCGHTFETHSDTEVLLHAYLEWKEDCVQHLNGIFAFALWDDQKQRLFLARDHLGVKPLFYTERNDSIIFGSEIKALLAHPSVPAEIDADGINEIFGLGLFRTPGCGVFKHIEEVRAGHSITFTRDKKVVTKYWNLESKVHTDSIEDTSSHILSILQDTVKRQLIADVPLVCMLSGGLDSSGITALAGKEFAAENKTLHTYSVDFVNSAKDFELTFARTGLDAPWVKRVSEHVGTSHHDIIVNAEELANHLFVPLRAKDLPSAGEMETSLYLLFCEMKKDATVALSGESADEVFGGYPWFHQEELLYVDKFPWLTNWKNTSPLLLHEISNQCNLENYIDTRFQEAILEVPTLEGESKKSAKQRQMFYLFLTRFLPFLLDRKDRMSMAVGFEVRVPFCDYRLVEYLWNVPFNIKSIDNIEKGILRRALKPALPDDVRNRRKSAYPTSQDPQYLQTIRHLSLDMCSNKNNPIFSLINHSTLLAIADGSNKEINNFEARSAMEYMLQVNEWLKTYHIHIA

SEQ ID NO: 24615 - protein, 327 aa, Bacillus anthracis str. Ames
MYQSLMTVRETQIAIKEVKTFFEDQLAKRLELFRVSAPLFVTKKSGLNDHLNGVERPIEFDMLHSGEELEIVHSLAKWKRFALHEYGYEAGEGLYTNMNAIRRDEELDATHSIYVDQWDWEKIVQKEWRTVDYLQKTVLTIYGIFKDLEDHLFEKYPFLGKYLPEEIVFVTSQELEDKYPELTPKDREHAIAKEHGAVFIIGIGDALRSGEKHDGRAADYDDWKLNGDILFWHPVLQSSFELSSMGIRVDSKSLDEQLTKTGEDFKREYDFHKGILEDVLPLTIGGGIGQSRMCMYFLRKAHIGEVQSSVWPDDLREACKKENIHLF

SEQ ID NO: 24616 - protein, 409 aa, Bacillus anthracis str. Ames
METIVQKFGGTSVGSVERIQHVANLIIEEYERGHSIVSVVSAMGKSTDELVALANAITENPSKREMDMLLSTGEQVTISLLTMALQAKGYNAISLTGWQAGITTESVHSSARITEINTDRIQSYLTKGTIVIVAGFQGVSEDLEITTLGRGGSDTTAVALAAALNAKKCDIYTDVTGVYTTDPRVVKDAYKLDEISYDEMLELANLGAGVLHPRAVEFAKNHNVILEVRSSMEQENGTIVKGECNMEQQSIVKGIAFEDNITRITVKGLEQGSLSTVFSTLAAAHINVDIIIQSITNEGTVHLSFSIHSNDLRETLAVLEQNQEALHYESVEYENHLAKVSIVGSGMVSNPGVAANMFTTLKEEDIHIKMVSTSEIKVSVVIDRLHLVTGVEALHQSFMAKIEPLVQMS

SEQ ID NO: 24617 - protein, 570 aa, Bacillus anthracis str. Ames
MKQYTTYEKLQCEEVTGAGHVIQCLKKLGVTTVFGYPGGAILPVYDALYESGLKHILTRHEQAAIHAAEGYARASGKVGVVFATSGPGATNLVTGLADAYMDSIPLVVITGQVATPLIGKDGFQEADVVGITVPVTKHNYQVRDVNQLSRIVQEAFYIAESGRPGPVLIDIPKDVQIEKVTSFYNEVIEIPGYKLEPRPDSMKLREVAKAISEAKRPLLYIGGGIIHADGSEELIQFARKKGIPVVSTLMGLGAYPPGDPLFLGMLGMHGTYAANMAVTECDLLLALGVRFDDRVTGKLELFSPHSKKVHIDIDPSEFQKNVAVEYPVVGDVKKALHMLLHMSIHTQTDEWLQKVKTWKEEYQLSYKQKESELKPQHVINLVSELTNGEAIVTTEVGQHQMWAAHFYKAKNPRTFLTSGGLGTMGFGFPAAIGAQLAKEEELVICIAGDASFQMNIQELQTIAENNIPVKVFIINNKFLGMVRQWQEMFYENRLSESKIGSPDFVKVAEAYGVKGLRATNATEAKQVMLEAFAHKGPVVVDFCVEEGENVFPMVPPNKGNNEMIMKRWEE

SEQ ID NO: 24618 - protein, 333 aa, Bacillus anthracis str. Ames
MVNSTSNRIKVYFGVCMLICLSVFPFVNDSRSLLILFTQIFIFAIFAMSFDVLLGYTGIVSFGHCMFFGIGAYGVALLFDRQGVSITNFFIGIVAAIIISAIVSYIIGLLSLRLKSHFYAMLTLAISQLFFVLAEKWRGLTHGGDGFTFGVPDVFRDRFTLYYVTLICLLIIFVLLRLFTKSSIGKVLKAISQNEQRVEALGYKVLHYKIIASVVAGVVAAISGGLFVITLRFVNTTVFSIEMTLNALLMTMIGGVGTLIGAIAGAGIIESLKYYLSELATEYPIFERWTIILGLLYIIVLLVFPKGLVGTVKGLKNMKRNKKEKRAEVEQNV

SEQ ID NO: 24619 - protein, 482 aa, Bacillus anthracis str. Ames
MYNTEMDETLKIINKGLKKTTSPKQIIVVGAGMAGLVSASLLKAAGHEVKIFEANNRVGGRIETVRMEDTGLYLDVGAMRIPYSHTLTMAYIRKFGLQVSPFINRNETDIIYVNGRKTTLKQYEKDPSILKYPVEMNEVGKTSEELLLLAVQPIINFIKKNPEKNWDVVVKDFGRYSTGQFLKYHPYQYNTYFSPVTIEMIGVLLDLEGFLERSFVETLRFLYIMQEESGFCEIVGGNDRLPKSFLPQLEENIIYNQKLMKLHQRDNGVTAFYRNEETFEYSSITGDLVIVTIPFSTMRFVEVEPFDSISHEKWKAIRELHYMPATKIGIQFKSRFWEEQGQLGGRIITDLPIRYAYYPSYGIGEKGPAMMLGSYTWSYDALLWDGLSKGDRIYYTLQNLATILGGQVYDEFLSGISKSWTLDPYALGGFALFQAGQESELQPAIVKPEGRIFFAGDHTTLYHGWIQGAIESGVRVAEEVNE

SEQ ID NO: 24620 - protein, 226 aa, Bacillus anthracis str. Ames
MTLSQDLKELLASVEYKMQIKKGNFIFQEGMEATELYIIHSGKVQISKLSADGQELTLRICSAYDIIGELTLFTDNAKYLLNSKCLEDVEVGVIKREALEKELLQKPALVFEFMKWISEHLRRMQTKFRDLVLHGKKGALYSTLIRMTNSYGVLKENGILIDLPLTNQELANFCATSRESVNRMLNELKKQGTISIHKGKITIHDLQFLKCEIACEDCSASVCSID

SEQ ID NO: 24621 - protein, 633 aa, Bacillus anthracis str. Ames
MCGFVGCLCENPREFSETEKHQFENMNTMIFHRGPDDEGYFRDEHVQFGFRRLSIIDLEAGHQPLTYENDRYVIIFNGEIYNYVELREMLLEKGATFATQSDTEVIIALYAHMKEKCVDYLRGMFAFMIWDREEKKLFGARDHFGIKPLYIAQQGDTTFFASEKKSIMHVMEDKGVNPTSLQHYFTYQYGPEPETLTIDVNKIEPGHYFVKEIGKEMEIHRYWKPYFNASSATKEEHIQAIRDVLYDSVKVHMRSDVPVGSFLSGGIDSSIIASIAREMNPNLLTFSVGFEQRGFSEVDVAKETAEKLGVKNHNVFISAKEFMDEFPKIIWHMDDPLADPAAVPLYFVAKEARKHVTVVLSGEGADELFGGYNIYREPNSLKMFSYIPSPGKSVLKALSGALKEGFKGKSFLERGCTPIEERYYGNAKIFREEEKAELMKYYNESVNYMDITKPLYNEIKDYDDVSKMQYIDMFTWLRGDILLKADKMTMANSLELRVPFLDKEVFDVASKIPTEFKIANGTTKAILREAARGIVPDHVLDRKKLGFPVPIRHWLKDEMHDWAINIINESKTEHLIDKQYVLNLLEAHCADKGDYSRKIWTVLAFMVWHQIYVEHKYDTNKFHEETKRAYSLV

SEQ ID NO: 24622 - protein, 296 aa, Bacillus anthracis str. Ames
MKKIGFIGLGNMGLPMSKNLVKSNYTVYGVDLNKDAEASFEKEGGIIGLSISKLAETCDVIFTSLPSPRAVEAVYFGQEGLFENSHSNVVLIDTSTVSPQLNKQLEEAAKEKKVDFLAAPVSGGVIGAENRTLTFMVGGSKEVYEKTESIMGVLGANIFHVSEQIDSGTTVKLINNLLIGFYTAGVSEALTLAKKNNMDLDKMFDILNVSYGQSRIYERNYKSFIASENYEPGFTVNLLKKDLGFAVDLAKESELHLPVSEMLLNVYEEASEAGYGENDMAALYKKVSEQLISNQK

SEQ ID NO: 24623 - protein, 67 aa, Bacillus anthracis str. Ames
MTLTGKVKWFNSEKGFGFIEVEGGNDVFVHFSAITGDGFKSLDEGQEVSFEVEDGNRGPQAKNVVKL

SEQ ID NO: 24624 - protein, 598 aa, Bacillus anthracis str. Ames
MRNFQGQFANKGGRNAPKIDKAKNTKGTVMRVWNYMGYQKAALTFVIFLVLVTTLLGLLGPYLMGVIIDQYIVPKDVSGTARMCLLLIAIYGVTVLLTWLQTFVMVNVALKTIQKIRQDIFKKIQTLSLRFFDVRSQGDLMSRVTNDIDNLNQALTQSVVQIISSALTFIGVTIAMFALDWILAIVTLITVPIMFFVTKKLVAYSGKNFAKRQKDLGELNGFIEEAITGADVTTLYGKEKETVQKFNKINEQLRVSATKADTFSAFIFPSMNFINNLGMGLVIGTGSVMVLNGMTTVGVIAAFINYSRQFSRPLSQFATLMNTIQAAVAGGERVFEIMDEVPEIKNKKDAFVIQNLHGHVALENVSFGYEENKTILKEVSLKARPGETIALVGPTGSGKTTIINLLTRFYDVQQGQIYIDEKNIKEYDLNSLRSKIGVVLQDTYLFAGSIMDNIRYGRLDASDEEVINAAKAASAHSFIKHLPNQYETKIATEGSNLSQGQKQLLAIARAILADTDILILDEATSNIDTRTELQIQEGLNNLMRGRTSFVIAHRLKTIEKADQILVIKDGSILEKGNHESLMEDRGFYFDLYTSQFKI

SEQ ID NO: 24625 - protein, 561 aa, Bacillus anthracis str. Ames
MIHLKTQYTVSTYLLDRLSELGIEHIFGIPGDYNLAFLDYVLAHKNLEWIGNCNELNAAYAADGYARIKGIAALITTFGVGELSAINGIAGSYAENVPVIKITGTPPTTVMENGELVHHTLGDGKFNHFSKMYREITIAQTNLTPEHAVEEIDRVLRACWNEKRPVHINLPIDVYNKPINRPAEPILHKPILSNKETLDKMLLHAISKINSAKKPIILADFEVDRFHAKEYLYQFVEKTGFPIATLSMGKGIFPEKHPQFIGVYVGDVSPPYLRKRIDESDCIISIGVKLTDTITGGFTQGFTKEQVIEIHPYTVKITDKKYGPVVMKDVLQQLSDVIEHRNEETLDIKPFISESLSMTEEFNPKAHMVTQKRFWQQIYHFLQENDVLLAEQGIPFFGSAAIPLPNNTTYVAQPLWGSIGYTLPALLGTQLANLSRRNILIIGDGSFQLIVQELSTILRQNLNPIIFLINNNGYTVERAIHGQNEPYNDIQMWEYTKLAKVFGTEEKSQTFKVQNETELQEVLTKISIDKNQLTFVEIVMSQGDQPELLAKLGKRFGQQNS

SEQ ID NO: 24626 - protein, 471 aa, Bacillus anthracis str. Ames
MSKLLKKKSVTQLLEHNQSKALTKTLGAFDLIMLGVGSIIGTGVLVLTGLVAARDAGPAVIFSFVLAAIICGFIALCYAEIASTLPASGSVYTYSYATIGEFVAHLVGWSLLLIYIVATAAVAAGWTGYFHNLIKGFGLEIPKALVTIPSHGGIVNLPAVIITLILAWMLSRGTRESKRINNIMVLIKIGMILLFITVGIFYVKPMNWIPIAPYGLSGVFTGGAAILFAFTGFDILATSAEEVKDPKRNLPIGIIASLIICTIIYVMVCLVMTGMVSYKELNVPEAMAYVMEVVGQGKVAGAIAVGAVIGLMAVIFSNMYAATRVFFAMSRDGLLPKSFAKVNKKTGAPTFITGLAGIGSSIIAGFIDLKELVNLVNIGSLVTFALVCLSVIILRKSHPNLKRGFMVPFVPVLPCVAIVCCVFLMLNLPLRTWVYFSIWITIGVVIYFLYSIKHSNLNEETISKLHDKIAR

SEQ ID NO: 24627 - protein, 426 aa, Bacillus anthracis str. Ames
MKRSITWVQGTALTIGAVLGCGILILPSITANSAGPASILSWVIMSILAFPIVATLARLAKMIPSAGGITAYVQMAFNANTSAILGWIMLGSIPIGVPIIALTGAHYIGYVFPISNLSVIGIAALILITSLLLHIKGIELSSKVSVFVICIISLLIVVAVIVSIPYVKLSSFTPFVPNGWSSVGASSVIIFFSFVGWEMITPLAEEFKRPAKDISISLFLGAICISIMYIAISFVTIGTHSYGDKDQIASLSILISKGLGPIGTYITTILAIFISFSAVHANIAGFSRMIYAQAREGHFPSFFAKLHSQFQTPTRVLLVLGGIFSCILIFYGMARPNLEMLLKGPSVIFITSYIFTMLAALKLLKVRDIGWWMAFLSLIICIIVYSFSGWAIFYPVILSVIGWIYIVMNKKYSTITNHSINTSNEN

SEQ ID NO: 24628 - protein, 222 aa, Bacillus anthracis str. Ames
MKFFIDTANLEDIKKAYKLGVLAGVTTNPSLVAKEGIKFEDRIAEICQAVPKVESVSAEVTPDAVTAEEMIAQAEELIKINGGDEKVTIKLPMTLAGLEACRYLTEKGVKTNVTLIFTVNQALLAARAGATYVSPFLGRLDDISEDGVLLVAKIAELFDVHQLDTQIIAASVRHPDHVTRVAMAGAHIATIPYKVIEQLAMHPLTDQGIEKFAADWAKAPKL

SEQ ID NO: 24629 - protein, 388 aa, Bacillus anthracis str. Ames
MLKHIPNAANKSVLFAFYNGVVTTYSYFHYESMKVFEHGSEGLPSNEIMDNIQRVRHTGESNWTAFVLTVKRNGLYEVDYYDDLNPTLESGSALLLLAYTHYHIEPTSDFSKLQLKSAIKAESFKKTLNYACMRNDIETVKEKLINIKLSTLNKKGPDRKTPLHIACLNENIEIVTLLVEAGADLKIKYHGETPFALACRKGNVEIIKYLISQGENANEIMVGKVTPLHLISSSGNQEIVHYILERITNINAVTNRKRSALHYAVEDNNLEAAKVLIDNGIDMELLEEYKRSALSLACDRNKPEMAGLLLENGANIHSTGQGKVTPLHSACERGFIEVVRVLLQHQPNLHAKATLYSMPRNENLKETPIETAKRLGYDEIVDLLSSKL

SEQ ID NO: 24630 - protein, 479 aa, Bacillus anthracis str. Ames
MNWYVIIPMIISFIVVFLIGVYASRRVQATAPNKFLQEYFLGGRELGGLLLAMTMIATYGSASSFIGGPGIAYNMGLGWVLLSAIQVVTGYIVLTVIGKKFAIIARKMEAITLIDYLKGRYNNKAVVILSAVCIIIFLFSATVAQWVGGGRLIESLTGLSYTTALFLFTFSVLVYVLIGGFRAVALSDTLLGIIMLVGTTIILIATVIAGGGIEKIMQELVQINPNLITPFGADGSLTKSYVTSFWILIGIGVVGLPQISVRAMSYKNSKAMHQALIIGTIVVGTIMIGMHLTGVFARVVLPGIAVPDKVMPLLAMEVLPPWLAGVFLAAPMAAIMSTVNSLLLLVSSSIIKDIYVNYINKDAADSTIRKGSLWITAIVGLLVYAAAIKPPDFLIWLNLFSFGGLEAAFIWPIVLGLYWRKGNATGALASILVGVSSYMCIHLFYPNPFGIHTVVFPICFAFIAYILGSMVAVKKNSIG

SEQ ID NO: 24631 - protein, 259 aa, Bacillus anthracis str. Ames
MSFHKPEQIAELVIEAGVQKVSQTLPAMLILGFLGGAFISLGFLLNIRVLGNLPERWGSLVNVLGGAVFPVGLMLVVLAGGELITGNMMSMSMALYAKKITFVSVLNNWIWITFMNFVGAIFVAYCFGHLGGLTEGDYLNKTVAIAEGKLHESFGRTLILAIGCNWLVCLALWLAYGTSDFVGKIIGIWIPIMAFVVIGFQQVVANMFVISAVIFAGHLTWMDLARNFVPVFIGNVIGGAGFVGFAYYACYQKQHSNMK

SEQ ID NO: 24632 - protein, 492 aa, Bacillus anthracis str. Ames
MKIEIMVSLAIYMAGMLYIGYWSYKKTSDLSDYMLGGRGLGPAVTALSAGASDMSGWMLMGLPGAMYATGLSSVWIAIGLLIGAYANYLILAPRLRTYTEVANDSITIPDFLENRFKDRTKILRFVSAIVILVFFTFYASAGLVSGGRLFENSFNLDYKIGLFVTVGVVVAYTLFGGFLAVSWTDFVQGCIMFIALVLVPIVAFTDVGGVTETFNTIKQVDASHLDMFKGTTILGIISFLAWGLGYFGQPHIIVRFMAITSIKDLKTSRRIGIGWMTISIIGAMLTGLVGIAYYAKNNATLQDPEMVFVTFSNILFHPYITGFLLSAILASIMSSISSQLLVISSAVTEDFYKTFFRRKASDKELVFIGRLSVLVVAMIAVVLAYHPSDTILTLVGYAWAGFGSAFGPAILLSLYWKRTNKWGVLAGMIVGALVVITWVQIPSLKASMYEMVPGFFCSLLAVIIVSLVTKEPVKAIHREFNEMEAVLEEETK

SEQ ID NO: 24633 - protein, 522 aa, Bacillus anthracis str. Ames
MSETLLVIISILLLLLLLLIVFFIITFFIKKRTHHSILKLHPYLGRMRYLLEKIGPEFRQYWFDHDTDGKPFSRYDFQSVMFLAKYRSEILGFGSKRDFEASGYYIANTLFPVLTEELSVNVTPEREGKKYVIHKEGLFSRREKLTADTTNLWLYEEDDAIIIGENRKYPWKLYGMFGASATSYGSIGENYILASGFGAKMAGGSWINTGEGGVIPEHLHTGANIVAQIGPGLFGYRDEDGNFSMEKFMGKAKESNIKAFELKFGQGAKIRGGHLEGQKVNEKIAFVRNVREGETINSPNRFSFLNNAAETLYFIQQLQENGGKPVGMKIVIGQQEPLENLFKTMKELNIYPDFITIDGSEGGSGATYKSMADSMGMPLIPALLTFIDTANHYDIRDKFKVFAAGKLITPDKVAIALAIGADAVNSARGFMMASGCIMALQCNSGQCPSGVATTNPHYQKALDPYEKKWRVMNYIVSMRYSLFSLAAAAGVKSPRHLKRDHIVFKDEMGRVVPLSELFPTSK

SEQ ID NO: 24634 - protein, 323 aa, Bacillus anthracis str. Ames
MEHGHYLKKNAKFIDREVTKWSEMIKDWEEGVEIFGAALIGAPLSKPSISHSGASFAPKTIRSMLDAYSTYAITEEHDMKESVLYDCGDITMHVTDIKESHNRIAKTVGHVTKVNPNMIPIVLGGDHSISFPSITGFANSKGKVGIIQFDAHHDLRNLDDGGPSNGTPFRSLLENGVITGKQLVQIGIRNFSNARAYHEYAKEHGVTVYTMKDVREREIKDIMTESIEVLRRQGVTSIYISLDMDVLDQAFAPGCPAIGPGGMDSTTLLDAIEFLGKEPLVQGMDIVEIDPTLDFRDMTSRVAAQVIMSFLLARETVSKQVSI

SEQ ID NO: 24635 - protein, 271 aa, Bacillus anthracis str. Ames
MSVFTPEEITELAANSGRKKAHLSLLPMLILGFFGGAFIALGYLLDIHVIGTMPKAWGSFTSFLGAAVFPIGLILVILAGGELVTGNMMTVSMAWLHKKIDLFHFIRNLVIVTFSNFIGAVFVAYFFGHIVGLAEGAFLAKTVSVAQAKLQDTPLQAFISAIGCNWLVCLAVWLSMGSKEFIGKIIGIWFPVMTFVAIGFQHVVANMFVIPAAIFAGHLTWIEYFPNFIFVFFGNLVGGMLFVALPYFISYKKKLPSKEEQTALKKKSVSA

SEQ ID NO: 24636 - protein, 410 aa, Bacillus anthracis str. Ames
MKIIVQKFGGTSVRDENGRKHALHHIKKSLDAGYKVVTVVSAMGRKGEPYATDTLLSLVNQEESHISNREQDLLLSCGELISAIVFSNMLNENGIKAAALNGAQAGFVTNDDFTNAKIIEMNCDRIHEELENVDVIVVTGFQGQTKKGDTTTLGRGGSDTSASALGVALHAEYIDIFTDVEGVMTADPRIVKDARHLQTVTYNEICNMAYQGAKVVHPRAVEIAMHAKVPLRVRSTYSDSEGTLIAAYDGATKGQDVEERPVTGIAHVSNVTQIKVLAKETAYDIQQHVFKEMANEGISVDLINISPTGVAYTVNDNVSARAVEVLKQLGYEPIVTEHCAKVSIVGAGMAGIPGVTAKIVTALAEKGIQILQSADSHTTIWVLVKETDLVEAVNALHSAFELSKEKQLEQ

SEQ ID NO: 24637 - protein, 493 aa, Bacillus anthracis str. Ames
MYRLSQYETPLFTALVEHSKRNPIQFHIPGHKKGQGMDPEFREFIGHNALAIDLINIAPLDDLHHPKGMIKEAQDLAAAAFGADHTFFSIQGTSGAIMTMVMSVCGPGDKILVPRNVHKSVMSAIIFSGAKPIFMHPEIDPKLGISHGITIQSVKKALEEHSDAKGLLVINPTYFGFAADLEQIVQLAHSYDIPVLVDEAHGVHIHFHDELPMSAMQAGADMAATSVHKLGGSLTQSSILNVKEGLVNVKHVQSIISMLTTTSTSYILLASLDVARKRLATEGKALIEQTIQLAEQVRNAINDIEHLYCPGKEMLGTDATFNYDPTKIIVSVKDLGITGHQAEVWLREQYNIEVELSDLYNILCLVTFGDTESETNTLIAALQDLSAIFKNKADKGVRIQVEIPEIPVLALSPRDAFYSETEVIPFENAAGRIIADFVMVYPPGIPIFTPGEIITQDNLEYIRKNLEAGLPVQGPEDMTLQTLRVIKEYKPIS

SEQ ID NO: 24638 - protein, 387 aa, Bacillus anthracis str. Ames
MEQFINPRVKDIQISGIRQFSNMIQNYDNLISLTIGQSDFPTPSLVKEAAKRAITENYTSYTHNAGLLELRKAACNFVKDNYDLHYSPETETIVTIGASEAIDVAFRTILEPGTEVILPAPIYPGYEPIIRLCGATPIFIDVRETGFRLTAEALENAITEKTRCVVLPYPSNPTGVTLSKKELQDIADVLKDKNIFVLSDEIYSELVYEQTHTSIAHFPEMREKTIVINGLSKSHSMTGWRIGLLFAPSYLAGHILKVHQYNVTCATSIAQYAAIEALTAAKDAPKMMRHQYKKRRDYVYNRLIQMGLTVEKPTGAFYLFPYVGHLTSSSFDFALDLVKEAGLAVVPGTAFSEYGEGYLRLSYAYSIETLKEGCDRLEAFLQQKAKS

SEQ ID NO: 24639 - protein, 391 aa, Bacillus anthracis str. Ames
MHNVVITAAVRSPIGTFGGALKNVTPVELAVPVLQEAVKRGGVEPHEVDEVILGHCIQRTDEANTARTAALAAGFPDTVTGYTIQRQCSSGMQAIMSAAMQIQLGVSEVVVAGGVEAMSSSPYALKQHRWGQRLQHGEIRDTVWEVLEDPIHHIMMGETAENLVEQYEITREEQDEVALRSHTLALKAIESGYFDDQIVPITIKERRKEVVFSKDEHPRADITAEKLAGLKPAFRKDGSVTAGNASGLNDGSAVLVLMSEEKAKEKGLQPLARIVGYSVAGVDPKIMGIGPAPAIRKGLEKVDWSLEDADLLEINEAFAAQYLAVEKELGLDREKVNVNGSGVGLGHPIGCTGARITVSLIHELKRRGLEKGIASLCVGGGIGVALFIEAL

SEQ ID NO: 24640 - protein, 367 aa, Bacillus anthracis str. Ames
MSVNRILVINPGSTSTKIGVFDNERPVLEETIRHDEEQIGKYKRIIDQYEFRKETILEVLHSHGINISKLNAVCGRGGLLRPIEGGTYTVNDAMLEDLKNGFSGHHASNLGGILAYEIASGLNIPAFIVDPVVVDEMEPIARISGIAGMERKSIFHALNQKAVARKVAEELNHKYEDLNLLVTHMGGGITVGAHKKGKVIDVNNGLNGEGPFSPERAGTVPVGQLVEMCFSGEYYRDEMVKKLVGQGGLVSLIGTNDAIKVEQMVEKGDPEATLIYKAMAYQVAKEIGGASAVLHGKIDAIVLTGGLAYSKILVDEIKERVDWIADVIVHPGEDELQALAEGALRVLREEEAPKEYIVREKETVARG

SEQ ID NO: 24641 - protein, 301 aa, Bacillus anthracis str. Ames
MNRKGYKSGFVSIIGRPNVGKSTFLNRIIGQKIAIMSDKPQTTRNKIQGVYTENDSQVIFIDTPGIHKPKHKLGDFMVKMAQTTLKEVDIVLFMVNAVEGFGRGEEFIIEKLKETKQPVFLVINKIDQVHPEQLLELIDQYRKLHDFAEIVPISALDGNNAEALIGTIKKYLPEGPQYYPDNQVTDHPERFIIAELIREKVLHLTREEVPHSVAVVIDAIQKREGGAVYINATIVVERPSQKGIIIGKQGKMLKEVGKRARFDIEALLGSKVFLEVWVKVQKDWRNKMSQLRDLGFREDEY

SEQ ID NO: 24642 - protein, 611 aa, Bacillus anthracis str. Ames
MSKIIGIDLGTTNSCVAVMEGGEPKVIPNPEGNRTTPSVVAFKNEERQVGEVAKRQAITNPNTIMSVKRHMGTDYKVEVEGKDYTPQEISAIILQNLKASAEAYLGETVTKAVITVPAYFNDAERQATKDAGRIAGLEVERIINEPTAAALAYGLEKQDEEQKILVYDLGGGTFDVSILELADGTFEVISTAGDNRLGGDDFDQVIIDHLVAEFKKENNIDLSQDKMALQRLKDAAEKAKKDLSGVTQTQISLPFISAGAAGPLHLELTLTRAKFEELSAGLVERTLEPTRRALKDAGFAPSELDKVILVGGSTRIPAVQEAIKRETGKEPYKGVNPDEVVALGAAVQGGVLTGDVEGVLLLDVTPLSLGIETMGGVFTKLIERNTTIPTSKSQVFSTAADNQPAVDIHVLQGERPMSADNKTLGRFQLTDLPPAPRGIPQIEVTFDIDANGIVNVRAKDLGTSKEQAITIQSSSGLSDEEVERMVQEAEANADADQKRKEEVELRNEADQLVFQTDKVVKDLEGKVDAAEVAKATEAKEALQAAIEKNELEEIRAKKDALQEIVQQLTVKLYEQAQAAAGQAEGAEGAQDAGAKKDNVVDAEFEEVKEDK

SEQ ID NO: 24643 - protein, 368 aa, Bacillus anthracis str. Ames
MTETIKCIGCGVEIQTEDKNEVGYAPASSLEKEQVICQRCFRLKHYNEIQDVSLTDDDFLRILNGIGKSDALVVKIVDIFDFNGSWLPGLHRFVGNNKVLLVGNKADLIPKSVKHDKVKHWMRYSAKQLGLKPEDVFLISAAKGQGIAELADAIEYYRGGKDVYVVGCTNVGKSTFINRMIKEFSDETENVITTSHFPGTTLDLIDIPLDEESSLYDTPGIINHHQMAHYVGKQSLKLITPTKEIKPMVFQLNEEQTLFFSGLARFDYVSGGRRAFTCHFSNRLTIHRTKLEKADELYKNHAGDLLSPPTPEELENMPELVKYEFNIREPKTDVVFSGLGWVTVNEPGAKIVAHVPKGVSVSLRKSLI

SEQ ID NO: 24644 - protein, 381 aa, Bacillus anthracis str. Ames
MERIYLDHAATSPTHLEVVEKMIPYMTETFGNPSSIHFYGRQTRHAVDEARRACARSIHANPNEIIFTSGGTEADNLALIGVARANRHKGNHIITTQIEHHAILHTCELLEREGFEVTYLPVDETGRVQVSDIQKALTEETILVSVMFGNNEVGTMQPIAEIGKLLKEHQAYFHTDAVQAYGLVEINVKEFGIDLLSISAHKINGPKGVGFLYAGTNVKFEPLLIGGEQERKRRAGTENVPSIVGLQHAILLAEKTREQKNAQYEEFKDIMVSVFQNEDITFEVNGNLEYRLPHVLNISFTGMNIEPFLVNLDLAGIAVSSGSACTAGSIDPSHVLVAMFGKDSDQIRSSVRFSFGLGNTKEQIEKAAYETVKIVKRLTQN

SEQ ID NO: 24645 - protein, 378 aa, Bacillus anthracis str. Ames
MIYLDYAATTPMSVEALQTYTKAASQYFGNEQSLHDIGGTASSLLQVCRKTFADMIGGKEQGVFFTSGGSESNYLAIQSLLNAQNKKHIITTPMEHASIRSYFQSLKSQGYTITEIPVDKSGLIRLVDLETAITEDTVLASIQHGNSEIGTVQNIAEIGALLKKYNVLFHSDCVQTFGKLPIHVFEMGIDSLSVSAHKIYGPKGVGACYINPQVRWTQVFPETSHEKGFRPGTVNVPGIASFLTAAENILKNQQEESLRFKELRSYFLEQIQTLPLEIEVEGHSTSCLPHIIGVTIKGIEGQYTMLECNRRGIAISTGSACQVGKQEPSKTMLAIGKTYEEAKQYVRFSFGQQTTKDQIDTTIHALHTIGNQFYRGVK

SEQ ID NO: 24646 - protein, 428 aa, Bacillus anthracis str. Ames
MFIDQVKIYVKGGDGGNGMVAYRREKYVPKGGPAGGDGGKGADVVFIVEEGLRTLMDFRYQRHFKADRGQHGMSKGQHGRKSEDLLVKVPPGTVVKDEKTGQILADLVTHGQTAVIAKGGRGGRGNSRFATATNPAPEIAENGEPGQERDVILELKVLADVGLVGFPSVGKSTLLSVVSSARPKIAEYHFTTIVPNLGVVETGDNRSFVMADLPGLIEGAHAGVGLGHQFLRHIERTRVIVHVIDMSGLEGRDPYEDYVTINNELKEYNLRLTERPQVVVANKMDMPDAEENLQAFKEKVGDEVKIFPISAVTKQGVRDLLFEVANLIETTPEFPIHEVVDESDTSVMYKFETEGVKFDITRESDGTFVISGYDIEKTFKMTDFSRDESVRRFARQMRGMGIDEALRARGAKDGDIVKILEYEFEFID

SEQ ID NO: 24647 - protein, 377 aa, Bacillus anthracis str. Ames
MRIGIPTEIKNNENRVAMTPAGAVHLVQNGHEVFVQKGAGLGSGFTDEEYVQAGAKLVETAEEAWNQDMVMKVKEPVASEYGYFREGLILFTYLHLAPEPELTKALIDNKVVSIAYETVQLDNRSLPLLAPMSEVAGRMSAQIGAQFLEKNKGGKGILLAGVPGVKRGKVTIIGGGQAGTNAAKIAVGLGADVTIIDLSAERLRQLDDIFGNQVKTLMSNPYNIAEAVKESDLVIGAVLIPGAKAPKLVTEEMIQSMEPGSVVVDIAIDQGGIFETTDRITTHDNPTYEKHGVVHYAVANMPGAVPRTSTLALTNVTVPYAVQIANKGYKDACLGNTALLKGINTLDGYVTFEAVAEAHGLQYADAKELLEKAPALS

SEQ ID NO: 24648 - protein, 401 aa, Bacillus anthracis str. Ames
MEKKKVVLAYSGGLDTSVAIKWLQEKNYDIIALCLDLGEGKDLAFVKEKALSVGAIKSYMIDVQEEFANEYALMAMQAHTLYEGKYPLVSALSRPLIAKKLVEIAEQEGATAVAHGCTGKGNDQVRFEVSIQALNPYLEVIAPVREWKWSREEEIAYAKENNVPIPINLDSPFSIDQNLWGRSNECGILEDPWAAPPEDAYEMTLALEDTPNKPEFVEIGFEAGVPTTLNGTAYPLSELIKTLNALAGKHGVGRIDHVENRLVGIKSREVYECPAAMTLITAHKELEDLTLVKEVAHFKPMIEQKITELIYNGLWFSPLKQALHAFLQETQKNVTGTVRVKLFKGHAIVEGRKSEYSLYDEKLATYTAQDEFNHDAAVGFISLFGLPTKVYSQVNQKKVEA

SEQ ID NO: 24649 - protein, 397 aa, Bacillus anthracis str. Ames
MSKIIAINAGSSSLKFQLFEMPSETVLTKGLVERIGLEDSIFTITVDGEKQKEITNIPDHAVAVNMLLKKLTENGIVKSLDEIGGIGHRVVHGGEKFADSVLITDEVLADIEELSDLAPLHNPANVVGIKAFQEVLPNVPAVAVFDTAFHQTMPESAFLYSLPYEYYEKFGIRKYGFHGTSHKYVTERAAELLGRPLESLSLLSCHLGNGASIAAVEGGKSIDTSMGFTPLAGVTMGTRSGNIDPALIPYIMEKTGQTVEEVVSVLNKKSGMLGLTGYSSDLRDIIAKEEEGDHRAKVALDVFVSRIHKYIGSYTARMKGVDAIIFTAGVGENSAIIRERVLEGLEYMGVYFDAKRNNVFGEEAFINFPHSPVKIIVIPTDEEVMIARDVLRLGNIG

SEQ ID NO: 24650 - protein, 380 aa, Bacillus anthracis str. Ames
MIYFDNSATTKPYPEALQSYVTVAGKYFGNPSSIHSLGGEAERLLTQSRTIAAQLLHVKPSEIIFTSGGTEGNNLAIKGIAMRNRSRGKHIITTNIEHASVFEAYKQLEDLGFDVTYLPVNEHGVVSVEDVKRALREDTILVSIIHVNNETGAIQPVAEIGTLLSNYPKIRFHVDHVQGIGKVPLNLYASHIDLCSISGHKFHSVKGTGLLYVRDGVRLDPILSGGQQELKYRSGTENLPGIVAMVKALRMTMEQVKEKVAHLQSLQAELVRFFKEMEDVTINTSLAYAAPHILNVSFVGLKPEVVVHALEEHGVYVSTKSACSSKANEVSRVLVSMGVPHAAAASAIRISLAPENTMEEVKQFEGIVKETMPKLYEVMR

SEQ ID NO: 24651 - protein, 396 aa, Bacillus anthracis str. Ames
MKQFELSRAAESLQPSGIRKFFDLAANMKGVISLGVGEPDFVTPWNVRQACIRSIEQGYTSYTANAGLLELRQEIAKYLKKQFAVSYDPNDEIIVTVGASQALDVAMRAIINPDDEVLIIEPSFVSYAPLVTLAGGVPVPVATTLENEFKVQPEQIEAAITAKTKAILLCSPNNPTGAMLNKSELEEIAVIVEKYNLIVLSDEIYAELVYDEAYTSFASIKNMREHTILISGFSKGFAMTGWRLGMIAAPVYFSELMLKIHQYSMMCAPTMSQFAALEALRAGNDEVIRMRDSYKKRRNFMTTSFNEMGLTCHVPGGAFYVFPSISSTGLSSAEFAEQLLLEEKVAVVPGSVFGESGEGFIRCSYATSLEQLMEAMKRMERFVENKKRTKHNTFCP

SEQ ID NO: 24652 - protein, 330 aa, Bacillus anthracis str. Ames
MRDKAKGDGTVKPKVYIAEPVPTFVENYLSEHCDYEKWEQNEKVPRDVLLEKIQDKDGLLNFGSAINEELLEAAPNLKVVSNISVGYDNFDLQAMAKHNVIGTNTPYVLDDTVADLVFALMLSAGRRVCELDSYVKNGEWNAEIGKEHFGLDVHHSTIGIIGMGRIGEAVAKRAKFGFDMDVLYYNRRRKEEAEQKFDATYCDLQTLLKQSDFIVLLTPLTDETYHLIGEKEFSFMKETAIFINASRGKTVDEEALIDALTEKKIFAAGIDTFTQEPIQKDNPLLSLQNVVTLPHIGSATLKTRQQMAMTAAENLVAGLQGKTPPNIVRG

SEQ ID NO: 24653 - protein, 261 aa, Bacillus anthracis str. Ames
MAGSTLTVKDLHVSIDGKEILKGVNLEVKGGEIHAIMGPNGTGKSTLSSAIMGHPKYEVTEGSIIIDGEDVLEMEVDERAQAGLFLAMQYPSEISGVTNADFLRSAINARREEGDEISLMKFIRKLDKNMEFLEMDPEMAQRYLNEGFSGGEKKRNEILQLMMIEPKIAILDEIDSGLDIDALKVVSKGINEMRGEEFGCLMITHYQRLLNYITPDFVHVMMNGRIVKSGGPELAQRLEAEGYDWIKKELGIEDETTEQEA

SEQ ID NO: 24654 - protein, 390 aa, Bacillus anthracis str. Ames
MREAVIVAGARTPIGKAKRGSLKTVRPDDLGALVVKETLKRANYEGPIDDLIFGCAMPEAEQGLNMARNIGGLAGLSYDVPAITINRYCSSGLQSIAYGAERIMLGHSEAVLSGGAESMSLVPMMGHVVRPNSRLVEAAPEYYMGMGHTAEQVAVKYGISREEQDAFAVRSHQRAAKALAAGNFADETVSVDVTLRTVGANNKLQEETITFAQDEGVRAETTLDILGKLRPAFNVRGSVTAGNSSQMSDGAASVLLMDREKAVSDGMKPLAKFRSFAVAGVPPEVMGIGPIAAIPKALKLAGLELSDIGLFELNEAFASQSIQVIRELGLDEEKVNVNGGAIALGHPLGCTGAKLTLSLIHEMKRRNEQFGIVTMCIGGGMGAAGVFELL

SEQ ID NO: 24655 - protein, 438 aa, Bacillus anthracis str. Ames
MHHDEKNKIGLTVALSIVVGTIIGSGVFMKPGSVLDYSGSSNMAILAWVIGGLLTLASGLTVAEIGAQIPKNGGLYTYLEEIYGSFWGYLSGWMQTIVYGPAIIGTLGLYFSSLMINFFYLDKVWNLPIAIGTVVFLGVVNSMGTKYGGIVQTITTIGKMIPIVLIVVLGFWKGNSDIFNVVVPISENQSIGMAILATLFAYDGWILLASIGGEMKNPTKLLPKAMTVGILIVTAAYVLINLALLNVLPATQIVELGENATATAAGMLLGEYGGKIISIGIIVSIFGCLNGKILTFPRIPMSMAERGQLPFAKFIAKESPRFKTPANAITVEIILGIILMIISDPNKLSEISVFIIYIFYVMTFIGVFILRKRNKNKERAYSVPLFPIVPIVAILGSLFVIGSAIINDPLSCFLSIGIVFTGLPVYWYLNKKNKTEVS

SEQ ID NO: 24656 - protein, 571 aa, Bacillus anthracis str. Ames
MLRKFFSYYKPYKGLFILDFSCAVVAGLLELGFPLIVNQFIDKLLPGQNWTLILWACFGLLAVYMLNAGLQYVVTYWGHMLGVNIETDMRQKLFDHIQKLSFRFFDNNKTGHLISRLTNDLMEIGEIAHHGPEDLFIAVMTLVGAFSFMMMINWKLALLTFFVIPFLLWLALYFNKKMTGTFRRLFSDVADFNACIENNVGGIRVVQAFGNEKFEKEQFAVNNARFRTTKLMAYKIMALNSSISYMLMRLVTLFVLICGTWFVLQGELTYGGFIGFVLLTNIFFRPIEKINAVIESYPKGIAGFKRYVELLETEPDIVDSKDAMEVKHVHGDIQYNNITFGYENKERILNDISLKIHAGETVAFVGPSGAGKTTLCSLLPRFYEQSSGSIQIDGIDTKDMTLSSLRKQIGIVQQDVFLFSGTIRENIAYGNLKASEAEIWQAVKRAQLEDLIYSQPDGLDTVIGERGVKLSGGQKQRLAIARMFLKNPPILILDEATSALDTETELAIQKSLAELSVGRTTLVIAHRLATIKNADRIVVVNKDGIAEQGSHDELIEQGGGYSRLYEAQFSS

SEQ ID NO: 24657 - protein, 65 aa, Bacillus anthracis str. Ames
MQGRVKWFNAEKGFGFIEREDGDDVFVHFSAIQQDGYKSLEEGQQVEFDIVDGARGPQAANVVKL

SEQ ID NO: 24658 - protein, 505 aa, Bacillus anthracis str. Ames
MRKLTKTFIVSLTLCIAFTLWGIIPESIIGKGSLGNVTTAIQTALVSKFGWSYIISVSIILGVSIFLIVSKYGSIRLGKDDDEPDYSYMTWFAMLFSAGMGIGLVFWGVAEPLNHLYAPPFGESATEESARLALRFSFFHWGLHPWGLYAFVALCIAYFTFRKGKASTISATVGPLFKGGDHGRIAHLFDVLAVFATVFGVATSLGLGAKQIAGGVSYLTSIPNSLTTQLVIIAIVTVLFMLSAQTGLDKGIKYLSNTNIILAFALMIIVLFVGPTNFIMNYFTSTIGAYIQELPSMSFRLSPLDEGGNQWIQSWTIFYWAWWIAWSPFVGTFIARVSRGRTIREFVIGVLLVPTVIGALWFSVFGGTGIHMELFGDAHIFEKVKEMGTEVGLFAMFDQMGSFGSALSVLAILLISTFFITSADSATFVLGMLTTHGSLNPPNRIKMIWGIVLAALASILLYVGGLEALQTAAIIAAFPFVFVIFFMMAALFKELQKEGRMKRHK

SEQ ID NO: 24659 - protein, 393 aa, Bacillus anthracis str. Ames
MSKTVILSAARTPVGKFGGSLKDVKATELGGIAIKAALERANVSASDVEEVIFGTVIQGGQGQIPSRQAARAAGIPWEVQTETVNKVCASGLRAVTLADQIIRTGDQSLIVAGGMESMSNSPYILRGARWGYRMGNNEVIDLNVADGLTCAFSGIHMGVYGGEVAKEDGISREAQDEWAYRSHQRAVSAHKEGRFEEEIVPVTIPQRKGDPIVVAKDEAPREDTTIEKLAKLKPVFDKTATVTAGNAPGLNDGGAALVLMSEDRAKQEGRKPLATILAHTAIAVESKDFPRTPGYAINALLEKTGKKIEDIDLFEINEAFAAVAIASTEIAGIDPEKLNVNGGAVAMGHPIGASGARIIVTLIHALKQRGGGIGIASICSGGGQGDAVMIEVH

SEQ ID NO: 24660 - protein, 290 aa, Bacillus anthracis str. Ames
MRFDEAYSGKVFIKSHPSFEESEVVIYGMPMDWTVSYRPGSRFGPARIREVSIGLEEYSPYLDRELEEVKYFDAGDIPLPFGNAQRSLDMIEEYVSKLLDAGKFPLGLGGEHLVSWPIFKAMAKKYPDLAIIHMDAHTDLRESYEGEPLSHSTPIRKVCDLIGPENVYSFGIRSGMKEEFEWAKEVGMNLYKFDVLEPLKEVLPKLEGRPVYVTIDIDVLDPAHAPGTGTLEAGGITSKELLDSIVAIANSNINVVGADLVEVAPVYDHSDQTPVAASKFVREMLLGWVK

SEQ ID NO: 24661 - protein, 522 aa, Bacillus anthracis str. Ames
MRMKSRKTDWPVFLISGGSLLLFVIAVFLNKSYVEGVINSSFAASIKYFGAFWQILLIGTFVVAMCMAFSKYGRVKLGGLEKPEISTTKWLAIIMSTLLAGGGVFWAAAEPMYHLMTVPPIHEGITAGTKEAVMPALAQSYMHWGFLAWTILGTISAVVMMYGHYHKGMPLKPRTLLYPIFGEKLRKSWLGTLIDAFAIIAVAAGTIGPIGFLGLQASYGLQALFNIPDVFTTQLAIIVCVVAVSTISAVTGIDKGIQIISNLNVRLAILLMVFVLLFGPGGFIIDSFVSSFGFYINEFIPMSTYRGDTTWLGSWTIFFWGWFIGYGPMMAILVSRISRGRTIREIIVAIGIIAPIITTFWFTILGGSGVFYELMKPGSISSALSESGMPAAMIAITEQLPLSHIIGPAFLLLTILFVVTTGDSMAYSISMAVTGDGDPRISLRVFWSLIMGTVAAILLYMGEGSINALQSFIVVTAVPVSILLFPMLWLAPKVAGELALKQGIVKEEEKTSFLFQKASKSK

SEQ ID NO: 24662 - protein, 297 aa, Listeria seeligeri
AEEIAKEVGIELGKSSVTHFSDGEIQINIEESIRGCHVYVIQSTSNPVNQNLMELLIMIDALKRASAATINIVMPYYGYARQDRKARSREPITAKLVANLIETAGATRMITLDMHAPQIQGFFDIPIDHLNAVRLLSDYFGERHLGDDLVVVSPDHGGVTRARKMADRLKAPIAIIDKRRPRPNVAEVMNIVGNVEGKVCIIIDDIIDTAGTITLAAKALREAGATKVYACCSHPVLSGPAMKRIEESPIEKLVVTNSIALPEDKWIDKMEQLSVAPLLGEAIVRVHENASVSSLFE

SEQ ID NO: 24663 - protein, 318 aa, Listeria ivanovii
MSNEYFDPKLKIFSLNSNRELTEEIAKEVGIELGKSSVTHFSDGEIQINIEESIRGCHVYVIQSTSNPVNQNLMELLIMIDALKRASAATINIVMPYYGYARQDRKARSREPITAKLVANLIETAGATRMITLDMHAPQIQGFFDIPIDHLNAVRLLSNYFGERHLGDDLVVVSPDHGGVTRARKMADRLKAPIAIIDKRRPRPNVAEVMNIVGNVEGKVCIIIDDIIDTAGTITLAAKALREAGATKVYACCSHPVLSGPAMKRIEESPIEKLVVTNSIALPEDKWIDKMEQLSVAPLLGEAIVRVHENASVSSLFE

SEQ ID NO: 24664 - protein, 380 aa, Clostridium butyricum
MRKAFICPTKYVQGEDDILNLGYFVRSFGESALLIAHKDDVTRVKDKLNKTCEKFKISFVESGFKGECSREEVCRLQQIASENKCSCIIGLGGGKAIDTAKCVAEGEALIIVPTIAATDAPTSHSAVLYTNEGAFDDYAYFKQSPSVVLIDTTVIANAPTRFLVSGMGDALSTYFEARATSNSYSNVNAGLPCGFREGVCNEAKGTNTALALAKLCYETLINDGAKAKVASDCNIVTPALENIIEANILLSGIGFESGGLAGAHAIHDGLTILEGTHKYFHGEKVAFGTIAQLVLENSPKEELNQVLDFCLEVGLPVCLADIGVESINENELMEVAKKACYKEESIHSMPFPISAEDVAASIIAADKIGREYKLKKGGCK

SEQ ID NO: 24665 - protein, 167 aa, Limonium latifolium
GYDGFEGVKTLVDVGGSSGDCLRMIINKYKDIPKAINFDLPEVVAKAPKIPGITHVGGNTFESVPSGDAIFVKWVLTCFTDEEVITLMRNCNKALPVGGKLICSEPTLPENSDESHRTRALLVADIFIMTTYRAKGKHRTEEEYRQLGLLAGFPKFRVIHVDYFFPV

SEQ ID NO: 24666 - protein, 234 aa, Limonium latifolium
ETLLKAWPFLHTAILDASTEPFARVNGEPAYQYYGKNDELNKNMQYAMSGVSVPYMKALLGSGYDGFEGVKTLVDVGGSSGDCLRMIINKYKDIPKAINFDLPEVVAKAPKIPGITHVGGNMFESVPSGDAIFVKWVLTCFTDEEVITLMRNCNKALPVGGKLICSEPTLPENSDESHRTRALLVADIFIMTTYRAKGKHRTEEEYRQLGLLAGFPKFRVIHVDYFFPVVEFQK

SEQ ID NO: 24667 - protein, 206 aa, Limonium latifolium
RAYQYYGKNDELNKNMQYAMSGVSVPYMKALLGSGYDGFEGVKTLVDVGGSSGDCLRMIINKYKDIPKAINFDLPEVVAKAPKIPGITHVGGNMFESVPSGDAIFVKWVLTCFTDEEVITLMRNCNKALPVGGKLICSEPTLPENSDESHRTRALLVADIFIMTTYRAKGKHRTEEEYRQLGLLAGFPKFRVIHVDYFFPVVEFQK

SEQ ID NO: 24668 - protein, 188 aa, Limonium latifolium
HGTTRSRHGSSSSSSPTANGFEGVKTLVDVGGSSGDCLRMIINKYKDIPKAINFDLPEVVAKAPKIPGITHVGGNMFESVPSGDAIFVKWVLTCFTDEEVITLMRNCNKALPVGGKLICSEPTLPENSDESHRTRALLVADIFIMTTYRAKGKHRTEEEYRQLGLLAGFPKFRVIHVDYFFPVVEFQK

SEQ ID NO: 24669 - protein, 375 aa, Limonium latifolium
MANHSSAAAMVVDETSEARNNARLKIIELANLISVPMSLTAIVRLKVPEAIWSNGSNTPVSAAEILSRLPDAPATADAENLQRLLRVLTSFGVFSEHLDTTSSSSSSTSERRYCLTEVGQTLVSFDESCPSHGAYVLQHHQETLLKAWPFLHTAILDASTEPFARVNGEPAYQYYGKNDELNKNMQYAMSGVSVPYMKALLGSGYDGFEGVKTLVDVGGSSGDCLRMIINKYKDIPKAINFDLPEVVAKAPKIPGITHVGGNMFESVPSGDAIFVKWVLTCFTDEEVITLMRNCNKALPVGGKLICSEPTLPENSDESHRTRALLVADIFIMTTYRAKGKHRTEEEYRQLGLLAGFPKFRVIHVDYFFPVVEFQK

SEQ ID NO: 24670 - protein, 571 aa, Methanosarcina acetivorans
MTLSPEDLKTIEKYALQNAVKYEKAPQSKAVMGKVMGECPQLRANPGAVSTALKSIVSEIAKGNPEAWKTRLSEIAPELIEALNVKKEPEKGLKPLEGAEPGKVVMRFAPNPNGPGTLGSARGMVVNSEYVKMYKGKFVLRFDDTDPDIKRPMLEAYDWYLDDFKWLGVVPDRVVYASDHFPIYYDYARKLIEMGKAYVCFCKGEDFKRLKDAKQACPHRDTSPEENLMHWEKMLAGEYEDQQAVLRIKTDIEHKDPALRDWGAFRIRKMSHPRAEIGNKYVVWPLLDFAGAIEDHELGMTHIIRGKDLIDSEKRQGYIYKYFGWTYPKTTHWGRVKIHEFGKFSTSSLRKAIEAGEYSGWDDPRLPTIRAIRRRGIQAEALKKFMIEMGVGMTDVSISMESLYAENRKIVDPVANRYFFVWAPVELEIAGMEPTVAKLPLHPTDHSRGVREIAVGNKVLVCAEDVEKLELGSVIRLKDFCNIEITSLSPLQAKHSDVSLEALKKAKAKIVHWAPVDGISVKVRGPEGDLEGIGEKGIVGELDKIVQFERFGFCRIDAVSEEKVVAYFAHK

SEQ ID NO: 24671 - protein, 572 aa, Pyrococcus furiosus
MEVEKLALKYALINAIEHDGKANPKAVIGKILGENPELRKKAREIVPIVNKIVEEVNTLSLEEQKKKLEEIYPEYFMEGTKKEKEEKKQLPPLPKAEKGKVVTRFAPNPDGAFHLGNARAAILSYEYAKMYDGKFILRFDDTDPKVKRPELIFYDMIIEDLEWLGIKPDEIVYASDRLEIYYKYAEELIKMGKAYVCTCPPDEFRKLRDQGIACPHRDEPVEVQLERWKKMLNGEYREGEAVVRIKTDLNHPNPAVRDWPALRIVDEPNHPRTGNKYRVWPLYNFASAIDDHELGVTHIFRGQEHSENETRQRYIYEYFGWEYPVTVHHGRLSIEGVILSKSKTRKGIEEGKYLGWDDPRLGTIRALRRRGILPEAIRELILEVGLKKSDATVSWDNLAAINRKLVDPIANRYFFVADPIPMYIEEAEEFEAKIPLHPDHPERGYRVLKFEPGKPIYVSKDDLSLLKPGGFIRLKDLFNVEILEVGDTIKARFHSHEYEVARKNKWRMIHWVPEGKECEVIIPEGEELIIRKGLLEKNANVKEGEIVQFERFGFVRIDKIENDKVIAIYAHK

SEQ ID NO: 24672 - protein, 548 aa, Thermoplasma acidophilum
MYEDDIRRIALINAYQHEGKADLKSVMGKVMAEIPDLRRDPRSAREMVSRIVDEVNSMSAYEIRETVETRYTSSIRKEKKVEEHRLPDLEGVNGPVVMRMAPSPSGPLHIGHTRMAILNDEYVKRYGGELILRIEDTNPKNIDPDAYHMIPEDLEWLGVNVTKIVIQSDRFDLYYAEAKKLMENGHMYVCTCPREEFKKRKLESIPCKDRDNPPETNLELFDKMIDGTIKEGDAVAVVKTDLKHPNPSVRDWIAFRIIEARHPRVDDKYRVYPMMSFSVAVDDHYLGLTHVLRGKDQLTNTDKQRYIFDYNGWKKPYYYHYGMIKFPGIKLKTSLMKKGILSGQYEGWSDIRLGTVRAFAKRGYRPETFRRYWINSGLREIDAIFSIEIFDSINREIVDPRAYRFSFVKDPVPVRIEGMPNISAKLPLHPTHPEYGFREYEVKGSVYIASRDFAAISEGERIRLKDLCYIRKKGNGIIYDGVEMTEKTKIINWCPEGSRDFSVLKPDGSKDSGLIEPKSSGYRGIAQLERYGYVNFADGDDLAYFTHP

SEQ ID NO: 24673 - protein, 153 aa, Escherichia coli str. K12 substr. W3110
MRELKKMGFALVVVTNQSGIARGKFTEAQFETLTEWMDWSLADRDVDLDGIYYCPHHPQGSVEEFRQVCDCRKPHPGMLLSARDYLHIDMAASYMVGDKLEDMQAAVAANVGTKVLVRTGKPITPEAENAADWVLNSLADLPQAIKKQQKPAQ

SEQ ID NO: 24674 - protein, 243 aa, Solanum lycopersicum
KRLMTDVPFGVLLSGGLDSSLVASVTARYLAGTKAAKQWGAQLHSFCVGLEGSPDLKAAKEVADFLGTVHHEFHFTVQDGIDAIEDVIYHIETYDVTTIRASTPMFLMSRKIKSLGVKMVISGEGADEIFGGYLYFHKAPNKEEFHRETCRKIKALHQYDCLRANKATSAWGLEARVPFLDKEFINVAMSIDPEWKMIKHDQGRIEKWVLRKAFDDEEQPYLPKHILYRQKEQFSDGVGYSWI

SEQ ID NO: 24675 - protein, 441 aa, Oryza sativa Indica Group
MAKQWWQDGRSAQEKAIDDWLPITSSRNAKWWYSAFHNVTAMVGAGVLSLPYAMSELGWGPGIAVLILSWIITLYTLWQMVEMHEMVPGKRFDRYHELGQHAFGEKLGLWIVVPQQLVVEVGVNIVYMVTGGKSLKKFHDVLCEGHGCKNIKLTYFIMIFASVHFVLSQLPNFNSISGVSLAAAVMSLSYSTIAWGASVDKGKVADVDYHLRATTSTGKVFGFFSALGDVAFAYAGHNVVLEIQATIPSTPEKPSKKPMWKGVVVAYIIVALCYFPVALVGYWAFGNHVDDNILITLSRPKWLIALANMMVVIHVIGSYQIYAMPVFDMIETVLVKKLRFPPGLTLRLIARTLYVAFTMFIAITFPFFGGLLGFFGGFAFAPTTYFLPCIMWLAIYKPRRFSLSWFTNWICIILGVMLMILSPIGGLRQIIIDAKTYKFYS

SEQ ID NO: 24676 - protein, 425 aa, Blastocladiella emersonii
MTLIDKLMEKTKKVVGSSDKDAPAPASPSSPSTAAGAGSASSTASSTTTAAASGNLSIPSPLVAGSTTSSSISHAQKMATAAHTNSDYSPSPAATPSAPLDAVAERRRRKTTLADLELRQTLGTGSFGRVHLVRLRSTGKYYAMKVLKKAEVVKHKQVEHTLNEKGILEQIDHPFLVALHSSFQDSANLYMVMEYVTGGELFTYLRRSQRFSNNVAKFYAAEVVLAFEYLHSKDIIYRDLKPENLLLDAQGHVKITDFGFAKHVPDITWTLCGTPDYLAPEIIQSRGYGRAVDWYALGVLIFEMLAGYPPFYDEDHVRMYEKILQGKVKWPSHFDPAAKDLLKRLLTTDLTKRYGNLKGGSKDIKMHKWFAGLDWTKLFNKQIPPPYTPPNRGDGDTSNFDAYPEETEPYGKVQPDPYAQLFKDF

SEQ ID NO: 24677 - protein, 277 aa, uncultured Acidobacterium sp.
  misc_feature (5)..(5): Xaa can be any naturally occurring amino acid
  unsure (1)..(277): unsure at all Xaa locations
MNGGXRTVFNRARGAFTRLGRTHLRRKCIFGESSIRGPSPFFRASGQDAVLLVLGISVAAIAAGLAGVVVGIPSLRLRGDYLAIVTLGFGEITRVLILRHRCRSGARGFSDIPPLSNFFFFWVFLFVLVTVSTIHNLVNSSYGRAFISIREDEIAAEAMGVDTTRFKVLSFVISSMFAGIGGSLFGHYTAYLNPNTFTFVTSFYLIIMIVVGGLGSIGGSILGAVLVTVILEAFRSLSEFRLVGFSILLVLVMIYRPQGLMGSRGMFKFRRKAAVAK

SEQ ID NO: 24678 - protein, 355 aa, Craterostigma plantagineum
MEKYELVKDIGSGNFGVARLMRNKETKELVAMKYIERGHKIDENVAREIINHRSLRHPNIIRFKEVVLTPTHLAIVMEYAAGGELFERICNAGRFSEDEARYFFQQLICGVHYCHALQICHRDLKLENTLLDGSPAPRLKSCDFGYSKSSLLHSRPKSTVGTPAYIAPEVLSRREYDGKLADVWSCGVTLYVMLVGAYPFEDQEDPFFFRKTILWIMAVQYKIPDYVRISQSCRHLLSRIFVANPLRRITIKEIKSHLWFLKNLPRELTEVAQAAYFRRDNPTYSLQSEEEIMKIVEEAKVPPQASRSIGGFGWGTEEDEENVEEEEEGESEGEEDEYEKQVKAAHASGEVPPLT

SEQ ID NO: 24679 - protein, 246 aa, Cyanidioschyzon merolae strain 10D
MLKIEQLKVGIKDRLILEGIDAHIEAGSVHAIMGPNGSGKSTLAKVIAAHPAYKILEGNFKWQDESINDKDAEARAQLGIFLAFQNPLTIPGVTNMDLLMLAYKTKHKQSIDAISFLEYIMPKLELVGLDASFLHRYVNDGFSGGEKKKNEILQLAILEPKLAILDEIDSGLDIDALKQIAHSLHMLKTTQNAYVLITHYPRLLEYIKPDYVHVMQKGRIILSGDASLAKYLERYGYDEVKKKAVV

SEQ ID NO: 24680 - protein, 1477 aa, Cyanidioschyzon merolae strain 10D
MRLPSPLPKNLTYCLTQFHGYAWLSKERDACGVGFICDLNAKPTHSILERALEALTLMEHRGACSADGESGDGAGLLTQIPWKMLRKQYSNLPNQVALGMVFLPHYAAEEAKHLLNHVISQNHSQVLHWRKVACVPEVLGPMAAQYVPQIEQVIITYESEFQLYLLRKQIEKAVSGLSWASDFSICSLSSQTVVYKGMVKAAVLSQFYQDFRHPDFETTFAIFHRRFSTNTMPKWSLAQPMRMLAHNGEINTLLGNLKWMHAQERRIQMSVTNPALSDSANLDAAAELITHLAGHSCAESLMKLIPEAFPPATSVADFYKYYEAIQEPWDGPALIVFSDGNQVGATLDRNGLRPARYWITHDDHLVLASEVIPYSKYRIHSRLAPGEMITVDVTTGQLKLNQELKTQIAQTRDYTRLIEQGLLQLKTYNFQNDLNWSSSKLLQWQTCFGYTSEDVELIIEHMASQGKEPTFCMGDDIPLAVLSGKPHVLYDYFKQRFAQVTNPPIDPLRENLVMSLNTYLGKKPPVWETKTYRILQLTSPILNEHQLEQIHQLFPTSILSTCFDAQISLRQAIEQLCEKAAKASETCEILVLSDREFQSESKSESTSQDTYIPPLLALGAVHQHLIRKGCRMEVSLIVDTAQCWSTHHFACLLGYGAEAVCPYLALETVRHWWHEPTTNTLMSSGKLVSYNLHEVQHNYIKAVQNGLLKILSKMGISCVSSYCGAQIFEIIGLHAEVVNLAFEGSVSRIGGLTLEELQAEVLQLSGATVSKKLPNVGFVQYRPGGEYHVNNPQMAKALHKAVRQWDSHAYEAFKNLMLNRPATALRDLLRIESDRTPIPLDEVEPIEKITSRFCTGGMSLGALSRETHETLAIAMNRLGGKSNSGEGGEDVLRYKPLTDVDETGHSPTFPHLKGLKNGDSLSSAIKQVASGRFGVTPEYLVNAKQLEIKIAQGAKPGEGGQLPGKKVSGYIAKLRGCKPGVPLISPPPHHDIYSIEDLAQLIYDLHQINPNAQVSVKLVAEAGIGTIAAGVAKAKADIIQISGHDGGTGASPLSSIKHAGVPWELGLVEVHQTLVENQLRDQVLLRVDGGLRTGHDVIMAALLGAEEFGFGTVAMIASGCIMARICHTNSCPVGVATQKEELRARYPGVPEAVVNYFRFVAEEIRFELARLGYKSLEQILGRSDLLRVNTTSSVKTSHLQLEWLCQKPAKWKTHKHVHTNGKGLDHELWQMTKDTVEQQAQFTAHLSITNTNRSVGAYLAGRIASKYGNEGFQGQIQVNFYGVAGQSFGSFLVKGLNFRLVGEANDYVGKGMNGGEIVIVSNAKVVLGNTCLYGATGGYLFARGCAGERFAVRNSNAIAVVEGVGDHGCEYMTGGLVVVLGECGRNFAAGMTGGLAYVLDEDLENKINGEIVKIQRIVTEAARVQLKHLISLHAYKTGSPKAQQILEQENWEKFWQVVPPSESNLPETNPEIMIKLS

SEQ ID NO: 24681 - protein, 821 aa, Cyanidioschyzon merolae strain 10D
MFERFTEKAIKVIMLAQEEARRLGHNFVGTEQILLGLIGEGTGLAARALKTLGVDLKEARVEVEKIIGRGSGFVAVEIPFTPRAKRVLELSLDEARILSHNYIGTEHLLLGLIREGEGVAARVLESLGVDLATLRSLVLRMLDETSEVVIGGGYSRSRTPTLEEFGVNLTELAMEGELDPVVGREKEIERVIQILGRRTKNNPVLIGEPGVGKTAIAEGLAQRIADRDIPDILEDMKVITLDIGLLVAGTKYRGEFEERLKKVMDEIREVGNVILVIDEVHTLIGAGAAEGAIDAANILKPALARGELQCIGATTLEEYRKHIEKDAALERRFQPVMVGEPTVDETIEILKGLRDRYEEHHRVRISDAALEAAAKLSSQYIADRYLPDKAIDLIDEAGSRVRLMYYKLPKVTLELDKELREVMRLKDEMIREDHFEIAAELRDREKEIRSQIMAMTKSHREETQEQILQARPVVSEEDIAQIVASWTGIPVKKLTRSESEKLLHMEETLHQRIVGQNEAVSAVSKAIRRARVGLKNPNRPIASFIFSGPTGVGKTELTKALASYFFGSNEAMVRLDMSEYMERHTVSKLIGSPPGYVGYNEGGQLTEAVRKRPYTVILFDEIEKAHPDVFNILLQILEDGRLTDSKGRTVDFKNTLLIMTSNIGSKIIEKGGGGLGFELGDSWQDTQYSRLKNLVNEELKQYFRPEFLNRIDEIIVFRQLTKEEVGQIAEMMLKEVYDRLAQQQQIQLQVTDRFKRKIIEEGYSATYGARPLRRAIMKWLEDPLAEHVLANTLSPGMTAVVDLDGEDVKVLPSKQMETQIA

SEQ ID NO: 24682 - protein, 607 aa, Cyanidioschyzon merolae strain 10D
MAKVVGIDLGTTNSVIAVMEGGQPTVVPNSEGFRTTPSVVAYTKNGDLLVGQIAKRQAVINPGNTFYSVKRFIGRKFSEIEQEAKQVPYPVQADGKGNVRIFCSAKDKFFAPEEISAQVLRKLVDSASQYLGEKVTQAVITVPAYFNDSQRQATKDAGKIAGLDVLRIINEPTAASLAYGLDKKSNEKILVFDLGGGTFDVSILEIGDGVFEVLATSGDTHLGGDDFDKKIVDWLIDNWKRIEGIDLSKDKQALQRLTEAAEKAKIELSNVTQTDINLPFITATADGPKHLDQTLTRAQFEQLTSDLIERCRKPVEQALTDAKLSKQDIDEVVLVGGSTRIPAVQQLVKDLLGKQPNQSVNPDEVVAIGAAIQAGVLAGEVKNILLLDVCPLSLGVETLGGIMTKMIPRNTTIPTRKTEIYSTAVDNQTNVEIHVLQGERELAKDNKSLGTFRLDGIPPAPRGVPQIEVTFDIDANGILSVTAKERSTGKQQSITITGASTLDQSEIERMVKEAEKNAEEDRKKREQIETKNLAESVYYQAEKMGLKDNAQELKNAIDQLDYEGMKNLTQQVQTLIAQKASETSNAKTNGKASEKEDVIDADFKAQE

SEQ ID NO: 24683 - protein, 827 aa, Paracoccidioides brasiliensis
MALAAFTPRASSRRIAQFGSRSLPLFNYTSFHAQRPSLDASGGLRRHQSNAPIVTQRPDILRQPDIRKSSATNIHVTISSIVGPGCLQQVRFLSSTTARRKEAKPEPAKKLRKPQKPQTELEKKQETALEEIHRGFERTEKASQAAKLNLSARLSKDAGGKRLGFREIWRLLKIARPEAKILSMALLCLLISSSITMSIPFSIGKILDIATHSSPEGGNELFGLTLPVFYSVLGGVLLLGAAANCGRIIILRIVGERIVARLRSKLFRRTFMQDAEFFDANRVGDLISRLSSDTIIVGKSITQNLSDGLRAAVSGVAGFGLMAFVSLKLSSILLLLIPPVSLGAFLYGRSIRNISRKIQKNLGSLTKIAEERLGNVKTSQSFAGEILEVHRYNRQTRRIFELGKRESLVSAAFFSTTGLMGNMTILSLLYVGGGMVQSGAISIGDLTSFLMYAAYAGSSMFGLSSFYSELMKGVGAASRLFELQDRHPTIPLTVGDKVVSARGAIRFKNLDFSYPTRPAVTVFKDLDFEIPQGSNVAIVGPSGGGKSTIASLLLRFYKHTRGQILIDGKDISSMNAKSLRRKIGVVAQEPVLFSGTIAENISYGKPHATRTEIIAAARKANCQFISDFPDGLDTHVGARGAQLSGGQKQRIAIARALIKNPDILILDEATSALDAESETLVNSALAALLRGNNTTISIAHRLSTIKRSDTIIVLSGDGHVAEQGSYQELSARPDGAFTKLMEWQMSSEGGAVQSVVRGPPSEKEELQQMLQEGEEDYGEYDDDSDAEPEKLVERDGVAEGASKEKYAVAAGIEASIATSKQQPSQEK

SEQ ID NO: 24684 - protein, 332 aa, Triticum aestivum
MCGGRHPLRHHPAAGRPCRAPEEEFQEEEGDAEFEADFEGFVEAEEESDGEAKPFPVRRSGFSGDGLKATAAGDDDCASGSAKRKRKNQFRGVRRRPWGKWAAEIRDPRKGVRVWLGTYNSAEEAARAYGVEARRIRGKKAKVNFPEEAPMAPQQRCATAVKVPEFNTEQKPVLNTMGNADVYSCSAVDYTLNQQFVQPQNMSFVPTVNAVEAPFMNFSSDQGSNSFSCSDLSWENDIKTPDITSVLASIPTSTEVNESAFLQNNGINSTVPPVMGDANVDLADLEPYMKFLMDDGSDESIDSILSCDVPQDVVGNMGLWTFDDMPLSAGFY

SEQ ID NO: 24685 - protein, 355 aa, Triticum aestivum
MCGGAILSDIIPPPRRATGGNVWRADKKRRARPDAAAGRPRRVPEEEFQEEESDAEFEADFEGFVEAEEESDGEAKPFPVRRSGFSGDGLKATAAGDDDCASGSAKRKRKNQFRGIRRRPWGKWAAEIRDPRKGVRAWLGTYNSAEEAVRAYDVEARRIRGKKAKSISQKKLPWLLSKRCATSVKVPEFNTEQKPVLNTMGNADVYSCPAVDYTLNQQFVQPQNMSFVPTVNAVEAPFMNFSSDQGSNSFSCSDFSWENDIKTPDITSVLASIPTSTEVNESAFLQNNGINSTVPPVMGDANVDLAYLEPYMKFLMDDGSDESIDSILSCDVPQDVVGNMGLWTFDDMPLSAGFY

SEQ ID NO: 24686 - protein, 210 aa, Solanum lycopersicum
MAMVNLNGISKEVHYRGVRKRPWGRYAAEIRDPGKKSRVWLGTFDTAEEAARAYDNAAREFRGAKAKTNFPKLEMEKEEDLKFAVKNEINRSPSQTSTVESSSPVMVDSSSPLDLSLCGSIGGFNHHTVKFPSSGGGFTGSVQAVNHMYYIEALARAGVIKLETNRKKTVDYLGGGDSDSSTVIDFMRVDVKSTTAGLNLDLNFPPPENM

SEQ ID NO: 24687 - protein, 715 aa, Oenococcus oeni
MKNKNRGFFRSSLSYAFVILAVIFLIYSFFGRSDGSVKHLSTTTFLKELKNNKIKDFTIQPGDSGVYTIAGDFKKAQKSSSSSSSTTTLLSGYQSSVTKFTAYVLPNNSSLKQITTAAQKAGVAVNPKPAASNFWGSMLTLILPTLIMFALLYWMLIGSQRGQGGSGGPGGIMSFGRSKAKPADPKQNKIRFADVAGEEEEKQELVEVVEFLKDPKKFTKLGARIPKGVLLEGPPGTGKTLLAKAVAGEAKTPFFSISGSDFVEMFVGVGASRVRDLFENAKKSAPSIIFIDEIDAVGRRRGAGMGGGNDEREQTLNQILIEMDGFEGSEGVIVLASTNRSDVLDPALLRSGRFDRKILVGAPDVKGREAILRVHAKNKPLAADVDLKVIAQQTPGFVGADLENLLNEAALLAARNDEKAVTAADIDEAEDRVIAGPAKKDRKTTQDERETVAYHEAGHAIVGLVLNDAQVVRKVTIVPRGRAGGYALMMPKDERYLMSEKDAKEELAGLMGGRAAEILINHVASSGASNDFQQATQIAREMVTQYGMSDKLGMVQLEGSSNVFVGDPNNPNPPYSQKTSELIDEEVRRLTNEAYKRAVDIIKSHPKQHKAIAEALLKYETLDEAQIRSLFETGEIPSDLVKDSQRPARPLSYEESKAALKKNGAVDNKEAEDELKRTKMIRKMKMIPSRVPIQLQKRRQPRRLQLLDAVNNKFD

SEQ ID NO: 24688 - protein, 99 aa, Citrus x paradisi
YVFIVDMPGLKSGDIKVQVEDDNVLLISGERKREEEKDGAKYVRMERRVGKFMRKFVLPENANVEAISAVCQDGVLTVTVDKLPPPEPKKPKTIEVKIA

SEQ ID NO: 24689 - protein, 207 aa, Eucalyptus grandis
MARGKTKMRRIENATSRQVTFSKRRKGLLKKAYELSVLCEAEVAVIIFSQNGKLYEFSSNSEIRKTIDRYRRSTNVDTYQLCGRYILHLKQETMDMERKIELLEVSQQKLSGQCLGSCSINEIQEIGDQLEQSLSSIRKRKAQLFNDQIQQLQAKERHLKEENAKLLAKFLANPWQSTAHPRAAAINSRSSRGTDVETGLFIGLPES

SEQ ID NO: 24690 - protein, 210 aa, Eucalyptus grandis
MVRGKIQLRRIENTTSRQVTFSKRRNGLLKKAYELSVLCDAEVAVIIFSQKGRLYEFSSNSEIQKTIDRYRRSTYDMDTYKTNLDQCILHLKQETTDMERKIELLEVSLRKLSGECLGSCSIDEIQMIGDQLERSLSSIRARKAQLFDDQIQHLQAKERSLKEENAKLLAKCLANPGQSTAHPRAAALHSRSSRSTDVETGLFIGLPELN

SEQ ID NO: 24691 - protein, 340 aa, Paraboea crassifolia
MGRAPCCDKTGLLMKKGPWSQEEDQKLLDYIQKYGYGNWRTLPTNAGLQRCGKSCRLRWTNYLRPDIKRGRFSFEEEETIIRLHSILGNKWSLIAARLPGRTDNEIKNYWNTNIRKRLLRMGIDPVTHSPRLQLLDLSTILNSSLCNNSPTQMNFSRLQPRFNPELLRFAASLFSSNCQSQDFPMQNQITSNNQIPPPFMQTSVQDVAVLPDLCADTNLGTSFSVHDEVQEFQQNPAGYGMPSALTGEYVPVLNDGYYGSGDQPFVDPTPSSVTSNFQSYCSNSLGFQSIFSTPPSSPTPLNSNSTYVNSCSSTEDETESYYNSMWKFEIPDNLRINDFM

SEQ ID NO: 24692 - protein, 458 aa, Streptomyces cattleya
MAGFLLRCRPEGAVPQHLGAGTGLATEVTRDGADVLVVHGDPLTPGGQAPIHAPLDELIAWTVRAYSRFCAVLVRDDRAVLWSDNGATCPLHYARGADDTLLVATSAGALLPLLGTAPVLGEGDRAVLPGGRFAGVTAVPAGTAVTLAVAGFDTEPLLTRRYHRLPARPTETDPERAVTAVRDALTHAVGRLATGLTEAGVMLSGGVDSSSVAALAAREVTSLSTYTVGTPFGDEFAQAAWFAERLGSKHHELVFEPEQLTALLPEMIRSLETWDLLTLQIAAPACFLLGHIATGARQVMLSGYGADLIFAGLGGTGTETRIERSVAAQTAATAVSNEFNPAYADARDVVVRYPYWTREVMSTALGIRGRLKVRPDTAKWVLRSAVTGILPDEVAWRPKRGIHEGTAMSRMFAAALGSDDRHTQARRLYEMATEVFRDTAAGTDELEGSDEGLAGVAS

SEQ ID NO: 24693 - protein, 240 aa, Streptomyces cattleya
MADGPGAYADPVDLDRVYPRHRTDVPTWLTGLARQAADDSPPELVRYLLDDPARGRPSAVLVLFGTGDAGTDLLLVRRSRTLRSHPDEVCFPGGSVSAGDRDVVHTALRESAEETGLDPAGVAVAGTLRPLRIAWTDFRVTPVLGWWGAEAEPRGDRGEVVSVHRVPLAEFADPANRFRVRYQDGYISPGFLVRELFVWGFTGSIVDWLMRLAGWGRPWDTSRIEELPDALRRYGGGFGR

SEQ ID NO: 24694 - protein, 367 aa, Aspergillus oryzae
MEYPPQYQQPHGQHPHAPSHIAAPYQTAPQNPGSTVGSMTSPTNPQAHMQQAHPTHQASPIVPSQSHYQQAQNAPGSVHQQMNFPQSYGVTTAMPQTFGISPTQAAAMATAAASGQFYPLHQDSMAGQMQQGPRGSPRMAGVQQVKNERNPRSPPQMPGQMPSMGSQVQMQQNAQIQQRRMSHVGSPHVQAAQPVLNHVVRPSVPPPMPPPPQPAVQQSQPSPDMAVGAVEESPLYVNAKQFHRILKRRVARQKLEEQLRLTSKGRKPYLHESRHNHAMRRPRGPGGRFLTADEVANLEKKNNAGGQENVDSKPTGENPPSAQKRKSSDVNDENTNSAKKAKTSVAKTSTSAEESEHESAEPSDEDG

SEQ ID NO: 24695 - protein, 857 aa, Campylobacter jejuni
MANIQDFLTDNMLSNLESAASLAIHSKNNEVVPLHLLWALSVDNASILNQILNKLNISKEALELEIKSRISKLATSSNVNRENIRFSNELINSLENAKGLMSANGDSYLSVDTWLISESQKSPIKEILAQFLDLREFQKELESLRAGRKIDSKTSDETLDSLNKFGIDLTLKASEGKLDPVIGREEEIERLMQILIRKTKNNPILLGEPGVGKTAIVEALAQRIIKKDVPKSLQNKKVIALDMSALIAGAKYRGEFEDRLKAVVNEVIKSENIILFIDEIHTIVGAGASEGSMDAANILKPALARGELHTIGATTLKEYRKYFEKDAALQRRFQPVNVGEPSVNEALAMLRGIKEKLEIHHNVTINDSALVAAAKLSKRYITDRFLPDKAIDLIDEAAAELKMQIESEPSSLRKVRKDIETLEVENEALKMENDEKNQKRLDEIAKELANLKEKQNALNSQFENEKSVFDGISAKKKEIDLLKNEASLAKARGEFQKAAELEYGKIPSLEKEVEILEDKWKKMSENGVLLKNQVDEDLVAGILSKWTGISVQKMLASEKQKFLEVEKHLKESVIGQDKALSALARAIKRNKAGLNADNKPIGKLLFLGPTGVGKTQSAKALAKFLFDDEKAMIRFDMSEFMEKHSVSRLLGAPPGYIGHEEGGELTEAVRRKPYSVLLFDEVEKAHKDVFNVLLGILDDGRATDSKGVTVDFKNTIIILTSNIASSAIMNLSGKEQEDAVKNELKNFSKPEFLNRLDDIITFNPLGKDEAYEIVKLLFKDLQMSLENKGIKASLSENAALLIAKDGFDPDFGARPLRRAIYDLIEDKLSDMILADELHENDSIIIDAKDDEIIIKKA

SEQ ID NO: 24696 - protein, 275 aa, Arabidopsis thaliana
MIKLLFTYICTYTYKLYALYHMDYACVCMYKYKGIVTLQVCLFYIKLRVFLSNFTFSSSILALKNPNNSLIKIMAILPENSSNLDLTISVPGFSSSPLSDEGSGGGRDQLRLDMNRLPSSEDGDDEEFSHDDGSAPPRKKLRLTREQSRLLEDSFRQNHTLNPKQKEVLAKHLMLRPRQIEVWFQNRRARSKLKQTEMECEYLKRWFGSLTEENHRLHREVEELRAMKVGPTTVNSASSLTMCPRCERVTPAASPSRAVVPVPAKKTFPPQERDR

SEQ ID NO: 24697 - protein, 437 aa, Arabidopsis thaliana
MEESSNQQILNSETRPDPIQKPPESPATKLSFPRLFLWFDQSNRIKTLLSWSIFFLLAVIVPMISHFVLICADCDFKHRRPYDGLVQLSLSIFAGISFVSLSDWSKKYGIRRFLFFDKLKDVSDKVRIGYEAKIQRSMKLLAIFVLPSTTLQAIYRIWWYASGFNQIPYIINPTLSHVLACTLQLSSWLYRTSLFIIACILYQNICHLQVLRLDEFARCFASEIKDFSSILAEHLKIRRELKIVSHRFRRFILLSLFFVTATQFMALLTTIRASVPFNIYEVGELALCSTSLVSGLFICLKSATQMTHKAQSVTSIATKWNVCASLDTFDVLYDGETPKCPTTTQHSQILSRRRNVVQSSDDDEEGEGDDNDLEIHPIFARAISSQKRQALVTYLENNRAGITVYGFLVDKTWLRMIFSIELALLLWLLKKTIMNIT

SEQ ID NO: 24698 - protein, 428 aa, Arabidopsis thaliana
MSSRICAMAKPNDAETLSSSVDMSLSPRVQSLKPSKTMVITDLAATLVQSGVPVIRLAAGEPDFDTPKVVAEAGINAIREGFTRYTLNAGITELREAICRKLKEENGLSYAPDQILVSNGAKQSLLQAVLAVCSPGDEVIIPAPYWVSYTEQARLADATPVVIPTKISNNFLLDPKDLESKLTEKSRLLILCSPSNPTGSVYPKSLLEEIARIIAKHPRLLVLSDEIYEHIIYAPATHTSFASLPDMYERTLTVNGFSKAFAMTGWRLGYLAGPKHIVAACSKLQGQVSSGASSIAQKAGVAALGLGKAGGETVAEMVKAYRERRDFLVKSLGDIKGVKISEPQGAFYLFIDFSAYYGSEAEGFGLINDSSSLALYFLDKFQVAMVPGDAFGDDSCIRISYATSLDVLQAAVEKIRKALEPLRATVSV

SEQ ID NO: 24699 - protein, 375 aa, Arabidopsis thaliana
MCGGAIISDFIPPPRSLRVTNEFIWPDLKNKVKASKKRSNKRSDFFDLDDDFEADFQGFKDDSAFDCEDDDDVFVNVKPFVFTATTKPVASAFVSTVGSAYAKKTVESAEQAEKSSKRKRKNQYRGIRQRPWGKWAAEIRDPRKGSREWLGTFDTAEEAARAYDAAARRIRGTKAKVNFPEEKNPSVVSQKRPSAKTNNLQKSVAKPNKSVTLVQQPTHLSQQYCNNSFDNSFGDMSFMEEKPQMYNNQFGLTNSFDAGGNNGYQYFSSDQGSNSFDCSEFGWSDHGPKTPEISSMLVNNNEASFVEETNAAKKLKPNSDESDDLMAYLDNALWDTPLEVEAMLGADAGAVTQEEENPVELWSLDEINFMLEGDF

SEQ ID NO: 24700 - protein, 374 aa, Arabidopsis thaliana
MCGGAIISDFIPPPRSLRVTNEFIWPDLKNKVKASKKRSNKRSDFFDLDDDFEADFQGFKDDSAFDCEDDDDVFVNVKPFVFTATTKPVASAFVSTGSAYAKKTVESAEQAEKSSKRKRKNQYRGIRQRPWGKWAAEIRDPRKGSREWLGTFDTAEEAARAYDAAARRIRGTKAKVNFPEEKNPSVVSQKRPSAKTNNLQKSVAKPNKSVTLVQQPTHLSQQYCNNSFDNSFGDMSFMEEKPQMYNNQFGLTNSFDAGGNNGYQYFSSDQGSNSFDCSEFGWSDHGPKTPEISSMLVNNNEASFVEETNAAKKLKPNSDESDDLMAYLDNALWDTPLEVEAMLGADAGAVTQEEENPVELWSLDEINFMLEGDF

SEQ ID NO: 24701 - protein, 348 aa, Arabidopsis thaliana
MARVLVSSPSSFFGSPLIKPSSSLRHSGVGGGGTAQFLPYRSNNNKLFTTSTTVRFSLNEIPPFHGLDSSVDIGAIFTRAESLLYTIADAAVVGADSVVTTDSSAVQKSGGWFGFISDAMELVLKILKDGLSAVHVPYAYGFAIILLTIIVKAATYPLTKQQVESTLAMQNLQPKIKAIQQRYAGNQERIQLETSRLYKQAGVNPLAGCLPTLATIPVWIGLYQALSNVANEGLFTEGFFWIPSLGGPTSIAARQSGSGISWLFPFVDGHPPLGWYDTVAYLVLPVLLIASQYVSMEIMKPPQTDDPAQKNTLLVFKFLPLMIGYFALSVPSGLSIYWLVSLSLKLLI

SEQ ID NO: 24702 - protein, 135 aa, Arabidopsis thaliana
MSLQRPNGNSSSSSSHKKHKTAAGSTCVLSSSADDGVNNPELDQTQNGVSTAKRRRGRNPVDKEYRSLKRLLRNRVSAQQARERKKVYVSDLESRANELQNNNDQLEEKISTLTNENTMLRKMLINTRPKTDDNH

SEQ ID NO: 24703 - protein, 480 aa, Arabidopsis thaliana
MDEAKEENRRLKSSLSKIKKDFDILQTQYNQLMAKHNEPTKFQSKGHHQDKGEDEDREKVNEREELVSLSLGRRLNSEVPSGSNKEEKNKDVEEAEGDRNYDDNEKSSIQGLSMGIEYKALSNPNEKLEIDHNQETMSLEISNNNKIRSQNSFGFKNDGDDHEDEDEILPQNLVKKTRVSVRSRCETPTMNDGCQWRKYGQKIAKGNPCPRAYYRCTIAASCPVRKQVQRCSEDMSILISTYEGTHNHPLPMSATAMASATSAAASMLLSGASSSSSAAADLHGLNFSLSGNNITPKPKTHFLQSPSSSGHPTVTLDLTTSSSSQQPFLSMLNRFSSPPSNVSRSNSYPSTNLNFSNNTNTLMNWGGGGNPSDQYRAAYGNINTHQQSPYHKIIQTRTAGSSFDPFGRSSSSHSPQINLDHIGIKNIISHQVPSLPAETIKAITTDPSFQSALATALSSIMGGDLKIDHNVTRNEAEKSP

SEQ ID NO: 24704 - protein, 411 aa, Arabidopsis thaliana
MSGGIMDEEIEIPPFFLCPISLEIMKDPVIVSTGITYDRDSIEKWLFAGKKNSCPVTKQDITDADLTPNHTLRRLIQSWCTLNASYGVERIPTPRPPICKSEIEKLIRDSASSHENQVKCLKRLRQIVSENATNKRCLEAAGVPEFLANIVSNDSENGSLTDEALNLLYHLETSETVLKNLLNNKKDNNIVKSLTKIMQRGMYESRVYATLLLKNILEVADPMQSMTLKPEVFTEVVQILDDRISQKATKAAMHILVNICPWGRNRHKAVEAGVISVIIELLMDESFTSERRGPEMAMVVLDLLCQCAEGRAEFLNHGAAIAVVCKKILRVSQTASDRAVRVLLSVGRFCATPALLHEMLQLGVVAKLCLVLQVSCGGKTKEKAKELLKLHARVWKDSPCLPKNMILAYPC

SEQ ID NO: 24705 - protein, 174 aa, Arabidopsis thaliana
MAVTAFNTLKLVSSSLDPIPSVSCSSYSFSLIYVGSPYKRCLKQSCSVRAMTSSSSAASSSSSSFGSRMEESIRKTVTENTVVIYSKTWCSYCTEVKTLFKRLGVQPLVVELDQLGPQGPQLQKVLERLTGQHTVPNVFVCGKHIGGCTDTVKLNRKGDLELMLAEANGKNGQS

SEQ ID NO: 24706 - protein, 428 aa, Arabidopsis thaliana
MEHQGWSFEENYSLSTNRRSIRPQDELVELLWRDGQVVLQSQTHREQTQTQKQDHHEEALRSSTFLEDQETVSWIQYPPDEDPFEPDDFSSHFFSTMDPLQRPTSETVKPKSSPEPPQVMVKPKACPDPPPQVMPPPKFRLTNSSSGIRETEMEQYSVTTVGPSHCGSNPSQNDLDVSMSHDRSKNIEEKLNPNASSSSGGSSGCSFGKDIKEMASGRCITTDRKRKRINHTDESVSLSDAIGNKSNQRSGSNRRSRAAEVHNLSERRRRDRINERMKALQELIPHCSKTDKASILDEAIDYLKSLQLQLQVMWMGSGMAAAAASAPMMFPGVQPQQFIRQIQSPVQLPRFPVMDQSAIQNNPGLVCQNPVQNQIISDRFARYIGGFPHMQAATQPMEMLRFSSPAGQQSQQPSSVPTKTTDGSRLDH

SEQ ID NO: 24707 - protein, 356 aa, Securigera parviflora
MSLLSDLINLNLSETTDKIIAEYIWIGGSGLDLRSKARTLPGPVSDPSELPKWNYDGSSTGRAPGEDSEVILYPQAIFKDPFRRGSNILVICDAYTPAGEPIPTNKRHAAAKVFSHPDVVAEVPWYGIEQEYTLLQKEVNWPLGWPLGGFPGPQGPYYCGTGADKALGRDIVDAHYKACLYAGVSISGINGEVMPGQWEFQVGPSVGISAGDEVWVARYVLERITEIAGVVLSFDPKPIKGDWNGAGAHTNYSTKTMREDGGYEIIKKAIEKLGLRHKEHIAAYGEGNERRLTGRHETADINTFLWGVANRGASIRVGRDTEKAGKGYFEDRRPASNMDPYVVTSMIADTTILWKP

SEQ ID NO: 24708 - protein, 284 aa, Securigera parviflora
GQATGEDSVVILHPQAVFKDPFRRGNNILVICDSYTPSGVPIPTNKRHDDAKIFSHPDVVAEEPWYGIEQEYTLLQKDTLWPYGWPVGGYPDSQGPYYCGNGADKAFGRDIVNAHYKACLYAGINISGINAEVMPGQWEFQVGPAVGISAGDEIWVARYILERITEMAGVVLSFDPKPIKGDWNGAGAHANYSTKSMRNDGGYEVIKSAIAKLEKRHKEHIAAYGEGNERRLTGKHETADINTFLWGVANRGASVRVGRETEKAGKGYFEDRRPASNMDPYVVT

SEQ ID NO: 24709 - protein, 356 aa, Securigera parviflora
MSLLTDLVNLNLSESTEKIIAEYIWVGGSGLDIRSKARTLPGPVSDPAKLPKWNYDGSSTDQAPGEDSEVILYPQAIFRDPFRRGSNILVICDVYTPAGEPLPSSYRYNAAKIFSHPEVAAEEPWYGIEQEYTLLQKDINWPLGWPVGGFPGQQGPYYCGIGADKAYGRDIVDAHYKACLYAGINISGINGEVMPGQWEFQVGPSVGISAGDEIWAARYILERITEIAGAVVSFDPKPIPGDWNGAGAHTNYSTKSMREDGGFEIIKKAIEKLGLKHKEHIAAYGKGNERRLTGKHETADINTFSWGVANRGASVRVGRETEKEGKGYFEDRRPASNMDPYIVTSMIAETTILWKP

SEQ ID NO: 24710 - protein, 98 aa, Securigera parviflora
MSLLSDLINLNLSETTDKIIAEYIWIGGSGLDLRSKARTLPGPVSDPSELPKWNYDGSSTGRAPGEDSEVILYPQAIFKDPFRRGSNILVICDAYTPA

SEQ ID NO: 24711 - protein, 512 aa, Arabidopsis thaliana
MCGILAVLGCSDDSQAKRVRVLELSRRLRHRGPDWSGLYQNGDNYLAHQRLAVIDPASGDQPLFNEDKTIVVTVNGEIYNHEELRKRLKNHKFRTGSDCEVIAHLYEEYGVDFVDMLDGIFSFVLLDTRDNSFMVARDAIGVTSLYIGWGLDGSVWISSEMKGLNDDCEHFETFPPGHFYSSKLGGFKQWYNPPWFNESVPSTPYEPLAIRRAFENAVIKRLMTDVPFGVLLSGGLDSSLVASITARHLAGTKAAKQWGPQLHSFCVGLEGSPDLKAGKEVAEYLGTVHHEFHFSVQDGIDAIEDVIYHVETYDVTTIRASTPMFLMSRKIKSLGVKMVLSGEGADEIFGGYLYFHKAPNKKEFHQETCRKIKALHKYDCLRANKSTSAFGLEARVPFLDKDFINTAMSLDPESKMIKPEEGRIEKWVLRRAFDDEERPYLPKHILYRQKEQFSDGVGYSWIDGLKDHAAQNVNDKMMSNAGHIFPHNTPNTKEAYYYRMIFERFFPQVRVL

SEQ ID NO: 24712 - protein, 416 aa, Arabidopsis thaliana
MDGSMNLGNEPPGDGGGGGGLTRQGSIYSLTFDEFQSSVGKDFGSMNMDELLKNIWSAEETQAMASGVVPVLGGGQEGLQLQRQGSLTLPRTLSQKTVDQVWKDLSKVGSSGVGGSNLSQVAQAQSQSQSQRQQTLGEVTLEEFLVRAGVVREEAQVAARAQIAENNKGGYFGNDANTGFSVEFQQPSPRVVAAGVMGNLGAETANSLQVQGSSLPLNVNGARTTYQQSQQQQPIMPKQPGFGYGTQMGQLNSPGIRGGGLVGLGDQSLTNNVGFVQGASAAIPGALGVGAVSPVTPLSSEGIGKSNGDSSSLSPSPYMFNGGVRGRKSGTVEKVVERRQRRMIKNRESAARSRARKQAYTVELEAEVAKLKEENDELQRKQARIMEMQKNQETEMRNLLQGGPKKKLRRTESGPW

SEQ ID NO: 24713 - protein, 668 aa, Arabidopsis thaliana
MARSFGANSTVVLAIIFFGCLFAFSTAKEEATKLGSVIGIDLGTTYSCVGVYKNGHVEIIANDQGNRITPSWVGFTDSERLIGEAAKNQAAVNPERTVFDVKRLIGRKFEDKEVQKDRKLVPYQIVNKDGKPYIQVKIKDGETKVFSPEEISAMILTKMKETAEAYLGKKIKDAVVTVPAYFNDAQRQATKDAGVIAGLNVARIINEPTAAAIAYGLDKKGGEKNILVFDLGGGTFDVSVLTIDNGVFEVLSTNGDTHLGGEDFDHRIMEYFIKLIKKKHQKDISKDNKALGKLRRECERAKRALSSQHQVRVEIESLFDGVDLSEPLTRARFEELNNDLFRKTMGPVKKAMDDAGLQKSQIDEIVLVGGSTRIPKVQQLLKDFFEGKEPNKGVNPDEAVAYGAAVQGGILSGEGGDETKDILLLDVAPLTLGIETVGGVMTKLIPRNTVIPTKKSQVFTTYQDQQTTVSIQVFEGERSLTKDCRLLGKFDLTGVPPAPRGTPQIEVTFEVDANGILNVKAEDKASGKSEKITITNEKGRLSQEEIDRMVKEAEEFAEEDKKVKEKIDARNALETYVYNMKNQVSDKDKLADKLEGDEKEKIEAATKEALEWLDENQNSEKEEYDEKLKEVEAVCNPIITAVYQRSGGAPGAGGESSTEEEDESHDEL

SEQ ID NO: 24714 - protein, 403 aa, Arabidopsis thaliana
MAHTSESVNPRDVCIVGVARTPMGGFLGSLSSLPATKLGSLAIAAALKRANVDPALVQEVVFGNVLSANLGQAPARQAALGAGIPNSVICTTVNKVCASGMKAVMIAAQSIQLGINDVVVAGGMESMSNTPKYLAEARKGSRFGHDSLVDGMLKDGLWDVYNDCGMGSCAELCAEKFQITREQQDDYAVQSFERGIAAQEAGAFTWEIVPVEVSGGRGRPSTIVDKDEGLGKFDAAKLRKLRPSFKENGGTVTAGNASSISDGAAALVLVSGEKALQLGLLVLAKIKGYGDAAQEPEFFTTAPALAIPKAIAHAGLESSQVDYYEINEAFAVVALANQKLLGIAPEKVNVNGGAVSLGHPLGCSGARILITLLGILKKRNGKYGVGGVCNGGGGASALVLELL

SEQ ID NO: 24715 - protein, 356 aa, Arabidopsis thaliana
MKPVFCGNFEYDARESDLERLFRKYGKVERVDMKAGFAFVYMEDERDAEDAIRALDRFEYGRTGRRLRVEWTKNDRGGAGRSGGSRRSSSGLRPSKTLFVINFDAQNTRTRDLERHFEPYGKIVNVRIRRNFAFIQYEAQEDATRALDATNSSKLMDKVISVEYAVKDDDSRGNGYSPERRRDRSPDRRRRSPSPYRRERGSPDYGRGASPVAHKRERTSPDYGRGRRSPSPYKRARLSPDYKRDDRRRERVASPENGAVRNRSPRKGRGESRSPPPYEKRRESRSPPPYEKRRESRSPPPYEKRRERSRSRSKSSPENGQVESPGQIMEVEAGRGYDGADSPIRESPSRSPPAEE

SEQ ID NO: 24716 - protein, 579 aa, Arabidopsis thaliana
MCGILAVLGCIDNSQAKRSRIIELSRRLRHRGPDWSGLHCYEDCYLAHERLAIIDPTSGDQPLYNEDKTVAVTVNGEIYNHKILREKLKSHQFRTGSDCEVIAHLYEEHGEEFIDMLDGMFAFVLLDTRDKSFIAARDAIGITPLYIGWGLDGSVWFASEMKALSDDCEQFMSFPPGHIYSSKQGGLRRWYNPPWYNEQVPSTPYDPLVLRNAFEKAVIKRLMTDVPFGVLLSGGLDSSLVAAVALRHLEKSEAARQWGSQLHTFCIGLQGSPDLKAGREVADYLGTRHHEFQFTVQDGIDAIEEVIYHIETYDVTTIRASTPMFLMSRKIKSLGVKMVLSGEGSDEILGGYLYFHKAPNKKEFHEETCRKIKALHQFDCLRANKSTSAWGVEARVPFLDKEFLNVAMSIDPEWKLIKPDLGRIEKWVLRNAFDDEERPYLPKHILYRQKEQFSDGVGYSWIDGLKDHANKHVSDTMLSNASFVFPDNTPLTKEAYYYRTIFEKFFPKQSAARATVPGGPSIACSTAKAVEWDATWSKNLDPSGRAALGVHVAAYEEDKAAAAAKAGSDLVDPLPKNGT

SEQ ID NO: 24717 - protein, 116 aa, Thiocapsa roseopersicina
MKIGIPLETAPGETRVASIPEVVKKLVGKGFEVMVEAGAGVRAGYPDEDYAAAGATPADRAGAFDVDLLLKVRRPDVADVEALRPGGLYIGLLESCGEDEILSAMLAKGVRVLGME

SEQ ID NO: 24718 - protein, 280 aa, Securigera parviflora
KRGNILEKGPENASQVMLSGPVLNEGDLESLLKDSLLKPQVLPTFFDITKGIDGSLEKALNKLCEAADEAVRNGSQLLILSDRSEALEPTHPSIPILLAVGTVHQHLIQNGLRMSASIIADTAQCFSTHQFACLVGYGASAVCPYLALETCRQWRLSGKTVNLMRNGKMPTVSIEQAQKNYCKAVKAGLLKILSKMGISLLSSYCGAQIFEVYGLGKEVVDLAFRGSVSKIGGLTFDELARETLSFWVKAFSEDTAKRLENFGFIQFRPGGEYHANNPEM

SEQ ID NO: 24719 - protein, 661 aa, Brassica juncea
MQIAVLPIGKFMARTLPTTSHRLMGWEWSLNPGPFNIKEHIIITIFANCGVAYGGGDAYSIGAITVMKAYYKQSLSFICGLFIVLTTQILGYGWAGILRRYLVDPVDMWWPSNLAQVSLFRALHEKEHKSKGLTRMQFFLVALGASFLYYALPGYLFPILTFFSWVCWAWPNSITAQQVGSGYHGLGVGAFTLDWAGISAYHGSPLVAPWSSILNVGVGFIMFIYIIVPVCYWKFDTFDARKFPIFSNQLFTSAGQKYDTTKILTPRFDLDINAYNNYGKLYLSPLFALSIGSGFARFTATLTHVALFNGRDIWRQTWSAVKTVKLDIHGKLMQRYKQVPEWWFYVLLVGSVALSLLMSFVWKESVQLPWWGMLFAFAMAFIVTLPIGVIQATTNQQPGYDIIGQFIIGYILPGKPIANLIFKIYGRISTVHALSFLADLKLGHYMKIPPRCMYTAQLVGTVVAGVVNLGVAWWMLESIQDICDIEGDHPNSPWTCPKYRVTFDASVIWGLIGPKRLFGAGGMYRNLVWLFLIGAVLPVPVWAMSKIFPDKKWIPLINIPVISYGFAGMPPATPTNIASWLVTGTIFNYFVFNYHKRWWQKYNCVLSAALDAGTAFMGVLLFFALQNAGHDLKWWGTEVDHCPLASCPTAPGIIAKGCPVF

SEQ ID NO: 24720 - protein, 541 aa, Hordeum vulgare
LTRSPVITNHLFRHEQGEAFAASGYARASGRVGVCVATSGPGATNLVSALADALLDSIPMVAITGQVPRRMIGTDAFQETPIVEVTRSITKHNYLVLDVEDIPRVIQEAFFLASSGRPGPVLVDIPKDIQQQMAVPVWDTPMSLPGYIARLPKPPSTESLEQVLRLVGEARRPILYVGGGCAASGEELRRFVELTGIPVTTTLMGLGNFPSDDPLSLRMLGMHGTVYANYAVDKADLLLAFGVRFDDRVTGKIEAFASRSKIVHIDIDPAEIGKNKQPHVSICADVKLALQGLNGLLSGSKAQQGLDFGPWHKELDQQKREFPLGYKTFGEAIPPQYAIQVLDELTKGEAIIATGVGQHQMWAAQYYTYKRPRQWLSSSGLGAMGFGLPAAAGASVANPGVTVVDIDGDGSFLMNIQELALIRIENLPVKVMILNNQHLGMVVQWEDRFYKANRAHTYLGNPENESEIYPDFVTIAKGFNVPAVRVTKKSEVSAAIKKMLETPGPYLLDIIVPHQEHVLPMIPSGGAFKDMIMEGDGRTSY

SEQ ID NO: 24721 - protein, 352 aa, Arabidopsis thaliana
MARSPCCEKNGLKKGPWTSEEDQKLVDYIQKHGYGNWRTLPKNAGTCLQRCGKSCRLRWTNYLRPDIKRGRFSFEEEETIIQLHSFLGNKWSAIAARLPGRTDNEIKNFWNTHIRKKLLRMGIDPVTHSPRLDLLDISSILASSLYNSSSHHMNMSRLMMDTNRRHHQQHPLVNPEILKLATSLFSQNQNQNLVVDHDSRTQEKQTVYSQTGVNQYQTNQYFENTITQELQSSMPPFPNEARQFNNMDHHFNGFGEQNLVSTSTTSVQDCYNPSFNDYSSSNFVLDPSYSDQSFNFANSVLNTPSSSPSPTTLNSSYINSSSCSTEDEIESYCSNLMKFDIPDFLDVNGFII

SEQ ID NO: 24722 - protein, 1031 aa, Arabidopsis thaliana
MEGGRGGGDGNFLPNSNFGVFSDSAMDMDFMDELLFDGCWLETTDGKSLKQTMGQQVSDSTTMNDNNNNSYLYGYQYAENLSQDHISNEETGRKFPPIPPGFLKIEDLSNQVPFDQSAVMSSAQAEKFLLEESEGGRRYWIAPRTSQGPSSSVKERLVQAIEGLNEEVQDKDFLIQIWLPIQQEGKNFLTTSEQPHFFNPKYSSLKRYRDVSVAYNFLADEDSKESVGLPGRVFLKKLPEWTPDVRFFRSEEYPRIKEAEQCDVRGSLALPVFERGSGTCLGVVEIVTTTQKMNYRPELDNICKALESVNLRSSRSLNPPSREVCKNGLLNQTLTSSIHRNNEFWLLNVICPFCFSFCRVYDLPLALTWAPCARQGKVGSRHSDENFSECVSTVDDACIVPDHQSRHFLEACSEHHLLQGEGIVGKAFNATKLFFVPEVTTFSKTNYPLAHHAKISGLHAALAVPLKNKFNSSVEFVLEFFFPKACLDTEAQQDMLKSLSATLQQDFRSLNLFIDKELELEVVFPVREEVVFAENPLINAGTGEDMKPLPLEEISQEDSSWISHMIKANEKGKGVSLSWEYQKEEPKEEFMLTSGWDNNQIGSGHNNFLSEAEQFQKVTNSGLRIDMDPSFESASFGVGQTLLGSRRPGEKRRTKTEKTIGLEVLRQYFAGSLKDAAKSIGESDDSFTQFHFHVAVCPTTLKRICRQHGITRWPSRKIKKVGHSLKKLQLVIDSVQGVQGSIQLDSFYTSFPELSSPHMSGTGTSFKNPNAQTENGVSAQGTAAAPKSPPSSSCSHSSGSSTCCSTGANQSTNTGTTSNTVTTLMAENASAILKRARSEVRLHTMNQDETKSLSRTLSHKTFSEHPLFENPPRLPENSSRKLKAGGASKVKATFGEAKHEIARRFNIDNIAPFDLKYLDDDKEWVLLTCEADLEECIDIYRSSQSRTIKISVHEASQVKLGGICVQEREPPSGVIFQVPNQSISVKSSNQYLLKKQVSLQTKGSRFGLFLFLSDSVSDTKEDIDPEPIIAT

SEQ ID NO: 24723 - protein, 160 aa, Raphanus sativus
MESEGKIVFTEEQEALVVKSWSVMKKNSADLGLKLFIKIFEIAPTAKKLFSFLRDSPIPAEQNPKLKPHAMSVFVMCCESAAQLRKTGKVTVKETTLKRLGANHSKYGVVDEHFEVTKYALLETIKEAVPEMWSPEMKSAWGQAYDHLVAAIKAEMKPSH

SEQ ID NO: 24724 - protein, 455 aa, Rhizobium leguminosarum bv. trifolii
MANIENSAGKPDAGLVRKGLTEALFAAVLSFGMFVLYVGLKTDQNISNELIIVQRWGLLAIFVAVAAIGRSPRWFSRPHLDSRKLAKSRQGELDISTEKSFFHRHFLKIALIALLLYPMVVVAFKGPQGSLTYVDNFGIQILIYVMLAWGLNIVVGLAGLLDLGYVAFYAVGAYSYALLSSYFGLSFWVLLPLSGIFAALWGVILGFPVLRLRGDYLAIVTLAFGEIIRLVLINWTEVTKGTFGISSIPKATLFGIPFDATAGGFAKLFHLPISSAYYKNFLFYLILALCMLTAYVTNSVRRMPIGRAWEALREDEIACRSLGINTVTTKLTAFATGAMFAGFAGSFFAARQGFVSPESFVFLESAVILAIVVLGGMGSLTGIAIAAIVMVGGTELLRSMDFLKLIFGPDFTPELYRMLIFGLAMVVVMLFKPRGFVGSREPTAFLRERKAISGS

SEQ ID NO: 24725 - protein, 672 aa, Hypocrea jecorina
MGPAVGIDLGTTYSCVGIFREDRCDIIANDQGNRTTPSFVAFTDTERLIGDAAKNQVAMNPQNTVFDAKRLIGRKFADPEVQADMKHFPFKVIDKNSKPVIEVEFKGEKKTFTPEEISSMVLTKMREAAEAYLGTTVNNAVITVPAYFNDSQRQATKDAGLIAGLNVLRIINEPTAAAIAYGLDKKVEGERNVLIFDLGGGTFDVSLLTIEEGIFEVKSTAGDTHLGGEDFDNRLVNHFVNEFKRKHKKVSSSTHVAPHSLDARHMLTPDRDLSTNARALRRLRTACERAKRTLSSSAQTSIEIDSLYEGIDYYTSITRARFEELCQDLFRSTIQPVDRVLADAKIDKSQVHEIVLVGGSTRIPRIQKPITDYFNGKEPNKSINPDEAVAYGAAVQAAILSGDTTSKSTNEILLLDVAPLSLGIETAGGMMTKLIPRNTTIPTKKSEVFSTFSDNQPGVLIQVYEGERQRTKDNNLLGKFELTGIPPAPRGVPQIEVTFDVDANGIMNVSAVEKGTGKSNKIVITNDKGRLSKEEIERMLSDAEKYKEEDEAEAKRVSAKNGLESYAYSLRNTLNDPKVDEKIEAADKETLKSEIDKIVQWLDDNQQASTEEYESHQKELEGVANPIMMKFYGAGGEGGMPGGMPGGAGGFPGAGGAPHQGGDDGPTVEEVD

SEQ ID NO: 24726 - protein, 441 aa, Eubacterium acidaminophilum
MVSLNNEAPQVKKPDNQVYYISMLIVLGIVGWGMIFKDNFATFASNLLSFLSETFGWAYLMSMFVFVVFAAGLAFSKFGNVKLGPDDSTPDFSTKSWFAMLFGAGMGIGLVFWGVAEPIFHYLAPLGIEPGSKEAVDFAFKTSFKHWGFHPWANYSVIGLALAYMQFRKGKPGLISSIFIPIFGEERVQGPIGKTIDILAVFATVAGVATSLGMGTLQIGSGISYIFGIEQTNMMNILIIAVVTVLFIWTAVSGIDKGIKILGDINLVLAGTLLVGTFLIGPKVATMNAFSNGLGLYLNDFLKDSLSINAFGDNSWLKSWTVFYWAWWIAWAPFGGSFIARISRGRTIREFVGGVIFAPAVASFVWFAVFGALGVGLSDKLGLDGLKAAVGAPETALFAVMQHYNLGTLLSFVTLLLLCTFFITSANSATFVLGMFTSEEI

SEQ ID NO: 24727 - protein, 210 aa, Eucalyptus occidentalis
MVRGKIQLRRIENTTSRQVTFSKRRNGLLKKAYELSVLCDAEVAVIIFSQKGRPYEFSSNSEIQKTIDRYRRSTYDMDTYKTNLDQCILHLKQETTDMERKIELLEVSLRKLSGECLGSCSIDEIQMIGDQLERSLSSIRARKAQLFDDQIQHLQAKERSLKEENAKLLAKCLANPGQSTAHPRAAALHSRSSRSTDVETRLFIGLPELN

SEQ ID NO: 24728 - protein, 404 aa, Haemophilus influenzae Rd KW20
MKLPIYLDYAATCPVDERVAKKMMAFLTIDGTFGNPASRSHKFGWQAEEAVDIARNQIADLIGADSREIVFTSGATESDNLAIKGAAHFYQTKGKHIITCKTEHKAVLDTCRQLEREGFEVTYLSPEADGLIDLEKFKAALRPDTILASIMHANNEIGVLQDIKAIGELCRANKTIFHVDATQSVGKVEINLEELAVDLMSMSSHKLYGPKGVGALYVRRKPRVRLEAIIHGGGHERGMRSGTLPVHQIVGMGEAYRIAKEEMASEMPRLKALRDRLYNGLKDIEETYVNGSMEHRLDSNLNISFNYVEGESLMMALRDIAVSSGSACTSASLEPSYVLRALGLNDELAHSSIRFTLGRYTTEEEIDYTINLMKGAVEKLRALSPLWDMFKEGIDLNTIEWSAH

SEQ ID NO: 24729 - protein, 107 aa, Haemophilus influenzae Rd KW20
METLDKIKKQISENPILIYMKGSPKLPSCGFPARASEALMHCKVPFGYVDILQHPDIRAELPTYANWPTFPQLWVEGELIGGCDIILEMYQAGELQTLLAEVAAKHA

SEQ ID NO: 24730 - protein, 647 aa, Haemophilus influenzae Rd KW20
MAMIFIAPEQTQALLNQAKSGIFANFSWFYVLTFSVFLGFLLILSVSSLGNIKLGQDEEEPEFSFLSWLAMLFAAGMGVGLMFFGVAEPLTHYLSDITAGSAEHKQQEALLHTLFHWGIHAWAVYGTIALALAYFGFRYKLPLALRSCFYPLLKDRINGKIGDAIDVMALLATLFGIITTLGFGSSQLGAGLEQIGWISQNSFALQVGVIVVVMCLAVFSAISGVGKGVKILSEINLTLAFCLLLFVLISGPTLYLLSAFSDNIGNYFSNLVQLSFKTYAYEQEHTSWFSGWTVLYWAWWCSWAPFVGLFIARISKGRTIREFIFGVLVIPSLFGILWFTVFGNTAVWLNDGIAAGGLGEFISSPEILLFKFLNYLPLPTITGFVSLLVILLFFITSADSGIYVLNNIASRDKSLASPAWQAIMWGTLMSVVAIVLMQSGGLANLQTMTLIVALPFALLMLVMCFSLWKGLIADKKYFSTKVNPTSIFWSGDKWKSHLEQMMNQTQEKDILRFLKNTALPAMRELRQELTGKYNLSVEINTLFEQEEPALELVIHKESMRDFMYGIKSVGREVSEQLINDENLPHIQHSATYEPYTYFFDGRVGYDVQYMDQDELIADMLKQYERYLSLLDDVGQELMAHEQTELAE

SEQ ID NO: 24731 - protein, 158 aa, Glycine max
EFQVGPSIGISAADELWVARYILERITEIAGVVLSFDPKPIQGDWNGAGAHTNYSTKSMRNDGGYEVIKKAIAKLEKRHKEHIAAYGEGNERRLTGRHETADMNTFVWGVANRGASIRVGRDTEKAGKGYFADRRPASNMDPYVVTSMIAETTILWKP

SEQ ID NO: 24732 - protein, 780 aa, Sulfolobus acidocaldarius
MRINILRVEYHSKTAHSILLQLDLFKKVKVICHMSQSIKFRVTEARQRDVGKKVARISETSMRKLNVEAGDYIEIIGQDGNSALAQVMPAYDISDDEIRIDGYIRKSIKVGIGDDVTVRKTNVSPASKVVLAPTQPIRFDNSFVEYVKDTLMDKPLAKGETLPIPIYTGTLELTVVNTQPSNYVYVTGSTNIEIREEPVKESSLAYPKVSWEDIGDLEEAKQKIREIVEWPMRHPELFQRLGIDPPKGILLYGPPGTGKTLLARALRNEIGAYFITVNGPEIMSKFYGESEQRIREIFKEAEENAPSIIFIDEIDAIAPKREDVTGEVEKRVVAQLLTLMDGIKGRGRVIVIGATNRPDAIDPALRRPGRFDREIEIRPPDTKGRKDILQVHTRNMPITDDVDLDKLAEMTYGYTGADLAALAKEAAIYALRRFVDEKKLNLDQPTIPAEIIKELKVSMNDFLNALKSIQPSLLREVYVEVPKVNWNDIGGLDNVKQQLREAVEWPLRFPELFTKSGVTPPKGILLFGPPGTGKTMLAKAVATESGANFIAVRGPEILSKWVGESEKAIREIFRKARQAAPTVIFFDEIDSIAPIRGLSTDSGVTERIVNQLLAEMDGIVPLNKVVIIAATNRPDILDPALLRPGRFDRLIYVPPPDKTARFEILKVHTKNVPLAEDVSLEDIAEKAEGYTGADLEALVREATINAMRSIYSMCDKQSRDECKGNMECYQKHIKECMNKTSFKVSKEDFEKALNVVKASLTQADIQRYERFSKELKRAIA

SEQ ID NO: 24733 - protein, 394 aa, Alcaligenes sp. SH-69
MTREVVVVSAVRTAIGTFGGSLKDVPPTELGALVVRESLARANVEGKDVGHVVFGHVVNTEPKDMYLSRVAAINGGCAEGTPAFNVNRLCGSGLQAIVSASQSILLGDTDVAIGAGAENMSRVPFASLNMRWGARMGDTKMVDMMIGALHDPFHNIHMGVTAENIAAKWGISREDQDKLAVESHNRAERATQNGLFKDQIVPVTLKSKKGDVQYATDEHFRPGATMDDLAKLKPVFLKENGTVTAGNASGINDAAAAVVLMEAGAAKARGAKPLARLVAYAHAGVDPKYMGIGPVPATQLALKKAGLTVADLDVIEANEAFAAQACAVTKDLGLDPAKVNPNGSGISLGHPIGATGALITVKALHELQRIQGRYALVTMCIGGGQGIAAIFERL

SEQ ID NO: 24734 - protein, 583 aa, Alnus glutinosa
MEESKKSCFISDRVDYKGDPADRNTTGGWVPAALIVGIEVSERLSTMGIIVNLVTYLKGTMHQSSTTSSNSTSNVAGTSFLLCLLGGILADSFLGRYWTIAIFSVIHALGTCMLAISAALPELRPSECNLHHDFPLKCEEPSSFQMGILYTALYSMALGVGGIKSSVSGFGTEQFDQNDEKEMSEMAHFFNRFYLIISFGTLLAVTVLVYVQDQVGRSWGYGICSASMFLSIVAFLVGTKRYRYRECTGSPIIQILQVIVAAIRKRKAELPTDLSFLYDKASDKESTISHTDKYSCLDKGAIITGMDRGADGLTISNPWGLCTVTEVEEVKMLIRILPIMASTIIFWTIRAQLLSFSVQQAATMERTIENFPIPPASFNGFFVGSTIITLIMYDRLLPFLRQSSNGVQGFTNLQKIGIAIFLSILGMAAASFAEMKRLEVVRANRGSTSTSSTLPITAFYLLPQFVLVGIGDGFMYTGQLDFFITESPKGMKAISTGLFLTTNALGFFGSSILVTIITKVTGEEVGHGWLLSRINDSRLDFFYALLAVLGFINLVFYLVLASWYKPSPVEDAHQKINGKEEKV

SEQ ID NO: 24735 - protein, 384 aa, Lactobacillus johnsonii
LIYFDNSATTAVYPAALETYDKVTKDIWGNPSSLHKMGDRSHQLLEASRKQIANLLNVKPYEIFFTSSGSESDNWAIKGTALAKKEFGNHIITSSVEHAAVSNSVRALENLGFRITVLPVDKSGQVNPEDLKEALDKETILVSIMGVNNEIGTIQPIKAISKVLEDYPNVTFHVDNVQALGKDVWDEVFTDRVDLMSLSAHKFHAPRGVGILYKKEGKMIKPLIDGGGQEKALRSSTENLPAIAATAKAMRLYLADEKKNAEQELAVKNKIVSYLNGKPGIHIFSPINDNFVPSILCFSLEGIRGETLVHTLESEDIYVSTTSACSSRSGVESGTLNSMKVDDDLATGAIRLSFDPSNTIEEAEQFISVFDKIYKHFAEINHLK

SEQ ID NO: 24736 - protein, 812 aa, Candida albicans
MLSSRIPKGKLLKQTSATSYLNLAKSIPITTARYRPNQYYANELAKPNVFTIHNIPSPCFSQVRNFHSSFPRKLQMQQTEQGDNRPALEKFGSDLTQLAKEGKLDPVIGRDHEIRRTIQILSRRTKNNPVLIGNAGTGKTAVMEGLAQRIIRGEVPDSMKDKQIITLDLAGIISGAKYRGDFESKLKSILKEVEEKNGKVILFIDEFHLLMGLGKAEGSIDASNLLKPALARGKLSMCGATTIEEYRKYVEKDAALARRFSPVTVNEPTGEDTISILRGLKERYEVHHGVRIMDSALVTAALYSNRYITDRFLPDKAIDLVDEASSTLRLQHESRPDAIATLDRQIMTIEIELESLRKEEDQLSIDRKHKLEKELEVKKSELKELTDQWESEKRAIDAVKNAKSELEKAKYELEQATREGDYARASRIQYASIPELQDKIQELSKNELAAKSSNLLHDSVTSEDIAGVISKMTGIPVNNLLKGEKDKLLDMNILLRQSVVGQDEAIDAVSDAVRLQRAGLTSENRPIASFMFLGPTGTGKTELTKSLAQFLFNDKNAVVRFDMSEFQEKHTISRLIGSPPGYVGYEESGELTEAVRRKPYSVVLFDEFEKAHPDLSKLLLQVLDEGSLTDSHGKKIDFKNTIIVMTSNIGQEILLADKNTYEDGHINSEVKSQVLENLRHHYAPEFLNRIDDIVVFNRLSKTALKEILDIRLREIGDRLVDKRIILQLTDEAKTLLCDMGYDPTYGARPLNRVLRKKLLDPLAMRLIKGQVQENETVKVEVKDHKIYVVPNHSEGTVIEKEEDYFKEDKDDN

SEQ ID NO: 24737 - protein, 584 aa, Vicia faba
MGSVEDDSSRLEEALIQDEESKLYTGDGSVDFKGRPVLKKNTGNWKACPFILGNECCERLAYYGIATNLVKPILLAKLHEGNVSAARNVTTWQGTCYLAPLIGAVLADSYWGRYWTIAIFSMIYFIGMGTLTLSASIPALKPAECLGAVCPPATPAQYAVFFIGLYLIALGTGGIKPCVSSFGADQFDDTDSRERVKKGSFFNWFYFSINIGALISSSFIVWIQENAGWGLGFGIPALFMGLAIGSFFLGTPLYRFQKPGGSPLTRMCQVVAASFRKRNLTVPEDSSLLYETPDKSSAIEGSRKLQHSDELRCLDRAAVISDDERKRGDYSNLWRLCTVTQVEELKILIRMFPVWATGIVFSAVYAQMSTMFVEQGTMMDTSVGSFKIPAASLSTFDVISVIFWVPVYDRFIVPIARKFTGKERGFSELQRMGIGLFISVLCMSAAAIVEIKRLQLAKELDLVDKAVPVPLTIFLQIPQYFLLGAAEVFTFVGQLEFFYDQSPDAMRSLCSALSLLTTSLGNYLSSFILTVVLYFTTRGGNPGWIPDNLNKGHLDYFSGLAGLSFLNMFLYIVAAKRYKSKKAS

SEQ ID NO: 24738 - protein, 812 aa, Saccharomyces cerevisiae
MKTYVLLYGKLIMTTMILNTGRFEEWYKVCIIALKEKEIYVPSSPIAMLNGRLPLLRLGICRNMLSRPRLAKLPSIRFRSLVTPSSSQLIPLSRLCLRSPAVAKSLILQSFRCNSSKTVPETSLPSASPISKGSARSAHAKEQSKTDDYKDIIRLFMLAKRDWKLLLTAILLLTISCSIGMSIPKVIGIVLDTLKTSSGSDFFDLKIPIFSLPLYEFLSFFTVALLIGCAANFGRFILLRILSERVVARLRANVIKKTLHQDAEFFDNHKVGDLISRLGSDAYVVSRSMTQKVSDGVKALICGVVGVGMMCCLSPQLSILLLFFTPPVLFSASVFGKQIRNTSKDLQEATGQLTRVAEEQLSGIKTVQSFVAEGNELSRYNVAIRDIFQVGKTAAFTNAKFFTTTSLLGDLSFLTVLAYGSYLVLQSQLSIGDLTAFMLYTEYTGNAVFGLSTFYSEIMQGAGAASRLFELTDRKPSISPTVGHKYKPDRGVIEFKDVSFSYPTRPSVQIFKNLNFKIAPGSSVCIVGPSGRGKSTIALLLLRYYNPTTGTITIDNQDISKLNCKSLRRHIGIVQQEPVLMSGTIRDNITYGLTYTPTKEEIRSVAKQCFCHNFITKFPNTYDTVIGPHGTLLSGGQKQRIAIARALIKKPTILILDEATSALDVESEGAINYTFGQLMKSKSMTIVSIAHRLSTIRRSENVIVLGHDGSVVEMGKFKELYANPTSALSQLLNEKAAPGPSDQQLQIEKVIEKEDLNESKEHDDQKKDDNDDNDNNHDNDSNNQSPETKDNNSDDIEKCVCRTSPERRGKGG

SEQ ID NO: 24739 - protein, 245 aa, Eucalyptus grandis
  misc_feature (151)..(151): Xaa can be any naturally occurring amino acid
  unsure (1)..(245): unsure at all Xaa locations
MGRGKVELKRIENKINRQVTFAKRRNGLLKKAYELSVLCDAEVALIIFSNRGKLYEFCSSSSMMKTIEKYQKCSYGSLETNCSINEMQNSYQDYLKLKARVEVLQRSQRNPPWEELGPLNSKELEQLEHQLENSLKQIRSAKTQFMFDQLXHLQHKEQMLVEANRELWKKLEESNTRIPLRLGWEAEDHNNISYSRLPTQSQGLIFQPLGGNPTLQIGYNPAGSNELNVSAADQHPNGFIPGWML

SEQ ID NO: 24740 - protein, 248 aa, Sphingomonas sp. UG30
MTSPASTIDMLVTQITRVAKDINSYELRPEPGVILPEFTAGAHIGVSLPNGILRSYSLVNPQGERDRYVITVNLDRNSRGGSRYLHEQLRVGQRLSIVPPANNFNLVETARHSVLFAGGIGITPIWSMIQRLRELGSSWELHYACRGKEFVAFRQELEQAASEAGATFNLHLDEEANGGFLDLSGPVARAGEDSIFYCCGPEAMLQAYKAASADLPSERVRFEHFGAAPSSAPADDVFTVLARSGQEF

SEQ ID NO: 24741 - protein, 166 aa, Oryza sativa Japonica Group
MDAHGQEEEEEPMQVQQQQAFRGVRKRPWGKFAAEIRDSTRNGVRVWLGTFDSAEEAALAYDQAAFAMRGSAAVLNFPMEQVRRSMDMSLLQEGASPVVALKRRHSMRAAAAGRRRKSAAPAPADQEGGGGVMELEDLGPDYLEELLAASQPIDITCCTSPSHHSI

SEQ ID NO: 24742 - protein, 672 aa, Pisum sativum
MEEHSVGPLVPAVVKPEPSKNFSTDTTAAGTFLLVPTMSDLDKDFLCPICMQIIKDAFLTACGHSFCYMCIITHLRNKSDCPCCGHYLTNSNLFPNFLLDKLLKKTSDRQISKTASPVEHFRQAVQKGCEVTMKELDTLLLLLTEKKRKMEQEEAERNMQILLDFLHCLRKQKVDELKEVQTDLQFIKEDIGAVEKHRMDLYRARDRYSVKLRMLDDSGGRKSRHSSMDLNSSGLASSPLNLRGGLSSGSHTKKNDGKSQISSHGHGIQRRDPITGSDSQYINQSGLALVRKKRVHTQFNDLQECYLQKRRQAADKPHGQQERDTNFISREGYSCGLDDFQSVLTTFTRYSRLRVIAEIRHGDIFHSANIVSSIEFDRDDDLFATAGVSRRIKVFDFSAVVNEPTDAHCPVVEMTTRSKLSCLSWNKYAKNQIASSDYEGIVTVWTMTTRKSLMEYEEHEKRAWSVDFSRTDPSMLVSGSDDCKVKVWCTNQEASVLNIDMKANICCVKYNPGSGNYIAVGSADHHIHYYDLRNISRPVHVFTGHKKAVSYVKFLSNDELASASTDSTLRLWDVKQNLPVRTFRGHANEKNFVGLTVRSEYIACGSETNEVFVYHKEISKPLTWHRFGTLDMEDAEDEAGSYFISAVCWKSDRPTILTANSQGTIKVLVLAA

SEQ ID NO: 24743 - protein, 46 aa, Aeromonas hydrophila
EKGFGFISPTDGSKDVFVHFSAIQTPGFKTLDEGQRVEFTIEQGQK

SEQ ID NO: 24744 - protein, 46 aa, Aeromonas salmonicida
EKGFGFISPADGSKDVFVHFSAIQSTSFKTLDEGQRVEFTIEQGQK

SEQ ID NO: 24745 - protein, 46 aa, Citrobacter freundii
DKGFGFITPDDGSKDVFVHFSAIQNDGYKSLDEGQKVSFTIESGAK

SEQ ID NO: 24746 - protein, 46 aa, Klebsiella pneumoniae
SKGFGFISPKDGSKDVFVHFSAIQSDSFKTLNEGQEVSFTIENGAK

SEQ ID NO: 24747 - protein, 46 aa, Photobacterium mandapamensis
EKGFGFLTQNNGGADVFVHFRAIASEGFKTLTEGQKVSFDVEQGQK

SEQ ID NO: 24748 - protein, 46 aa, Photobacterium phosphoreum
EKGFGFITQDNGGADVFVHFRAIASEGFKTLAEGQKVSFEVEQGQK

SEQ ID NO: 24749 - protein, 45 aa, Streptococcus dysgalactiae
EKGFGFISTENGQDVFAHFSAIQTNGFKTLEEGQKVEFDVEEGQR

SEQ ID NO: 24750 - protein, 46 aa, Yersinia enterocolitica
DKGFGFITPADGSKDVFVHFSAIQSNDFKTLDEGQKVEFSIENGAK

SEQ ID NO: 24751 - protein, 644 aa, Legionella pneumophila
MAKIIGIDLGTTNSCVAVMEGDKPKVIENSEGHRTTPSIVAFTDDNEILVGQSAKRQSVTNPEKTLFAIKRLIGRRFDDPIVQKDIKMVPYKIMKADNGDAWVRVKDQDKAPPQISAEVLRKMKKTAEDYLGEEVKEAVITVPAYFNDSQRQATKDAGRIAGLEVKRIINEPTAAALAYGMDKKRGDSVIAVYDLGGGTFDISIIEIAEVDGEHQFEVLATNGDTFLGGEDFDLALIEYLASEFKKDTGIDLHNDPLALQRLKEAAEKAKIELSSAQQTDVNLPYITADASGPKHLNIKLTRAKLESLVEKLVERTIEPCKTALKDAGLTVSQINEVILVGGQTRMPLVQKTVEEFFGKEPRKDVNPDEAVAVGAAIQAAVLSGEVKDILLLDVTPLSLGIETMGGVMTKLIEKNTTIPTKATQVFSTADDNQTAVTVHVLQGEREQASANKSLGRFDLRDIPPAPRGVPQIEVTFDIDANGILNVSAKDKATGKAQSIVIKASSGLSEEEVAAMVKDAQSHAEEDKKFKEMAELRNQADSLIHSCEKSMKDLADELSEDEKRGIETAISELKEAVQGTDKARIEDKLKVLTDASAKMAERIYAKKSSEGQAAQGQTQSQESTKPAEEGVVDAEFEEVKEEDKK

SEQ ID NO: 24752 - protein, 633 aa, Aggregatibacter actinomycetemcomitans
MGKIVGIDLGTTNSCVAVMEGEKPRVIENAEGDRTTPSIIAYTNDNETLVGQPAKRQAVTNPKNTLFAIKRLIGRRFEDEEVKRDIDIMPFAITKADNGDAWVEVKGEKLAPPQISAEVLKKMKKAAEDYLGEPVTEAVITVPAYFNDAQRQATKDAGRIAGLDVKRIINEPTAAALAYGLDKGTGNKTIAVYDLGGGTFDLSIIEIDEVGGEKTFEVLATNGDTHLGGEDFDNRIINYLVDEFKKEQGIDLRNDPLAMQRLKEAAEKAKIELSSAQQTDVNLPYITADATGPKHLNIKLTRAKLESLVEDLVAKSLEPVRIALKDAGKSPSEIDDVILVGGQTRMPLVQQEVEKFFGKAPRKDVNPDEAVAIGAAVQGGVLAGDVKDVLLLDVTPLSLGIETMGGVMTTLIEKNTTIPTKKSQVFSTAEDNQSAVTIHVLQGERKQASANKSLGQFNLEGINPVPRGMPQIEVTFDIDADGIIHVSAKDKGTGKEQQITIKSSSGLSDEEIQQMVRDAEANAESDRKFEELVQARNQADHLIHSTRKQLDEAGDKVPAADRGTIESALSDLEKAAKGEDKAVIEAKIKALAEVAQKLAQTAQPHGDPQQAQSNSKPNDDVVDAEFEEVKDNK

SEQ ID NO: 24753 - protein, 638 aa, Rhizobium leguminosarum
MAKVIGIDLGTTNSCVAVMDGKDAKVIENAEGARTTPSMVAFSDDGERLVGQPAKRQAVTNPTNTLFAVKRLIGRRYEDPTVEKDKHLVPFTIVKGDNGDAWVEANGKGYSPAQISAMILQKMKETAESYLGEKVEKAVITVPAYFNDARPGQPRMPAASLGLEVLRIINEPTAAALAYGLDKKEGKTIAVYDLGGGTFDISILEIGDGVFEVKSTNGDTFLGGEDFDMRLVEYLVAEFKRDNGIDLKNDKLALQRLKEAAEKAKIELSSSQQTEINLPFITADASGPKHLTLKLTRAKLESLVDDLVQRTIAPCKAALKDAGVTAAEIDEVVLVGGMSRMPKVQEVVKQLFGKEPHKGVNPDEVVALGAAIQAGVLQGDVKDVLLLDVTPLSLGIETLGGVFTRLIERNTTIPTKKSQTFSTAEDNQQAVTIRVSQGEREMAADNKLLGQFDLVCLPPSPRGMPQIEVTFDIDANGIVQVSAKDKGTGKEQQIRIQASGGLSDADIEKMVKDAEAHATEDKKRREAVEARNQAESLIHSSEKSLKDYGDKVSEADRTAISDAIAALKTASEASEPDADDIKAKTQTLMEVSMKLGQAIYEAQQAESGAAGMPPPKAGDNVVDADYEEIKDDDRKKSA

SEQ ID NO: 24754 - protein, 637 aa, Rhodobacter capsulatus
MAKVIGIDLGTTNSCVAIMDGSQPRVIENSEGARTTPSIVAYTDNERLVGQPAKRQAVTNPTNTVFAVKRLIGRRTTDAEVEKDKKLVPYNIVDGGNGDAWVEVRGEKFSPAQVSAVILQKMKETAESYLGETVTQAVITVPAYFNDAQRQATKDAGKIAGLEVLRIINEPTAAALAYGLDKKDSKTIAVYDLGGGTFDISVLEIDDGLFEVKSTNGDTFLGGEDFDMRIVNYLADEFKKEHGVDLTKDKMALQRLKEAAEKAKIELSSASQTEINQPFISMNAATGVPLHMVMKLTRAKLESLVDDLIKASLKPCAAALKDAGVSKDEIDEVVLVGGMTRMPRVVEEVTKFFGKEPHKGVNPDEVVALGAAIQAGVLQGDVKDVVLLDVTPLSLGIETLGGVFTRLIDRNTTIPTKKSQIFSTAEDNQNAVTIRVFQGEREMAADNKMLGMFNLENIPPAPRGVPQIEVTFDIDANGIVSVKAKDKGTGKEQQITIQASGGLSDDDIEKMIKDAEANAEADKKRKELVEAKNTGESLLHSTRKSLEEHGDKVDGSTVEMIELACNALEESLKSEDPGKIKGAVQNLTDAAMKLGEAIYKAQASEAGPASDDEDGPRSVDDDIVDADFEDMGENKRK

SEQ ID NO: 24755 - protein, 382 aa, Metarhizium anisopliae
MSFAGMLNRLHGQPESYDKKSKYKFGRTLGAGTYGVVREADGPSGKVAIKIILKKNVKGNEKMVYAELDMLQRLTHPHIVKFVDWFESRDKFYIVTQLATGGELFDRICDQGKFTEVDASQTIRQIMTAVDYLHDNDVVHRDLKPENLLYVTRDPDSDLVLADFGITKTLDIKEETLTTMAGSFGYAAPEVMEQKGHGKPVDMWSMGVITYTLLCGYSPFRSENLRDLLRECTAAPVPFHERYWKDVSQDAKDFILVLLVPEPEKRWTSKEALGHIWLSGKNATDHNLLPELEAYRRRARLRRVIEIVKLQNRIAKLKEHEEDPSESDMGDAQGASDNHKGDGSRLHALGLFAVREAKQKQESLQVEEELEKESRRRSFSNA

SEQ ID NO: 24756 - protein, 309 aa, Rhodobacter capsulatus
MTRSSIILGAPIQSGTHQPGCVMGPASLRTAGLIASLTALGWRIEDQGDLSIGPQAAVAHANPAVHHLAETRAWIALLAARAEAAAAQSDLPVFLGGDHSMSAGTMAGVAAHAARLGRPLFVLWLDAHPDLHSLDTTESGNLHGTPVAYACGLGDFAAYPPLAHAIDPSRLCMMGIRSVDPAEHRRILEHGIEVHDMRAIDETGVVAPLRAFIDRVKAANGLLHVSFDVDFLDPGIAPAVGTTVPGGATFREAHLIMEYLCDAGVVTSLDLVELNPFLDERGRTASLICDLAASLFGRRVLDRQTRSFA

SEQ ID NO: 24757 - protein, 220 aa, Populus tremuloides
MVRGKTQMRRIENATSRQVTFSKRRNGLLKKAFELSVLCDAEVALIVFSPRGKLYEFASSSMQETIERYRRHVKENNTNKQPVEQNMLQLKEEAASMIKKIEHLEVSKRKLLGECLGSCTIEELQQIEQQLERSVSTIRARKNQVFKEQIELLKQKEKLLAAENARLSDECGAQSWPVSWEQRDDLPREEQRESSSISDVETELFIGPPETRTKRIPPRN

SEQ ID NO: 24758 - protein, 323 aa, Solanum lycopersicum
RDQCSDISCSGVTNHAFPQRRFDSELTSCNSRNLSLSFGSYKPVYLSQFLTGSRYLRVMQEILSEIAQLSLQNHNLVGYRGNGTENGANTSFALNSDAGRGYAAMSSDDSPDGLMGCEAKKKNLVALLQVVDDQYNQCLDEIHMVISAFHAVTELDPSIHARFALQTISSLYKNLRGENKQSHSRNGRTFQQRMRRKGSREVILKHHSFKSSGHFQQLKRKDHQLWRPQRGLPERSVSVLRAWMFQNFLHPYPKDAEKQLLAVKSGLTRSQVSNWFINARVRLWKPMIEEMYAEMNRRKIRAGNEEDHRRNHKIIESHLFTMK

SEQ ID NO: 24759 - protein, 680 aa, Paracoccidioides brasiliensis
MLASRFSRALPRAVPSFARSSSRSSAYKLPATPFRRWNSTEGGEEKVKGQVIGIDLGTTNSAVAVMEGKTPRIIENAEGARTTPSVVAFTKDGERLVGIAAKRQAVVNPENTLFATKRLIGRKFTDPECQRDLKEVPYKIVQHANGDAWVEAQGQKYSPSQIGGFVLQKMKETAEAYLGKPVKNGVVTVPAYFNDSQRQATKDAGQIAGLNVLRVVNEPTAAALAYGLEREQDRVVAVYDLGGGTFDISILEIQKGVFEVKSTNGDTHLGGEDFDITLVRNVVQQFKKESGIDLSNDRMAIQRIREACEKAKIELSSALQTEINLPFITADSSGAKHINSKMTRSQLEALVDPLISRTIEPVRKALKDANLQAKDIQEVILVGGMTRMPKVGESVKSIFGRDPAKSVNPDEAVAIGAAIQGAVLAGEVTDVLLLDVTPLSLGIETLGGVFTRLINRNTTIPTKKSQTFSTAADFQTAVEIKVYQGERELVRDNKLLGNFQLVGIPPAHRGVPQIEVTFDIDADSIVHVHAKDKSTGKDQSITIASGSGLSDTEIQNMVDDAEKFGAQDKERKAAIEAANRADSVLNDTEKALKEFEDKLDKTEADQIKEKIASLREVVAKSQSGEGSITADELKAKVDELQNASLTLFDKMHKARSEEGQQQQSQQSNEGQQGGEGEKKP

SEQ ID NO: 24760 - protein, 585 aa, Elaeagnus umbellata
MCGILALLGCSDDSQAKRVRVLELSRRLKHRGPDWSGLFQFGDCYLAHQRLAIIDPASGDQPLFNEDKTVVVTVNGEIYNHEELRKKLSHHKFRTGSDCDVIAHLYEEYGEDFVDMLDGIFAFVLLDTRDNSFIVARDAIGVTSLYIGWGLDGSIWISSELKGLNNDCEHFETFPPGHLYSSKAGGMRRWYNPVWFSETIPSAPYDPLALRRAFENAVIKRLMTDVPFGVLLSGGLDSSLVASITARHLSGTKAAKQWGTKLHSFCVGLEGSPDLKAAKEVAAYLGTVHHEFHFTVQDGIDAIEDVIYHVETYDVTTIRASTPMFLMSRKIKSLGVKMVMSGEGSDEIFGGYLYFHKAPNKEEFHEETCRKIKALYLYDCLRANKSTTAWGLEARVPFLDKEFINVAMNIDPEYKKIKRDEGRIEKWVLRKAFDDEERPYLPKHILYRQKEQFSDGVGYSWIDGLKAHAAKHVTDKMIRNAAHIFPHNTPNTKEGYYYRMIFERFYPQNSARLTVPGGASVACSTAKAVEWDESWSKNLDPSGRAALGVHLSAYDNQVPSGVVQPEIISNVPQITVNTLGLEIQS

SEQ ID NO: 24761 - protein, 369 aa, Thermus caldophilus
MVIGVPKEIKTLENRVALTPGGVESLVRRGHTVLVERGAGEGSGLSDAEYARAGAELVGREEAWGAEMVVKVKEPLPEEYGFLREGLILFTYLHLAADRGLTEAMLRSGVTGIAYETVQLPDGTLPLLVPMSEVAGRMAPQVGAQFLEKPKGGRGVLLGGVPGVAPASVVILGGGTVGTNTAKIALGMGAQVTILDVNHKRLQYLDDVFGGRVVTLTATEANIKKSVQHADLLIGAVLVPGAKAPKLVTRDMLSLMKEGAVIVDVAVDQGGCVETIRPTTHAEPTYVVDGVVHYGVANMPGAVPRTSTFALTNQTLPYVLKLAEKGLDALLEDAALLKGLNTHKGRLTHPGVAEAFGLPYTPPEEALRG

SEQ ID NO: 24762 - protein, 341 aa, Oryza glaberrima
MDHRELWPYGLRVLVIDDDCSYLSVMEDLLLKCSYKVTTYKNVREAVPFILDNPQIVDLVISDAFFPTEDGLLILQEVTSKFGIPTVIMASSGDTNTVMKYVANGASDFLLKPVRIEELSNIWQHIFRKQMQDHKNNNMVGNLEKPGHPPSILAMARATPATTKSTATEALLAPLENEVRDDMVNYNGEITDIRDLRKSRLTWTTQLHRQFIAAVNHLGEDKAVPKKILGIMKVKHLTREQVASHLQKYRMQLKKSIPTTSKHGATLSSTALDKTQDHPSRSQYFNQDGCMEIMDYSLPRDDLSSGSECMLEEQNDYSSEGFQDFRWDSDKQEYGPCFWNF

SEQ ID NO: 24763 - protein, 877 aa, Arabidopsis thaliana
MGNFNFLPLVSFASFVVVLVLVCAQDQSGFVSIDCGIPEDSSYYDEKTDIKYISDAAFVESGTIHSIDSKFQKKNLEKQFQKVRSFPEGKKNCYDVQPPQGKGFKYLIRTRFMYGNYDNLGKAPDFDLYLGVNLWDSVTLENSTTIVTKEIIYTLRSDKVHVCLVDKERGTPFLSVLELRLLKNNIYETASDSLMLYRRWDLGATGDLPARYKDDIFDRFWMPLMFPNFLILNTSLMIDPTSSNGFLPPSVVMSTAVAPMNSSIEQIMVYWEPRDPNWKFYIYIHFAEVEKLPSNETREFSVFLNKEQIDTTSVFRPSYLYTDTLYVQNPVSGPFLEFVLRQGVKSTRPPIMNAIETYRTNEFLDLPTDQNDVDAIMKIKTKYKVKKNWLGDPCAPFGYPWQGINCSYTANNPPRIISVNLSFSGLTGQIDPVFITLTPLQKLDLSNNRLTGTVPDFLANLPDLTELNLEENKLTGILPEKLLERSKDGSLSLRVGGNPDLCVSDSCRNKKTERKEYIIPSVASVTGLFFLLLALISFWQFKKRQQSVKTGPLDTKRYYKYSEIVEITNNFERVLGQGGFGKVYYGVLRGEQVAIKMLSKSSAQGYKEFRAEVELLLRVHHKNLIALIGYCHEGDQMALIYEYIGNGTLGDYLSGKNSSILSWEERLQISLDAAQGLEYLHNGCKPPIVHRDVKPTNILINEKLQAKIADFGLSRSFTLEGDSQVSTEVAGTIGYLDPEHYSMQQFSEKSDVYSFGVVLLEVITGQPVISRSRTEENRHISDRVSLMLSKGDIKSIVDPKLGERFNAGLAWKITEVALACASESTKTRLTMSQVVAELKESLCRARTSGDSGDISFSEPTEMNVSMTVDPGVLPQPR

SEQ ID NO: 24764 - protein, 279 aa, Oryza sativa Japonica Group
MEKPEWSMDDFEIGKYIGEGKFGKVYLAREKQSGYVVALKVTFKAKLDKYRFHAHLRREIEIQHGLDHPNVLRLFAWFHDAERVVLVLEYAARGELYKLLRTVRRFSERTAATYVASLAGALAYCHKKQVIHRDIKPENLLLDIEGRLKIADFGWAVRSNAKRHTLCGTIDYLAPEMIEKKAHDHAVDNWTLGILCYEFLYGSPPFEAAEQDDTLRRIVKVDLSFPSTPYVSADAKDLICKLLVKDSNKRLSLDDIMKHPWIVKNADPSGSCSDQKART

SEQ ID NO: 24765 - protein, 337 aa, Anabaena circinalis 90
MTIIYPPKNFPSKTKNHKVLLIGKMYDEIGEKLLAEYTNVEIIKEPKQHQIHEAIQDVSGVFVRYPTKLDAQAIGLAKNLKVISTSGFGTDAIDIAAATKRGIVVVNNPGLSTTAVTEHTLSMILALAKKLTFLNQCVKAGNYLIRNQVQPIQLEGKTLGIVGLGRIGSAVAKICSTALQMRVLAYDPYVPSGKADTVRATLVQDLDYLLTESDFVSLHPELTDETCEMFDLEAFKKMKPSAFLINTSRGKVVRQPDLVTAIREKLIAGAAIDVFEPEPPAINNPLYEFDNVIFSPHLAGVTPEAGMAAALSAANQILQVLQGEKPPYIINPKVWNS

SEQ ID NO: 24766 - protein, 500 aa, Synechococcus sp. PCC 7002
MKSSLVILYHREPYDEVRENGKTFYRDKTSPNGIMPTLKSFFANAEQSTWVAWKQISGKQQENFQAKMAFPGQENSVVHRIPLSADQVKNFYHITSKEAFWPILHSFPWQFTYDSSDWENFKQINEMFAEAACEDADDDALFWVHDYNLWLTPYFIRQKKPNAKIAFFHHTPFPSVDIFNILPWREAIVDSLLCCDLCGFHLPRYVQNFVAVARSLRKVEITRQVPVDEHAFTAVGTALAEPEITTQLKYKDHLVNLDAFPVGTNPTQIRAQVEKASTQERIRKIREELGSNKLILSAGRVDYVKGTKEMLVCYERLLERRPELQTKVNLVVAAAKAASGMRVYKNAQSEIERLVGRINGRFANLNWTPILLFTSALSYEELLGFFGAADIAWITPLRDGLNLVAKEYVVAHGCDDGVLILSEFAGSAVELPDAILTNPYAAKRMDESIDQALAMPVEEQQRRMKSMYQAIQRYDVQQWANHMFREAKATAVLGKEPTPV

SEQ ID NO: 24767 - protein, 513 aa, Synechococcus sp. WH 8103
MTIKNQVNPYFAEKKLNKIEKSKLEKDGLLVGSEIEKFAKIGWENMDETDLKLRLKWYGMFWRPKTPGKFMLRLRIPNGVLTSNQIRVVASIVERYGENGSCDITTRQNLQLRGILLCDLPEILRRLREAGLSSIQSGFDNPRNVTGNPLAGIDPNEIVDTRPYTTEVQNFLTNNCEGNSEYSNLPRKWNTAVAGSKDNFLLHNDIVFHPVENNGVMGFSIWIGGILSPQMNAYAFPMNVWVLPDEICNILDTVIRLWRDNGERENRTKGRFRMYLDEVGLVEFRSQVEKLYGTLTPDPGSIFENSPRSHFGINQQKQAGLYFAGIHVPVGRLTAEDLQDIATASLKYGNGEIRLTEDQNIIITGLTSERVEELKTDTLLQRFPLAPSNISAGTVSCTGNTYCSFALTNTKDQSLKAEKELDEELNLPEEIKVHWTGCPNTCGQAYMGAIGLTGTKAKNAEGVMGEGYTMTIGGSQGRNPTIGQVYRKAIPAAEIKAALKEVLISEFGATEER

SEQ ID NO: 24768 - protein, 588 aa, Capsicum annuum
MASFSVKFSATSSLTSSKRFSKLHATPPQTVAVPPSGAVEVAAERLEPRLEERDGYWVLKEKFRKGINPAEKAKIEKEPMKLFTENGIEDIAKISLEEIEKSKLAKDDIDVRLKWLGLFHRRKHQYGRFMMRLKLPNGITTSAQTRYLASVIRKYGKDGCADVTTRQNWQIRGVVLPDVPEILKGLDEVGLTSLQSGMDNVRNPVGNPLAGIDPQEIVDTRPYANLLSNLLSQYVTANFRGNLSVHNLPRKWNVCVIGSHDLYEHPHINDLAYMPATKDGRFGFNLLVGGFFSPKRCAEAIPLDAWVPADDVVPVCKTILEAYRDLGTRGNRQKTRMMWLIDELGVEGFRAEVVKRMPQKKLERESTEDLVQKQWERREYLGVNPQKQEGYSFVGLHIPVGRVQADDMDELARLAEEYGSGELRLTVEQNIIIPNIENSKIDALLNEPLLKQISPDPPILMRNLVACTGNQFCGQAIIETKARSMKITEEVQRLVSVTQPVRMHWTGCPNSCGQVQVADIGFMGCLTRKEGKTVEGADVFLGGRIGTDSHLGDIYKKSVPCEDLVPIIVDLLVNNFGAVPREREEAED

SEQ ID NO: 24769 - protein, 441 aa, Mycoplasma gallisepticum R
MIRINKNMQFIDRCQIKLIAGNGGDGIIAWRREAHYDKGGPAGGSGGKGGNIILVADHNQSTLLSLKYSKIIRASNGDNGKPDLSSGQNGMDKYVKVPIGTTVYDEQTNEVIVDLIRDKQEYIICHGGKGGRGNAAFKSSTLRAPNLYELGDEGEEKTVRLELKYLANVGIVGYPNAGKSTLISKLSNAKPKIANYQFTTLVPILGIVENNDKRLVFADIPGLIENASEGYGLGHDFLRHVERCEVLIHLISMNPLDHDDVIDAYEKIMTELRKYSQLLVNKKMLVVANKMDVEGASENFNKLRSYLAKKGIDISSISAINGDVNNLVDRVFDLYQKTLSTTTETNPFSIPMVAEKVYYYDGEKTIDDDPLDVIKDGENRWIVSSKKLTYWFKKIPQTTLDNITRLGQKIKSLGVEDQLKKMGAKPNDVIVICDYEYLIDE

SEQ ID NO: 24770 - protein, 268 aa, Mycoplasma gallisepticum R
MSELVINNLTVNIDKKRILTNVSATIKAGDIVAIMGPNGHGKSTLLKTIMGHHDSKIVRGKILFKDQVLNKMEVDERARLGLYLASQAPEEIPGVSLVEFIRSAINARREKPIDLPEFYKLIQSNTKKLKMNFELLNRSVNEGFSGGEKKKNEIFLLKTINPDFAMLDEIDSGLDVDALKIITKELQEWIKDKSKSLIIVSHYERMFKLIKPTKVFVVVNGTIVTEGDASLAKRIDKEGYDWIRKEFNIDFKENKDHDFELIDQFAAK

SEQ ID NO: 24771 - protein, 300 aa, Mycoplasma gallisepticum R
MKKSGIVVITGLASVGKSTLINKIANSKVAIISKYDQTTRNVIAHKIVHDKIDYLLLDTPGFHKSFNKLSLFLNSEIKQAYKHAHACILIVDSTKKPTDDFINLLKIMKSYEMNDLIVIYSKIDLIKNEDHINEAQQLINELFKVVKMIKANLLSDHLNDQIDEGLEQLLDENYQLPESELDENEKDNFEIKEIIREKILNNTFQEVPHSVAVIIEAKKYDQEKKLFNIECAIVTERESQKKIIIGKQGSMIKKIGTQARNELLNIYDCKINLKLFVKVEKEWRNDDYLIKSLGHKKWVL

SEQ ID NO: 24772 - protein, 390 aa, Mycoplasma gallisepticum R
MAMNKILVINAGSSSIKFQLYDANEKVLAKGLCERIFIDGAFKYEFEDGSKDEGNSAFPTHKEALTHLLESLKKHKVINDLSEIVGVGHRVVQGAYWTDSTLITPQVLEKIYELAKLAPLHNKPEADVIDVVQKLIPKAKNVAVFDTSFHTSMPEVAYEYAIPREWKEKHLVRRYGYHGTSYRYVTKRFEQLLNKKAVNLVICHLGNGASIAAIKDSKSINTSMGFTPLEGLVMGTRSGDIDPSVVQYIAKQTNKTLDQVIDDLNKKSGLLGLSSYADMRDVTSNLPKTQLTLDVYTQRVADYILKYANQINASIDGLVFTAGVGENASLIIQEVVNKVHLLKVSLDPKAFEQKYSDYRKLSDDKSQLNVYQVRTNEEIMIMRDVVRLSK

SEQ ID NO: 24773 - protein, 717 aa, Mycoplasma gallisepticum R
MFASFTPTEEKNVLSKYSRNLNDEIARNAIDPTIGREEEIRRLIEILSRKNKNNPVLIGEPGVGKTAIVEGFARKIVNGDVPDNLKDVEVVELSLSSLIAGTQFQGSFEERLNKILKEVKNSSGKVILFIDEIHQLVGMGKNSSNSAMDAANILKPMMARGEIKVIGATTIDEYRKYIEKDGALERRMQKILVDEPTKQEALTIMRGLRERWEAFHKVRIFDDALVAAVEMSARYISDRYLPDKAIDLIDEAAAKIKTLIHSLPPELDNIKQKIIHLSTELAALEREKKENHSNVRLGRIEQLKKEIKDFTNKQNELTVKWTQQKTIYECINKLKEEVTNLTAEIERLQAKGEYTQASKLLYLEIPKRQEEIEKKTKELSEFTDNLIKTSISRVEIAEVISQATKIPLSKLVASEQQKLLNLKNDLSKYIKGQDHAIKNVSDAVLRGRAQINDPNRPIGSFLFLGPTGVGKTEVAKKLAYCLFDNEKAMVRIDMSEFMERHSVDKLIGSPPGYIGYDQPGVLSDAIRTKPYAVVLFDEIEKAHPDVLNILLQILDDGQLTDNHNRLVNFKNTIIIMTSNIGAEHILANNPAKTIEELKRKIRPELLNRIDELITFKALNDKDLSAIAQKLLSDLSDRIKKQQINITFDKKIVENVVKHGSNTVFGARPLKRYIQREVENFLAKKIIENKLEKNKSYVCTFNAETNEYTLVNLRKAVS

SEQ ID NO: 24774 - protein, 351 aa, Mycoplasma gallisepticum R
MKIKVVKISIIMHVKSNHIIFGLSAAKKLTDSICRRLSMKPGEIVIQKFADDEIFVRPDCTLRNKDVVFIQSTNSPVNDNLMELLIAIDSAKRASAKSITALIPYYGYARQDRKSAGREPITSKLVADLLTKAGVTRATLTDIHSDQTQGFFDIPVDILKASFVLLSHVLVDNKIDDLVVVSPDYGGVKRARKIAESINVPLAIIDKRRPKPNVAESINILGEVKNKCCILVDDMIDTGGTIISAAKLLKKQKAKTVLVMATHGLFNKNAIELFDECYKKKEINKVYIADTIDQTEKNLEKKPQFKVVKLDHFYSLVLDKYINGGSISDVYTIYQEWVKSPNLKKILKEIE

SEQ ID NO: 24775 - protein, 329 aa, Mycoplasma gallisepticum R
MIMKKLTLLETELAIKYIKDLFQNALSKELNLLRVSAPLIIAPDSGLNDNLNGWEAPVSFKSKTNGVSSQVVQSLAKWKRYSIARYEIPLYQGLYTDMNAIRMDETLDATHSMYVDQWDWELRISENDRNVEFLKNTVNKIYKVLKEAQLKVNEKYGIFEQKDLLPEHIHFVTTQELLDQYPDKNPSEREQLVCEKYKAVFVMQVGKKLSNNQVHDGRSPDYDDWSLNGDIMVYNPRSKKALELSSMGIRVNKEVLLKQLEESKQNERLELMFHKKLVNGELHQTIGGGIGQSRLCYFLLQKDHIGEVQASHWSDEIVVEAKAKGIKLL

SEQ ID NO: 24776 - protein, 330 aa, Mycoplasma gallisepticum R
MNGENMSTLIEELKNKIKNSKKVPQILLVEGWNACVQEAAKQLVAEKLVKPVLMFRTMDEIPADFDPRIKRYVIEKMDLSKYATYLFKLREKKGMTLEVAQQEVQKPNVLASLLVKLDEVDGEVCGKEYTTKETLKPALQIIKTSETAKIVSSVMVLEKNQERLVFADCAINVYPTAEELAEIAKSTIKFAKDVLQIEKINLAMLSYSTLNSGVGESVDKVKAATKLVEESDVGKLASICGPMQFDAAYVEEVRKQKAPKLDWEKGANVFIFPNIDAGNIGYKIAQRLGGYDAIGPVLTGLAKPVNDLSRGANAHEIYSVAIITACQAVA

SEQ ID NO: 24777 - protein, 587 aa, Porphyridium sp.
MTHIEKSNYQEQTGAFALLDSLVRHKVKHIFGYPGGAILPIYDELYKWEEQGYIKHILVRHEQGAAHAADGYARATGEVGVCFATSGPGATNLVTGIATAHMDSIPIVIITGQVGRSFIGTDAFQEVDIFGITLPIVKHSYVIRDPRDIPRIVAEAFSIAKQGRPGPVLIDVPKDVGLETFEYQYVNPGEARIPGFRDLVAPSSRQIIHSIQLIQEANQPLLYVGGGAITSGAHDLIYKLVNQYKIPITTTLMGKGIIDEQNPLALGMLGMHGTAYANFAVSECDLLITLGARFDDRVTGKLDEFACNAKVIHVDIDPAEVGKNRIPQVAIVGDISLVLEQWLLYLDRNLQLDDSHLRSWHERIFRWRQEYPLIVPKLVQTLSPQEIIANISQIMPDAYFSTDVGQHQMWAAQFVKTLPRRWLSSSGLGTMGYGLPAAIGAKIAYPESPVVCITGDSSFQMNIQELGTIAQYKLDIKIIIINNKWQGMVRQWQQAFYGARYSHSRMEDGAPNFVALAKSFGIDGQSISTRQEMDSLFNTIIKYKGPMVIDCKVIEDENCYPMVAPGKSNAQMIGLDKSNNEIIKIKE

SEQ ID NO: 24778 - protein, 200 aa, Craterostigma plantagineum
MPAEAPAVEDFSSDKASPRTCSDGDEELNFVNNNNDNNNSRKKLRLSKEQSAFLEEHYKLHNSLNPNQKFALAKQLNLRPRQVEVWFQNRRARTKLKQTEADCEYLKQRCESLTDDNKRLLQELKDLRGLNDDDDDDNNNNNKQFPPLAVCPSCKHITTTSAAVVVHAISAVDSREDAAVMAKSMSRSKFNFPFSPYIDN

SEQ ID NO: 24779 - protein, 292 aa, Craterostigma plantagineum
MGFVDLRNAGLVLDLGLSVNASYEQKLEDHHQLGCNNKLIISEHHQPQTYLTLSLSADHRRDQTFAVLDSDSKQKIGTAAGFNDQISGDVISAANSSSLSNVISSCVKREREVVGGEDLDMEAKVSSSSSKLIIVDEVIDDDGSNGRKKLRLTKAQSALLEESFKHHSTLNPKQKQDLARELKLRPRQVEVWFQNRRARTKLKQTEVDYALLKKCCETLTEENRKLQKEVQELKALKLAQSPLYMHLPATAATFAVCPSCGGAGGVGAANSGFTLAMKPHLCNPFTNRSSAF

SEQ ID NO: 24780 - protein, 900 aa, Gnetum gnemon
ASQSTVAAESHSKSKSVGDRMPLYDASMIPGSEMFNFSAEAELLSFQSKNLSSQQSASSEDAVSCRPVAAGPFTSFGHTVSKDSVVSNVTSWKNYSAQGSEEWPGRVILNSVGYEGGQDSLATPLMLGGSVKEVAAQADAMRLYLMNPGYDAYSEASTAAHSSNNIANQIHDVHKQIVEVPAHFQSYIQNHAVSVVGETSHSSGSQWVSGTNELALLPSYSDIQNGHYLPSSRYYGIGSWANRHNALQDSYQGAFVEGKVGVEVRPQQLSIGRDGCGPSGQGLSLSLSPHQPSEVPLHQIDAVCNRTNILQLSADQLKGKSEDVQSRNEGAHGPQGHPSPYSRRVLSRVGAPMDLQMNVGPLGPFTGYATILKGSKYLKPAQQLLEEFCNVGKGLNYQCNPSKQKLLGHHLSAEKSLPDAVIPPISTTVKGEVDGRKASACAASSSMSVVDKTSSEPAMGEQLVISGARFEMHKKRTRLLALLDELQRRYRQYNDQMQMIITSFESVGGLGAAAPYTSLALKAMSRHFKCLKDAIGDQLKVISKALGNESSLPGVSVGETPRLRLVDQGIRNQRSVHHLGMLEQHAWRPQRGLPERAVSVLRAWLFEHFLHPYPTDADKHMLARQTGLSRSQVSNWFINARVGLWKPMVEEMYELETREASQVDAPPGKTDREERDTSKGGISTEKNASGRGKVLMETISEMQSVSGCGSSSKLEQTTSTSQNGHENCGTSVSIPLESSYLHAHEADAARETAVNVNRHFSGQTQGMPTSHSAISGVESDSGYADSSGFSYEQATKRLRQGLGNTIDFSSYMGGRISHESLNPRPTGNASVSLTLGLRHSGAQEKYTGALYLPREDTLQGCNSRYEIHEIHDGHNQACVGGFETHDIQFRKHLIGTQLLQ

SEQ ID NO: 24781 - protein, 272 aa, Leptospirillum ferrooxidans
GPQDRKNTPKMAKSNAHCGPKHSPLLFLGTFILWLGWFGFNPGSTLMATTPSVGYFAYIAMTTNLAAAAGALAAMFTAWKILGAPDMSMVANGAIAALVAITASCAFVDPWASVVIGAVAGVIAVVGVLAIDRIHIDDPVGAVSVHGMAGIWGTLSNGLFATPDRVKLLAVGTPGLFYGGGFHQLLVQAEGVSASLAYVFFVSLLVFYVIKVTIGLRVSEHDEVSGLDISEHKMWGYPEMFSGGFGGGTAPGELAGRSEMSMSAAKPVTQRT

SEQ ID NO: 24782 - protein, 404 aa, Leptospirillum ferrooxidans
MDDLIYLDNNSTTRVDPRVLEAMIPYFTQDFGNAHSRNHPFGWKAEEAIDKARGEVAALIGADPKEIVFTSGMTESDNLAIKGVAEMYKEKGRHIIVLETDIRSILDPAITLSRAGYEVTTLPVNKEGRVEIETLKKAIRPDTILVSMMASNHEIGTIQPLAEIGAITKEKGILFHVNGAYAASTVPLDVNRMNIDLLSLNAHLIYGPKGVGALYVRRKNPRVKLTPMIDGGGHERGLRSGTLNTPGIVGMGAACRILKESWDKEIPRLKALRDRLEDGIMKELDYVVINGDKDHRAPNVTNLSFAYVEGEALLMGLKEIALSSGSACTSSTLEPSYILRALGVGSDLAHSSIRFSLGRFNTEEEITTTIRRVKEAVSRLRDMSPLYEMAKEGIDIKSVQWSSH

SEQ ID NO: 24783 - protein, 474 aa, Leptospirillum ferrooxidans
RSGYDAFPPEVLNLRLRWWGVYPQGDGAGKAGGSVPFFMLRTRIAGGILKAAALRQMAYISERYAKSTADITVRQNIQFHWVTPSDLPEIFRLLGEVGIDSMGACGDVTRNITGCPVSDLSGDPLAQRHRNLLEEANAALKGHPDFWNLPRKFKITIASCKSQCSLPEINDVGIVPVTHPVHGDGYAIRVAGGLSTRPHFSVPLHFFFRYEEVIPVLRGVASLFRDRSELRENRDRARLKFLFLEHGWDRSRFEEALLPYLSFSPVVWEPSGIEVEGFKSARDHIGVHQVPDGSGRYYIGLSINQGALSPEVMRGLADLSESLGNGEIRLTSMQNLILTGVEEKNLSLVLEKIALLGLNASDGSFLSRTVSCTGNVFCRLALVETKEFSRDLASTLHERFGELSNPINLHVTACPNDCGQQRISEIGLQGVSIKNEEGAPVDGYELFLGGQTGSRKSFNQRTGVRLSGEQVAPV

SEQ ID NO: 24784 - protein, 826 aa, Arabidopsis thaliana
MTVPGIITDVDGDTTSEVTSTSGGSRERKIIVANMLPLQSKRDAETGKWCFNWDEDSLQLQLRDGFSSETEFLYVGSLNVDIETNEQEEVSQKLLEEFNCVATFLSQELQEMFYLGFCKHQLWPLFHYMLPMFPDHGDRFDRRLWQAYVSANKIFSDRVMEVINPEDDYVWIQDYHLMVLPTFLRKRFNRIKLGFFLHSPFPSSEIYRTLPVRDEILRGLLNCDLIGFHTFDYARHFLSCCSRMLGLDYESKRGHIGLDYFGRTVYIKILPVGVHMGRLESVLSLDSTAAKTKEIQEQFKGKKLVLGIDDMDIFKGISLKLIAMEHLFETYWHLKGKVVLVQIVNPARSSGKDVEEAKRETYETARRINERYGTSDYKPIVLIDRLVPRSEKTAYYAAADCCLVNAVRDGMNLVPYKYIVCRQGTRSNKAVVDSSPRTSTLVVSEFIGCSPSLSGAIRVNPWDVDAVAEAVNSALKMSETEKQLRHEKHYHYISTHDVGYWAKSFMQDLERACRDHYSKRCWGIGFGLGFRVLSLSPSFRKLSVEHIVPVYRKTQRRAIFLDYDGTLVPESSIVQDPSNEVVSVLKALCEDPNNTVFIVSGRGRESLSNWLSPCENLGIAAEHGYFIRWKSKDEWETCYSPTDTEWRSMVEPVMRSYMEATDGTSIEFKESALVWHHQDADPDFGSCQAKEMLDHLESVLANEPVVVKRGQHIVEVKPQGVSKGLAAEKVIREMVERGEPPEMVMCIGDDRSDEDMFESILSTVTNPELLVQPEVFACTVGRKPSKAKYFLDDEADVLKLLRGLGDSSSSLKPSSSHTQVAFESIV

SEQ ID NO: 24785 - protein, 186 aa, uncultured Acidobacteria bacterium
MGIADGGRRAVFLDRDGVINRVVLIGGRPHPPPSVAAMHVLPGVAEALARLSAAGFRLVVVTNQPDVARRTQQRAVIDAMHAHLAATLPIDDFRVCDHDDADECSCRKPKAGLLEEAAREGGLSLVASFMVGDRWRDIEAGRRAGCTTVFIDCGYREQPPDRPDVTVRSLPEAADWILRRSQLEDA

SEQ ID NO: 24786 - protein, 247 aa, uncultured Acidobacteria bacterium
MRVMSPTTASNPFFISHLATAGLSGYPRVVWYNQHRSKSMTTSVDALRRALAKPLPGAGAQMRMSPKPRAGAGMAPPAEGWRPAAALLLLYPHDGEWHVLLTVRGAGLRHHTGQVSLPGGRLDAGESVEGAALREAYEEVGVEPASVEVLGRLTPLEIAVSGHILNPVVGLTSERPAFRPHTVEVDCVLEVPLARLLAPDVLGLEERVQARPPHAVMQVPYFDIAGHHVWGATAMVLSELLALLAED

SEQ ID NO: 24787 - protein, 561 aa, uncultured Acidobacteria bacterium
MSDIDQTVNIPPLYCQHSTNSRRKVFMSATPTRIFVADDISDSGLQPLRAAGFVVEKRTGLKGPELLEALSGCAGLVVRSETKVTADLLDGAPALRVVGRAGVGVDNIDVPAATERGIVVMNAPDGNTITTAEHTIALLIALARRIPQANSSLKSGRWERKTFIGVELQGKTLGVVGLGRIGRTVAARARAFGMKIVAFDPFIAPEQARDAEIELAPLDELFSSADFITVHTPLTAETRGVIGREAFAKMKPGARIINCARGGLVDEGALYDAIKSGTVAGAALDVFVEEPPAKDHPLLLLDEVIATPHLGASTAEAQEGVAFTVAEQMRDYLLTGALRGAVNVPSLGTKELAVLRPYIELAEKLGHFQAQLVDSAVREVKLEFAGEIVELNAAPVTRSFLAGLLRDVSARVNAINAFLIAEERGINVTTSYFRAGADSASSIRTQVVAAGGEQAVAGTIFGFGEQAREGRITEIDGFHIEALPHGHMLVMRNRDVPGVIGRVGTILGERGVNISHFHLGRRERGGEAMAVIEVDAAADAETLDALRSLQDILSVCVIELV

SEQ ID NO: 24788 - protein, 657 aa, Neocallimastix patriciarum
MFLSTLAKKSTTFGVSNVVKNALSSKVMRTTPRMFQRFESSKVKGQVIGIDLGTTNSCVAVMDGKNPRVIENAEGARTTPSVVAFSKEGELMVGQPAKRQAVVNPENTLFATKRLIGRRFDDKAIAKDMESVPYKIIKHKNGDAWVQAHDKQYSPAQIGGFVLMKMKETAEGFLGKSVKNAVVTVPAYFNDAQRQATKDAGSIAGLNVLRVINEPTAAALAYGLDKNGDRVVAVYDLGGGTFDISILEIQKGVFEVKSTNGDTHLGGEDFDAALVKHIVEAFKKESGIDLSKDRMALQRVREAAEKAKIELSSTMTTDISLPFITADASGPKHINMKFTRAQFESLTNKLIQRTVEPCKKAIRDAGVTNKDINEVILVGGMSRMPKVQQSVSSLFGREPSKSVNPDEAVAIGAAIQGGVLAGDVTDILLLDVTPLSLGLETLGGVFTRLINRNTTIPTKKSQVFSTAADGQTQVEIKVYQGERELCRDNKLLGEFKLVGLPPAPRGVPKIEVTFDIDADGIVNVSAKDQATGKDQSITIAASSGLSESEIENMILEAEKHAESDKKKKDVIEIVNNAQTVIADTEKAMNDFKEQLDATESEKIKGLLEELKGLCAQDIDSLTVEQVKGKIDEVQQASLKLFELVYKNKNNENNENKQ

SEQ ID NO: 24789 - protein, 676 aa, Erwinia sp. Ejp 556
MPATEIPEKHQKDRINPVVFYTSAVLILLFSLTTILFTDFSDRWINRTLNWVSNTFGWYYLLAATLYIVFVIFMACSRFGSIKLGPEQSKPEFSLMSWAAMLFAAGIGIDLMFFSVAEPVTQYMMPPEGQGQTLAAARQAMVWTLFHYGLTGWSMYALMGIALGYFSYRYGLPLTIRSALYPIFGKRVNGPIGHTVDIAAVLGTIFGIATTLGIGVVQLNYGLKVLFDVPEGLTAQAGLIVLSVIMATISVTSGVNKGIRFLSELNVLLAFGLILFVLFVGDTSFLLNALVLNVGDYINRFMGMTLDSFAFDRPTEWMNNWTLFFWAWWVAWSPFVGLFLARISRGRTIRQFVLGTLTIPFIFTLLWLSIFGNSALNEIIHGNLALAQETLAHPERGFYSLLAQYPGFTFSASVATITGLLFYVTSADSGSLVLGNFTSRLADINNDAPNWLRIFWSVTIGVLTMGMLMVNGVTALQKTTVIMGLPFSFVIFFVMAGLYKSLRVEDHRRASATVNTPPVTVDRLNWKQRISRVMNYPGTTHTRKMLDNVCRPAMEEVGRELERRGAKVQVNELPAVEDERLNHLELLVDLADEQSFLYQIWPQRYSVPAFTYRARSGKSDYFRLETFLLEGTQGNDLMDYTKEQIINDILDQYERHLTFLHIHREAPGNSMPFPEV

SEQ ID NO: 24790 - protein, 190 aa, Mycobacterium bovis AF2122/97
MVAERAGHQWCLFLDRDGVINRQVVGDYVRNWRQFEWLPGAARALKKLRAWAPYIVVVTNQQGVGAGLMSAVDVMVIHRHLQMQLASDGVLIDGFQVCPHHRSQRCGCRKPRPGLVLDWLRRHPDSEPLLSIVVGDSLSDLELAHNVAAAAGACASVQIGGASSGGVADASFDSLWEFAVAVGHARGERG

SEQ ID NO: 24791 - protein, 690 aa, Mycobacterium bovis AF2122/97
MADSSAIYLAAPESQTGKSTIALGLLHRLTAMVAKVGVFRPITRLSAERDYILELLLAHTSAGLPYERCVGVTYQQLHADRDDAIAEIVDSYHAMADECDAVVVVGSDYTDVTSPTELSVNARIAVNLGAPVLLTVRAKDRTPDQVASVVEVCLAELDTQRAHTAAVVANRCELSAIPAVTDALRRFTPPSYVVPEEPLLSAPTVAELTQAVNGAVVSGDVALREREVMGVLAAGMTADHVLERLTDGMAVITPGDRSDVVLAVASAHAAEGFPSLSCIVLNGGFQLHPAIAALVSGLRLRLPVIATALGTYDTASAAASARGLVTATSQRKIDTALELMDRHVDVAGLLAQLTIPIPTVTTPQMFTYRLLQQARSDLMRIVLPEGDDDRILKSAGRLLQRGIVDLTILGDEAKVRLRAAELGVDLDGATVIEPCASELHDQFADQYAQLRKAKGITVEHAREIMNDATYFGTMLVHNCHADGMVSGAAHTTAHTVRPALEIIKTVPGISTVSSIFLMCLPDRVLAYGDCAIIPNPTVEQLADIAICSARTAAQFGIEPRVAMLSYSTGDSGKGADVDKVRAATELVRAREPQLPVEGPIQYDAAVEPSVAATKLRDSPVAGRATVLIFPDLNTGNNTYKAVQRSAGAIAIGPVLQGLRKPVNDLSRGALVDDIVNTVAITAIQAQGVHE

SEQ ID NO: 24792 - protein, 295 aa, Mycobacterium bovis AF2122/97
MTAHPETPRLGYIGLGNQGAPMAKRLLDWPGGLTVFDVRVEAMAPFVEGGATAAASVSDVAEADIISITVFDDAQVSSVITADNGLATHAKPGTIVAIHSTIADTTAVDLAEKLKPQGIHIVDAPGSGGAAAAAKGELAVMVGADDEAFQRIKEPFSRWASLLIHAGEPGAGTRMKLARNMLTFVSYAAAAEAQRLAEACGLDLVALGKVVRHSDSFTGGAGAIMFRNTTAPMEPADPLRPLLEHTRGLGEKDLSLALALGEVVSVDLPLAQLALQRLAAGLGVPHPDTEPAKET

SEQ ID NO: 24793 - protein, 563 aa, Mycobacterium bovis AF2122/97
MAFPEYSPAASAATFADLQIHPRVLRAIGDVGYESPTAIQAATIPALMAGSDVVGLAQTGTGKTAAFAIPMLSKIDITSKVPQALVLVPTRELALQVAEAFGRYGAYLSQLNVLPIYGGSSYAVQLAGLRRGAQVVVGTPGRVIDHLERATLDLSRVDFLVLDEADEMLTMGFADDVERILSETPEYKQVALFSATMPPAIRKLSAKYLHDPFEVTCKAKTAVAENISQSYIQVARKMDALTRVLEVEPFEAMIVFVRTKQATEEIAEKLRARGFSAAAISGDVPQAQRERTITALRDGDIDILVATDVAARGLDVERISHVLNYDIPHDTESYVHRIGRTGRAGRSGAALIFVSPRELHLLKAIEKATRQTLTEAQLPTVEDVNTQRVAKFADSITNALGGPGIELFRRLVEEYEREHDVPMADIAAALAVQCRGGEAFLMAPDPPLSRRNRDQRRDRPQRPKRRPDLTTYRVAVGKRHKIGPGAIVGAIANEGGLHRSDFGQIRIGPDFSLVELPAKLPRATLKKLAQTRISGVLIDLRPYRPPDAARRHNGGKPRRKHVG

SEQ ID NO: 24794 - protein, 481 aa, Mycobacterium bovis AF2122/97
MVGPRTRGYAIHKLGFCSVVMLGINSIIGAGIFLTPGEVIGLAGPFAPMAYVLAGIFAGVVAIVFATAARYVRTNGASYAYTTAAFGRRIGIYVGVTHAITASIAWGVLASFFVSTLLRVAFPDKAWADAEQLFSVKTLTFLGFIGVLLAINLFGNRAIKWANGTSTVGKAFALSAFIVGGLWIITTQHVNNYATAWSAYSATPYSLLGVAEIGKGTFSSMALATIVALYAFTGFESIANAAEEMDAPDRNLPRAIPIAIFSVGAIYLLTLTVAMLLGSNKIAASGDTVKLAAAIGNATFRTIIVVGALISMFGINVAASFGAPRLWTALADSGVLPTRLSRKNQYDVPMVSFAITASLALAFPLALRFDNLHLTGLAVIARFVQFIIVPIALIALARSQAVEHAAVRRNAFTDKVLPLVAIVVSVGLAVSYDYRCIFLVRGGPNYFSIALIVITFIVVPAMAYLHYYRIIRRVGDRPSTR

SEQ ID NO: 24795 - protein, 489 aa, Mycobacterium bovis AF2122/97
MSAASQRVDAFGEEAGYHKGLKPRQLQMIGIGGAIGTGLFLGASGRLAKAGPGLFLVYGVCGVFVFLILRALGELVLHRPSSGSFVSYAREFFGEKAAYAVGWMYFLHWAMTSIVDTTAIATYLQRWTIFTVVPQWILALIALTVVLSMNLISVEWFGELEFWAALIKVLALMAFLVVGTVFLAGRYPVDGHSTGLSLWNNHGGLFPTSWLPLLIVTSGVVFAYSAVELVGTAAGETAEPEKIMPRAINSVVARIAIFYVGSVALLALLLPYTAYKAGESPFVTFFSKIGFHGAGDLMNIVVLTAALSSLNAGLYSTGRVMHSIAMSGSAPRFTARMSKSGVPYGGIVLTAVITLFGVALNAFKPGEAFEIVLNMSALGIIAGWATIVLCQLRLHKLANAGIMQRPRFRMPFSPYSGYLTLLFLLVVLVTMASDKPIGTWTVATLIIVIPALTAGWYLVRKRVMAVARERLGHTGPFPAVANPPVRSRD

SEQ ID NO: 24796 - protein, 132 aa, Mycobacterium bovis AF2122/97
MRVGIPTETKNNEFRVAITPAGVAELTRRGHEVLIQAGAGEGSAITDADFKAAGAQLVGTADQVWADADLLLKVKEPIAAEYGRLRHGRSCSRSCIWPRHVLAPMRCWIPAPRQLPTRPSRPPTAHYPCLPR

SEQ ID NO: 24797 - protein, 239 aa, Mycobacterium bovis AF2122/97
MSEVAGRLAAQVGAYHLMRTQGGRGVLMGGVPGVEPADVVVIGAGTAGYNAARIANGMGATVTVLDINIDKLRQLDAEFCGRIHTRYSSAYELEGAVKRADLVIGAVLVPGAKAPKLVSNSLVAHMKPGAVLVDIAIDQGGCFEGSRPTTYDHPTFAVHDTLFYCVANMPASVPKTSTYALTNATMPYVLELADHGWRAACRSNPALAKGLSTHEGALLSERVATDLGVPFTEPASVLA

SEQ ID NO: 24798 - protein, 618 aa, Mycobacterium bovis AF2122/97
MSAPTKPHSPTFKPEPHSAANEPKHPAARPKHVALQQLTGAQAVIRSLEELGVDVIFGIPGGAVLPVYDPLFDSKKLRHVLVRHEQGAGHAASGYAHVTGRVGVCMATSGPGATNLVTPLADAQMDSIPVVAITGQVGRGLIGTDAFQEADISGITMPITKHNFLVRSGDDIPRVLAEAFHIAASGRPGAVLVDIPKDVLQGQCTFSWPPRMELPGYKPNTKPHSRQVREAAKLIAAARKPVLYVGGGVIRGEATEQLRELAELTGIPVVTTLMARGAFPDSHRQNLGMPGMHGTVAAVAALQRSDLLIALGTRFDDRVTGKLDSFAPEAKVIHADIDPAEIGKNRHADVPIVGDVKAVITELIAMLRHHHIPGTIEMADWWAYLNGVRKTYPLSYGPQSDGSLSPEYVIEKLGEIAGPDAVFVAGVGQHQMWAAQFIRYEKPRSWLNSGGLGTMGFAIPAAMGAKIALPGTEVWAIDGDGCFQMTNQELATCAVEGIPVKVALINNGNLGMVRQWQSLFYAERYSQTDLATHSHRIPDFVKLAEALGCVGLRCEREEDVVDVINQARAINDCPVVIDFIVGADAQVWPMVAAGTSNDEIQAARGIRPLFDDITEGHA

SEQ ID NO: 24799 - protein, 527 aa, Mycobacterium bovis AF2122/97
MTAVKHTTESTFAKLGARDEIVRALGEEGIKRPFAIQELTLPLALDGEDVIGQARTGMGKTFAFGVPLLQRITSGDGTRPLTGAPRALVVVPTRELCLQVTDDLATAGKYLTAGPDTDDAAAVRRRLSVVSIYGGRPYEPQIEALRAGADVVVGTPGRLLDLCQQGHLQLGGLSVLVLDEADEMLDLGFLPDIERILRQIPADRQSMLFSATMPDPIITLARTFMVRPTHIRAEAPHSSAVHDATEQFVYRAHALDKVELVSRVLQARDRGATMIFTRTKRTAQKVADELTERGFAVGAVHGDLGQLAREKALKAFRTGGIDVLVATDVAARGIDIDDVTHVINYQCPEDEKMYVHRIGRTGRAGRTGVAVTLVDWDELPRWSMIDQALGLGSPDPAETYSNSPHLYAELAIPATAGGTVGPARKSQGRRRDTDCDGQKTAQHARNTPRRRRTRGGKPVTGHPGTNPISSPIVGGDATSEPGSGTASDSGSDVVSGSRSGNGEAARRRRRRRRRPTHAQDGFAARAN

SEQ ID NO: 24800 - protein, 380 aa, Mycobacterium bovis AF2122/97
MSKKHTTLNASIIDTRRPTVAGADRHPGWHALRKIAARITTPLLPDDYLHLANPLWSARELRGRILGVRRETEDSATLFIKPGWGFSFDYQPGQYIGIGLLVDGCWRWRSYSLTSSPAASGSARMVTVTVKAMPEGFLSTHLVAGVKPGTIVRLAAPQGNFVLPDPAPPLILFLTAGSGITPVMSMLRTLVRRNQITDVVHLHSAPTAADVMFGAELAALAADHPGYRLSVRETRAQGRLDLTRIGQQVPDWRERQTWACGPEGVLNQADKVWSSAGASDRLHLERFAVSKTAPAGAGGTVTFARSGKSVAADAATSLMDAGEGAGVQLPFGCRMGICQSCVVDLVEGHVRDLRTGQRHEPGTRVQTCVSAASGDCVLDI

SEQ ID NO: 24801 - protein, 500 aa, Mycobacterium bovis AF2122/97
MAPSGGQEAQICDSETFGDSDFVVVANRLPVDLERLPDGSTTWKRSPGGLVTALEPVLRRRRGAWVGWPGVNDDGAEPDLHVLDGPIIQDELELHPVRLSTTDIAQYYEGFSNATLWPLYHDVIVKPLYHREWWDRYVDVNQRFAEAASRAAAHGATVWVQDYQLQLVPKMLRMLRPDLTIGFFLHIPFPPVELFMQMPWRTEIIQGLLGADLVGFHLPGGAQNFLILSRRLVGTDTSRGTVGVRSRFGAAVLGSRTIRVGAFPISVDSGALDHAARDRNIRRRAREIRTELGNPRKILLGVDRLDYTKGIDVRLKAFSELLAEGRVKRDDTVLVQLATPSRERVESYQTLRNDIERQVGHINGEYGEVGHPVVHYLHRPAPRDELIAFFVASDVMLVTPLRDGMNLVAKEYVACRSDLGGALVLSEFTGAAAELRHAYLVNPHDLEGVKDGIEEALNQTEEAGRRRMRSLRRQVLAHDVDRWAQSFLDALAGAHPRGQG

SEQ ID NO: 24802 - protein, 1527 aa, Mycobacterium bovis AF2122/97
MTPKRVGLYNPAFEHDSCGVAMVVDMHGRRSRDIVDKAITALLNLEHRGAQGAEPRSGDGAGILIQVPDEFLREAVDFELPAPGSYATGIAFLPQSSKDAAAACAAVQKIAEAEGLQVLGWRSVPTDDSSLGALSRDAMPTFRQVFLAGASGMALERRCYVVRKRAEHELGTKGPGQDGPGRETVYFPSLSGQTLVYKGMLTTPQLKAFYLDLQDERLTSALGIVHSRFSTNTFPSWPLAHPFRRIAHNGEINTVTGNENWMRAREALIKTDIFGSAADVEKLFPICTPGASDTARFDEVLELLHLGGRSLAHAVLMMIPEAWERHESMDPARRAFYQYHASLMEPWDGPASMTFTDGTVVGAVLDRNGLRPSRIWVTDDGLVVMASEAGVLDLHPSTVVRRMRLQPGRMFLVDTAQGRIVSDEEIKADLAAEHPYQEWLDNGLVPLDELPEGKDVRMPHHRIVMRQLAFGYTYEELNLLVAPMARLGAEPIGSMGTDTPVAVLSQRPRMLYDYFHQLFAQVTNPPLDAIREEVVTSLQGTTGGERDLLNPDENSCHQIVLPQPILRNHELAKLVSLDPNDKVNGRPHGLRSKVIRCLYRVSEGGAGLAAALEEVRGAAAAAIADGARIIILSDRESDEEMAPIPSLLAVAGVHHHLVRERTRTQVGLVVESGDAREVHHMAALVGFGAAAINPYLVFESIEDMLDRGVIEGIDRTAALNNYIKAAGKGVLKVMSKMGISTLASYTGAQLFQAVGISEQVLDEYFTGLTCPTGGITLDDIAADVAARHRLAYLDRPDERAHRELEVGGEYQWRREGEYHLFNPETVFKLQHSTRTGQYKIFKEYTRLVDDQSERMASLRGLLKFRTGVRPPVPLDEVEPASEIVKRFSTGAMSYGSISAEAHETLAIAMNRLGARSNCGEGGEDVKRFDRDPNGDWRRSAIKQVASARFGVTSHYLTNCTDLQIKMAQGAKPGEGGQLPGHKVYPWVAEVRHSTPGVGLISPPPHHDIYSIEDLAQLIHDLKNANPSARVHVKLVSENGVGTVAAGVSKAHADVVLISGHDGGTGATPLTSMKHAGAPWELGLAETQQTLLLNGLRDRIVVQVDGQLKTGRDVMIATLLGAEEFGFATAPLVVAGCIMMRVCHLDTCPVGVATQNPLLRERFTGKPEFVENFFMFIAEEVREYLAQLGFRTVNEAVGQAGALDTTLARAHWKAHKLDLAPVLHEPESAFMNQDLYCSSRQDHGLDKALDQQLIVMSREALDSGKPVRFSTTIGNVNRTVGTMLGHELTKAYGGQGLPDGTIDITFDGSAGNSFGAFVPKGITLRVYGDANDYVGKGLSGGRIVVRPSDDAPQDYVAEDNIIGGNVILFGATSGEVYLRGVVGERFAVRNSGAHAVVEGVGDHGCEYMTGGRVVILGRTGRNFAAGMSGGVAYVYDPDGELPANLNSEMVELETLDEDDADWLHGTIQVHVDATDSAVGQRILSDWSGQQRHFVKVMPRDYKRVLQAIALAERDGVDVDKAIMAAAHG

SEQ ID NO: 24803 - protein, 183 aa, Acacia mangium
VLCDAEVALIIFSPRGKLYEFASSSMREAIERYRSHNRDVQTATRFVEQNMQYLKQETETMMKKIGQLGILKRKLLGEDCGSCSVKELEEIEQQLESSVRKVRERKSQVYNEQMEQLKEKRKTLAAENARLSEKYNSLAKQAREKNDGENAASLENIPTSEVETDLLIGLPETRSITLPIHVL

SEQ ID NO: 24804 - protein, 270 aa, Populus tremula x Populus tremuloides
MGRSPCCEKAHTNKGAWTKEEDDRLVAYIRAHGEGCWRSLPKAAGLLRCGKSCRLRWINYLRPDLKRGNFTEAEDELIIKLHSLLGNSRWSLIAGRLPGRTDNEIKNYWNTHIRRKLLNRGIDPATHRPLNEPVQEATTTISFTTTTTSVEEESRGSIIKEEIKEKLISATAFVCTEAKTQVQERCPDLNLELGISLPSQNQPDHHQPFKTGGSRSLCFACSLGLQNSKDCSCNVIVSTVGSSGSTSTKNGYDFLGMKSGVLDYRSLEMK

SEQ ID NO: 24805 - protein, 113 aa, Drosera tokaiensis
MPGQWEFQVGPSVGISAGNELWVARYILERITEIAGVVLSLDPKPIEGDWNGAGAHTNNSTKSMREEGGYEVIKKAIEKLGLRHKEHIAAYGEGNERRLTGHHETANINTFLW

SEQ ID NO: 24806 - protein, 982 aa, Solanum lycopersicum
MKHIFKKLHHSNRSNDAQSTSSISSSSSPASSLSSASCTTDHRNSNSVSQSPLSPSTISTASTTTTPAAPVGAGGGGGGGNLSTINRQQDYYTSEEEYQVQLALALSVSSSQSQDPFPSDVNSSNGHGVGRTAVDLARDREDAAADLLSRQYWDYGVMDYEEKVVDGFYDVYNLFTDPASRGKMPSLSELETNPGTSNFEGVIINQRIDPSLEELMQIAHCITLDCPASEISLLVLRLSELVTGHLGGPVKDANIILAKWMEISTELRTSLHTSVLPIGSLKIGLSRHRALLFKVLADHVGIPCRLVKGSHYTGVEDDAVNIVKLPNDSEFLVDLMGAPGTLIPADVLSAKDASFNSPKLNKIPSLPSNSHSGVSYPRRNLLSGQNSVLGDDFSGRSKPEKIESVHSISDAGGSSTAGSSGINKRPSSNQVDWTSPLAIGTSLYKGGRGPNAAGDGLRLNVNVVPYDQNNPEDPKNLFADLNPFQIKGSGNTLLQKNPARNKVSELQQPINTLIPGRPPAPMMWKNRYAPNEVPRKNESDSEGLFPKKNGGSSGYNISSIASTSSNIPQKSSTDTSRLHGNSRPAYRGNDEVASTRNNSSILSAELEFRRLSVQNSQNNNRETSQWEGHSLQSDDLNRTQAYGDDIIVESDHTRNLQAQSIGTNIKLKEPENPTSSGNLGPSQVDPVFDDVGDCEIPWEDLVIGERIGLGSYGEVYHADWNGTEVAVKKFLDQDFSGAALAEFKREVRIMRRLRHPNVVRFMGAITRPPHLSIITEFLPRGSLYRIIHRPHFQIDERQKIKMALDVAKGMDCLHTSNPTIVHRDLKSPNLLVDTDWNVKVCDFGLSRLKHNTFLSSKSTAGTPEWMAPEVLRNEPSNEKCDIYSFGVILWELATLRLPWSGMNPMQVVGAVGFQNKRLEIPKELDPIVARIIWECWQTDPNLRPSFAQLTVALTPLQRLVIPAYVDQLNSRLPQEISVNSTP

SEQ ID NO: 24807 - protein, 339 aa, Actinobacillus pleuropneumoniae serovar 1 str. 4074
MANTNKNPLCINELQVYSIVQEAPHVKTINFIAQDFYPYQAGQYALVSIKNTPHITRAYSLSSTPGESRFVSITVREIEGGVGSTWLNNEVKVGDQVWFSNPMGEFSCQHVLADNYLLVGAGSGVTPIMSMARWLLANRPKVNLTVIHSVHSPEDVIFKSEWQELKAKYPQLNLVMNASVGATEGFASGRISAEIIKNAVPNVSDYTVMTCGPEAYMAALKNIVLELGVSEDRFFTEAFFNTSLAGEISSDKKTTLTINAAKQIKAEVPVGMTLLAALEAQEQPVVSGCRTGLCGLCKTKVTGGEYEVVGTGDLTEEEIAQGYVLACSCRVKENVSVSL

SEQ ID NO: 24808 - protein, 556 aa, Actinobacillus pleuropneumoniae serovar 1 str. 4074
MTEEILENAPETRANFITHIIDEDLKSGKHNNVYTRFPPEPNGYLHIGHAKSICLNFGIAQEYKGLCNLRFDDTNPVKEDVEYVDSIKQDVEWLGFKWEGEPRYASDYFDQLYGYAIELINKGLAYVDELSPDEMREYRGTLTEPGQNSPYRDRSVEENLALFEKMKNGEFEEGKACLRAKIDMASPFIVMRDPVIYRVKFAHHHQTGDKWCIYPMYDFTHCISDAIERITHSLCTLEFQDNRRLYDWVLENISIERPLPHQYEFSRLNLEGTLTSKRKLLKLVTDGTVDGWNDPRMPTISGLRRRGYTPASLREFCRRIGVTKQDNVVEYSALEACIREDLNENAPRAMAVINPVRVVIENFGDKEILKAPNHPNRPELGERDLPFTRELYIDEADFREEANKQYKRLVLGKEVRLRNAYVIKAERVEKDENGKITTIFCTYDPETLGKNPADGRKVKGVIHWVSAEDNKLAEFRIYNRLFTVANPGAEDDINTVLNPESLVIKHGFVEPSLVNAKAEQGYQFEREGYYCLDSKDGSAENLVFNLTVSLKEGFTA

SEQ ID NO: 24809 - protein, 563 aa, Actinobacillus pleuropneumoniae serovar 1 str. 4074
MSAHLLIPQLTEIVGSQHIITDAAKSEAYRSGYRFGTGKALAVVRPATLLEYWRVLKACVRHDVIVINQAANTGLTGGSTPNGNDYDREIVIINTMRMDGIQLINNAEQVVCLPGSTLNELEIKLKPHGREPHSVIGSSCIGASVIGGVCNNSGGALVQRGPAYTEMALFAQLNEQGELELKNHLGIDLGETPEEILENLQNNRYQRKDIQLDCGKGHDHTYCDHVRKIDEDSPARFNADPNRHYEASGSAGKLAVFAVRLDTFPLEKQTAVFYIGTNHTATLNDLRRHMLANFKQLPISGEYIHRDAFDIAARYGKDTFWVIKKFGTHWLPKLFALKANADRIAKKFSFLPHHLSDKFMQTLSKRLPEHLPQSLWQYREKYEHHLILKMGGTGVAEAREYLKQYFSESEKGGYFECNAVETQAAMLHRFAVASAAIRYRATHENEVEDIVALDIALRRNDQDWFEVLPPEIDQKILHKLYYGHFMCHVFHQDYIVKKGVDCVALEHEMLALLDKRGAQYPAEHNVGHLYEAKPTLRKFYKDLDPTNSFNVGIGQTSKKKYWK

SEQ ID NO: 24810 - protein, 274 aa, Actinobacillus pleuropneumoniae serovar 1 str. 4074
MFSPAEMAKIAEDGAVYKATKHQLYSFISAILAGGFIGLAFVFYTTTQTGAVDVPWGMAKLVGGTVFSLGVILCVVFGAELFTSSTLTAVAKATHRITWFQMFKNWCIVYGGNFIGGLSVVVLIWLSGQIMAANGQWGLTILKTAQHKIHHTWIEAFTLGILCNMMVCLAVWMANAGKSLTDKAFIMIMPIALFVSSGFEHCVANMFMIPMGMMIAHFASPEFWMAINVDSAQFADLDLYHFIVKNLIPVTFGNIVGGVFFIGLVQWFLYIRKH

SEQ ID NO: 24811 - protein, 408 aa, Actinobacillus pleuropneumoniae serovar 1 str. 4074
MSVKLPIYLDYAATTPMDERVAQKMMQYMTKDGIFGNPASRSHKFGWEAEEAVDVARNHIADLIGADSREIVFTSGATESDNLAIKGAAHFYQTKGKHIITVKTEHKAVLDTCRQLEREGFEVTYLDPEEDGILDLAKLEAAIRPDTILVSVMHVNNEMGVIQDIKAIGEICRAKKIIFHVDATQSVGKVPVNVQELKVDLMSFSSHKLYGPKGIGGLYVCRKPRVRIEAIIHGGGHERGMRSGTLPVHQIVGMGEAYRIAKEEMATEMPRLRALRDRLYNGFKDIEEVYVNGSMEEGKRVDSNLNISFNFVEGESLMMALRDIAVSSGSACTSASLEPSYVLRAIGRDDELAHSSIRFTLGRWTTEEEIDYTIELVKKAIVKLRELSPLWEMFKEGVDLSKIEWNHH

SEQ ID NO: 24812 - protein, 69 aa, Actinobacillus pleuropneumoniae serovar 1 str. 4074
MSKATGIVKWFNSTKGFGFITPDQGGKDIFVHFSGIVGSNFRTLEEGAKVEFEVQDSERGPSAVNVKTL

SEQ ID NO: 24813 - protein, 87 aa, Actinobacillus pleuropneumoniae serovar 1 str. 4074
MTEQNQQPKTYCGFIAIVGRPNVGKSTLLNKILGQKISITSRKAQTTRHRIVGIHTEDQYQAIYVDTPGLHIEEKRAINRTNVRRIQ

SEQ ID NO: 24814 - protein, 311 aa, Actinobacillus pleuropneumoniae serovar 1 str. 4074
MNYLASANETLSLYAQAISQLNQRLDGAFNQAVEMVLNCEGRVVVAGIGKSGLVGQKMVATFASTGTPSFYLHPTEAFHGDLGMLKPIDVVILISNSGETDDVIKLLPSLKSFGNKIIAMTGNPNSTLAQHANLILNIGVEREACPNNLAPTTSTLVTMALGDALAIALINARDFKAEDFARFHPGGSLGRKLLNRVKDVMQTKLPIAQPNADFSTILSVMNEGRMGVALIMQGEQLQGIITDGDIRRTLAQFGTDSLAKTAEQIMSKHPKTVSDNTYLAKAEEMMKELHIHSLIALNDEGKVSGIMEFSS

SEQ ID NO: 24815 - protein, 474 aa, Actinobacillus pleuropneumoniae serovar 1 str. 4074
MNKEMLLPLIAYLCFVFGVAFYAYRKRQGGSFLSEYYVGSRSMSGFVLAMTTAATYVGASSFIGGPGAAYKYGLGWVLLAMIQVPAVLLALGALGKKFALLARQYNAVTINDLLLARYQNKFVVWISGFALLLSFFAMMTVQFIGAGRLLETTLGVPYQTAVIIFAITVGIYTFIGGFRAVVLTDTIQGLVMLVGTSLLLGGVIYAAGGVENAVNTLESINPQLIEPYGIDERPLDFTFMTSFWVLVCFGLIGLPQLAVRSMAYKDSASLHKALVIGTLVVSLLMFGMHLAGVLGRAVIPDLKIPDQVIPTLMIQVLPPLVAGIFLAAPMAAIMSSIDSLLIQSSSTLIKDLYLAVKPEAVNNEAKLKRFSTMTTLTFAVLLVFAALNPPDMLIWLNLLSLGGLEATFLWVIVLGLYWKNANAAGAISSMLAGLTSYVIFTSFKISILSFHAIVPSLVIGLIAFLIGNRFGKKS

SEQ ID NO: 24816 - protein, 632 aa, Actinobacillus pleuropneumoniae serovar 1 str. 4074
MGKIIGIDLGTTNSCVAVMDGDKARVIENAEGARTTPSIIAYTDNETLVGQPAKRQAITNPKNTLFAIKRLIGRRFESEEVQRDIKIMPFEITRADNGDAWVNVKGDKLAPPQISAEVLKKMKKTAEDFLGEAVTEAVITVPAYFNDAQRQATIDAGRIAGLDVKRIINEPTAAALAFGLGSTKENQVIAVYDLGGGTFDISIIEIDNFDGEQTFEVLATGGNTHLGGEDFDNRVIDYIIDEFKKEQGVDLRNDPMALQRVKEAAEKAKIELSSAQSTEVNLPYITADATGPKHLAINVTRAKLEALVEDLVASSIESLKTVLKDAGKSVNEINDIILVGGQTRMPLVQQKVAEFFGKEARKDVNPDEAVAIGAAVQGGVLKGDVKDVLLLDVTPLSLGIETMGGVMTVLIEKNTTIPTKKSQVFSTAEDNQSAVTIHVLQGERKQASANKSLGQFNLEGINPAPRGMPQIEVTFDIDANGVINVSAKDKNTGKEQQIRIQASSGLSDEEIEQMVRDAEANAEADKKFEELVQARNQADGIAHATRKQIEEAGDALNADDKAKIEAAIADLEKAAKGDDKAEIDAKTEALIKASEPLMQAAQAKAQAGEQPQQSAKDDGVVDAEFEEVKDNK

SEQ ID NO: 24817 - protein, 857 aa, Actinobacillus pleuropneumoniae serovar 1 str. 4074
MNFEKFTTKLQEALAEAQSLAIGKDNNYIEPAHLLYALVKQPDGSIAPLFTALNVQPQRILSELETILNRLPTVSGGTTQPSQQLIRLLNQCDKLAQQFGDSFISSELFVLAALDDNGDLGKLLKQFGLTKEKVNAAISQIRGGENVNNQNAEETRQALQKYTIDLTERAKAGKLDPVIGRDEEIRRAVQVLQRRTKNNPVLIGEPGVGKTAIVEGLAQRIVNGEVPEGLKNKRVLSLDMGALIAGAKYRGEFEERLKAVLNELAKEEGQVILFIDEIHTMVGAGKTDGAMDAGNLLKPSLARGELHCVGATTLDEYRQYIEKDAALERRFQKVLVDEPTVEDTIAILRGLKERYEIHHHVQITDPAIVAAATLSHRYISDRQLPDKAIDLIDEAASSLRMEIDSKPEPLDKLERRIIQLKLERQALQKEEDEASRQRLAKLDEELTAREREYSELEEVWKAEKSALLGTQHIKTELENARIEMDQARRENNFEKMSELQYGKIPALEKQLHEAVKREEEGSENQLLRTKVTEEEIAEVLSKATGIPVSKMMEGEKEKLLRMEEVLHSRVIGQNEAVEAVANAIRRSRAGLSDPNRPIGSFLFLGPTGVGKTELCKTLANFLFDDPDAMVRIDMSEFMEKHSVSRLVGAPPGYVGYEEGGYLTEAARRRPYSVVLLDEVEKAHPDVFNILLQVLDDGRLTDGQGRTVDFRNTVVIMTSNLGSHLIQENPELDYAGMKEVVMSVVGQHFRPEFINRIDETVVFHPLGQAHIRAIARIQLQRLIARLAERGYEVTVTDAALDHIGKAGFDPLFGARPLKRAIQQELENPLSQQILSGKLLPNSPVVVDYQNDRLSISNS

SEQ ID NO: 24818 - protein, 181 aa, Actinobacillus pleuropneumoniae serovar 1 str. 4074
MKKAIFLDRDGTINIDHGYVHQIDDFQFIEGVGKALKQLQDKGYLLVLVTNQSGIARGYFSEEQFNQLTEWMDWSLDEDYGVVLDGIYYCPHHPEGKGEYKEDCDCRKPKAGMFTQAIADLDIDPAQSYMVGDKLEDLLAAEVAGVKTKVLVRTGKPVTAEGEAKADLVLDSLVDLVRYIK

SEQ ID NO: 24819 - protein, 441 aa, Actinobacillus pleuropneumoniae serovar 1 str. 4074
MNAPTDAEIALIKEGATLVSFIWPAQNPQLMEKLQAKKINVLAMDAVPRISRAQALDALSSMANISGYRAVIEAANAFGSFFTGQITAAGKVPPAKVLVIGAGVAGLAAIGAANSLGAIVRAFDSRPEVKEQVKSMGADFLEIDFEEEGGSGDGYAKVMSEEFNRRAMELYAEQAKEVDIIITTAAIPGKAAPRLITKEMVDSMKPGSVVVDLAAATGGNCEYTKAGKAIVTKNQVKVIGYTDFPARLPTQSSQLYGTNLVNLLKLLTPNKDGQIDINFEDVVLRGVTVVRDGELTWPAPPIQVSAQPQKPAAAAPIEKKEEKPTDPRVKYGVMTGAGALFLWLASVAPAAFLSHFTVFVLACVVGYYVVWNVSHALHTPLMAVTNAISGIIIVGAVLQISQPTGNFFVDILAFIAILVASINIFGGFKVTQRMLAMFRKG

SEQ ID NO: 24820 - protein, 450 aa, Actinobacillus pleuropneumoniae serovar 1 str. 4074
MSHLSVAKFGGTSVANFDAMTSCANIVTSDANTRVVVLSASAGVTNYLVELANGCEKERREEILDAVRTIQYNIIEKLQNQSEVSAEIDELLQHIAALAESASLATSNALTDELICHGEMMSTKIFTQLLKERNFPAVWVDVRDIVATNSNYGKAAPNDEKTQQQSDAIIKPLIAAGNVVITQGFIGRDDEGKTTTLGRGGSDYSAALLAEVLNANDVLIWTDVPGIYTTDPRVVPNAQRIDTMAFNEAAEMATFGAKVLHPATLLPAVRSNIPVYVGSSKAPEQGGTWVTRDPQPRPTFRAIALRRNQTLLTLSSLSMLHAQGFLANVFAILAKHKISVDVITTSEVSVALTLDKTGSASSGADMLSKELLDELNAYCHVQVEHDLALIAIIGNNLHTQAGVAKQLFHTIENFNIRLISYGASTNNVCTLIKNDEADEVVRALHAGLFE

SEQ ID NO: 24821 - protein, 566 aa, Actinobacillus pleuropneumoniae serovar 1 str. 4074
MVVQSLKDEGVEYVFGYPGGSVLDIYDAIHTLDNINHVLVRHEQAAVHMADGYARSTGKVGCVLVTSGPGATNAITGIATAYADSVPLVILTGQVPSALIGTDAFQECDMLGISRPVVKHSFMIKNPEDIPSIIKKAFYIASTGRPGPVLIDIPKDMVNPANKFTYEYPKEVSLRSYNPTVQGHKVQIKKALKALLVAKKPVLYIGGGIISAECATQLTDFATKLNLPVTSSLMGLGAFPASNKQFLGMLGMHGTYEANNAMHESDLILGIGVRFDDRTTNNLAKYCPNAKVIHVDIDPASISKTVPAYIPIVGSAKNVLEEFLSLLEEENLAKNQADLTAWWQQINEWKARQCLNFEVSKDVIKPQQVIRLIHKITNGDAYVASDVGQHQMFAALHYPFEKPRRWINSGGAGTMGFGLPAAIGVKFAHPEATVVCVTGDGSIQMNIQELSTAKQYDTPVVIVSLNNRFLGMVKQWQDLIYSGRHSQVYMNSLPDFAKLAEAYGHVGITIDHPNELEEKLTQAFAIKDKLVFVDVKVDETEHVYPMQIRGGAMNEMILSKTERTDA

SEQ ID NO: 24822 - protein, 322 aa, Xylella fastidiosa
MPTIQDERNLMVFSGNANKPLTQSICKELGVRMGKSLVSRFSDGEEQVEIEESVRRQEVFVVQPTCAPSAENLMELLVIIDALKRASVSSVTAVIPYFGYSRQDRRMRSLRVPITAKVAAKMISAIGADRVLTIDLHADQIQGFFDVPVDNVYASPLLLADIWRAYGTDNLIVVSPDVGGVVRARAMAKRLGDTDLAIIDKRRPRANVATVMNIIGEVNGKTCVLVDDLVDTAGTLCAAAVALKQNGATKVVAYITHPVLSGPAVDNINNSELDELVVTDTIPLSDAARECRKIRQLSVAELLAETIRRIAFGESVSSLYVD

SEQ ID NO: 24823 - protein, 322 aa, Streptomyces coelicolor A3(2)
MSSNETPRGPVDSSRIPRYAGPATFARLPRLDEVGAADVAVVGVPFDSGVSYRPGARFGGNAIREASRLLRPYNPAQDASPFALAQVADGGDIAVNPFNIHEAVETIEAAADDLLGTGARLMTLGGDHTIALPLLRSVAKKHGPVALLHFDAHLDTWDTYFGAEYTHGTPFRRAVEEGVLDTSALSHVGTRGPLYGKKDLTDDEKMGFGIVTSADVYRRGADEIADQLRQRIGDRPLYISIDIDCLDPAHAPGTGTPEAGGMTSRELLEILRGLASCNLVSADVVEVAPAYDHAEITSVAASHTAYELTTIMSRQIAEARTK

SEQ ID NO: 24824 - protein, 865 aa, Streptomyces coelicolor A3(2)
MDAELTNRSRDAINAASNRAVTEGNADLTPAHLLLALLQGQDNENITDLLAAVEADLAAVRTGAERIVAGLPSVTGSTVAPPQPSREMLAVVADAQARAKELGDEYLSTEHLLLGIAAKGGAAGEVLEGQGASAKKLQEAFRKARGGRRVTTADPEGQYKALEKFGTDLTAAARDGKLDPVIGRDQEIRRVVQVLSRRTKNNPVLIGEPGVGKTAVVEGLAQRIVKGDVPESLKDKRLVALDLGAMVAGAKYRGEFEERLKTVLAEIKDSDGQVVTFIDELHTVVGAGAGGDSAMDAGNMLKPMLARGELRMVGATTLDEYRERIEKDPALERRFQQVLVAEPTVEDSIAILRGLKGRYEAHHKVQIADSALVAAASLSDRYITSRFLPDKAIDLVDEAASRLRMEIDSSPVEIDELQRSVDRLKMEELAIGKETDAASLERLERLRRDLADKEEELRGLTARWEKEKQSLNRVGELKEKLDELRGQAERAQRDGDFDTASKLLYGEIPDLERDLEAASEAEEEVARDTMVKEEVGADDIADVVASWTGIPAGRLLEGETQKLLRMEDELGKRLIGQTQAVRAVSDAVRRSRAGIADPDRPTGSFLFLGPTGVGKTELAKALADFLFDDERAMVRIDMSEYSEKHSVARLVGAPPGYVGYEEGGQLTEAVRRRPYTVVLLDEVEKAHPEVFDILLQVLDDGRLTDGQGRTVDFRNTILVLTSNLGSQYLVDPTTGEAEKKQQVLEVVRSSFKPEFLNRLDDLVVFSALSQEELSRIARLQINGLARRLAERRLTLEVTDEALAWLAEEGNDPAYGARPLRRLVQTAIGDRLAREILSGEIKDGDTVRVDRFGDELIVGPASGKTL

SEQ ID NO: 24825 - protein, 618 aa, Streptomyces coelicolor A3(2)
MARAVGIDLGTTNSVVSVLEGGEPTVITNAEGARTTPSVVAFAKNGEVLVGEVAKRQAVTNVDRTIRSVKRHMGTDWKVNLDGKDFNPQQISAFVLQKLKRDAESYLGEKVTDAVITVPAYFNDAERQATKEAGEIAGLNVLRIVNEPTAAALAYGLDKDEQVILVFDLGGGTFDVSLLEIGDGVVEVKATNGDNNLGGDDWDQRVVDYLVKQFQSGHGVDLAKDKMALQRLREAAEKAKIELSSSTETTINLPYITASAEGPLHLDEKLTRAQFQQLTSDLLERCKTPFHNVIKDAGIQLSEIDHVVLVGGSTRMPAVAELVKELTGGKDANKGVNPDEVVAIGAALQAGVLKGEVKDVLLLDVTPLSLGIETKGGIMTKLIERNTTIPTKRSEIFTTAEDNQPSVQIQVYQGEREIAAYNKKLGMFELTGLPPAPRGVPQIEVAFDIDANGIMHVTAKDLGTGKEQKMTVTGGSSLPKDEVDRMRQEAEKYAEEDHARREAAESRNQGEQLVYQTEKFLKDNEDKVPGEVKTEVESAVAELKEKLKGEDTAEIRTATEKVAAVSQKLGQAMYADAQAAQAAGGEAPGADAGAEGKGADDDVVDAEIVDDERKDGAA

SEQ ID NO: 24826 - protein, 697 aa, Streptomyces coelicolor A3(2)
MTRSVYVTGIDRGDGRQVVELGVMELLTRQVDRVGVFRPLVHDGPDRLFELLRARYRLSQDPATVYGMDYQEASLLQAEQGVDELVSALVDRFHLVARDYDVVLVLGTDYADTQFPDELSLNARLANEFGASVLPVVGGRKQTADSVLAETHNAFRAYDGLGCDVLAMVTNRVAREDRDEIAERLAHRLPVPCWVVPDEPALSAPTVSQIAHALGAEIVLGDDSGLARDALDFVFGGAMLPNLLAALTPGCLVITPGDRADLVIGTLAAHSAGTPPIAGVLLTLNEVPGEGILTLAARLAPGTPVLSVTGTSFPTAERLFSLEGKLGAATPRKAETALGLFERYVDTAELNKRVSAPSSDRVTPMMFEHKLLEQARSDLRRVVLPEGTEERVLHAAEVLLRRGVCELTLLGPVEQIRKKAADLGIDLGGAELIDPAASELRDSFAEKYAALRAHKGVTVELAYDVVSDVNYFGTLMVQEGFADGMVSGSVHSTAATIRPAFEIIKTKPDAAIVSSVFFMCLADKVLVYGDCAVNPDPDAEQLADIATQSASTAAQFGVEPRIAMLSYSTGTSGSGADVDKVREATELVRSRRPDLSVEGPIQYDAAVEPSVAATKLPGSAVAGQASVLIFPDLNTGNNTYKAVQRSAGAIAVGPVLQGLRKPVNDLSRGALVQDIVNTVAITAIQAQQSPTEKASAQ

SEQ ID NO: 24827 - protein, 371 aa, Carnobacterium sp. St2
MKIGIPKEIKNNENRVAISPAGVYSLTEGGHEVLVEASAGKTAGFTDAEFEESGAKIVNNADDVWAADMVIKVKEPLPEEYGYFREGLIIFTYLHLAAAKELTEKLMETGVTAIGYETMEKDGVLPLLTPMSQVAGRMAVQIGAQFLENNYGGKGLLLGGTPGVSTGNVVIIGGGVSGMHAAKMAVGLGADVTILDVNPARLAELGNIFGNSVTTLMSNEYNIAEQVKTADLVIGAVLIPGSKAPTLVTEEMVESMEEGSVIVDIAVDQGGIVETADKVTTHDNPVYTRHGVLHYAVANMPGAVAKTSTMALTNVTIPYALEIANKGVVQASQDNPTVYGGINVMDYKLTKKEVAQSLDIDYVEASTCFNK

SEQ ID NO: 24828 - protein, 371 aa, Shewanella sp. Ac10
MIIGVPTEIKNHEYRVGMVPSSVRELTIKGHVVYVQSDAGVGIGFTDQDYIDAGASILATAAEVFAKSDMIVKVKEPQAVERAMLRHDQILFTYLHLAPDLPQTEELITSGAVCIAYETVTDDRGGLPLLAPMSEVAGRMSIQAGARALEKSLGGRGMLLGGVPGVEPAKVVIIGGGMVGTNAAQMAVGMGADVVVLDRSIDALRRLNVQFGSAVKAIYSTADAIERHVLEADLVIGGVLVPGAAAPKLITRDMVKRMKPGSAIVDVAIDQGGCVETSHATTHQDPTYIVDDVVHYCVANMPGAVARTSTFALNNATLPYIIKLANQGYKQALLNDKHLLNGLNVMHGKVVCKEVAEALNLEFTEPKSLLA

SEQ ID NO: 24829 - protein, 374 aa, Vibrio proteolyticus
MIIGVPKEIKNHEYRVGMIPASVRELISHGHQVFVETNAGAGIGFSDDDYIAVGASILPTAAEVFAQADMIVKVKEPQAVERAMLKEGQILFTYLHLAPDFPQTEDLIKSKAVCIAYETVTDNMGRLPLLAPMSEVAGRMSIQAGAQTLEKSHGGRGLLLGGVPGVEPAKVVIVGGGVVGANAARMAVGMRADVTILDRNIDTLRKLDEEFQGRAKVVYSTEDAIEKHVLAADLVIGAVLIPGAAAPKLVTKEHIAKMKPGAAVVDVAIDQGGCFETSHATTHADPTYIVDDVVHYCVANMPGAVARTSTFALNNATLPYIVKLANKGYREALLADHGFLEGLNVIHGKVTCKEVAEAFNLEYVQPETAIAMFN

SEQ ID NO: 24830 - protein, 347 aa, Helicobacter hepaticus ATCC 51449
MFVDSVDIFIASGKGGAGAVSFRREKFVIHGGPDGGDGGDGGDVYVEVDNNTDTLSKFRGARHYKAKNGQPGGSRRCSGKRGNDVVIKVPLGTQILDFDTKELIVDMDTCPMRVCLLKGGKGGLGNTHFKNAANQAPTYAQSGLSGEEKHILLELKLIADVGLVGFPNVGKSTLISTLSNAKPEVANYEFTTLIPHLGVVDADEFSSFVMADIPGIIEGASGGKGLGIAFLKHIERTGFLLFVLDIMREQSLKEQWEILSLELEKFSPILSQRAFGIVLSKSDMQHLGEEFADKFDKQTQELEQFLAQKGNPQSFILPISSIQKSGLKELVFEILNSLRINPQSILQ

SEQ ID NO: 24831 - protein, 859 aa, Helicobacter hepaticus ATCC 51449
MNLFEKLTNQMKETLDSAASLALHSSNQEISLAHIYWALLSNHQSVLNQALNKMNIDKTALELQARSEVDKLPKSSQVQKENLSISKELSSALNLAQGEAIKNGDSFIAVDMFLIANLKESTFVAIFKPLVDIAEFKKTLLSLRGESKIESQSGDDNLESLSKFGIDLTQKALENTLDPVIGRDDEINAMMQILIRKSKNNPILLGEPGVGKTAVVEGLAQRIVAKAVPTSLQNKKLIALDMSALIAGAKYRGEFEERLKNVVDEVKKAGNIILFIDEIHTIVGAGASEGSMDAANILKPALARGELHTIGATTLKEYRKYFEKDAALTRRFQPINVNEPSINEALQILRGIKPNLEAHHNVNITDAALVAAAKLSSRYITDRFLPDKAIDLIDEAAAELKMQIESEPLELSKIKKHIANLEVEKQALNMEKTNVNEARVLEIDKELENLREEKMSLEGKFEQEKSVFTRIATIKAELDSLKRESELAKRSGDYNKAAEIDYGKIPDIQAQEAALHKQWEEMQQNGTLLKNAVTQESIAGVVSRWSGIPIKKMLQSQKERILGIESELAKSVVGQDDAIKAIARAIKRNKAGLNDASRPIGSFLFLGPTGVGKTQCAKTLAEFLFDNAKSLVRIDMSEYMEKHAVSRLVGAPPGYVGYEEGGVLTEAIRRKPYSIVLFDEVEKAHPDVFNILLQVLDDGRLTDSKGVSVDFSNTIIILTSNIASDKIMEIGDKQERQKAVKEALKMYFKPEFLNRLDDVVVFNPLGLADITQIVDIMFKSLAKRALEKGINVTLSQEAREHIAQVGFDSVYGARPLKRALYEEVEDRLADLILRDEIKEGDRVNFALKNGEICTHIEKE

SEQ ID NO: 24832 - protein, 591 aa, Helicobacter hepaticus ATCC 51449
MYRPNEQDNGMSLTRVLIAIGLSIAFFAIYAYFFPQKPHQNTHQAHTAQNTQDTQESIQASTHTEINTQVAPHQNIQDSTQSVQNEISSSAQMPHSLKQTIIARVDSDEFELEIDALGRIKQVYLKDEKFIRHEQTSLFAMIGEVLGMKPAHKEKRDKLPLFGDSQLHTMEMRFSDTSINQQAFDTPYTANISYIKLENAPVEIVLTQNLGNLVIKKYLTIHPNLAYDVRLELSKPNIEYFVSNGMRPTADTDTYAFRGVITRNNIDGVLTKFEDGDASSDYLAKNAADIRSSSFVASVDRYYTSLFFSNAPKGLYVVMSGDNAHNPMPYVRFEGDAEFAGYIGPKEYHELQGIENTLTDVVEYGRITFFAKPLFLLLEYLYDLCGNWGWAIVLLTLIVRIVLYPLTYKGMVSMQKLKDLAPKMKDLQTRYKDDPQKLQIHMMDLYKKHGANPLGGCLPLILQIPVFFAIYRVLHNAVELKSSAWILWITDLSAIDPYFVLPVLMGVSMYISQKLTPSNFTDPMQEKIFKMLPWVFTIFFIIFPFPAGLVLYWTINNVFSIIQQISINKIMEGKKAKEIAAHHDEKTNKRG

SEQ ID NO: 24833 - protein, 526 aa, Helicobacter hepaticus ATCC 51449
MKYKIVVCDHIHQKGLDLLTAQSDVQMENLASLPKDELLTKIKEADVVITRSSTDVDEAFLASSGQIRAVVRAGVGVDNVDIEGCSRKGIVVMNVPTANTIAAVELTMAHLINAVRNFPGANTQLKHERKWKREDWYGIELKGKKLGIIGFGNIGSRVGIRARAFEMEVLAYDPYILPSKATDLGVAYATNFEDILSCDIITIHTPKNAETKNMITAKQIAQMKDGVILINCARGGLYNEKDLYDALSVGKIKWAGIDVFDKEPAINNALLDLPNVYVTPHIGANTLESQEQIAIQAAQAAIEAARGSSYPNALNLPVKESELPSMVKPYLELIQKLAFLAVQANKGVITSIHIEAQGEISAYGDSLQTFALVGALNASLGDKINYVNAPFVAKERGIDVKMTLKQESETYKNHIYITLSTQNESITLSGAVFEDRHLRLTSINHFQFDIEPKGKMIFFKNTDVPGVIGLVGSILGNHQVNISDFRLARQNKEAMAVILVDSEVSNEVIGQLENIPACLSIKIVNV

SEQ ID NO: 24834 - protein, 286 aa, Helicobacter hepaticus ATCC 51449
MNAIVSLKTLIPPLKIQGIKSKIIPHIRDIFQTWNKKGIYFEPFMGSGVVGFNLAPKRAIFSDNNPHIIAFYQAIQQGVITKDSARKYLQYEGDILQKVGQEHYLKVRERFNQTHSPFDFLFLNRSCFNGLMRFNSKGRFNVPYCKKDARFSAAYITKITNQIDAVARLIQHSDYEFRICDFSLVLQEAKKNDFIYCDPPYIDRHSDYFNAWSESNERELYKILKNTKAQFLLSTWHSNVYRQNQYMNEYWNNFKLKLIEHFYHLGASEVNRHTIKEALIQNKVMS

SEQ ID NO: 24835 - protein, 306 aa, Helicobacter hepaticus ATCC 51449
MQIESISNQTLPTRAGFVATLGRPNAGKSTLLNHLLGENLALVSHKANATRKQLQLIVPYAPLNAQIIFVDTPGIHHQEKLLNQYMLSQALRALSDYDMALYLAPVSDDIGHYEHFLELSQGKKHILLLSKIDTCTNEEILHKIAQYQRFSDTFLELLPVSVKKGFDREKILHTIASHLPFSPFLYDEEILSNASLKEIYKEMIRQSLFENLSDEIPYEADVVIKKFEESAEQDRIFAHIIVEKSSQKGVVIGKGGSSIKRISKCARQKIESLSSKAIFLKLDVEVYKGWSKQRDTLKKIGYDFTL

SEQ ID NO: 24836 - protein, 170 aa, Helicobacter hepaticus ATCC 51449
MIIRFLYGIINKKAYSKPYLINLFTHHIMILHIFMIKLHYFYIPNQIRHKMQFEMLYSKIHRAKVSDANLNYVGSITIDKTLAQSANLLAGMKVEIVNINNGERFSTYVIYGDKKGEICLNGAAARKVQIGDIIIIIAYATYTHNELEHYKPTIVQVNESNQILSITNEV

SEQ ID NO: 24837 - protein, 388 aa, Helicobacter hepaticus ATCC 51449
MKQVYLDNNATTMLDPSIKPLMEPYFCEKFGNPNSLHKYGTQTHAAISEAIEKLYKGINADDNDDIIITSCATESNNWVIKGVYFDEIVKKGKRHIITTEVEHPAVRATCAFLETLGVEVTYLPINQQGTITAKQVRESLREDTALVSVMWANNETGLIFPIEEIGTLCRQNNVLFHTDAVQAIGKIPVDVQSAQVDFLSFSAHKFHGPKGVGGLYIRKGIELTPLFHGGEHMRGRRSGTLNVPYIIAMGEAMKLANDYLDFELSQVKNLRDRLESALLEIPDVFVVGTRDNRVPNTTLISIRGIEGEAMLWDLNKAGIAASTGSACASEDLEANPVMVAIGADKELAHTAIRISLSRFTTSEEIDYTIEVFKKAVQRLRAISSSYES

SEQ ID NO: 24838 - protein, 401 aa, Helicobacter hepaticus ATCC 51449
MLIVQKYGGTSMGDCDRIHNVAKRVIKSKAQGHKLVVVVSAMGGETDRLINFTQHFTPLPNTREVDMALSAGERVSAALLAIALESMGVKAISLSGRGAGIITDEFHTKARISYIDTTKIFHLLNEDYVVVVAGFQGISQQGEVTTLGRGGSDLSAVALAGALNATVCEIYSDVDGIYTTDPRIVKNARKLEKISYDEMLELASMGAKVLLNRSVELAKKLNVNLICASSFSEAQGTLITKEEDIMEKPVVSGVALDKNQARVSLADVQDRPGIAADIFGLLADNNINVDMIVQTIGRDGKTDIDFTIPKTEVTLTQQVLEKFKDDLGNIEYDNNIAKVSIVGVGMKSHSGVASTAFKALAQDDINIMMISTSEIKISMIINAQFAELAVCKLHSVYELDK

SEQ ID NO: 24839 - protein, 625 aa, Helicobacter hepaticus ATCC 51449
MAKVIGIDLGTTNSAMAVYEGNEAKIIANKEGKNTTPSIVAFTDKGEILVGEPAKRQAVTNPKKTVYSIKRIMGLMFNEDKAKEAEKRLPYNIVDRNGACAVEIADKIYTPQEISAKILMKLKEDAQSYLGEDVTEAVITVPAYFNDSQRKATKEAGTIAGLNVLRIINEPTSAALAYGLDKKEAEKIMVYDLGGGTFDVTVLETGDNVVEVLATGGDAFLGGDDFDNRIIDWAAEEFKSDEGIDLKNDVMALQRLKDAAENAKKELSSAQETEINLPFITADASGPKHLVKKITRAKFESLIDDLIEDTIKKIEFVIKDAGLSQSDISEVVMVGGSTRIPKVQERVKAFISKDLNKSVNPDEVVAVGAAIQGGVLKGDVKDVLLLDVTPLSLGIETAGGISTKVVERGVTIPTKKTQIFSTYEDNQPAVSINVLQGERELARDNKSLGRFDLSGIPAAPRGVPQIEVTFDIDANGILTVSAKDKATGKSQEIKISGSSGLSDAEIEKMVKEAELHKEEDTKKKAIIELRNNADSLVYQTKKSLEEFKDKIESAEVEKIQSAVAALEETLKNENASKEELEEKIKNLTEVSHKLAEAAYAKEQGGTQQGTDTKKKDDDVIDAEVE

SEQ ID NO: 24840 - protein, 275 aa, Helicobacter hepaticus ATCC 51449
MKKLLLALFGVVFMIGLSACGDNQSTKESKNALEEIKQKGVVRIGVFSDKPPFGFINEKGQNDGFDVYIAKRIAKDLLGDENKVEFVLTEAASRVEFLRSNKVDIIMANFTQTPEREAVVDFAKPYMKVALGVISPNGEIKSIDDLKGKKLIVNKGTTADAFFSKNYPDIELLKYEQNTEAFLALKDKRGDALAHDNTLLLAWAMENEGFNVGIPTLGEEENIAPAIKKGNIELKNWLDNEITSLTHEGFMKEAYEKTLAPIFGEEKMDSVIFSH

SEQ ID NO: 24841 - protein, 570 aa, Helicobacter hepaticus ATCC 51449
MKVMKGAQMLIQALHLEGVKVVFGYPGGAVLHIYDEIYKQNYFSHILARHEQGAVCAADGYARSSGEVGVAIITSGPGFTNAITGIATAYTDSIPLVVISGQVPITQIGTDAFQEIDAVGISRPCTKHNFLVRNISELPRILKEAFYIARSGRQGPVLVDIPKDITGTLGEFAYPESISLQSYKPTIKGNSRQIKKLCEAIMSAQKPLFYIGGGAILSNASEIIREIVHCTGIPCAETLLARGVLRYDDENLLGMLGMHGSYAANMAVSECDLLVCLGARFDDRVTGKLSEFAKNAKIAHIDIDPSSIGKIIAVDYPIVGDLKHIVSDMMIELSGYDTQKIMRWREHLRSYALTHPMSFEDSVDSIKPQWVIQRLGEHLGDNAIITTDVGQHQMWAAQFYPFSFPRQFLSSGGLGTMGYGLPAALGAKLACPHKTIINITGDGSILMNIQELMTCVVYGIPFVNVILNNNYLGMVRQWQSFFYEHRFSHTDLSLQPDFIKLIESFGGVGFRVEKKCEFDEAFKKALDAKKVAFIEVMIDRYEDVLPMVPSGGAIYEMILSSGEKALREGK

SEQ ID NO: 24842 - protein, 388 aa, Helicobacter hepaticus ATCC 51449
MTQEYKTKGYFSYLPISFFGACMGLSAISVAWDKMMRLIQNLTINTENFLAPTHNTNFLPSTLLANFSFALSVSFALLALIAFIGLVSAYALKILSSFESVKLEFVSPLTRPFFGTFFISLLLLPFALHRLGLPESLSLAVWIVGAILMFIFSVHIVQFWICNKLELSHITPAWIIPVVGLLDLPLALPLFVDKVWVQDFSFIIAGFCVGVGFFWSIVLCVLIFARIVFFEKLPEKLMPTLVILLAPFGAGVSAYAVFIRIPILSSIDNSSYVQALISLLNSTNNLDYALLSIGLFLLFALLPQVFQIGKCCPFRISWWAISFPLAAMCIASFNIAESIASKSSALSGGAIFFSALSSMLLIAVTLTFIWLLVRTLRGIIKGELKNLA

SEQ ID NO: 24843 - protein, 322 aa, Helicobacter hepaticus ATCC 51449
MKLDYALVAKEVLEIESASLLQATKRLNGKILESIVECIINSQGKVVVCGVGKSGLIGAKISATLSSTGTPSVFMHPTEAMHGDLGLLQKNDIVLAISYSGKSEELLNILPHIKRLGNPIITMSKDINSPLSRMGDYFLDISIQKEACPLNIAPTSSTTLTLALGDALAVCLMKRRDFKANNFASFHPGGALGKQLFVKLKDLMQIENLPLISPDLPLSQAIIIMSQKRLGSAIITQNDALWGILSDGDLRRAMMNKDFDLNAPVSIYATRNPKTCDNPDILAFDALKFMEENKIQLLIITNKQNHIQGVIHLHTLIAAGIK

SEQ ID NO: 24844 - protein, 404 aa, Helicobacter hepaticus ATCC 51449
MAAIKKVVLAYSGGLDTSVILKWLGDNYHCEVVTFTADIGQGEEVEPAREKALKLGIKSENIFIEDLREEFIKDFVFPMFRANTIYEGEYLLGTSIARPLIAKRLVEIAKSVGADAIAHGATGKGNDQVRFELGAYALNPDIKVIAPWREWDLNSREKLLAYAESAGIAIEKKQNKSPYSMDANLLHISYEGQILEDPNVEPEEDMWRWSVSPLNAPDKPESISIEFQNGDGVAINGEKLSPANFWVNLNELGGKHGIGRLDLVENRYVGMKSRGCYETPGGTIYLKAHRAIESLCLDREEAHLKDSIMPKYAELIYNGYWFSPEREALQALIDKTQQKVSGVVRLKLYKGNVIVIGRESKNSLFNAAYSTFEEDSVYNQKDAAGFIKLNALRFIIAGKANRDK

SEQ ID NO: 24845 - protein, 401 aa, Helicobacter hepaticus ATCC 51449
MNILVINCGSSSLKFQLIDTDTEKVLANGICDRIGIEGSVLQYKNKEGKKSEKKEAMPNHTKAIEMVLEALTNKQNGAISSLDDIRAIGHRVVHGGEFFKESVLINDTVIAHIKECSDLAPLHNPANLMGIDVCKQKMPNTPMVAVFDTAFHQSMPPQAYTYGVPYEWYEKHKVRRYGFHGTSHKYVSQRTTEFLGLDYHNSKIIVCHLGNGSSISAIKNGKCVDTSMGLTPLEGLIMGTRCGDLDPAILEYISKREDLDIQSILNVLNKKSGVLGISGVSSDFRDLLDADLGGNERAKLARLAFAYRVMKYVGAYCAAMNGVDAVSFCAGVGENAKFIRGMIVKHLEFLGVELDEEANNICGQEAIISTANSKVKVCVIPTNEELVIARDTRAIVSQLKD

SEQ ID NO: 24846 - protein, 331 aa, Helicobacter hepaticus ATCC 51449
MSFIDTIKTQARKNKKTIVLPETSDSRTIEAAVKILNEDFAELILIGEQEQILSTYQDNAQVLKKATFLHSSDTALLDELIELLVKLRAHKGMDKSKAREILVNDNLYFGAALVKAGRADGMVAGAIHATSDVLRAALQIVGTAPDSKLVSSFFVMVVPQCDYGLNGTFVFSDCGLCQNPSAEELAHIALSSAKSFASIMHEEPMVAMLSHSTYGSAKHPDVDKVVEATKIAKSLDKNLKVDGELQLDAAIVPSVGASKAKGSNVAGKANVLVFPDLDAGNIGYKLVQRFAKAEAYGPITQGMGAPINDLSRGCSADDIVGVVALTALQAK

SEQ ID NO: 24847 - protein, 260 aa, Helicobacter hepaticus ATCC 51449
MRSCVNVKRLLKVAGLFLFLSMFALQANAGMLEDIKKKDELVVGVKNDIPHFALLDQKTKEIKGFEIDVAKLLAKHILGNENKLKLVAVNAKTRGPLLDNGSIDVVIATFTITPERKRTYNFSEPYYKDSVGLLVLKEKGYKSLADMKDATIGVAQAATSKRAIASAAKKLGINVKFNEFPDYPSIKAALDAKRIDAFSVDKSILLGYVDKKSEILSDSFEPQEYGIVSPKKDKEFAAFIDTFVKKNKAQIDELAKKWGL

SEQ ID NO: 24848 - protein, 177 aa, Helicobacter hepaticus ATCC 51449
MQKCAFFDRDGVINQDNGYVYKIKDFIFCDGLFALLETLKAQNYLLLVITNQSGIARGYYNESDLNTLHQYMQERLKAQLGFGFDRIYHCPHLPSENCDCRKPKIGMIKAACRDFNIDLAHSFFIGDKITDMQCAQNAHINGKFLLGEAQVNDNSLKNVQKIATLHQLHSIIKESHF

SEQ ID NO: 24849 - protein, 309 aa, Helicobacter hepaticus ATCC 51449
MRGFKIFSGSAHTLFSNEVAKCLDISLSKTTINRFSDGEINVQIGESVRGKDIFIIQPTCAPANDHLMELLIMTDALKRSGAKNINAVIPYFGYARQDRKVVPRVPITAKLVANLIEQSGIHRVITMDLHAEQIQGFFDIPVDNLYGSIVFRDYLKTKSFKNPIVASPDIGGVARARHFADRIGMDLVIVDKKRERANESEVMNIIGDVDGKDVILIDDMIDTAGTMCKAADVLKSRGANSVIALGTHPVLSGPALERIAKSALDEVVVTNSIPLRVAHPKIKVLSVAPLFAEVIRRICHNESVNSLFF

SEQ ID NO: 24850 - protein, 395 aa, Helicobacter hepaticus ATCC 51449
MKKTTYAKRVELLGESTTIAISTLARELKAAGQDILSFSAGEPDFDTPEIIKDEAIRALKSGFTKYTAVAGIPELLEAIKDKLLRENTLAYERNEILVSNGAKHSLFNVFQALVDKDDEVIIPSPYWVTYPELVTFSGGKSVIVQTTQANNFKITPKQLREAITPKTKVFVLNTPSNPTGMVYTKEELESLAEVLKDTNIWVVSDEMYEKLVYGVKFFSVAAVNEDMMQRTITINGLSKSVAMTGWRIGYLACKDKKLVKLMNNLQSQCTSNINSITQKAAIVALKGEANNDIEDMRKAFEERMRFACDAINNIQNLNVCEPQGAFYLFINISTLPRYGTDSMGFCQALLKEQGVALVPGVAFGMEGFVRLSFACSLEQLKEGITRISQFVKTLF

SEQ ID NO: 24851 - protein, 530 aa, Helicobacter hepaticus ATCC 51449
MNNLGYLLNVKVKRMDNASLIQQSEESPSVTIKQGLKSKHKQDTQGFDVFGLKDFVLKGIREAGFSTPSPVQSQSIPIILQGKDLIAQAQTGTGKTAAFAIPILNTLNRNKDIEALIITPTRELAMQISEEILKLGRFGRIKTICMYGGQSIKRQCDLLEKKPKAMIATPGRLLDHLQNGRIAHFSPQIVVLDESDEMLDMGFLDDIEEIFKFLPNTRQTLLFSATMPEPIKALAMKILNEPAFVKITPTDVTNQDIEQQYYIINEGERDEAIVRLIETQNPTKSIIFTRMKKEADALAIRLANRGFKAIALHGDMEQRDRREAIKAFRENKIEILVATDVASRGLDISDVSHVFNYHIPLNPESYVHRIGRTGRAGKKGVAVTLATPLEYKDLSKIKQITKAKLKLCEIKQEYSDDAFSQELSHTKISDKSVAIYEKLKDKIDTTQLCLKLISLHLEKNSSLKIGLSKEQIAKLEENYESEQPKKSNKKFVGNTRSATKGNLRGGKGSKNNKRYDNIDRSQPYTNSIWG

SEQ ID NO: 24852 - protein, 375 aa, Hordeum vulgare
EFPPSLPSVVQPGSSIPPAMALLTDLLNLDLSGSTEKIIAEYIWIGGSGMDLRSKARHLPGPVTHPSKLPKWNYDGSSTGQAPGEDSEVILYPQAILKDPFREGNNILVMCDCYTPRGEPIPTNKRYNAAKILSNPDVAKEEPWYGIEQEYTLLQKDINWPLGWPVGGFPGPQGPYYCGIGADKSFGRDIVDSHYKACLFGGVNISGINGEVMPGQWEFQVGPTVGISAGDQVWVARYILERITEIAGVVVTFDPKPIPGDWNGAGAHTNYSTESMRNDGGFKVIVDAVEKLKLKHKEHIAAYGEGNERRLTGKHETADINTSSWGVANRGASVRVGRETEQNGKGYFEDRRPASNMDPYVVTSMIAQTTILWKP

SEQ ID NO: 24853 - protein, 590 aa, Pseudomonas syringae pv. tagetis
MCGLAGELRFDHQPADLAAVERITHELAPRGPDAWGFHSQGPVALGHRRLKIMDLSDGSAQPMIDSHLGLSMAFNGAIYNFPELRAELESLGYQFHSGGDTEVLLKGYHAWGADMLPKLNGMFAFAIWERDSKQLFIARDRLGVKPLYLSKTDKRLRFASSLPALLKGGDISGMLDPVALNHYLNFHAVVPAPRTLLAGVEKLPPASWMRIDASGKVEQKVWWTLPYGPHDDEKNLTLEDWRDRVLDSTREAVAIRQRAAVDVGVLLSGGVDSSMLVGLLREVGVEDLSTFSIGFQDAGGERGDEFQYSDLIAKHYGTRHHQLRIQESEIIEQLPAAFRAMSEPMVSHDCIAFYLLSREVSKHCKVVQSGQGADELFAGYHWYPQVDGASDPVAAYRDAFVDRSYAEYAETVQPKWRTPNDAAGDFVRDHFAQPGASAAVDKALRLDSTVMLVDDPVKRVDNMTMAWGLEARTPFLDYRLVELSARIPGKFKLPDGGKQVLKEAARLVIPSEVIDRKKGYFPVPGLKHLQGDTLNWVRELLTDSSQDRGLFNPAMVDKLLTNPEGQLTPLRGSKLWQLAALNLWLSEQGL

SEQ ID NO: 24854 - protein, 330 aa, Gossypium hirsutum
MFMLGNTKMGSASSFSKFCLTLLLLVDVLGSTNAQLSTNFYSKSCPNLLSTVKSTVTSAINKEARMGASLLRLFFHDCFVNGCDGSVLLDDTSSFTGEKNANPNRNSSRGFDVVDNIKSAVENVCPGVVSCADILAIAARDSVEILGGPKWAVKLGRRDARSASQSAANNGIPPPTSNLNRLTSRFNALGLSTRDLVALSGAHTIGQARCTSFRARIYNESNIDASFAQTRQRNCPRTTGSGDNNLAPLDIQTPTSFDNNYFKNLISQRGLLHSDQQLFNGGSTDSIVRGYGNSPSSFNSDFVAAMIKMGDISPLTGSRGEIRKNCRRVN

SEQ ID NO: 24855 - protein, 281 aa, Griffithsia japonica
ARGLSSTPLSTASKCRSLRSHRISTPIASAAPSAPSQVASDSLVELLVPEADRPAKLAEAATLPSVTVTDLDMEWIHVLSEGWASPLKGFMREAEYLQTIHFNALRLPDGSVTNMSIPIVLAIDDDQKAALDGKPAFALKSPAGDIVAIMRNFEIFVHNKEERVARTFGLTDERHPYTATIYASGDHLVGGDLEVLQEFTYGDGLDEFRLSPRQMRAEYERLGADAVFVFQLRNPIHNGHAPAHDVVPRAAYRTRLQKPRARRPPNRAARSRGDDIPLEIR

SEQ ID NO: 24856 - protein, 190 aa, Griffithsia japonica
ARGTGGVYATAERCAVTTTLAGATGGVVTLIVIKIRDHIFDLLACLNGILAGLVAITACCAFVDPWAAVVIGAIGAVVYIGAAMLLLKFQIDDPLEAFPIHGASGAWGCLAGTLFNKQGHQVTAGFTDQIWGLFYGGGGRLLGVNALGMVVITVWTVGLVTPLFLVMKFTGILRISPEEEIIGNDVSKHG

SEQ ID NO: 24857 - protein, 1017 aa, Oryza sativa Japonica Group
MKNLFKSKIKWQHRSNDPASSQGQGQGLPQRRRRRHRRRAPRRGGRLRYPCRRYRRRPLPPPRRRRGLAAAGPGGGGGGTGGEDYMLSEEEFQMQLAMALSASNSECVGDLDGEQIRKAKLISLGRGNRFAAVRDDEQTADALSRRYRDYNFLDYHEKVIDGFYDIFGPSMESSKQGKMPSLADLQTGIGDLGFEVIVINRAIDTTLQEMEQVAQCILLDFPVANIAALVQRIAELVTDHMGGPVKDANDMLTRWLEKSTELRTSLHTSLLPIGCIKIGLSRHRALLFKILADSVGIPCKLVKGSNYTGDDDDAINIIKMNEREFLVDLMAAPGTLIPSDVLSWKGNSLNSNARLTQNPLAGSSSTTDSNLSANALPPGHKGGQLPLFSSGDWILASQSGYEKDGATTSSQASSSGTTSVAAGSAFDSSWTLVSHGQSDDPSTSAGMSAQQKVILPGGEHPWNENINARNENIKLVSDLQGNSESINLFADLNPFGGREPKRTSVPLNGPDNRNNELQRRRENVVPSTRRPQQRLVMKNWSPYNDVSNNKQYNYVEDSFARRNIGDNAASSSQVARPSAKNTNLNVGVRTDTPYMAAHNYDNSMAGSSAMKMTSTAGIGKVPDKVLYGDLDKGLTNSRLGDQPPIERHKWGNSVEGRIPTGTVHNQAKEHKENFDGKQDNKKLHPDPKKSPLDRFMDTSMPSRNPESVSPSFARSHKLDTMFDDVSECEIHWEDLVIGERIGLGSYGEVYRADWNGTEVAVKKFLDQDFYGDALDEFRSEVRIMRRLRHPNIVLFMGAVTRPPNLSIVSEYLPRGSLYKILHRPNCQIDEKRRIKMALDVAKGMNCLHISVPTIVHRDLKSPNLLVDNNWNVKVCDFGLSRLKHSTFLSSKSTAGTPEWMAPEVLRNEQSNEKCDVYSFGVILWELATLRMPWSGMNPMQVVGAVGFQDKRLDIPKEIDPLVARIIWECWQKDPNLRPSFAQLTSALKTVQRLVTPSHQESQSPPVPQEIWVNSSTP

SEQ ID NO: 24858 - protein, 592 aa, Medicago sativa
MNHLPRIFGYRNKSTTEMNSKKKKQPKLQRRNAVKNFNYDAQPSSSSPESSESASSSASILCTRSMDFHDRKSFRVEGVDGEFDIICRSLGLNGPEDFSIPAAAWEAMKFRSSSDVLPRLNVSEFDETKTSGEIDQVGVVDCDDRVLVRDSPAESSGGEVNVSIRDSPAKSSGCCTGGEIRVPVRGFDETSNCSTGSGGIKGIRPPMLKPPPGVRVSVVDDTCSTWDILRDFAPEGEGKEREEQEEEEEKVDEVEEKEEVGELELKVEEEENGDIIGEFSRSCSFTTSQEDDSSSTTTDTRSNSISPNVRLKPVITPGSWQKGELLGRGSFGTVYEGISEDGFFFAVKQVSLLDQGSQGKQSVVQLEHEIALLSQFEHENIVRYIGTEMDESNLYIFIEFVTKGSLLSLYRRYKLRDSQVSAYTRQILHGLKYLHDRNIVHRDIKCANILVDANGSVKVADFGLAKAIKLNDVKSCQGTAFWMAPEVVRGKVKGYGLPADIWSLGCTVLEMLTGKIPYSPMECISAMFRIGKGELPPVPDTLSRDARDFILQCLKVNPDDRPTAAQLLDHKFVQRSFSQSSGSASPHIPRRG

SEQ ID NO: 24859 - protein, 133 aa, Kandelia candel
DPLDGFFSSAVANVPFNSANEAAAFANARFDWKETPEAHVFKADLPGLKKEEVKVEVEEGRILQISGERRKEQEEKNDKWHRLERSSGKFLRRFRLPENAKMYQVKASMENGVLTITVPKEEEKKPEVEAIEI

SEQ ID NO: 24860 - protein, 272 aa, Griffithsia japonica
RFVQACTRRLMSDVPVGVFISGGLDSSLVASIAKKHLPDGYVFHSFSCGLEGSPDVRAAQKVADYLGTKHHVLTFTVEDGISALRDVIYHLETYDVTTIRASTPMYLLSRLCKQYVKVVLSGEGADEVYGGYLYFHNAETERDFHEETVRRVKLLYTSDVLRGDRSTAAQSLELRVPFLDRDFLDVSMSFSAQDKVTQKGKRIEKWPMRQAFAKEFCGEEFLPDDILWRSKEQFSDGVGYNWIDGLKEFCDKEVSDKLLANASDKFPHQPPK

SEQ ID NO: 24861 - protein, 355 aa, Triticum aestivum
  misc_feature (106)..(106): Xaa can be any naturally occurring amino acid
  unsure (1)..(355): unsure at all Xaa locations
MCGGAILSDIIPPPRRATGGNVWRADKKRRARPDAAAGRPRRAPEEEFQEEEGDAEFEADFEGFVEAEEESDGEAKPFPVRRSGFSGDGLKATAAGDDDCASGSAXRKRKNQFRGIRRRPWGKWAAEIRDPRKGVRVWLGTYNSAEEAARAYDVEARRIRGKKAEVNFPEEAPMAPQQRCATAVKVPEFNTEQKPVLNTMGNADVYSCSAVDYTLNQQFVQPQNMSFVPTVNAVEAPFMNFSSDQGSNSFSCSDFSWENDIKTPDITSVLASIPTSTEVNESAFLQNNGINSTVPPVMGDANVDLADLEPYMKFLMDDGSDESIDSILSCDVPQDVVGNMGLWTFDDMPLSAGFY

SEQ ID NO: 24862 - protein, 158 aa, Staphylococcus epidermidis
ATQLQKTDYVSPIVLGNEDNIKSLASKHALDLTQIEIIDPATSELKDELVDAFVERRKGKATKEQAVELLDNVNYFGTMLVYTGKAEGLVSGAAHSTGDTVRPALQIIKTKPGVSRTSGIFFMIKGDEQYIFGDCAINPELDAQGLAEIAVESAKSAQ

SEQ ID NO: 24863 - protein, 158 aa, Staphylococcus epidermidis
ATQLQKTDYVSPIVLGNEDNIKSLASKHALDLTQIEIIDPATSELKDELVDAFVERRKGKATKEQAIELLDNVNYFGTMLVYTGKAEGLVSGAAHSTGDTVRPALQIIKTKPGVSRTSGIFFMIKGDEQYIFGDCAINPELDAQGLAEIAVESAKSAQ

SEQ ID NO: 24864 - protein, 158 aa, Staphylococcus warneri
ATQLQATDYVTPIVLGNKDKIQSLANDKGLDLANIEVIDPSTSELKSELVDAFVERRNGKATKEQAEELLDNVNYFGTMLVYTGKAAGLVSGAAHSTGDTVRPALQVIKTKPGVSKTSGIFFMMKGEEQYIFGDCAINPELDAQGLAEIAVESAKSAQ

SEQ ID NO: 24865 - protein, 158 aa, Staphylococcus epidermidis
ATQLQKMYYVSPIVLGNEDNIKSLASKHALDLTQIEIIDPATSELKDELVDAFVERRKGKATKEQAVELLDNVNYFGTMLVYTGKAEGLVSGAAHSTGDTVRPALQIIKTKPGVSRTSGIFFMIKGDEQYIFGDCAINPELDAQGLAEIAVESAKSAQ

SEQ ID NO: 24866 - protein, 184 aa, Arabidopsis thaliana
MQSSNVTDCTMRKRGTKRKIEIEKRMTKQQRSVACSKRRPTLFSKAADLCLLSGANIAVFVTSPDENSDVVYSFSGYSHASEIVDCYLNNKSPPKTTINPESAKFWWEEPDLYRDCDDLSELRIIEDRLMRTKKHLMDYLEKKEKSHSVSKSDQNPNNDSGSSSSSSQIASDFASHHLINLVTW

SEQ ID NO: 24867 - protein, 105 aa, Candidatus Portiera aleyrodidarum
MYAVIKCGNKQFNVKEGQKIKIDKVKLEIGDVIEITKVLLINKKNKIIKIGRPFVKTATVSAEIIAHKREKKIKIIHFKRRKHYMRHKGHRQWFSEIKIINIKGY

SEQ ID NO: 24868 - protein, 327 aa, Candidatus Portiera aleyrodidarum
MQFIDETYIFIEAGTGGTGCLSFSSLLRGSDGGNGGTGGNIFCIGDKYLNTLFFLNYNKVYKAQNGENGKPKKQNGNNGKDVFIKVPVGSMLRDAQTCELIGEIIIHRQNIKVAKGGTSGIGNLKTKRSKNMKGTIGESRNLYIELILLADVGCLGIPNSGKSTFIRSITSALPKVARYPFTTLRPFLGFVKLNKTYSFIITDVPGLIIGASQGLGLGLKFIKHLNRIKIICNLLDVMCNKVLDTTLGIISEIKTIYIDMFQKQRYLVLNKLDKLPKYKKSQVIEIVINGLTWRNKTTLFIISAKKKYGCYELKKSALTYLKRGING

SEQ ID NO: 24869 - protein, 514 aa, Capsella rubella
MDNSRTRQNMNGSAAATNWSQQNGRTSTSSLEDLEIPKFRSFAPSSISISPSLVSPSTCFSPSVFLDSPAFVSSSAHVLASPTTGALITNESNTKLINEGEKKDNNINFFDFSFQTQSSGVSAPTTTTTTTNNSSIFQSQEQQRKNQSDQWSQNESRQNNQAVSYNGREQRKGEDGYNWRKYGQKQVKGSENPRSYYKCTFPSCPTKKKVERSLEGQITEIVYKGSHNHPKPQSTRRSSSSSSSTFHSAVYNASLDHHRQASSDQPNSNNSFHHSDSFAMQQDDNTTSDSVGDDEFEQGSSIVSRDEEDCGSEPEAKRWKGENETNGGNGGGSKTGREPRIVVQTTSDIDILDDGYRWRKYGQKVVKGNPNPRSYYKCTTIGCPVRKHVERASHDMRAVITTYEGKHNHDVPAARGSGYATNRAPQDASSVPIRPAAIAGHSNSTTSSPAPYTLQTLHNNNTNSTARSWLRYDNNNNNNNNNPQTLQNCVCGDAFSRATEEPNEETSFFDSFMP

SEQ ID NO: 24870 - protein, 490 aa, Salmonella enterica subsp. enterica serovar Enteritidis
MVPVVALVGRPNVGKSTLFNRLTRTRDALVADFPGLTRDRKYGRAEVEGREFICIDTGGIDGTEDGVETRMAEQSLLAIEEADVVLFMVDARAGLMPADEAIAKHLRSREKPTFLVANKTDGLDPDQAVVDFYSLGLGEIYPIAASHGRGVLSLLEHVLLPWMDDVAPQEEVDEDAEYWAQFEVEQNGEEAPEDDFDPQSLPIKLAIVGRPNVGKSTLTNRILGEERVVVYDMPGTTRDSIYIPMERDEREYVLIDTAGVRKRGKITDAVEKFSVIKTLQAIEDANVVLLVIDAREGISDQDLSLLGFILNSGRSLVIVVNKWDGLSQEVKEQVKETLDFRLGFIDFARVHFISALHGSGVGNLFESVREAYDSSTRRVSTAMLTRIMTMAVEDHQPPLVRGRRVKLKYAHAGGYNPPTVVIHGNQVKDLPDSYKRYLMDYFRKSLEVMGTPIRIQFKEGENPYANKRNTLTPTQMRKRKRLMKHIKKSK

SEQ ID NO: 24871 - protein, 323 aa, Ruegeria sp. PR1b
MPTSSMTDAATLGEMSRVLTTEASALQQMAEALGVPHLEAVRILEAMQGRVIVSGVGKSGHIGNKIAATLASTGTPAQFVHATEASHGDLGMVTARDVCLVISNSGETRELADIITYSRRFGIPLIAITRVAESTLAQQADVTLLLPDAPEACGIGVAPTTSTTATLAIGDALAVALMARRGFQREDFQVFHPGGKLGAQLMLVDALMHAGEALPLVLPDTPMAEALLTMTAKGFGVAGLIEEDRLAGIITDGDLRRNMTGLMEKTAGAVATRDPQVIRSGALASEALHEMNSRKISSLFVLDQDDHVVGLLHIHDCLRAGIA

SEQ ID NO: 24872 - protein, 564 aa, Streptomyces sp. AM-7161
MAATPENPTPAAARRKVGRHRGEGQWAVGHFTPLNGNEQFKKDDDGLNVRTRIETVYSKRGFDSIDPNDLRGRMRWWGLYTQRKQGLDGTKTGVLEPEELDDEYFMLRVRIDGGRLTTEQLRVIGEISEEFARGTADITDRQNVQYHWIRIEDVPEIWNRLEAVGLSTTEACGDTPRVILGSPVAGIAADEIIDGTPAIEEIYRRIVGNKDFSNLPRKFKSAVSGSPLLDVAHEINDIAFVGVEHPEHGPGFDVWVGGGLSTNPKLGVRLGTWVSLDEVPDVYEGVISIFRDYGYRRLRNRARLKFLVADWGPEKFRQVLEDEYLNRKLTDGPAPEQPAGRWRDHVGVHRQKDGRFYVGFAPRVGRVDGATLTKIAGIAEEHGSGRVRTTAEQKMLVLDIEEAQVESIVAALEALDCGSPPAFRRGTMACTGIEFCKLAIVETKGRGSSLIDELERRIPEFDEPLTININGCPNACARIQVADIGLKGQLVLDDDGNRVEGYQVHLGGALGLEAGFGRKVRGLKVTAAELPDYVERVLKRFQAERETGERFATWTARASEESLS

SEQ ID NO: 24873 - protein, 317 aa, Bradyrhizobium japonicum
MSAKNGSIKLVAGNSNPALAQAIAQGLHLPLTKAVVRRFADMEIFVEIQENVRGSDAFIIQSTSFPANDHLMELLIITDALRRSSARRITAVLPYFGYARQDRKSGSRTPISAKLVANLITQAGVDRVMTLDLHAGQIQGFFDIPTDNLYAAPLMVRDIKDKFDLSKTMVISPDVGGVARARGLAKRINTPLAIVDKRRERPGESEVMNVIGDVAGYTCILVDDIVDSGGTLVNAADALIAKGAKDVYAYITHGVLSGGAAARITNSKLKELVITDSILPTDAVSKAPNIRTLPIASLISDAIARTAAEESVSSLFD

SEQ ID NO: 24874 - protein, 328 aa, Pseudomonas putida
MELLIQPNNRIIPFSAGANLLEVLRENGVAISYSCLSGRCGTCRCRVIDGSVIDSGAENGQSNLTDKQYVLACQSVLTGNCAIEVPEADEIVTHPARIIKGTVVAVESPTHDIRRLRVRLSKPFEFSPGQYATLQFSPEHARPYSMAGLPDDQEMEFHIRKVPGGRVTEYVFEHVREGTSIKLSGPLGTAYLRQKHTGPMLCVGGGTGLAPVLSIVRGALKSGMTNPILLYFGVRSQQDLYDAERLHKLAADHPQLTVHTVIATGPINEGQRAGLITDVIEKDILSLAGWRAYLCGAPAMVEALCTVTKHLGISPEHIYADAFYPGGI

SEQ ID NO: 24875 - protein, 298 aa, Escherichia coli
MKDKVFVPPIKSQGIKTKLVPCIKRIVPKNFNGVWVEPFMGTGVVAFNVAPKDALLCDTNPHLISFYNALKNKDITGDLVKDFLYREGEKLLLSNGEYYYEVRERFNNYKEPLDFLFLNRSCFNGMIRFNSKGGFNVPFCKKPNRFAQAYITKISNQVDRISEIISKGNYTFLCQSFEKTIGMVNRDDVVYCDPPYIGRHVDYFNSWGERDERLLFETLSSLNATFITSTWHHNDYRENKYVRDLWSSFRILTKEHFYHVGASEKNRSPMVEALITNIAKDIIDHIEKSSGDILVIEE

SEQ ID NO: 24876 - protein, 553 aa, Rhodopirellula baltica SH 1
MLTVSALFSTDSFLMLFRVPGFCLESQSVPLISTESESNSRSESAGTRQTASSRTTSGSAWKKAIRTTNKLMLLGCVALAAVFTGCADSGVSLEDLEAAAAKVDISKIEVDVNPTESAAMLDLEKSDLTFGFIKLTDCAPLVIAKEKGYFDDEGLNVTLETQSNWKILLDNVINGQLDGAHMLAGQPIGATIGVGTKSPIVTAYSLDYNGNGITVSNEVWAQMQENDPELKSPTPKHPISAASLKPIVEDYLQDAGEPFPMGMVFPVSTHNYEIRYWLAASGIHPGMYTESDIKGFTDAQVKLSTVPPPQMPQNLEADIVKGYCVGEPWNQKAVVTGIGVPVTTNYDIWKNNPEKVFGVTGEWAEKNPQTHLAVIKALIRAGKWLDATDDSGKLVNREEAVEILSRKDYVGAEKEVIGNSMMGTFVFQSTDVREMPDFNVFFKHEASYPHYSDAIWFLTQMRRWGQITESKPASWYAETAKKIYKPEIYRQAAELLISEGKLDPNEIPAPDYDGYRAVTTEFIDGNKYDAKDPIGYINSFEIGNKDDESLAKK

SEQ ID NO: 24877 - protein, 613 aa, Rhodopirellula baltica SH 1
MTDQQDSKPFSDEQQQYLAGFTFGADVARAVQGLPVISGSGGQGTTLAIGGGSTTVDGESVPTGPDRFAFEAQSAVLAAGKKLSKEEQAKRDKNPLDMWDEMQARSDAGEFPKGTDVFLQKFHGLFYVTPAQDSFMCRLRLPGGQIQAWQLRGLADLADQSAGPYLDLTTRGNVQLREIPADQAMNILFGTRELNIVPLGSGGDNIRNCTSSAMSGLDADELIETLPLAIRMHHYILNHREMYGLPRKFNIAFEGGGRIASLEDTNDIGFKAVRVLDENASDDLPAGVYFQLCLGGITGHKDFARYTGVLLRESECVAVAAAIVRVFIRTGDRTDRKKARLKYVLDDMGFEKFIAEVEAEMGRTLTKVDVSRLTVQDIEDRSAHVGVFPQKQPGLNSLGIVFPVGRMTTDQARALADLALRYSNGDIRLTVWQNLILTNITDADLPAVQAGIRECGLDYEANSVRAGLVACTGSAGCKFAGAPTKANAIEIAERVESVLTLDQPINIHLTGCHHSCAQHYIGDIGLIACQVEVGDDMVDGYHICLGGGWGSRQGIAREIFKSVPFAEVPDLVTGILSSYQQNRVDSNESFNDFAGRLSDEELKSLVATPSVVC

SEQ ID NO: 24878 - protein, 442 aa, Rhodopirellula baltica SH 1
MNTDSRPNNPSEPAKLRRDVGLFGAMMMGLGSIVGTGVFVSIGIAAGITGPSVVLAILVAGLVATFNGLSSAQLAAAHPVSGGTYEYGYRWLTPSMGFTAGWMFLCAKSASAATAALGFAGYALQLFQFDHDDWIVPLAIGAVVATTLLLLGGIRRSNWTNIAIVSMTLIALASFVIAGLPFAWREGSSNLTPFFASDSPAIATRQFLEACALMFVAYTGYGRIATLGEEVHNPRRTIPRAIIVILLVSSLLYAIVGGIAVAAAGIDVWSSTSQQTAPLQLVANHLNSPLVAKLVAIGAVTAMLGVLLNLILGLSRVVFAMGRRGDLPRGLATVSTQNSNPSGAVIAVGIGVGTLALIGDVETTWSFSAFTVLVYYALTNLAATRLTADERLFSPIVPWLGLASCLGLAFWVQPKIWIIGLSLIAVGLVFQQCMKRSDTSAS

SEQ ID NO: 24879 - protein, 361 aa, Rhodopirellula baltica SH 1
MIVGVPSEIKTDEYRVGMLPVGVAELTQAGHTVLVQAGAGLGSGLPDHDYLRAGAELVASADDIFAKADLVVKVKEPQRSEYDLIRPGQLVFTYFHFAADDTLTKAMLDSGATCLAYETLRDASGQLPLLTPMSEVAGRMSIQEGAKYLERPQMGRGILLGGVPGVAPAHITILGGGVVGANAAKIAAGFQADVAILDVNLDRLRYLDDVMPANVNTLYSDRHNIVEQLERADLVIGSVLIPGARAPNLVRAEDLRIMKSGAVVIDVAVDQGGCIETSRPTTHSEPTYIIDEVVHYCVANMPGAVGRTSTFALCNATMRWISKIAAAGMSGVLQDTGPLQSAINIHEGKIVHEAVSSAYQG

SEQ ID NO: 24880 - protein, 601 aa, Rhodopirellula baltica SH 1
MARANRGEHSTLSTFWQSRHNAASFDPLYRRIDVNAPEPSDSATPEKTPSKHFIRQAIDADLASGRFDGVATRFPPEPNGYLHIGHAKSICLNFGLAKDMGGTCNLRFDDTNPIKEDTEYVDSIQEDVRWLGFEWDNLHFASDYFDQLYDWAEQLVKDGKAYVCDLTAEETREYRGTLTEPGKNSPHRDRTPEKNLELLRAMKAGKFKDGEKTLRAKIDMASPNINLRDPVMYRIAHVPHHRTGDKWCIYPMYDWAHGQSDSLEKITFSICTLEFEHHRPLYNWYCENLGIHHPRQIEFARLNMTFTVMSKRKLLQLVKENHVTGWDDPRMPTLVGLRRRGYTPESIRSFCADIGVAKFNSTIDVIRLENSVREHLNSVAPRRMAVLDPIKLTITNWPEGKVEMMNAINNPEDESAGSREIPFSGELYIETEDFREEAPRKFFRLKKGGSVRLRSGYIVDCHDVVKDADGNVTEVLCTYDPETKSGEDTSGRKVKGTIHWVSREHAQKVTVRNYDRLFKVENPDASSDTGSFLDHLNPDSLTTLTAHVEPALAEAAVGDRVQFERLGYYVVDPDSTDGEIIFNRIVPLRDTWGKIEAKGKK

SEQ ID NO: 24881 - protein, 419 aa, Rhodopirellula baltica SH 1
MLSLPLMIAASASTVVILGVVMFTVVVIALVLLILAAKSQLVASGPVKIMINGQKEISVPAGGKLLGALADAGIFVSSACGGGGTCAQCKVKVSEGGGDLLATEAGHINKKEAAEGERLSCQVAVKTDMVVEVPPEAFDTQKWECTVKSNDNVATFIKEFVLQLPEGAEVDFRAGGYIQIECPPHEIHYKDFDIAEEYHPDWDQYNIWRYVSKVEEPVVRAYSMANYPGEKGIIMLNIRVASPPPRAPEGTPPGKMSSYIFSLKPGDKATISGPYGEFFIKDSDAEMVYIGGGAGMAPLRSHIFELFKRQKTDRKVSYWYGGRSLRELFYIEHFREIEKDFPNFKFNIALSEPQPEDNWDGYVGFIHQVLLDNYLSKHPAPEDIEYYICGPPMMNAAVFRMLDDLGVEPENIAYDDFGG

SEQ ID NO: 24882 - protein, 438 aa, Rhodopirellula baltica SH 1
MSPSLFFAAIFCGSCFLLFVGSADAIEEWEWKRLTRKRLPKLRSGKAIDAVSAKLADQSASAAKPDVTNHPSRWKGWRSASVQSVKDESLDCRSFVFVPTDGEPFPPFLGGQYLTVRLKDPSSGKNVSRCYSLSSGPDEPHYRITVKRVPGGTMSNLLHDTIDVGDRIEIQAPKGRFHYSVEESQSANLEPLNLVAAGIGITPMLSMLFQSLNERTDRDVNLFYQVRNAVDAPFLAPIREIAKMLEATTGVRVHLWFSKPEDDDLRPGDSVGRLSAERIVERLGHHRGEYLICGPDVFMNAIAEGLIECGASADRVMFESFGGKSKSAGALAVPACDPCSDASDVDESNSDDSVGWNVTFQTSGKSASFEAGMDGLLDVAESLDVDVDSGCRSGDCGACVRRLLSGEVRYAETPECDVEDGEAVLCVAKPVSEVVVDA

SEQ ID NO: 24883 - protein, 411 aa, Rhodopirellula baltica SH 1
MLILVANLGSTSFKYKLLDMSGDFESANASPDSRVLARGAVDRIGEPISQCEVIVTQSHQGETFREETQMPVPDHGVAVQACLDQLTHPENGCLTEANEVAAIGFKAVHGGRKSGTFVVDDEVLEAMDEMSAAAPAHNPPYIAAMKLLRQRFPELPLVAAFETEFHDTISPERRTYAIPAEWTREMQIQKWGFHGSSHRFIAERAAEVLGRDDAKIISCHLGGSSSLTAIDSGKSIMTTMGMTPQTGVPQNNRVGDFDAFAIPLIMERTSQSLEEVLKTLASQGGLKGLSGGMADLRDIESAASEGNADAKLALGVYTEEIRRHLGGMMVALGRLDAIVFTGGIGENSDVVRAAVCAGLEGFGIELDASKNDGMRGEGSLHTESSKTQILVLPTNEEWIVAKRSLRALAAQ

SEQ ID NO: 24884 - protein, 415 aa, Rhodopirellula baltica SH 1
MVLSTLHPMFFDRVEIEFQAGKGGDGCMSFRKEKYVPKGGPDGGDGGRGASIVLEARLGVNSLAQFATRKFFRAEKGGFGMGALRHGRKGREMRLFVPCGTSIIDAKDGFVIKDLTQVGEEFVICRGGKGGHGNARFKTPQNQAPRERELGQPGETRHVIMELKSIADVGLIGKPNAGKSTLLSRISSARPEIADYPFTTKYPNLGIVDVDIERSFILADIPGLIEGASEGIGLGHEFLRHVERAGLLVHLIEPTPVDGSDPIQNYVAIREELQHYDESLADRDELVVMTKCELDPDGEVREQLQAYFDEHPANHARDLRSISAATDVGLKELVGEIMTRVAKRREEMIEAGITPTLIRQDDAPVTPKKERRLPPHKAAATGGLSDEVQAQDIQGAATLSDTGKVVPGERRDRSS

SEQ ID NO: 24885 - protein, 498 aa, Rhodopirellula baltica SH 1
MLAAKARIAAANLNCDCQSLPSPKKSPHPRMKVGSSKMPSKPKQPKADGMHILFADDEPQLQKLMGTELPRMGYRVTVCPDGPTAVDVLSKEPIDCLLVDLDMPGMSGIEVIARAREIRPEIEAVIMTGNPSQETAIEALRHGTFDYLMKPCRLAEISALMGRVSERREWNRLVAALRHRLQRAEGDSDLIGENQSMHAVRKLIAKVAPTESTVLIRGETGCGKELVARAIADESLRSEQPFVAINCGALPETLIESELFGHVKGAFTGADSGRMGLFEVASGGTLFLDEVGELPLAVQAKLLRVLETGDIRRLGDNQSIKVDVRVVCATHRDLEKMVTEGTFREDLMFRINTFELRLPALRDRIDDLPALAEHLLRRHRADGTSGQLFTEAAMAELQSHQWPGNVRELANVIEHASVLCDALPIDVEHLPQHFARRQLRADLADTAPMTMREIELRAIERAMTRHNGNKKAVAEELGMSLKTLYNKLNAASEASEAA

SEQ ID NO: 24886 - protein, 672 aa, Rhodopirellula baltica SH 1
MKKDSESNSSDKSNKEELSTGRRGGNPMIIALVITVLAAMLFFNQPEPSSLISASFFRSQLEKNNIESVEIGDIEVSGTFKTRPQMPASESADGDAKPKELLKRFRFTRPAGADYAVQLSEDLEKRNIKDWKFSPPDNTAAILNLLILVGLPLAIFFFIFMMIRRTRNDMMGGGFLSGFSKSPAKRFEATDKVITFNDVAGLEGVKADLQEIVDFLKTPEKFQKLGGQVPKGVLLNGPPGTGKTLLARAVAGEADVPFFSVNGSEFIQMFVGVGASRVRDLFKTAKEQSPSIIFIDEIDAVGRQRGAGLGGGHDEREQTLNQILGEMDGFGGAQAVIVIAATNRPDVLDPALLRPGRFDRHVTVGRPTMKGREEIFKVHVRDVPLGDDVDLHRLAAGTVGLTGADIRNMVNEAALWAARGDKKIVEMSDFDYARDKILMGAKREEVLLESEKEKTAYHEAGHTLTAWHLEGSHIVHKVTIIPRGRALGVTQYVPNEDRLSMSKRELEHQLIVLLGGRAAEKIIYTETCVGAENDLERATSIARRMVTHWGMSPKIGPVSYKTSDEDPFLGREIHQQRQFSEHTQELIDEEVARILMEADQKAEQLLREHRGQLETITRELLDREELNEAELTELIGPSIHKRLGDEEGKVEQIMAPEGAAERTSNASARRED

SEQ ID NO: 24887 - protein, 303 aa, Rhodopirellula baltica SH 1
MADDKSLPKIGWVGTGVMGASMCGHLLDAGYEVTLTTRTLAKAESLLTRGATWVKTPRAVAESSDLIFTIVGYPHDVREVILDPGTGVLAGCKPGDVIVDMTTSQPSLAVEIAEAAARREVDSLDAPVSGGDTGAKGGTLSIMVGGSGRALTKVQPCLESMGKTIVHQGGPGAGQHTKMVNQILIATNMIGVCEALVYGHKAGLDLPTVLQSVGSGAAGSWSLNNLGPRIIDNQFDPGFYVEHFIKDMGIALAECRAMSLSMPGLALAEQLYQAVAAQGHGRDGTHALALAIANLSGIDWLKR

SEQ ID NO: 24888 - protein, 544 aa, Rhodopirellula baltica SH 1
MMIAEMQNGVPQFIIILVYLSLLLALGLFSSRLFKGTKEDYQVASHSIGPFLLLMSMFGTTMTAFALVGSSGEAFREGIGVYGMLASSSGIIHSLCFFLIGVKVWRFARAHNYTTQIEFFRDRLNNNLVGWLLFPILVGMIIPYLLVGVISAGGVVQALTAGLAPEMFPVPLEGGPGGVDPAVHGGIPAWLGSLTICTVVLVYVFFGGMRGTTWANTFQTLVFMILGVVTFFVIANKLGKQDSFFENLRVLGESIPEEGKTRAEMSKTKFFTYLMIPLSVGMFPHLFQHWMTAKKASTFKLSVVCHPLFIMIVWVPCVLVGVWATGELMPAKPPLPRLPGGDIVDANKVLPFLVKTQTAPILGGFLAAGILAAIMSSLDSQFLCIGTMFNNDVVNHTFGKDRFSDKQQVLFTRLFIVAIVAITYLLSLGNVRSVFALGVWCFSGFSALFPLVVAALYWRGLTAMGAIAGILAAISSWSYLFYQGTLDPQGLSKYVLRLSIGEESYEVMPVVAMVFSTLIAMVVVSLVTPKPPQETLAKFFPDQA

SEQ ID NO: 24889 - protein, 514 aa, Rhodopirellula baltica SH 1
MAAGTALQAPHNETGAQSAPRSKWSKSMPNLLVIDDDRTILALAEKALAPIADVSVAANAADGLGLLREGEFDAVLLDIQLPDQNGLAVYCEIREHDRRIPVIFMTVEAASNTAIEAMQLGAFDYIAKPLNVESLRDLVEKAIEQRQISSVPVAISADDEGGDQSAELFIGRSPVMLDVFKAVGKVAKQDVPILVRGESGTGKELVARALFQYSHRSDETFLAVNCAALPDNLLESELFGHEKGAFTGAESRRIGKFEQCNGGTLFLDEIGDMAPTVQAKVLRVLQEQRFERVGGNKELTTNVRIIAATNRPLEQMVVDGDYREDLLYRLNGVTIELPPLRDRLSDVPALIRFFLAQAKIEFNKPDLEGLSPEAVDLLTVYDWPGNVRQLRAVIRRCVLDTVMPVITPDTLPDAIAGTRNSGAKSESGTNEKLESEAPGSQLPQLVQRLLKEKSTNVYGEAMEYMERFVILQVLQSTDGNQSQAAEILGITRGKLRDRINSYNIVLKSDVAVES

SEQ ID NO: 24890 - protein, 634 aa, Rhodopirellula baltica SH 1
MCGFTGGLWQRDDQAINADLLSRMTNEIAHRGPDDSQIWMDPEHRDATGRPMGVGLGFRRLSIIDVEGARQPLSNEDGRVRMVFNGEIYNYEVLRKRLQGAGHQFATQGDGESIVHLYEDIGTDCFSSLNGMFAIAIWDARRNRIVLARDRIGQKPLYYSYKNGRLVFASELKALRLVPGVCEEVDPNAIDEFLTYQYIPHPGTIFKGVHKLPPGHFAVLDERGLRVERYWNFDPSIERPLGREEAIEKVRDLLADSVRLRMRSDVPLGSFLSGGIDSSLITALAGDHTDTPLRTFSIGFPVADFDETRYAAQVAEHLQTDHTRFEVQPSGIDILEKLVWHYDEPYGDSSAVPTWYLSKLTRESVKVALSGDGGDELFAGYERYRALWMSQKIARLFPLNKFPGIGLIQRLPDSNRRRSVVRRAKRFLEAIDQPVVRRYMNWLQIFPESMRASMYNDEFVQALPGHDPVDFLESVWARSEGRDVVTRASTSDIQSYLPCDLCTKVDIASMAHGLEVRQPMLDYRFVELAASMPVEHKFRGRRGKLILQDAFGDRIPSSIFTRPKMGFGIPIGQWFREDFKPLVHDTMLASDARINAYFRPEAIADLVRSHETGEQNHGYRLWNLLVLETWLRQL

SEQ ID NO: 24891 - protein, 498 aa, Rhodopirellula baltica SH 1
MSSISAFTTQELSGGPTGFRFAWLTMVLLVGMMGIGGSLASVASAQDEPAAATDTAEVADAGDADSEEPAADAGVGYAFDNGFLFLCAVLVLFMQAGFAMVEVGLNSSKNTVNILSKNLMDLSVGALLFFFVGFGLMYPGSYGDVTNGYFAFGGTGIYDSSPDQTFSPQVDWFFQAVFAATAATIVSGAVAGRMKFNAYLIYSAILTGLIYPISGFWKWGGGWLMQFGEQAADGSFAMGFQDFAGSAVVHAVGGFAGLAGAIFLGPRLGRYTAEGKSVPLPGHNVAFAALGVFILWVGWYGFNPGSQLAFQSSADIDATVFIAVNTTLAAAAGVIVATAVSWGLFGKPDLTMGLNGALGGLVGITACCDAMSNSMSIVVGAVAGALVVLSIVVLDKVKIDDPVGAFPVHGVCGVWGCMALGILPNAHLESESTNFMIQLIGTASICAWAFISMSVVFGVLKAVGMLRVSPQEEQAGLDISEHGMHAYPSDAVAGGSVI

SEQ ID NO: 24892 - protein, 472 aa, Rhodopirellula baltica SH 1
MAGYHRFVVPFTLCSIFVMPVPQVAIVGRPNVGKSSLFNWLARRRLAIVDNFEGVTRDRMTTLIESDDQFFELIDTGGMGVEDADDLTSDVRRQIDMAIASADVILLVVDVQTGLMPLDEEVVERLRGVERPVILVANKADQEHQDIHADEFRRLGRGHLITVSTTQNRHRDDLIQVIVDRLPEKDEDLVAPESSMKIAIVGRRNVGKSTFVNTLAESDRMIVSEVAGTTRDSVDVRFEIDGQTFLAIDTPGLRKRKSIRTDLDFYGTHRAQRSVRRADVVLMFFDALEKTSKVDKQLVGYIMEHHKPVIFVVNKWDKVDKEVPTERWVKYLRHQFTTLSYAPIAFITGQTGRNVKAVMNHAAMLYKQAQSRVSTGELNRILRAAIEQHPPAMYQGRRPKIFYATQVSTEPPTVVVMCSDPKALTHDYQRYLIGWMRDHLPFGEVPIKLYMQQRSRSEAKAERSGQGRSLES

SEQ ID NO: 24893 - protein, 156 aa, Rhodopirellula baltica SH 1
MVDTPYRKMLAAKIHRATVTGADVNYEGSLTVPPELLVAAKIHPYESLHVWNVTRGTRLETYAIEGLPNSNDVCANGAAAHLIRPGDHVILAAYAMVPEADAATHKPRLIFVDDNNQLSHVGPEIAGPNLRSDSDDTHLVRSTEMTPDGQPLAEGC

SEQ ID NO: 24894 - protein, 540 aa, Rhodopirellula baltica SH 1
MHRILVLDDIAQEGIDLLEASEGIEYEVRTKLKGEELRQSLNEFDAAILRSGVTITPESLEGNTRLRALVRAGVGTDNIDKPAATRRGIVVMNTPAGNTVSTAEHTFAMLLAMSRNIAAANQSLVEGRWDRKKFMGTQVAGKTLGIVGMGRIGREVASRAQAFDMDVVAFDPFLTDDQAESLKVRRVATVDDMLPQIDYLTVHTPLTPETRGLIGMEQLEKVKPGLRIINVARGGIYDSEAMVEGLKSGKLGGVALDVYENEPCTDSPLFGMPGVVCTPHLGASTEEAQTQVAVEGIHLLLNYLRTGEIRHSVNVASLDPKTLAELRGHLNVAHRLGLFLSQLHGGGIDHARLTFRGEVSGKDTRVLNNAFCAGLLERVVEDANVINSEMLLRERGIELTCERVGDKGAFTSSITAEVSGNGKTVQAGAAILGHEMPRLILVNGYRLESFLDGKLLVFVHKDVPGIIGRVGTTFGSHGVNIAQMAVGREGDAPGGAAIGVLSLDGEVPTAALDDLLAIDAITECQVIDMPGAGQLPSWLS

SEQ ID NO: 24895 - protein, 406 aa, Rhodopirellula baltica SH 1
MEGVGIRFPESVSAQSVRSTWHTSSGKGAVSVRRSGTLCFADELHRIIFRKREALVAGQRSIMSVSEKAAKGNRVDETSRLGMETMKHSVLVTRQIPGESLKRLREVCEVEVWPEAIPPSREELCRLVKGRHGLLTMLSDRIDGELMDVAGEQLCVVSNYAVGFNNIDVDAAKTRGVVVGNTPDVLTDATADLAVSLLFAASRHVLPAGNQVREGEWKTWEPTGWLGVEPSDKTLGIVGMGRIGKATAKRLVGGWGMNLLYTSRSDQGDVEKELGGRRVELDTLLAESDFVSVHVALTDETRNLIDADAIGKMKSTSVLVNTARGEIVDQDALVDALNRRAIFAAGLDVTTPEPLPADHALVKSPHCVILPHIGSATHTSRNAMSEIAVDNLIAGLAGKPLRCSVT

SEQ ID NO: 24896 - protein, 316 aa, Rhodopirellula baltica SH 1
MRELKIFSGRANHDLAEKLCRHLHLKPARITLGQFPDGENYCKLDEDVRGRDVFLVQPTCPPVNDNLIELLTMIDCCKRASAERITAVIPYFGYARQDRKDEGRVPITAKLVANLITRAGADRVLTMDLHAAQIQGFFDVPVDHLYAAPVINDHFVSRRFAGDEVVVVSPDEGSIKRALGHTKRLGGNLAIVDKRRTNALEVRQNTIIGGPVEGKVALMFDDMISTAGSICGAARLVHEAGAKEIHIACTHGVLCGPAIERLREAPIDSITVTDTIPVTGEKLLPNLVQLSVAPLLAEAIKRIHHDQSISELFRER

SEQ ID NO: 24897 - protein, 366 aa, Rhodopirellula baltica SH 1
MSDSFILCSGKTATGTKKVFRRLASMTKCKLEYIWLDGYQPTQSMRSKTKIVEDFSGKVEDAEMWSFDGSSTEQAPGGASDCLLKPVFCLPDPDRLGTGFLVMCEVMNADGTPHRSNGRATIKDDDNDFWFGFEQEYTIFDPETKKPIGFPAEGFPGPQGPYYCSVGAGKAVGREIVEEHLELCLQAGLNVEGINAEVMMGQWEFQIFAKGAAQAGDEIWLARYLLDRTGEKYGMEINYHCKPVKGDWNGSGMHANFSNTTLRTCGSKEVYEAICQAFEPRITEHIDVYGADNDQRLTGLHETQSIDKFSYGISDRGASIRIPIATVEKGWKGWLEDRRPASNADPYMVASAIIATVKTANVPAGV

SEQ ID NO: 24898 - protein, 381 aa, Rhodopirellula baltica SH 1
MSLIYLDFNRTTPMAPSVIEAMQPYWSTHFMLPTQSHVHASAVSEAIEGARESVAFLIGCEPFELVFTSGGTEANNLGILGAAEFDNTMDPLDGPPHVLISNVEHDAVMQAGLQLGRLGWDVELVPCDADGLVSADEFEKRFRESTQMVCLQLANHVLGTLQPVRELADRCHNRGIRLHCDATTSVGKIPVDVTQLRVDSLALSAHKMYGPKGNGALFVRRGLELKPILFGESREMGLRAGSENVPGIVGFGSAASMAGRCVDEAYETLAELRQRLIDGLRSNLGEQVLIHAEHVDGLPNTVTVQMPAEAKRIQKAARHLVVGLAQSESPPDEMTRVLRAIGRSEKEIGRAIRVSVGWTTSREQIDRAVNLLAEAADYPSP

SEQ ID NO: 24899 - protein, 393 aa, Rhodopirellula baltica SH 1
MPEVSSASNHRFQPSSNRQRVNMHPWIADRTASFDSSGIRKVFDLAAKLKDPINLSIGQPDFDVPEEIQDATVDAIRSGKNAYSPTQGIAPLREKLLAEINAKYPGQNRDVFVSSGTSGGLVLSLLSMINPGDEVIFLDPYFVMYPALVSLCGGIPVTVDSYPDFRLDPAKIEAAITPKTKMILVNSPANPTGVTASEQDLRDVGDLAAKHNIALLSDEIYSRFFYDGDFASPAATNPDTIVIDGFSKSHAMTGWRVGYVHGPPEIIATMLKIQQYSFVCSPQPAQWGALRAMEISLDGHIDDYRRKRDFMVEQLSPHFELTSPGGAFYLFPKAPGTEGGTAFVERAIADGLLIIPGKIFSSRDSHFRVSFAASDDTLRRGAERLIKLAGDNR

SEQ ID NO: 24900 - protein, 827 aa, Rhodopirellula baltica SH 1
MADSSVERRLFSFILSSMAFFLIYMSLRTMFAPPLPPEEDAIAEVDGETVEPAEDLVADTDASEPGEGEGEEANEDTDAVERPSSPTWSTLGSMDPTSGYVMLVTLNSRGGGIERIELTERKENGRLKYRRVDVRSGYLGYLAADPTATDLGIRVNVVGPGTPADLATASGVQGGLKPGDIITGFNQNNVNNLSMLREAMLETKPGESATVTVLRNEKSIDFTTTLTEHPLDLIRLAEHGGDDEVEGNLSRLSCLLTVGRVGRREIQSGEKTIEGMVDTGDLIWDASQDGDNVSYQLQLSDSEMKPASGKSVGLQRTYSLKPDSYSLDMDVQIDNRAEEAQELAYRIEGANGITLEGWWYSNKISPNWGGSAARDIVYKTTAEGHELVSGYALLKRAKNESEADDQTLFAPDSAPPARNLSYIGVDAQYFTVAMLPPEGQESLKTFRRAAANIIADPSAVPDNKERAVNASFYLDSAIADVPPGSSLKQSLRLFAGPKQPDVMEAYGLGDCIYYGWFSFVAKPLGGLLHLFSNVGNYALAIVLLTLCVRGLMFPLSRKAAINAQRMQELAPELKKIAEKHKDDMEARVRAQRELQQRVGFNPMAGCAPMFLQLPIFIGLYRTLSVDIELRQAAFASWTTWASNLAAPDMMYYWGDWMWDYLGGRGTGWLGPYFNILPMIVVSLFLAQQKMFMPPATDEQTAMTQKMMNYMTLVMGLFFFRVPAGLCIYFITSSLWGIGERILVKKTLPSKPHFDPATLQGAAAGGGTVDGKVNNSAGANGKKSSDGKPKTMADRLRERLGTPEEEAAPLPKDRKRPPSKKPGNKKRR

SEQ ID NO: 24901 - protein, 729 aa, Rhodopirellula baltica SH 1
MFGATSVGVGAIVGGGILALAGVAFATTGPSAILAFGLNGVIAILTALSFAEMASKFPESGGTYTFSRKVLSVESAFTVGWVVWFASIVASVLYAIGFGSFATLLLSELYSTQGSVPHWLGEPWSVPVVSLATTVGIGGLMTFRTSGGGAWINVAKVAVFSVLIIGGFWMLTGQPVSKTTAELRPFLASGWGGLVQAMGYSFIALQGFDLIAAVGGEVREPTKNIPRAMLLSLVIALLIYLPLLFVLTTVGTDGSQSIRELAASDPEAVVALAARHYLGTSGYWLVLIAAVLSMFSALQANLFAASRIALAMSRDNTLPNALSRLAAGSGSPWISVLVTTGLVCLLIQLLPDIAAAGAASSLIFLVTFAIAHWLAILVRQRSVLTPPPFRVPGYPAVPVVGGLACLALAIFQGIAVPEAGIIAVMWIAIGGVLFLSLFARRARLTDVSNIASNPELSRLRGNSPLVLVPIANPNNARAMIALADTLVPAALGRVLVQTVVVAPHDWDPLVNHRPSAQLHSVMNEILHASASLGVRCETLTTVSAEPMMEIARVAKLHQCQSVLLGLSEITPEARDTPLEGLLGQLSSDVVVLRAPKDWQLDQSQQILVPVGGRGGHDYLLTRLLSSLSREQQRQVKFLRVIPTDTLRADQKRIRKELDRTTRVNAGRVCEREVVRSNDPVKTIADRAGTAGLIILGAQRLGPRQKLFGDFTRKVALESDCPVIIISRRG

SEQ ID NO: 24902 - protein, 444 aa, Rhodopirellula baltica SH 1
MLLDFPARILLTVLACFAPDNLNARPSNIADSPAFGCRSEMKSCVLAYSGGLDTSVILGWLQDQGYEVHCVYVDLGQPCEDRDAIMEKARTCGAKSSRLVDVREELCRDFAFPVLAWQAKYEQIYLLGTSIARPLISKVCLEVAREVGATAYAHGATGKGNDQCRFQLAAEALDPNIEMIAPWRIKSFRDAFPGRTELIEYCDVKRIPVKASTAKPYSSDENVLHISYEAGKLEELDVNGVELVEFGMGVSPQDAPDKPEEVTIGFESGVPKTLNGKAVNALEMVEQLNDIAGRNGVGRIDMVENRFVGMKSRGVYESPGMTVLYDALMYVEQLTMDRDLMHLRDRMAPEVAEMVYYGFWYTPKMDALMSFIETAQRPVTGEVTLQLYKGNIMVSSRTSPNSLYDEEIATMEGGGSYNQDDAEGFLRIQGLPSRVQGRVSPRKF

SEQ ID NO: 24903 - protein, 595 aa, Rhodopirellula baltica SH 1
MSLIVQKFGGTSVADTEKIRAAARKAIRAQKAGHRVVMVVSAMGKNTDTLLDLASQISDEPPAREMDMLLSTGEQVSVALVAMAIHSMGSKAVSLTGGQIGLKTDNSFSKARIQSIDTGRIERLLDAGNIVVAAGFQGIDDDLNITTLGRGGSDTTAVALAAVLGADACEINTDVDGVYTTDPRLLAEARRVDVISYDEMLELASLGAGVMHSRSIEFAKKFEVPIHVRSSFSDQDGTMIVAQPESETAPVSGAALTRDEARVTVLGVPDVPGMSQKIFSAIAAQKVAVDMVVQNVGTSGKADVSFTVAGGELKKTLAALEGILDSLGADGVTHDDQVSKVSVVGLGMAHQKAVAASMFRALAEANVNIHMITTSEIKISCLVPRDQANEALRAVHEAFSLDQRPSDAKTWNEIKASNAKEADVADVVARLQNDALEALTLTDISIVPAQARVTLDGVPDQVGVAADMFEQIGEAGIFVDMIVQGYDGEDGSTSVSFTVEQADLDAAQKVAREICGKHSMRDVRGASGITKLSVSGIGLRSHTQVGTVLFEQLASAGINVEMIATSELQVNVVIQSDQAGDAATRLKQAFAEALH

SEQ ID NO: 24904 - protein, 899 aa, Rhodopirellula baltica SH 1
MIPRPTSLSHPLLCLEILMAFRIDKLTTQAQNVVAEAQAQATSAGNAEIDPLHVLSAAVNQRDGITTPLLEKINVDVPKLKSLLTSELEKLPHASGMGQARVSAKLQAALEASATSAESLKDEYVSTEHLLVGLARTDNKAKNLLSLLGVSDNDLLTAMSQIRGSARVTDPNAESTYQALEKFGIDLTQLAQSGKLDPVIGRDNEIRRVIQVLSRRTKNNPVLIGQPGVGKTAIAEGLALRIFEGDVPQSLKGKKVVSLDMGALVAGAKFRGDFEERLKSVLREVKDSDGKVILFIDELHLVVGAGNAEGSADAANLLKPELARGALRCIGATTLDEYRQHIEKDAALERRFQPVFVGEPNVEDTVAILRGLKPRYESHHGVRITDSALVAAANLSDRYIADRFLPDKAIDLIDEAASRLAMEKESVPEPIDRLQRRLRQLELVHRQLVDEQEASAVDKRVEVEEEMESAKAELASLKEQWETEKMGLDDVQSVRQEVDQLQHRFAQLDADAKEKQLRGESPEDAYSEMLQVQSRLRELQARIDEAEKHDDSADQTKEEPGDEKRRLLRKEVTEEEIAEVVSTWTGVPVTRMMETERAKLLVMEERLHQRVVGQDEAVTAVSDAVRRSRSGLQDPNRPIGSFLFLGPTGVGKTELCKALAEVMFDDESAMVRIDMSEFMERHSVSRLIGAPPGYVGYEEGGKLTEAVRRRPYAVILLDEMEKAHPDVFNVLLQVLDDGRLTDGQGRTVNFTNTVVVMTSNVGSQVIQRVTEEGGGEDEMRQAVEDALKARFLPEFLNRIDDTVIFHPLQQTQIRRIVQLQLEELRSRLAANGLSFEITDAAIDQIAEVGYDPAYGARPLKRVIQREVQNPLASAILKNSYAEGTTIKIDHDGDQFVFSG

SEQ ID NO: 24905 - protein, 704 aa, Rhodopirellula baltica SH 1
MTFWQAHCGRGSGTDLAISVDPTKRLTKWTAQGPRSARRNPNSYHLTPTIQFGHRSSRIMAQGEKIIGIDLGTTNSVVAIMEGSEPKVIPNPEGNRLTPSVVAFTDKQETIVGEPARRQAVTNPKRTVYSAKRFMGRRHNEVQSEEKMVPYGITGGPGDYVKIQVGDSEYTPQEISAKVLRKLKESAESYLGHKVNKAVITVPAYFNDAQRQATKDAGQIAGLEVARIINEPTAAALAYGLDKKKDESIIVFDLGGGTFDVSVLEVADSGDEEQESRVFQVVSTSGDTHLGGDDFDEALINYVASEFQKDNGIDLRNDAMALQRLQEACEKAKKELSTLPETDINLPFITMDASGPKHLTMKITRSKFEELIDALVERCRGPVLQALKDAGMDPKDIDEVVLVGGSTRVPKVREVVKSIFGKDPHQGVNPDEVVAVGAAIQGSVLAGDRNDVLLLDVTPLTLGIETEGGVMTALVERNTTIPAEKKNVFSTAADNQTAVTVRVFQGERKMANANRLLAEFNLEDIPAAPRGVPQIEVKFDIDQNGILSVSAKELKTGKEANVEIKDSGALSDSDIEQMQKDAEANAEEDKRQFELVEARNKVNQQVYQLEKLMGENDDKLSDDDKAPMNAAIEKVKKAAEGDDLAEIKAASDELEAASQAFSKVLYEKTDAAGEAGADAAGAAGATAGGGDDDDAIDAEFEVKE

SEQ ID NO: 24906 - protein, 395 aa, Rhodopirellula baltica SH 1
MIYLDHHATTPCDPRVVEAMLPYLTQHFGNPHSDSHEAGREVRRAIDQSIDSMAAILNAPRESVVITSGATESINLAIRGVLMHPRCKRHQVVVCETEHPAVLEVADDLSKQLSAGGQPIEIIRVGVHPHDHPSAGQVDLVQLRAAVNNQTALVSIMWANNEIGSVAPIKTIAEITHEAGALLHCDATQAVGRLPVDALASDVDLLTASAHKFYGPKSTGFLVVGNGNRRVRLRPQIVGGGQQRGLRGGTLNPASIVAMATALRIAIDEMESDTSRILTLRELLWGRLHESIDGLQLNGANWHDDSSVRLPGNLNVRLRDVEGEAWMAATPEVAFSSGSACSSTEALPSHVLLAMGLTESEARRSVRFGVGRFNTADEINSAADQLIASHQKLVG

SEQ ID NO: 24907 - protein, 663 aa, Rhodopirellula baltica SH 1
MPSSPSRRRFEAYRQAVRDRHRRGNQDTEKDLASGRGGHHHGGGPGGKKIGTRDRSFRELFLAFWGLIAGQRGAILTALALLTVSIGLRLIPPLGTKLAIDSVLIRPPKPLPDWVSGIPNLSEILGDPMSSPMRVLIAIGLLVTVLTAIGTAVNLVGRWIATKAVNKTQVSIRATVFDHAVHLPLHHVHSMKSGGVASLIREDAGGVADLIFSMLYNPWRAIVQFIGSLVILMLVDWKLMLGGMFLLPTVWLTHRTYINRIRPLFRDVRKQRQKIDSGATETFGGIRVVRTFSRSRSESSRYVREGDFLVRQQLFTWWWMRIIETIWEVLIPLASTGLLLYGGYQIIEGNLTLGDLMMFLVYLTMLLDPLATIAGSAVAFQNNLAGLDRVLDVLDVEEELPSREGSISLASKQRVGDLSIQNVTFRYPGTETPVLKEVSFDVASGQTVALVGRSGAGKTTLTNLIARFYDPDEGRICFNGRDLRDIQLSSYRSLLGIVEQDVFLFDGSIHENIAYARRRASREDVISAAQAAAADEFIRKFPEGYETVIGERGVKLSGGQRQRLAIARAILADPQILILDEATSNLDSESERLIQDSLSELLQDRTAFVIAHRLSTIMNADKIVVLEDGEVLEIGTHEELVASGGRYRDMVMLQMDQGMQASR

SEQ ID NO: 24908 - protein, 699 aa, Rhodopirellula baltica SH 1
MIQRSVYIGTNGNATGKRMVALGMMELAARRFGRVAFFRPVVHVGPNEDQSIRMMRSRYGIVTPADEMFGVTRAQARQMLADDRYSNLIQLIQQRFKSLEAKADFVVVEGTSYQGLAPELEFELNADIAANIGSRVLSVYAMGDRSVDECVQSVLIGNESFVDRGAQLIATIINKVPDDQSTALNAAIKTSKLDSKAPLYFLPDEPLLRQPTVREIQSGIGAKLVSGDESSLDREVAVRKVAAMQLPGFLERLSNAALVMTPGDRSDILVGCVLACSQPDGPSPAAVVLTGGILPPPSIRRLVENANALPILVAIEDTYTVASKAAEVRAEIGDHSPRKIESAIGVFERHVDTDSLADRLQAPIVPRITPMLFEHSLIQRARQQRVKIVLPEATEPRILQAVDVLRRRDVTDVVLLGDPNLIAAAAARAGVMLPNDGLEIIDPATSPLRNSFASEYYQLRKHKGVTTDIAHDRMIDVTYFGTMLVHRGLAGGLVSGAVHTTANTIRPAFEFIRTRPDVNVVSSVFLMCLKNGVLVYGDCAVIPNPTAEQLTEIAISSAETAVQFGIEPRIAMLSYSTGESGHGEDVDKVREATAMVRKRRPDLLVEGPLQYDAAVDPDVAATKMPGNPVAGQATVLVFPDLNTGNNLYKAVQRSAGAIAIGPVLQGLNKPVNDLSRGCTVTDIVNTVAITAIQAQTVAS

SEQ ID NO: 24909 - protein, 391 aa, Rhodopirellula baltica SH 1
MHSDGHRQHRRDHGHPSTNGGFMNVLVFNVGSTTLKYACIDAETEEVISSGLVDRIGQPGGDAINHIVAAKIAIDEVGLNNVCVIGHRIVQGGDLFLEPTVVTPDVLKRLRTLDTLAPLHNPAARSVVEGLVGIGTPQTLVFDTSYFATLSPAAYRYAVPEDWYQKHAVRRYGFHGTSHQYVTQKAIRFIGGNDESRIISLHLGGGASATASIGGHAVDTSMGMTPLEGLVMATRSGDLDPAIVLHMTEHAGFEPSDVRNSLNRKSGLLGLCGDQDMRTVLKRRQAGDPAATLAIDIYVRRIIKTVGSYIAILGGLDALVFTAGVGQHSSEIRGLVCDSLQHFGISLSEEKNQSCCDDPADISAPDARVRTLVVDTNEELAIARLVRNRAT

SEQ ID NO: 24910 - protein, 419 aa, Rhodopirellula baltica SH 1
MPSFTRRRVHLAMPPTFSVSSRVDNATETAFVAPTTRDKSKDAIVAPQPQLNHGTSVPTLTPLSPLDQIRLVRETMLREAEAIQKAAAIASADAAEAAAWISRCEGSIVLTGVGKAGLIAQKLVATLASTGSPAHFLHPIEAVHGDLGRVQSKDLVIAFSNSGRSEEVVRVVEYLKHQACGIIAVTADRENPLAELADHVVPIGRHREACPDGLAPTSSTSVMLAVGDAIAVLASRLCGFTPNDFARFHPGGALGRKLTDVRQAMRPLAECRLAPQTISIREAMMIGGAGRRSGAILLLDESERLAGIFTDSDLARLLQHRQETSLDEPIELFMTKQPICIADDERLPRAVEILSQRKISELPVVDSDHRPIGMIDITDLVATGDVRQTVSSSQGSIQSNPDDSSGEDGPRCIPITSGD

SEQ ID NO: 24911 - protein, 277 aa, Rhodopirellula baltica SH 1
MKACLAMNHILKIENLHVSVGDKPILRGVNLTIKHGETHALMGPNGSGKSTLGLAIMGHPGYTVTEGSITLDGEDVLAMAPDERARTGIFMAFQRPMAIPGVKMADFLRHATTNVRNPDRKEGEELIPMREFRKELKEKMAHLRMDVEFARRYVNDGFSGGEMKRAEILQLAMLQPKFAVLDETDSGLDADAVRLASESIADIGREKMGLLIITHHDKLLVHNPPEFTHVMLGGRLVETGGKELAVELHEHGYDRIRKAYPEAEAANQEMLAEETAV

SEQ ID NO: 24912 - protein, 900 aa, Rhodopirellula baltica SH 1
MDTVRRATNMVLNVDSEASLSLSQISGVEGGSFQDDWLILCAVIVLLMQAGFMCLESGLVREKNSINVAVKNLADLMISVASFWTIGFSVMFGATIFGLFGVGQLMPDFGVSDSLAAFFVFQAVFCGTATTIVSGAVAERMRFHGYLVSCVCVSALIYPVVGHWVWASGANGMSIGWLEGLGFRDFAGSTVVHSVGGWAALAGCIVLGPRLGRFRKDGRVRDIQPSNLTLAYLGAFILFFGWFGFNCGSTFKATGEIALIAINTLLGGCFGGLSSILVSSLRTGIPDPRSIANGLLGGLVGITASGSMIDPRAAALVGAIAGVVAVYSDEWLVRLRIDDAVGAISVHGFCGAWGTIAFALFIRTDELAPGMSRWEFLAVQVFGVVVTFGFVFGGVFVLLRGLGRFIQLRVDPETERLGLNVAEHNASSRLLDLAVSMDAAARMRKLEPSCKVRSEYGTAIGDLIDSYNQMIDHICEDQTALAEATKRAEALTAILDDSPNEIAIVHADTGQVLSLNRGARVNLQRDEDEFSELTFDCLFNTEFGELQKFRLSAFDDEAGFTQQLATAVRKDGTTYPASISVQHAEFLGYQVLVVLTVDMTSQVELKERLHAAEKMEAVGQLAAGIAHEINTPLQCMSGNVEFLQSVQQNLQDTLRLVAEGVSDEQALHEITEKLSSDRWSRLLGESDAAIEDTQKSIGRVVQIIGAMRVLSHPGPAGKTNTSINGILRDSAAISRGRWKYAAQMDFDLCDSEPTVACRANELSQVFCNLFVNAADSIEEKNEKVPEAGLGNIFVSSSIEQDGVLIKVRDSGVGMSESVRRRCFEQFYTTKPVGKGTGQGLSIAYQIIVGRHGGNIEITSEEGVGTEFQIWIPMHASDDACDGATKTNAGQTNDATSLAAV

SEQ ID NO: 24913 - protein, 398 aa, Rhodopirellula baltica SH 1
MIYLDNNATTAIDPAVARVLAEAFSQTPANASSQHRLGQQTRSRLEAATDLIGRCLGSDLSRVHAPRLLITSGGTESNNLAISGLGEPDGAIVISRIEHPSVVAAAAAEEQTGRQVGWVDVDVDGVIQLESLRSTLDRLTESGNSPERVSVVSIMSANNETGVIQPIRAAADICREFRVPLHVDATQSIGKVPVDLTAWGVSAATITPHKLHGPTGVGFLWLDAGVDVRAALRGGEQQLGTRPGTEPVALVIAAAEAIRLACEQQPGAAEHMTALRDKLESELVRRHPSLVIHGERAPRLPSTTCLSLPGADRQSLLMSLDMAGVACSSGSACSSGSSPPSHVLLAMGASKSLVDSALRFSVSRFSTEAEIDRAIELISRQFSKAEGFSTVDNSVEKG

SEQ ID NO: 24914 - protein, 417 aa, Rhodopirellula baltica SH 1
MRSSTKAPPMLSEKTIRIVKEITPLVAANAETITRRFYERMFEANPEVKAFFNQAHQHSGGQQKALAGAICAYFTHIDNPAVLMPAVELIAQKHVSLGIKPEHYPIVGSNLLAAIGDVMGDAATPEIVEAVSEAYGFLADIFIGREGAIYEEQASMPGGWNGTRTFVVTKKVRESEIVTSFYLKPEDEGPLPPFKPGQYITVHMDHPHTPTSPRNYSLSDCASQPHYRISVKREERLVPDAPDGLISNHLHDGIEEGHRIELGPPCGEFTVDPATIAKPIVLIAGGIGVTPLLSMAKSIVHANPNAELHFIQAARNSKVHAFADELRRLAQAGPNVHTKVIYDSPLPGDVEEGKCDEAGFVTENQIRESTPFTDADFYFCGPKPFMKNVHSCLRELGVDEHRVRYEFFGPKEELVAV

SEQ ID NO: 24915 - protein, 378 aa, Rhodopirellula baltica SH 1
MMQIGVPRERWPGEARVALVPASVKKLIQVGFSVGIESGAGLASGFPDEAYTDVGAAVQVDRATVLSGSDIVLRVRRPELDEVSTLRPEAIHISFLDPFNEKELVSEMAKSGVTSVSMEMIPRSTRAQKMDALSSQANLAGYVTVIQAAYHSKKIFPMMMTPSGTIRPARVFVIGAGVAGLQAIATAKRLGARVDAFDTRPVVAEQVRSLGAKFVEIDLGEVGQTEQGYAKALTPEQIELQKEGQKKVIAASDVVITTAQLFGRPAPRIVTRDMVLGMQTGSVVVDMAVETGGNVEGSVLNEIVDVEGVKIIGQGNLPSEVSRNASEMYSNNLTALIDEFWDAESKRLEFNPEDEIVQAAVITRGGKIVNDTIAQLHS

SEQ ID NO: 24916 - protein, 559 aa, Rhodopirellula baltica SH 1
MSPHPMTLLRRSMLRYKIGRLQRYLADAERARDIQRENLLHRIHQNADTAFGRDHGFSEIRTLEDFRRRVPIAGYEAARPYVDRVIQGETTALFPENTKVVMFATTSGTTDHPKMIPVTEDFYRQYKAGWQYWGTGVYRDYPHLLQMKSLQFSSHWNVTQTPSGAPCGNISGLAAETRPFYIGSLFVLPACVIQITEHLAKHYTALRLSLACDRVGKIVTANPSTLVEVAKFADTMKETLIRDIHDGTLTGDQPIPDAIRQQLRSRLRPNPRRARQLQQIVDRTGHLYPKDAWPDLTLLAVWTGGSVGLYLNQLPEYYGDAAIRDHGLSASEGRMTVPLQNGSPSGMLDYSSHHFEFIPESERDSKTPHVLEAWELTEGENYFIVLTTASGLYRYDIHDLVRCDGFCGQTPMLSFLNKGKNFCSFTGEKLSEHQVMQAMQQTLQSINAPSCTFTLAPTLGERPRYHLVLDDSSLPNLCERIGQELQNQLAQVNCEYADKCASGRIEPIQVTRVPAGTWEKLRASKTSKRGNFEEYKHPCLTNDPNFLQNLSKLDSASPS

SEQ ID NO: 24917 - protein, 619 aa, Rhodopirellula baltica SH 1
MIGARSISTLFESHSVPSRPPPMSTASSSSSANAAKGDQQPMNGADVLVKSLVDHGVEVLFAYPGGCSMPMHQALTRYGDSIRTILPRHEQGGAFAAQGYSRSTGKIGVVMATSGPGATNLVTAIADAKLDSIPMLCITGQVPTGAIGTDAFQETPMVEICRGITKHHYLVTDLADLPRVMKEAFHIATSGRPGPVLVDMPKDVQLGNFPIDMDPEMDLPGYSPEAPKVAGETIKQMAAAIKLARRPVIYAGGGIISGEASEELRELIKKTGIPTVTTIMGLGAVSPDDPRSLDWLGMHGAAYANYAVRDCDLLIALGVRFDDRVTGKVEAFAKDAKIIHVDIDSSELNKNKQAHIPVRGDVKDVLVQLNKIVQPPEIEAWQKTCTDLKAKYPLKYDNSFDGILQQHAIATLSKITADRETYVSVGVGQHQMWAAQFFKFRNPRTWMSSSGLGTMGFGLPAAMGVQAAHPDALVIDIDGDGSFQMNIQELATCFCEKLPVKVLLLNNQHLGMVVQWEDRFMDRNRAHTYLGPIDHDEAKGKSTADRFEYASDRYPNFVQIAKGYGCGAATVKKKADLEGALQEMIDHKGPFLLDVEVPYQEHVLPMIPGGMTVDDMLLD

SEQ ID NO: 24918 - protein, 639 aa, Rhodopirellula baltica SH 1
MCGITGFWNPSRTNERELRFALDPMLDVLDHRGPDERGSRFFQERGLAMGHTRLSIIGLACGHQPIETDDGDYAVTVNGELYDYKRIRTALACENYECNGKSDSAITLPLYLKHDLAMVDHLRGEFAVVLYDDRKERLVLIRDRFGVKPLYYAVNDNGFIWGSEVKSILQHPDVEPRLCPKAAVHQMMQVMVPGSTAFEGVDALLPGHMLVVQRNGDSLEVQTKRWWDFEFPESHDENADPEPFIQGVQDRLIDAVAARLEADVPVGCYLSGGIDSCSILGLANTLQQSPVKAFTIAFDSDEYDESNIAKRMAERTGAEQELLRLTEKELYGPAFERATWHAERTFYNTLAVAKWHMSRRVRACNYKAVITGEGSDELFGGYPFFKRDWLGRDDEGGIFAGAILAEEDLKHSAWQDLCGFTPSWIQPWMLVLKRFEPILSSSLTDLLQEYDPVGEVAGAIDPAQVRGRHRLDVSQYTWSKTMLEGQILTWGGDRMDMANSMEARPAFLDHHVAEYATTIPPNIRIRNGVEKWVLREAMVNVLPRELYERKKFAFMAPPAHTDPVKRAAVQEMIDHWLTPSRVESVGFFQHDKLMQFIDDAWKESDGTIARRNDIVMNHVLQLHMLHGQYVEGLPLPAVD

SEQ ID NO: 24919 - protein, 233 aa, Allium sp. AL-2003
VQLKRMENKINRQVTFSKRRNGLLKKAHEISVLCDAEVALIVFSAKGKLYEYSTDSSMEKILERYERYCFAEKSSTMSDIDSQEDWSLEYHKLKAKVESLNNRQRHLMGEQLESLSLREIGQLEQQLENSLKTVRTRKSQELLSSISELQDKEKTLRDENKALENELMKRARAKAILEQQARWKHHNHKQQDNLHNPNINIGNYQTRNNEGGVEPATDVQVRVVRNLLPHWML

SEQ ID NO: 24920 - protein, 219 aa, Chelidonium majus
  misc_feature (12)..(12): Xaa can be any naturally occurring amino acid
  unsure (1)..(219): unsure at all Xaa locations
GLVKKAHEISVXCDAEVALIVFSTKGKLFEYSTDSGMERILERYERYSYAERELVASELDQGNWSLEYTKLKAKIEILQKNQRHFMGEDLESMSLKELQNLEQQLDTALKQIRSRKNQLMYESISELQKKEKVLQEQNNQLGKKLKEKEKEVAQQQAQWDQQSQGQSSPSFLLSQSLPSLNIGGSYHMRGSNGSEEEGVRPQTTRTNTTLMPPWMVHHL

SEQ ID NO: 24921 - protein, 229 aa, Corylopsis sinensis
VQLKRMENKINRQVTFSKRRAGLLKKANEISVLCDAEVGLIVFSTKGKLYDMERIFDRYERYSYAERQLVVTNHESQGSWTIEHAKLKARMEVLQRNQRHFMGENLDSVSLKELQNLEHQLDNALKHIRSRKNLLMQESISELQRKDKSLQEENNSLSKKIKEKENALAHRAQWEQQNQGLNSFPILLSQPPQSLNIGTYQTGCSEGEEGTPFQQRPNTLLPHWMVSHL

SEQ ID NO: 24922 - protein, 236 aa, Heuchera americana
VQLRRMENKINRQVTFSKRRGGLVKKAHEISVLCDVEVALIVFSNKGKLFEYSTDSCMEKILERYERYSYAERRLVATGSESQENWSLEYTKLKAKIELLQRSQRQFMGEDLDLLSLRELQNLEQQLDTALKHIRSRKNQLMNQSISDLQKKEKAIQEQNNLLAKKIKEKEKAMSQQAEWEQQNNGASTSNFLNPQPLPCLNISSTYQGGAQPEAMRRNELDLTLEPIYSCHLGCF

SEQ ID NO: 24923 - protein, 210 aa, Heuchera americana
  misc_feature (194)..(194): Xaa can be any naturally occurring amino acid
  unsure (1)..(210): unsure at all Xaa locations
SVLCDAEVALIVFSNRGKLYEFCSTSNMLKTLERYQKCSYGAVEVNRPCKELESSYREYLKLKGKFEGLQRTQRNLLGEDLGPLNTKELEQLERQLDSSLKLIRSTRTQFMLDQLSDLQNKEQVLMDSNRSLARKLDEISAKNNNLRLSWEGGEQSIPYSQQQAQPQGLFQPLDCNPTLQIGYNSIGSDPDDYXQLMHRMSTGFMPSWML

SEQ ID NO: 24924 - protein, 206 aa, Michelia figo
  misc_feature (107)..(107): Xaa can be any naturally occurring amino acid
  misc_feature (204)..(204): Xaa can be any naturally occurring amino acid
  unsure (1)..(206): unsure at all Xaa locations
VQLKRMENKINRQVTFSKRRNGLLKKAYELSVLCDAEVALIIFSSRGKLYEFGSAGTNKTLERYQRCCYTPQDVVVSDRETQGWYQEVSKLKAKYESLQRSQRHLLXEDLGPLSVKELQHLERQLEVALSQARQRKTQIMIEQMEELRKKERQLGDINKQLKIKLEAEGQGPFRCIQGSWESGAMVGNNTFSMNAPQAAPLDAXSP

SEQ ID NO: 24925 - protein, 239 aa, Phytolacca americana
  misc_feature (235)..(236): Xaa can be any naturally occurring amino acid
  unsure (1)..(239): unsure at all Xaa locations
VQLRRMENKINRQVTFSKRRSGLVKKAHEISVLCDAELALIIFSPRGKLFEYSTDSSMEKILERYERYFYAERQLASNDPNTEVNWTFDFAKLKAKLELLQRNHRHYLGQDLDSLNIKDLQSLEQQLDNALKHIRTRKNQLMHESISELHKKEKAMQEQNNMLVKKIKEREKAMAEAQGMQWQRQQNEPPEASNFLLPPPLTSWNTAGDAYHGQIAGEVKRNDLDLTLEPVYSCXXGCF

SEQ ID NO: 24926 - protein, 226 aa, Phytolacca americana
GLVKKAHEISILCDADVALIVFSTKGKLFQYATGSCMEKILERYERYSYAERQLITPDPESHLSWTLEHAKLKARVEILQKNQRNYMGEELDTLSLKELQTLEHQLDSALKQIRSKKNQLMYESISQLQKKDKALQEQNKSLSKEVKEKEKEKEKTMTQQAQWDNQNQDINSSSCLMSDQALPSLNIGMNYQTESGSSSVENEAIQQQNRNNTTIALMPHWMLSHL

SEQ ID NO: 24927 - protein, 238 aa, Pachysandra terminalis
VQLRRMENKINRQVTFAKRRNGLLKKAYELSVLCDAEVALIIFSARGKLYEFCSSSSMQNTLERYQKCSYGPLEPSQPAKETQSSYLEYMRLKARVEGLQRSQRNLFGENLGPLSTKELEQLEHQLEMSLNQIRSTKTQFMLDQLSDLQRKEQMLQEANRSLKRKLEESNAENSLGPSWESGGHGVPFGHQPAQSEGFFQPLECNSTLQIGYNHVGADQMSITVPPQNVNGFVPGWMV

SEQ ID NO: 24928 - protein, 238 aa, Peperomia caperata
  misc_feature (207)..(207): Xaa can be any naturally occurring amino acid
  misc_feature (238)..(238): Xaa can be any naturally occurring amino acid
  unsure (1)..(238): unsure at all Xaa locations
VQLKRMENKINRQVTFSKRRTGLLKKAHEISVLCDAEVALIVFSTKGKLYEYATNSSSMPGILDRYERHSFTDKEFFIKEGEPPEGAWTLEYAKLKARYELLQKNYRHYLGEDLGSLSGKELQQLEGQLDASLKNVRSRRTQALFHTISDLQKKEKSLLEQNSVMIKKLQDLEKAEKAQQSQLEMQNHERTQNQPPLILLPPPALSXGSFRQENGPSVEGEAAPRVAQKNSLLPPWMX

SEQ ID NO: 24929 - protein, 215 aa, Papaver nudicaule
  misc_feature (36)..(36): Xaa can be any naturally occurring amino acid
  misc_feature (168)..(168): Xaa can be any naturally occurring amino acid
  unsure (1)..(215): unsure at all Xaa locations
RHEMSMLCDAEVALIIFSNRGKLYEFCSSNSMFKTXERYQKCNYGQPEPNVSARESLEHASHQEYLKLKARVEALQRSQRNLLGEDLGPLSGKELEFLEKQLDSSLKQIRSTRTQYMLDQLTDLQRREQMLSDANKTLRRRLEEGAQASQQQWDMQHGVGYSRQQQSXHHQAADHNQGFFHPLECEPTLQIGYQQDQITVAQGAPMGSYMPGWLA

SEQ ID NO: 24930 - protein, 240 aa, Papaver somniferum
VQLRRMENKINRQVTFSKRRSGLLRPCAEMSVLCDAEVALIVFSTKGKLFEYSTDSGMDRILERYERYSYAERELVTTEIDQGNWSLEYSKLKSKIEILQKNQRHFMGEDLQSMSLKELQNLEQQLDVALKQIRSRKNQLMYESISELQKKEKALQEQNNKLGKQLKEKEKEVAAQQQQASQFSQGQSSPSFLLSQSLPSLNIGSGSYQARGGDNGNEEGNRTQTTRTNTATLMPPWMLN

SEQ ID NO: 24931 - protein, 215 aa, Ranunculus bulbosus
ALRHEMSVLCDAEVGLIIFSARGKLYEFASAGGMSRTLERYHKNSFSNQDSNLAIDRETQSWYQEVSKLKAKYESLQRSQRHLLGEDLGPLNVKELQNLEKQLEGALAQARSRKTQIMLEQMEALRRKERELGDMNKQLKNKYQLEAEGQGSLRAMQGSWESNALNNYSGHPSHSSSMDCEPTLQIGYHQYVSADGGPIQRNNAGENNFIQGWEL

SEQ ID NO: 24932 - protein, 232 aa, Syringa vulgaris
  misc_feature (231)..(231): Xaa can be any naturally occurring amino acid
  unsure (1)..(232): unsure at all Xaa locations
RMENKINRQVTFAKRRNGLLKKAYELSVLCDAEVALIIFSNRGKLYEFCSSSSMLRTLERYEKCNYGAPEPHVSSREALELSSQQEYLKLKARYEALQRSQRNLLGEDLGPLNSKELESLERQLDMSLKQIRSTRTQAMLDTLTDLQRKEHALNEANQSLKQRLMEGNHISLQWNQDPEEVGYGREPTQHQPHGFFHPLECEPTLQIGYQNDPMAAAGPSLNNFMSGWLPXI

SEQ ID NO: 24933 - protein, 207 aa, Syringa vulgaris
ALVQLRRMENKINRQVTFAKRRNGLLKKAYELSVLCDAEVALIIFSNRGKLYEFCSTSNMLKTLERYQKCSYGSLEVNNSTRDLEESSNREYLKLKSKYESLQRHQRHLLGDELGPLNINDLEHLEHQLETSLKHIRSTRTQVMVDQLSDLQAKEKMMVETNTALERKLEEIYAANQLQQSWAGGEQSCAYSQQHLNLRTFFNLWMQ

SEQ ID NO: 24934 - protein, 242 aa, Syringa vulgaris
  misc_feature (188)..(188): Xaa can be any naturally occurring amino acid
  unsure (1)..(242): unsure at all Xaa locations
LVQLRRMENKINRQVTFSKRRNGLLKKAYELSVLCDAEVGLIIFSSRGKLYEFGSAGMTATLERYQRCCFNPQNAGAGAERETQSWYQEVSKLKAKYESLQRTQRHLLGEDLGPLNVKELENLEKQLEGSLSQARQRKTKIMMEQMEDLRRKERQLGEMNKQLKIRVSLELSSHETEGQGLRGFPCQXNAAASAGTSNFMAQPGTNPMEFEPEPVLQMGYHHYNLGEGPLFQDHGYRSFDLF

SEQ ID NO: 24935 - protein, 241 aa, Tradescantia virginiana
  misc_feature (228)..(228): Xaa can be any naturally occurring amino acid
  unsure (1)..(241): unsure at all Xaa locations
VQLKRMENKINRQVTFSKRRGGLLKKAHEISILCDAEIALIIFSTKGKLYEYATNSKMDNILERYERYSYAEKALTSSDPDIQGNWCQEYAKLKSKVEALCKSQRHLMGEQLETLNLKELQQLEQQLEGSLKHVRSRKTQVMLDSISELQRKEKSLEEQNKNLEKEILEKQKIKALAQQAHWEHQNQPAPRGSPPRPFVIAESHPTLNIGHFQGRTNAVEAEENQQPXMRICSSLLPPWML

SEQ ID NO: 24936 - protein, 235 aa, Tradescantia virginiana
VQLKRMENKINRQVTFSKRRTGLLKKAHEISVLCDAEVGLIIFSTKGKLYEYSTDNSMAKILERYDRYATAERAVLEANLNLEVGSHYEYRKIKAKVDALQKSQRHLMGEQLDTMTNKELQQLEQQLETALKHIRSRKNQMMLESVAALQKKEKALREQKSILEKKLIEKQKDMEISQIHQYQAHEDNTSPTSLVLTNSLPTTLNTNGCITHAIEEEHAPTLPHTNNNNLPPWMV

SEQ ID NO: 24937 - protein, 226 aa, Paeonia suffruticosa
SQVTFSKRRGGLLKKAHEISVLCDAEVALIVFSTKGKLFEYSTDSSMEKILDRYEQYSIAERQLVEEPGSQGNWSLEYSKLRAKIELLQRNQRRFMGEDLDSLSPKDLQNMEQQLDVSLKNIRSRKNQLMYESISELQKKERAIQEQNNLLAKQIKEKEKTMAQQAQWEQQIHHGPNASAYLLSPHELTTLNMGGNYQGEPTEMRRNELDLTLEPIYTCHLGCFGA

SEQ ID NO: 24938 - protein, 521 aa, Gossypium barbadense
  misc_feature (399)..(399): Xaa can be any naturally occurring amino acid
  unsure (1)..(521): unsure at all Xaa locations
MVGNSLAGLQDHLKLAREYALEGLYDTSIIFFDGAIAQINKHLNTLDDPLIRSKWMNVKKALSEETEVVKQLDAERKAFKEAPNGAAVLLPTRSCQIIFLCFHPLDEYPTSSGAPMDDPDVWRPPSRDTSTRRPARGGQAGMRKSPQDGISGRGNTRTAATGRGAKAGASSRTNTGVRGSTTGKKGTGSGKSSKGDSANGDAEDGKLKRSQYEGPDPDLAEMLERDVLETTPGVRWDDVAGLTEAKRLLEEAVVLPLWMPEYFQGIRRPWKGVLMFGPPGTGKTLLAKAVATECGTTFFNVSSATLASKWRGESERMVRCLFDLARAYAPSTIFIDEIDSLCNARGASGEHESSRRVKSELLVQVDGVNNTGTNEDGSRKIVMVLAATNFPWDINEALXKRLEKRIYIPLPNFESRKELIRINLKTVEVAADVDIDEVARRTEGYSGDDLTNVCRDASLNGMRRKIAGKTRDEIKNMSKDEISKDPVTMCDFEEALAKVQRSVSQADIEKHEKWFSEFGSA

SEQ ID NO: 24939 - protein, 333 aa, Oryza sativa Japonica Group
MTSAVAAPPATGGKRPVLLLRRINDRLAAELRSRFRVLNFYESSAPLLAFLAAAAAGPDPPLAAVVVAGGAIQVNAAFLDAVPSLGCVVTTGAGVDHIDLAECARRGVAVAGAGTVFSTDVADHAVGLLVDVLRRISASDRYVRRGLWAARGDYPLGSKLSGKHVGIIGLGSIGSLIAKRLQAFGCTISYNSRRPKDSVSYNYFPDVTDLAAASDVLIVACALNDETRHIVDSSVLEALGKDGVVVNIARGGIVDEAELIRALKEGRIAGAGLDVFEKEPDVPAELLSMDNVVLTAHEAVFTTESNWDLADLMIANLEAFFSGGPLLTPVLPK

SEQ ID NO: 24940 - protein, 239 aa, Oryza sativa Japonica Group
MAAAEVQSAAGWGRQLQQDGGGWRKGPWTSQEDALLVEHVRQHGEGRWNSVSKLTGLKRSGKSCRLRWVNYLRPDLKRGKITPQEESIIVQLHALWGNRWSTIARSLPGRTDNEIKNYWRTHFKKGKPSKNIERARARFLKQRREMQQSQQLQQPTLMPTPTPQSKDIIVAETGDARTDDDAGGAAAAVAPSSSSSSLSMGGGEAEDLIMHQDAMDDLMMCPAMSTTSSSTAPPSPGIS

SEQ ID NO: 24941 - protein, 432 aa, Oryza sativa Japonica Group
MYGVGGGGGGFNAPYTASARRRNHEDDDDEEEEESGEGRVLEAWERAYADDRSWEALQEDESGLLRPIDTKTLVHAQYRRRLLLRSAASAAARIQKGLIRYLYIVIDLSRAASEMDYRPSRMAVVAKYAEVFIREFFDQNPLSHVGIVTMKDGISHRLTEIGGSPESQIKALMGKLECSGEPSLQNALELVHGYLDQVPSYGHKEVLFLYSALNTCDPGDIMETIAKCKKSKIRCSVIGLAAEIFICKYLCEETGGSYTVALDESHFKELLLEHAPPPPAIAEYAAANLIKMGFPQRGAEDLISICSCHKKIKSGAEGYICPRCKVNVCELPTECRTCGLTLVSSPHLARSYHHLFPVQPFDEVSSVHPNRLGQKGGQKCYGCQQSFINPDSQSSLHVRCPKCNQHFCLDCDIYIHESLHNCPGCESQRSSS

SEQ ID NO: 24942 - protein, 213 aa, Oryza sativa Japonica Group
MAITRRHPPLLLLFLAVAAAATIAGASQSTRPRPAVSPAAAADFVRRSCRATRYPQVCERSLMPQAPAVGRSPRLLAQAALTVGADRARSCSGYLGGGGSSSSSKRSGGGGRGGAVGDCADTLRDAEERLRQSAAEMSRMGRSGSPRFAWRLSNVQTWASAALTDASTCLDSLATYAAPGIDVDALRKRVGAVSQATSNALALVNNLDPHHHL

SEQ ID NO: 24943 - protein, 69 aa, Wigglesworthia glossinidia endosymbiont of Glossina brevipalpis
MSKIKGNVKWFNESKGFGFITPEDGSKDVFVHFSAIQSNGFKTLAEGQRVEFEITNGAKGPSAAHVTTI

SEQ ID NO: 24944 - protein, 712 aa, Wigglesworthia glossinidia endosymbiont of Glossina brevipalpis
MYVSRTIIFVPLEKRVGLNYVFSGIIQAIKRKNIKFTVFQPFKYFNNTKKNFNIIDYTLKKYNIKGNDHKEQFSFDYIVNVLSSNKKNFLLEKIVENFYKQKKNNEIVLIPGINIYNGYEFLEKLNYELAKILDAEIVLILRLYKNFLDYIKLLSFKFGFEKKNKISGIILNELDCTKNSNQSIDCKRLLKNDNLYEIKKNNHENCSLINEKSIPIISKIPFNEDFYFVYLYKIKEHFKAKFLNKNYNYVIKSILFCEVYKENIFKNNFKQSLLVISKKQINKFCLMHLKESKYNFYSSILIIGCDKNENEIKVFCEIAEKKKISVIYNNMSFINFFYYLTKFKFNFYKKFNDIIKISNYISNYISDIWISNFSLKKKEKKFFSPEIFQYNILQLSRYTKKSIILPEGEEIRILCAANICSKKNIAHCILLGNPKNILEKARLNGITIEKNIDIINPVEIREKYISHIINLRKKKCISEISARKQINKNIVLATLMLNEGIVDGLVSGATTTTADTLRPAFQFIKTDPKHSLISSIFFMLLPEQTLIYGDCAININPNSKQLSEIAFQSHNSAIQFGIDPKIAMISYSTGYSGQGESVEKVRQATLIAKKSYPKLVIDGPLQYDAATVKSVAKSKAPFSEVAGKATVLIFPELNTGNTTYKAVQRSSNIICIGPVLQGIKKPVNDLSRGASIDDIVYTIAITAIQSIKKDQN

SEQ ID NO: 24945 - protein, 399 aa, Wigglesworthia glossinidia endosymbiont of Glossina brevipalpis
MSQNLILVLNCGSSSIKFSVIDPKTEKKYISGIAECLKLKESSVKWKIDKSYHESSLNEYSDHNLALRFIVNEILQHKKDILKKIVGIGHRIVNGGIKCTKSTIIDEKILKNIKDSIPFAPLHNPAHLIGIYESFKIFPNLINKNVAVFDTAFHQTIPEDSYLYAIPYYFYKKYNIRRYGAHGISHSYVSKKASNILNIPIEKSNLITCHLGNGGSVSAILNGKCIDTSMGLTPLEGIVMGTRCGDIDPSIIFYLHEKLKISVKEIREIFSEKSGLLGLTNISSDFRYIEDNFLKNKIAKRAMKIYCNRLSKYIGAYITLLENKLDGIVFTGGIGENAYNMRELLINKLKILGFEINKEKNFKIRLGRSGIITNSNSIPALVIPTNEELVIAKESIIFT

SEQ ID NO: 24946 - protein, 290 aa, Wigglesworthia glossinidia endosymbiont of Glossina brevipalpis
MENINYFKYKFQIFILKNKIIKYLFKKRNKMLNKNFFNSLLKSIILISFFIFNLSFASKLEDIKKSGLLRVAIFDSNPPFGKIDLKNHSIIGYDADFSKEIANILGVKLKLIPTNPSNRIPLLQSGKVDLIIADITITKEREKVINFSVPYFVTHQKLLVNKYSSNELKDYSFDKIGAVKGTTGQKTLHDILPKAQIISYEDIPMAFSALRNGNVKAITQDSTILSGLLLAAPDKDKYKILQETISKEVIGIGVKKGEDDLLSEVNKALKILEESGKKLIIYNKWFGNKK

SEQ ID NO: 24947 - protein, 638 aa, Wigglesworthia glossinidia endosymbiont of Glossina brevipalpis
MSDMAKNLILWLIIAVVLMSIFQSFGPNDSNRRKVEYSAFISELNQDQIKETRINGREIFALKKDGSRYVTYIPINDSKLLDILLSKNVKIIGEPPEEPSLLTSIFISWFPMLLLIGVWIFFMRQMQGGGGKGAMSFGKSKAKMLTEDQIKTTFSDVAGCDEAKEEVSELVDYLKEPSRFQKLGGKIPKGILMVGPPGTGKTLLAKAIAGEAKVPFFTISGSDFVEMFVGVGASRVRDMFDQAKKTAPCIIFIDEIDAVGRQRGAGLGGGHDEREQTLNQMLVEMDGFEGNEEIIVIAATNRPDVLDPALLRPGRFDRQVVVGLPDVRGREQILKVHMKAIPLSSDIDAAVIARGTPGFSGADLANLVNEAALFAARKNKKNVSMMEFEKAKDKIMMGAERKSLVMTEKQKEATAYHEAGHAIVGRLVPGHDPVHKVTIIPRGRALGITFFLPKGDVISISRQKLESQISTLYGGRLAEEIIYGLSNVSTGASNDIKVATSIARNMITQWGFSDKLGPLLYSEEEGEIFLGRSVTKSQNISDKTARIIDQEIKILIEKNYLRAKNLIIDNIDILHAMKDALMKYETINAYQIDDLMKRKPVRPPCDNQDSKRHNNKDDIINKSKNNISNNTSVTNNIQ

SEQ ID NO: 24948 - protein, 581 aa, Wigglesworthia glossinidia endosymbiont of Glossina brevipalpis
MLKKNFSTWRIFCRLWPIISPFKSGLIISIVALIINATSDTLMLSLLKPLLDNGFKSSENKISIWMPLAIVALMLSRGSSGFISSYFISWVSGKVVMNIRRNLFRHMMNMPVSFFDKRSTGALLSRITYDTEQVASSSSSVLITIVREGSLIIGLFFMMFFHSWKLSSVLIIITPIVFFSINQVSKRFRKINKKIQNNMGQVNFIVEQMLKGHKEIRIFGGQKEEIDRFNYVSNFIRQQSMKIVISSSTLDIIIQFISSITLAVILYISSLPKIIDELTAGTITVIFTSMIALMRPLKSLTNVNANFQKGMVACKTLFSIFDIKQEQDIGKCYINRARGEIKFKNITFTYPGKENPSLKDINIKISAGCTVALIGSSGAGKSTIVNLLTRFYEADKGSIFLDNINLKKYKLSNLRNQIALVSQNIYLFNDTIANNIAYAKKKIYSKYQIEKAAYMAYAMDFIIKMKHGLNTIIGENGTLLSGGQRQRIAIARALLRDCPILILDEATSALDIESEIKVQKAIDKIRKNRTSLVIAHRISTIKKSDMILLVEKGKIIEYGNHNELIEKKGVYAQIYRLQLDQ

SEQ ID NO: 24949 - protein, 386 aa, Wigglesworthia glossinidia endosymbiont of Glossina brevipalpis
MKFPIYLDYASTTPVDQRVYEEMIKYLKYDGIFGNPSSRSHIYGWKAEQAVEKSRKNISNLINSDAREIIFTSGATESNNLAIKGSINFNKTEKLHVISGETEHISVLDTLYNLQENGIELTLLSPNKNGIIHPKRLEEKIKKNTVLVSLMHVNNETGIIQDIESFCKICKSRKILFHVDATQSIGKIPIDVSLIPIDLMSFSSHKIYGPKGVGALFLRRKPPIYFKAQIHGGGQEKNFRSGTLPVHQIVGMGKACAILKDEMNLENKKIKLLRDKFLSGIKEKNNILLNGDPINNIPNILNITFLGIDSKTLIILLKDLAISSGSACSSEKENSSHVLKAMGLNHFLSKSSIRFSIGRFTSKEDISFAINQINNTIKILKENSKY

SEQ ID NO: 24950 - protein, 549 aa, Wigglesworthia glossinidia endosymbiont of Glossina brevipalpis
MEKQKKITSNFIYKIIHKDLFINKYKYIHTRFPPEPNGYLHLGHAKSICLNFNLAKIFKGKCNLRFDDTNPNTKHEKYINKIKNDILWLGFKWDGKTRYSSDYFDQIYNFAIKLIKKNLAYVEELSLKEVRKNRGSLTRKGKQSPYRNRKIKENLILFEKMKNGEFKEGSACLRAKINMQSSCVLMRDPILYRIRFKNHHRTKNKWCIYPTYDFSHCISDSIENITHSLCTLEFQENKKLYNWILKKVSTDFVPKQYEFSRMNLEYSIMSKRKLKILIEKKLVSGWNDPRIPTLAGIRRRGYTASSIREFCNRIGITKQESTISESMLEFFIKKELNFNSYRLMAVINPLLLIIENFPDEYEEKIEISNHPYNNMGKRTVIFNKKIYIERSDFMENPKLEYKRLSLGKKVKLRNSYIIKANRIEKNKHGYITKVYCNYYSNIKKNNYKFSKLGIIHWVSEKNNIPAEFRFYDRLFTHPNPEKLDNFLSFFNKDSLIIKHGFIEKNIKKHHINYPVQFERIGYFFADKFNYKKDYPVFNLTAKLSSYLNR

SEQ ID NO: 24951 - protein, 645 aa, Wigglesworthia glossinidia endosymbiont of Glossina brevipalpis
MEILMGNIIGIDLGTTNSCVAIIENGKVKVIENSEGDRTTPSIIAYTEENEILVGQPAKRQSVTNPKNTFFAIKRLIGRKFTDHEVQRDVNIMPYKIVSSENGDVWLNVKNQKVAPPQISAEILKKMKKTAEDYIGKSITEAVITVPAYFNDTQRQATKDAGKIAGLDVKRIINEPTAAALAYGLDKKTGNRIIAVYDLGGGTFDISIIEIDDVDGEKTFEVLSTNGDTHLGGEDFDSRLINYLVNEFKKEQGIDLRNDPLAMQRLKESSEKAKIELSSVHQTDVNLPYITADSSGPKHMNIKVTRAKLESLVEELIYKTLEPVKTSLKDAKLKIIDIKDVILVGGQTRMPLVQKKVSDFFGKEPRKDVNPDEAVAIGAAVQGGVLAGDVKDVLLLDVTPLSLGIETMGGVMTTLISKNTTIPTKHSQIFSTAEDNQSAVTIHVLQGERKRSIDNKSLGQFNLDGIAPAMRGMPQIEVTFDIDADGILHVSAKDKNSGREQKITIKASSGLSENEIDKMLKESEANAELDIKFEELVKTKNQADHLLHSTRKQIKEAKNLPLEKKTEIEKCINELELSIKGEDKKDIEIKIQSLIQISSCLVDFSKNKENLNKEDIIKTNKKENNNKTNDDVVDAEFEEIKDKKN

SEQ ID NO: 24952 - protein, 327 aa, Wigglesworthia glossinidia endosymbiont of Glossina brevipalpis
MPNNDVPSNFDFIYYGKQVLDLEKNGICKLKKCINRDFQKIGELLLKCNGKIATMGIGKSGHIARKLSSTFSSTGSPSFFIHPTEAGHGDLGSLCSNDIVIAISNSGESKEIISLIYYLNNFNITYISITGNPLSTMSKLSKINLSIKVTKEACSLGLSPTTSSTAALVMGDALAISLSIAKGFNIKNFSFLHPGGILGKKLSLRVNDIMRKKIDVPIVYSTYSIFDTIVKITKKNFGIAVILNNNKTIKGVFNFKNLKKIYKLNLNLNDSISTVMNINFNQINPDILVEKAFKIMQSIKTDYLLVSIKNYFSGIIHINDIKKYGFY

SEQ ID NO: 24953 - protein, 106 aa, Wigglesworthia glossinidia endosymbiont of Glossina brevipalpis
MKNSIEKIKEQIKKNKIILYMKGSPENPKCGFSSKVARILCESNFRFAYVDVISNPHIREKLPEFSNWPTFPQLWVNGSLVGGCDIVTKMHEKGELVPFINKEINK

SEQ ID NO: 24954 - protein, 305 aa, Wigglesworthia glossinidia endosymbiont of Glossina brevipalpis
MKIFSGSSNIKLSNKIANLLGISISNSEINKFQDGEINIKINENVRGEEVFIIQSMCFPVNDNFMELVITADALKRASAKKIIAVIPYLGYSRQDRRVYNEQVPITAKMIANLLAASGICHVIIVDLHCEQIQGFFDIILDSITTENIFFNDIISQKLNQPVLVSPDFGGMKRVRRISKMLNHKDIVIIEKYRPKLNESEVIKVIGDVNNRDCILLDDIIDTASTLCKSALCLKKLGASKIICYATHPVFSKKSYKNIKNSEIDEFIVCDSIPLNVNIKCFNKIRVLTISKILADHIFSISKLNK

SEQ ID NO: 24955 - protein, 246 aa, Wigglesworthia glossinidia endosymbiont of Glossina brevipalpis
MLLIENLIVKIGDQNILNNLNLEIKKGEIHAIMGPNGSGKSTLSDTLAGKKNCIICSGRILFKKIDISQLNPEERAGNGIFIAYQYPVEIPGISNKRFLHASVNAIRKYKNKPPLDMFNFSEIFKKNISLLNMPENLIHRSLNTGFSGGEKKRNEILQMMMIKPDLCILDEIDSGLDIDSLREITNCINLLKSKKRSFIIITHYQRILNYINPDYVHILHKGNIIQSGKFDLVKQLEKHGYGWIKK

SEQ ID NO: 24956 - protein, 337 aa, Wigglesworthia glossinidia endosymbiont of Glossina brevipalpis
MNLTDNAVIFVKGGNGGKGCVSFRREKYIPKGGPDGGNGGNGGNVWIYSDKNTHDLYHCLVRKNFIAEDGENGKKNNSSGKNGKDVIIKVPIGTNIFFIKNSENIIFGHTRFHNQKFLVAKGGVRGLGNNYFKSPTNRTPMESTLGKLGESFKIKLDFVFLADVGLFGYSNTGRSCFMRSISNVKPKISFYPFTTLFPYIGSLNFLNKDIKFVDIPSFIEGKKKNNLRNRFLKHLQNCRLLLHFINLDVKNVKKTINKEKINIKILKSFRNLFLKPIWLIINKTDININSNIFFKQAQFVSNSLGYEKKFFFISLNDFISIKILINKILLFLEENKR

SEQ ID NO: 24957 - protein, 231 aa, Wigglesworthia glossinidia endosymbiont of Glossina brevipalpis
MNKLLLVDDDKELISLLKELLEKEGFEIQVAYNGEQALSKLNDTIDLLLLDIIMPKKNGIDTLKEIRKNKQHLPIIMLTARGSELDKIIGLELGADDYISKPFNKRELVARIKAILRRSYLFNQKILDNKSTIFVDLLNINPGRQEAYFNNIYLNLTGTEFSLLFLLAKNLGNVVSREYLSKEILGKKLNPFDRAIDMHISNLRKKLPSRKDSRPWFKTLRGKGYLMVSIT

SEQ ID NO: 24958 - protein, 545 aa, Wigglesworthia glossinidia endosymbiont of Glossina brevipalpis
MCSIFGILNIKNNSISLRKKALKCSNLMKHRGPDSNGIYCDEDVILVHERLSIIDVKSGNQPLFNNSKTNVLIMNGEIYNYEEIKKNLIHDYSFNTNSDNEVVLALYKKFGLNFLNKLNGMFAFILYDIEKKIYLIGRDHIGMIPLYMGYDCDNNLYISSEMKALIPVCNYIKEFPIGSYLCNLNKKIIKYYKRNWFEFDSIKNCLLSYKKIKHSLKKSVLNHLKSEVPFGILLSGGLDSSIIASIASKELNYKNLNKKLKSFSIGLENSPDLHSSRICARYLNTDHCEVKFTEQDGLDVIKKVIYYVETYDITTIRASIPMYLISQKIKSSGIKMILSGEGADEIFGGYLYFHNAPSEKDLHDELVRKLKSLHIYDCARANKSMLAFGIEARFPFLDKKFLDVAMRINPKHKMCNKNRIEKYILRKSFINYLPNNILWRQKEQFSDGVGYKWIDSIKNFSKKIISDKKFNNAIHKFPYNTPLSKEEYLYREIFENFFPLPSAAECVPQEKSIACSSEIASKWSKYRNLNFDPSGRSLDIHISKN

SEQ ID NO: 24959 - protein, 815 aa, Wigglesworthia glossinidia endosymbiont of Glossina brevipalpis
MRVLKFGGTSISSLKCFSKVVNIIKKNYKKDQIAVVLSAPKKVTDNLFYMIEKSCQTKDIKEIFNNTKDIFFYLIKSLFDSNENYYYLNIYNFIELKFNRLLYLLNIVFNLKFCPNSINAEIVCMGEIISVKLMELYLKNKNIDVFVIDPKKIFLSKGQYLESFIDIKESERRIKKINFPKNKVILMAGFIAKNKYGELVALGRNGSDYSATALAACLKANVCEIWTDVDGIYTGDPNKIKNTKLINKLSCKEAISLSYLGAEILHKRSIFPILEFNIPCIIKNTNNSNSYGTSILNIVNDEKEIIKGITFLKDIAMISIFICYNIKTINIYNRILVAFKKSNIKIIFMMQSSSESNINIFIFQNNLSESKCIIEYEFCFEINNKLFESIHYKSDLFILSMIGSNIFKNKNIFINIVKFFNFIHKKMISILYGGYLSNAFSVVLESCNIVNDLNNMHKIFFEKKNFIEIFIIGNKNIKNCLFNLFYKKKFFFKKKHIELKICGISDAKKLLINENGINLKHWKYNLSNSKIIFDSDIIIECLKKNNFLNPVIVDCTQNKIISKKYADFLIQGFHIVTSNKQPNISSIDYYKKIRNMSIISNKKFLYNANFNTQFPIIENIKSFLNLSENKNYYFSGVLSSAISFIFERLNKGMSFYKIIVLALQSGFSLKDIYHAILGKDSAENLLIIARELGYNIEIKDIEIKPIISKKFLKKNIKKEIFNISISVDNKFKKKLQKAKIQGNVLNYVSNIKNGKFIIKIQEASPNNPLFKVKSKENIFIFYTNSHKSFPIILKSFSYKKNIYIFNILNDLLKLT

SEQ ID NO: 24960 - protein, 411 aa, Streptomyces griseoruber
MTRALVVGGGIAGPVAAIALQKAGLDPVVYEAFPRTADTAGNFMNIAPNGLDALACVGLAEPVRRLGFTTPAIAFYRADGRRLTEDVPVEVQAGPGAVIQTLRRADLYRTLREEVSRRGIPVEYGRRLVDARASGGRVSARFADGTHAEGELLVGADGIRSRVRKVIDRQAPDPRYLGTVNAFGVAPGQPLRGRPGVLRMYFGRRSFFMSAQHPDGDVWWFANPPRPAEPDAAELRRPDERWQEEFVELFRQDGMPAVDIVRASTQFSVPSANYDLPRVPHWQRDGMVLVGDAAHAVSPTAGQGGSVAMEDAVVLAKCVRDAPGVDAALAAYERVRRARVERIVAQGKRNVDGNLSGPLGRVVRDFFIRRAFRDIAVKGPERSPVWMLGHHIDWDTPEAAAPGSRRAGTGR

SEQ ID NO: 24961 - protein, 218 aa, Rosa rugosa
NGLLKKAYELSILCDAEVALIIFSNRGKLYEFCSSSSILKTLERYQKCSYGAMEVNEPAKELEQSSYREYLKLKTRCESLQRTQRNLLGEDLGPLNTKELEQLERQLESSLKHVRSTKTQYMLDQLSDLQSKEHMLIEANRDLTMKLDEINSGTQLRQTWERGHAHQTMLYGTQHAQTQGLMFQPLDCNPTLQIGYNAVGSQQMTAATPAPTQPVNGF

SEQ ID NO: 24962 - protein, 142 aa, Campylobacter coli
MTQEQIQIIKDCVPILQKNGEDLTKEFYKIMFNDYPEVKPMFNMEKQASGEQPKALAMAILMAAKNIENLENMRSFVDKVAITHTKLNVKEEHYPIVGACLLKAIKVVLYADETTLKAWEEANKAIAQFYIDIEKEIYAKAK

SEQ ID NO: 24963 - protein, 497 aa, Pseudomonas putida
MAGSSSPSPTRRLLLPVTAMTRPPWRWAAALTTWPRRCAMTCSPPTPARSAAKAAPACTTCASTTSAVSWWRCSMANPTKCAAPCWRRRHNMTEPTLADALIIDAVRTPIGRYAGALSGVRADDLAAIPLKALIQRHPELDWKAIDDVILGCANQAGEDNRNVAHMASLLAGLPMEVPGTTINRLCGSGLDAIGNAARALRCGEAGLMLAGGVESMSRAPFVMGKSEQAFGRAAELFDTTIGWRFVNPLMKAAYGTDSMPETAENVAEQFGISRVDQDAFALRSQHKAAAAQACGRLAQEIVPVEIPQRKGPAKRVEHDEHPRGDTTLEQLARLGTPFREGGSVTAGNASGVNDGACALLLASSAAARRHGLKARGRIVGMAVAGVEPRLMGIGPVPATRKVLELTGLSLADLDVIELNEAFAAQGLAVLRELGLADDDPRVNRNGGAIALGHPLGMSGARLVTTALHELEATAGRYALCTMCIGVGQGIAMVIERL

SEQ ID NO: 24964 - protein, 520 aa, Pseudomonas putida
MNWTAISMFMVFVCFTLLVTRWAALRTRSASDFYTAGGGLTGMQNGLAIAGDMISAASFLGISAMMFMNGYDGLLYALGVLAGWPIILFLIAERLRNLGKYTFADVVSYRLAQTPVRLTSAFGTLVVALMYLVAQMVGAGKLIELLFGISYLYAVMLVGVLMVAYVTFGGMLATTWVQIIKAVMLLSGTSFMAFMVLKHFGFSTEAMFASAVAVHAKGQAIMAPGGLLSNPVDAISLGLGMMFGTAGLPHILMRFFTVSDAKEARKSVFYATGFIGYFYLLLIVIGFGAIVMVGTEPSYRDATGAIIGGGNMIAVHLAQAVGGNLFLGFISAVAFATILAVVAGLALSGASAVSHDLYACVIRQGKATEQEEMRVSRIATLLIGLLAVLLGLMFESQNIAFLSGLVLAVAASVNFPVLLLSMFWKGLTTRGAVCGSMAGLASAVLLVVLGPAVWVNVLHHEKALFPYSNPALFSMSLAFLSAWVFSVTDSSERASEERGRYLAQFIRSMTGIGAAGASKH

SEQ ID NO: 24965 - protein, 376 aa, Pyrococcus horikoshii OT3
MALSILFLSIASLTLSSSLIIDHYFHLSFLRNPLKSQSGGGKMKPKVFITREIPEVGIKMLEDEFEVEVWGDEKEIPREILLKKVKEVDALVTMLSERIDKEVFENAPKLRIVANYAVGYDNIDIEEATKRGIYVTNTPDVLTDATADLAFALLLATARHVVKGDRFVRSGEWKKRGVAWHPKWFLGYDVYGKTIGIIGLGRIGQAIAKRAKGFNMRILYYSRTRKEEVERELNAEFKPLEDLLRESDFVVLAVPLTRETYHLINEERLKLMKKTAILINIARGKVVDTNALVKALKEGWIAGAGLDVFEEEPYYNEELFKLDNVVLTPHIGSASFGAREGMAELVAKNLIAFKRGEIPPTLVNREVIKIRKPGFE

SEQ ID NO: 24966 - protein, 280 aa, Prunus armeniaca
EKSAKRKRKNQYRGIRQRPWGKWAAEIRDPRKGVRVWLGTFNTAEEAARAYDSEARRIRGKKAKVNFPDETPRSSAKRSVKANPQKMQPKTNMNAIQPNLNQNINFVNDPNQDYYNAMGFLDEKPPTNNFGFMSTFPANDVALKSSTPSDAVPLYFGSDQGSNSFDCSDFGWGEQGSKTPEISSVLSSVMEESDDSLFLEDASPTKKLRSNPEDLVPVQDNAGKTLTDELSAFEMKYFQTPYLDGSWDASVDAFLSGDATQDGGNSVDLWCFDDLVGGGF

SEQ ID NO: 24967 - protein, 640 aa, Arabidopsis thaliana
MVVKRKLNCGGSNGFDFPNIPKAPRSSRRKVSGKRSDDESEICAIDLLASLAGKLLEESESSSTSTYASEADNLDHLGGLIKQELEDGYTTKPCKSEFFDPGNPASKSTSENTSVTCLPFSSFENDCILEQTPVSDCKRASGLKSLVGSITEETCVVNEDAGSEQGANTFSLKDPSQLHSQSPESVLLDGDVKLAPCTDQVPNDSFKGYRNHSKLVCRDDDENYCKYYKFSDKCKSYRPLSRVGNRRIMQSVRAISKLKCFEDTRTDGRLKALYRKRKLCYGYNPWKRETIHRKRRLSDKGLVVNYDGGLSSESVSNSPEKGESENGDFSAAKIGLLSKDSRVKFSIKSLRIPELVIEVPETATVGLLKRTVKEAVTALLGGRIRIGVLVQGKKVRDDNNTLSQTGLSCRENLGNLGFTLEPGLETLPVPLCSETPVLSLPTDSTKLSERSAASPALETGIPLPHQDEDYLINLGNSVENNDELVPHLSDIPADEQPSSDPRALVPVLALESDALALVPVNEKPKRTELSQRRTRRPFSVTEVEALVSAVEEVGTGRWRDVKLRSFENASHRTYVDLKDKWKTLVHTASISPQQRRGEPVPQELLDRVLGAHRYWTQHQMKQNGKHQVATTMVVEAGSSM

SEQ ID NO: 24968 - protein, 538 aa, Sphingomonas paucimobilis
MTARGLTVEKPARAEGPTVRDAVMTLLRDLGMTTLFGNPGSTELPLFRDMPQDFRYILGLQESVVVGMADGFAQMSGNAAFVNLHSSAGTGHALGNIFTAFRNQTPLVITAGQQARSIFPYDPFLYAERATEFPQPFVKWTCEPARAEDVPLAILRAYHMAMQAPRGPVFVSVPIDDWDRACTPIDVSTVSQDVMASPALIGAAAEALDKARSPVIVAGAGVGRENARAALAKLAEAHKARVFVAPMAARAVFPEDHPLFAGFLPASREAVVSALKGHDLVLVLGAPVFTYHVEGFGPYVPEGASLIQIVDDPSVAARTPVGTAIIGNVADAIARLSAATSPAPPRAVPDAALPAPNVVGSGTAIEEALLMQQLATLRPKGIIISEEAPSTRGPMHDHFPIRLEDEFMATASGGLGFALPAAVGAAIAQPDRTVLCLLGDGSSMYSIQGLWTAAEMGLDVRFLIVNNGGYAALDQFGALFDIEVVGSKLPGLDFVKIAEGMGVPGARVSTVDALDEAIRELFAGKGPRLLEVVVQRPA

SEQ ID NO: 24969 - protein, 401 aa, Corynebacterium glutamicum
MTNRIVLAYSGGLDTTVAIPYLKKMIDGEVIAVSLDLGQGGENMDNVRQRALDAGAAESIVVDAKDEFAEEYCLPTIKANGMYMKQYPLVSAISRPLIVKHLVEAGKQFNGTHVAHGCTGKGNDQVGFEVGFMDTDPNLEIIAPARDFAWTRDKAIAFAEENNVPIEQSVKSPFSIDQNVWGRAIETGYLEDLWNAPTKDIYAYTEDPALGNAPDEVIISFEGGKPVSIDGRPVSVLQAIEELNRRAGAQGVGRLDMVEDRLVGIKSREIYEAPGAIALIKAHEALEDVTIERELARYKRGVDRRWAEEVYDGLWFGPLKRSLDAFIDSTQEHVTGDIRMVLHAGSITINGRRSSHSLYDFNLATYDTGDTFDQTLAKGFVQLHGLSSKIANKRDREAGNN

SEQ ID NO: 24970 - protein, 415 aa, Tradescantia virginiana
TTPISIEDVRREVKILKALSGHKHLVKFYDACEESLNVYLIMELCEGGELLDRILSRGGKYTEEDAKAIVMQILNVVAYCHLQGVVHRDLKPENFLFINRDENAPMKLIDFGLSDFTRPDERLNDIVGSAYYVAPEVLHRSYSMEADIWSIGVITYILLCGSRPFWARTESGIFRSVLRADPNFDDSPWPTASPEAKDFVKRLLNKDYRKRMTAAQALSHPWLRDKEPQIPLDILIYKQTKLYLRATPLKRAALKALSKALTEDELVYLRLQFKLLEPNNDGRVSLENFHTALAQNATEAMKESRVLDILNSLESLAYRRMDFEEFCAAAISCYQLEALEHWEQIASTAFEYFEQDGNRVVSVEELAQDLNLPQNAYAILKDWIRQSDKKLSFLGYTRYTRYLHGVTPRPNTRQH

SEQ ID NO: 24971 - protein, 246 aa, Malus x domestica
MGRGRVELKRIENKINRQVTFAKRRNGLLKKAYELSVLCDAEVALIIFSNRGKLYEFCSSSSMLKTLDRYQKCSYGAVDQVNRPAKELESSYREYMKLKGRYESLQRTQRNLLGEDLGPLNTKELEQLERQLEGSLKQVRSTKTQYMLDQLSDLQNKEQLLIEANRDLTMKLDEISSRNQLRQSWEGGDQGMAYATQHHHAQSQGFFQPLDCNPTLQMGYSAVGSEQMSATTNAQQVNCFIPGWML

SEQ ID NO: 24972 - protein, 373 aa, Aspergillus niger
MMEYPPQYQQPHGQHPHASSHITAPYQTAPQSAGSTVGSMTSPTNPQARMQQAHATHQASPIVPSQSHYQPAQNAPGSVHQQMNFPQSYGVTTAMPQAYGISPTQAAAMATAAASGQFYPLHQDSMAGQMAPGPRGSPRMAGVQVKSDRNPRSPPQIPGQMPSMGSQVQMSQNAQMQQRRMSHVSSPHVQNAQPLINHAGRPSVPPSMPPPPQPPVQQSQPSPDMVAGAAEEPPLYVNAKQFHRILKRRVARQKLEEQLRLTSKGRKPYLHESRHNHAMRRPRGPGGRFLTADEVAAMGKKQASGSTTAGLEGADDYAVKPPGDNPPSAQKRKSSDVNDDTINSSKKTKTSAKPSTSADESENESAELSDEDG

SEQ ID NO: 24973 - protein, 161 aa, Cichorium intybus x Cichorium endivia
MGFSEKQEALVKESWEVMKQDIPALSLYLYAMILEIAPEARGLFSFLKDTNVIPQNNPKLKSHAVKVFKMVCESAIQLREKGEVVVSGSTLKYLGSVHLEKGIVDPQFEVVKEALIRTVAKAMGEKCSEEMKSAWSEAYDELADAIKTEMKKEAAETQTHI

SEQ ID NO: 24974 - protein, 403 aa, Sinorhizobium meliloti
MLTQKTKDIVKATAPVLAQHGYAIIQHFYKRMFQAHPELKDIFNMAHQERGEQQQALARAVYAYAANIENPESLSAVLKDIAHKHASIGVRPEQYPIVGEHLLASIKEVLGDAATDEIISAWAQAYGNLADILAGMESELYGRSEERAGGWAGWRRFIVREKNPESDVITSFVLEPADGGPVADFEPGQYTSVAVQVPKLGYQQIRQYSLSDSPNGRSYRISVKREDGGLGTPGYVSSLLHDEINVGDEPKLAAPYGNFYIDVSATTPIVLISGGVGLTPMVSMLKKALQTPPRKVVFVHGARNSAVHAMRDRLKEASRTYPDFKLFIFYDEPLPTDIEGRDYDFAGLVDVENVKDSILLDDADYYICGPVPFMRMQHDKLLGLGITEARIHYEVFGPDLFAE

SEQ ID NO: 24975 - protein, 335 aa, Schizosaccharomyces pombe
MQQTYKPNTSALKDGAPKATVDQKQLLPCKYRVGRVLGGGTYATVREAVHIETNKMYAAKIMNKKMMEKKQDFVKNEIAILKRVSYEHPNILHLVDFFETVNNLYLITELATGGALFDRICAKGSFYEADAAALMRTTTSAVKYLHDNGIVHRDLKPENLLYRSKDPNSDLLIADFGLSHFYEDSQYYMLMTACGTPEYMAPEVFRRTGYGKPVDMWAIGVITYFLLSGYTPFARPSQVEVIEAILANEYTFNDPCWSGISETAKDFIKKCLENDPSKRLTAADALKHPFLSENGPATSNLLPNVRENFNARKTFRTAYNAVRAFNTWKKLENKH

SEQ ID NO: 24976 - protein, 614 aa, Lactobacillus sanfranciscensis
MASNKVIGIDLGTTNSAVAVMEGGKPKIITNPDGSRTTPSVVAFKNGEIQVGEVAKRQEITNPNTVRSIKSHMGEEGYTVDIDGKKYTPQQISAMILQYIKGYAEDYLGDTVSEAVITVPAYFNDAQRQATKDAGKIAGLDVKRIINEPTAAALAYGLDKQDKDEKILVYDLGGGTFDVSVLELGDGVFQVLSTNGDTHLGGDDFDQRIIDYLVAEFKKENGVDLAQDKMALQRLKDAAEKAKKELSGVNQTEISLPFIASNDNGPLHLQTTLTRAKFNELTHDLVEKTKIPFENALKDAGLSTSDIDEVILNGGSTRIPAVQEAVKEWSGKEPNHSINPDEAVALGAAVQGGVLTGDVKDVVLLDVTPLSLGIETMGGVMTKLIEKNTTIPTSKSQTFSTAADNQTAVDIHVLQGERPMAADNKSLGRFQLTDIPAAPRGIPQIEVTFDIDKNGIVNVSAKDKGTGKEQKITIKDSNGLSDEEIEKMMNEAKANEEADKKKKEEVDLNNEVDQLIFQTDKTLKDVEGKVSEDEIKGVKDAEEELKKAKADGNLDDMKAKKDTLNEKVQAVAVKLYQQQQSQGGEAGAANGDASKKDDNTVDGDFHEVHDDDKK

SEQ ID NO: 24977 - protein, 548 aa, Escherichia coli K12
MNGAQWVVHALRAQGVNTVFGYPGGAIMPVYDALYDGGVEHLLCRHEQGAAMAAIGYARATGKTGVCIATSGPGATNLITGLADALLDSIPVVAITGQVSAPFIGTDAFQEVDVLGLSLACTKHSFLVQSLEELPRIMAEAFDVACSGRPGPVLVDIPKDIQLASGDLEPWFTTVENEVTFPHAEVEQARQMLAKAQKPMLYVGGGVGMAQAVPALREFLAATKMPATCTLKGLGAVEADYPYYLGMLGMHGTKAANFAVQECDLLIAVGARFDDRVTGKLNTFAPHASVIHMDIDPAEMNKLRQAHVALQGDLNALLPALQQPLNQYDWQQHCAQLRDEHSWRYDHPGDAIYAPLLLKQLSDRKPADCVVTTDVGQHQMWAAQHIAHTRPENFITSSGLGTMGFGLPAAVGAQVARPNDTVVCISGDGSFMMNVQELGTVKRKQLPLKIVLLDNQRLGMVRQWQQLFFQERYSETTLTDNPDFLMLASAFGIHGQHITRKDQVEAALDTMLNSDGPYLLHVSIDELENVWPLVPPGASNSEMLEKLS

SEQ ID NO: 24978 - protein, 171 aa, Pringlea antiscorbutica
KLWPNAKYVSSIMTGSMLPYLKKLRHYAGGLPLVSADYGSTESWIGVNVDPHFPPEDVSFAVIPTFSYFEFIPLYRQQNQQDICSDGDFVEEKPVPLSQVKLGQEYELVLTTFTGLYRYRLGDVVEVTGFHKGTPKLSFIYRRKLILTINIDKNTEKDLQRVVDKASQLLS

SEQ ID NO: 24979 - protein, 605 aa, Dianthus caryophyllus
MDTKIGSLDTCPPQNSDICCPNKTTTTATHLHAPPTTHAPPESTLGRHLARRLVQIGVNDVFSVPGDFNLTLLDHLLAEPGLNLVGCCNELNAGYAADGYARSRGVGACVVTFTVGGLSVLNAIAGAYSENLPVICIVGGPNSNDYGTNRVLHHTIGLPDFSQEMRCFQTVTCYQAVVNNLEDAHEQIDTAISTALKESKPVYISVSCNLPAIPHPTFSREPVPFSLSPRMSNKMGLEAAVEAAAEFLNKAVKPVMVAGPKLRVAKACNAFVELVDASGYATAVMPSAKGLVPEHHSHFIGTYWGAVSTAFCAEIVESADAYIFAGPIFNDYSSVGYSLLLKKEKAILVQPDRVVIGNGPAFGCVLMKDFLTELAKKIKKNTTAFENYTRIFVPEGQPLKCEPKEPLRVNVLFQHIQKMLSSDTAVIAETGDSWFNCQKLKLPKGCGYEFQMQYGSIGWSVGATLGYAQAVPEKRVLAFIGDGSFQVTAQDVSTMLRCGQKTIIFLINNGGYTIEVEIHDGPYNVIKNWNYTALIDAIHNGEGKCWTAKVFCEEELVNAIKTATGPKADCLCFIEVIVHKDDTSKELLEWGSRVSAANSRPPNPQ

SEQ ID NO: 24980 - protein, 420 aa, Porphyra purpurea
MAKVCPVHGGLSELVNRVVASLTTSELMPKIVVNGTDYTTLHRIADGTLSPLTGPMTKTDYDNVLVKKGIERDGKMWAWTIPLSLPVTAEEAKSLKAGEPALLVNEAGDAFGTLDVDATFSWDKPAFLKAVYGTDRTDHPGARLWLDDARVDLVGGAISMLAHDENRPFKDRIMYPTSMRALLQEQGYGASVAFQTRNPLHRAHEYALVYGAEKLLKEVGDTAKVGVFLNPLVGQLKGDDVPAATRMETYIKLIDGGVLGEGDMDEALWKSKGQSLREQVRLAGLHMRMFYGGPSEAVMHAIYRQNMGITHFIIGRKHADAPYDDKSAIWGDFDAQEIFEKLEGDLQIKTVNVGFAAYFEELGKVSLCSENKGKTTVSISGSKMREMLNSGTMPDSRVMRPATAQVLMDYYAAKNKEASA

SEQ ID NO: 24981 - protein, 536 aa, Haemophilus ducreyi 35000HP
MNSNRSLLVMGLLLVSFLIFTQWQQDFNPEIQAQKQAQQQSRDVPHATNTANAITEHMTKGKTITVESDVLRLVIDTLGGDVIESDLLAHKASLDSTDPLKLLTTEGLIYTAQSGLVGKNGIDTHIGRAPYQVTQDHFTLAKGQNEIVVPMTFEQDGVMYTKTFTLKRGSYDVAVSFDIQNNSANTIEVQPYGQIKHSLLDSSGNLAMPTYTGGAYSSSETNYKKYSFDEMTKANLNIDTKGGWVALLQHYFVSAWVPNQDASNTLYSRTHNGVATIGYRGPITTVKPNTKTTITSQLWTGPKDQKEMAQAATHLELTVDYGWAWFIAKPLFWLLIFIHSIIGNWGLAIMGVTLVVKSLLYPLTKAQYTSMAKMRMLQPKLQELRERYGDDRQQMSQEMMKLYKQEKVNPMGGCLPLILQMPIFIALYWTFMEAVELRHAPFFGWIQDLSAQDPYYIFPVLMGLSMFLLQKMSPTAVADPTQLKVMTFMPVIFTVFFLWFPSGLVLYWLTSNCITIVQQWLIYRNLEKKGLHTRKK

SEQ ID NO: 24982 - protein, 634 aa, Haemophilus ducreyi 35000HP
MGKIIGIDLGTTNSCVAVMDGDKPRVLENAEGARTTPSIIAYTDKETLVGQPAKRQAITNPKNTLFAIKRLIGRRFTDNEVQRDIEIMPFEIAKADNGDAWVNVKGDKLAPPQISAEVLKKMKKTAEDFLGEPVTEAVITVPAYFNDAQRQATKDAGRIAGLEVKRIINEPTAAALAYGLDSKKENQIIAVYDLGGGTFDISIIEIDNFDGEQTFEVRATNGDTHLGGEDFDNRVINYLVEEFQKEQGVDLRNDPMAMQRVKEAAEKAKIELSSAQETEVNLPYITADATGPKHLNIKVTRAKLEALVEDLVSRSLEPLKTALADAGLSVSEINDVILVGGQTRMPLVQKKVADFFGKEPRKDVNPDEAVAIGAAVQGGVLAGDVTDVLLLDVTPLSLGIETMGGVMTSLIEKNTTIPTKKSQVFSTAEDNQSAVTIHVLQGERKRAADNKSLGQFNLEGINPAPRGMPQIEVTFDIDANGIINVSAKDKNTGKEQQIKIQASSGLSDEEVEQMVRDAEANAESDRQFEELVQTRNQADSIAHATRKQISEAGDALTAEDKAKIETALAELETAAKGEDKAEIEAKIEAVIKASEPLMQAAQAKAQTNQAGEQQSSAKDDSVVDAEFEEVKENK

SEQ ID NO: 24983 - protein, 391 aa, Haemophilus ducreyi 35000HP
MKFIDEALIRVEAGDGGNGCVSFRREKYIPKGGPDGGDGGDGGDVYLIADENLNTLIDYRFEKRYAAGRGENGRSAGCTGHRGNDITLRVPVGTRAIDNDTKEVIGDLTQHGMKMLVAKGGYHGLGNTRFKSSVNRAPRQKTNGTAGEKRDLLLELMLLADVGMLGLPNAGKSTFIRSVSAAKPKVADYPFTTLVPSLGVARVGSDRSFVVADIPGLIEGAAEGAGLGIRFLKHLERCRVLIHLVDIMPIDESDPVQNITVIESELYQYSEKLADKPTWLVFNKIDTIGEEIAAEQAKNIAEQIGWQGDYYLISAATGQNVQQLTRDIMDFIEANPRQIIEENKALDEVKFKWDDYHQQAMQHPVEEDWSDFDDEWSEEDEEGVEIIYERG

SEQ ID NO: 24984 - protein, 107 aa, Haemophilus ducreyi 35000HP
METIDKIKQQINENPILLYMKGSPKFPSCGFSARAVEAIIQCQVPFGYVDILTNPDIRSELPKFANWPTFPQLWVEGELIGGCDIILEMFQKGELHTLLKETATKHG

SEQ ID NO: 24985 - protein, 278 aa, Haemophilus ducreyi 35000HP
MNNNQRAFLKWAGGKYRLSIEIRKFLPPQSTQGVCFVEPFVGAGSVFLNTHYDRYLLADINSDLINLFNTIKQDVERYITQSKLIFLSPNANTALYYYAKRQEFNHSTDIFHRSVLFLYLNRFGFNGLCRYNKKNEYNVPFGRYKKPYFPEKELRFFAAKAQKAQFICADFEHIFEYIYQNPDNYIVYCDPPYAPLEQESNFTHYASGGFSLAQQELLVKHAKQAQQKQIPVLISNHDTAFTRKIYHGAQIKKIKVQRSIGKNAKSRIKVNELLALFS

SEQ ID NO: 24986 - protein, 856 aa, Haemophilus ducreyi 35000HP
MNFEKFTTKLQEALNEAQSLAVAKDNAYIEPVHLLYALVKQQDGAIAPLFTTLNVSTQTLINELELILNQLPQVTGTTTQASQQLIRLLNQTAKLAQQFNDSFISSELFLLAALDDHGSLGKLFKAFGLTKENVTQAISQMRGGESVNNQNAEQTRQALQKYTIDLTERAKTGKLDPVIGRDEEIRRTVQVLQRRTKNNPVLIGEPGVGKTAIVEGLAQRIVNGEVPEGLKNKRVLSLDMGALIAGAKYRGEFEERLKAVLNELAKEEGQVILFIDEIHTMVGAGKTDGAMDAGNLLKPSLARGELHCVGATTLDEYRQYIEKDAALERRFQKVLVDEPSVEDTIAILRGLKERYEIHHHVQITDPAIVAAATLSHRYISDRQLPDKAIDLIDEAASSLRMEIDSKPEPLDKLERRIIQLKLERQALQKEKDEASRQRLAKLDEEMTAKAQEYSALEEVWKAEKSALLGTQHLKTELENARIAMDQAKRADNFEKMSELQYGTIPALEKQLQDAIKREEENNDHHLLRTKVTEEEIAEVLSKATGIPITKMMEGEKEKLLRMEQVLHSRVIGQNEAVEAVANAILRSRAGLADPNKPIGSFLFLGPTGVGKTELSKTLANFLFDDENAIVRIDMSEFMEKHSVSRLVGAPPGYVGYEQGGYLTEAVRRRPYSVVLLDEVEKAHPDVFNILLQVLDDGRLTDGQGRTVDFRNTVVIMTSNLGAHLIQENAEITYLAMKEMVMSVVSQHFRPEFINRIDETVVFHPLDQQHIRAIANIQLQRLIRRLAERGYQVTISDTALDHISQAGFDSLFGARPLKRAIQQELENPLAQQILSGKLLPNNPVIIDYQDNHIIAKQ

SEQ ID NO: 24987 - protein, 475 aa, Haemophilus ducreyi 35000HP
MNNEMLLPLIAYLLFVFGVAFYAYRQRQGNSFLSEYYVGSRSMSGFVLAMTTAATYVGASSFIGGPGAAYKYGLGWVLLAMIQVPAVLLGLGALGKKFALLARKYNAVTINDMLLARYNNKLVVWLSSLALLLSFFAMMSVQFIGAGRLLEITLGIPYQTAIIIFAVTVGIYTFIGGFRAVVLTDTIQGVMMLLGTSLLLGGVIYAAGGIENAMNTLANINPQLIEPYGIDERPLDFTFMTSFWILVCFGLVGLPSLVVRSMAYKDSASLHKALVIGTLVVSLLMFGMHLAGVLGRAVIPDLTIPDQVIPTLILQTLPPVVAGIFLAAPMAAIMSSIDSLLIQSSSTLIKDLYLAIKPDAINNEKKLTYFSTITTLTFSVLLVFAALNPPDMLIWLNLLSLGGLEATFLWVIVLGLYWDKANALGAISSMAAGLCSYVVMATFKISIFSFHAIVPSLIISLVAFLIGNRFGKQAS

SEQ ID NO: 24988 - protein, 274 aa, Haemophilus ducreyi 35000HP
MFTPAEMAKIAEEGAVYKATKHQLYSFISAILAGGFIGLAFVFYTTTQTGATNVPWGLAKLVGGAVFSLGVIMCVVFGAELFTSSTLTAVAKATQRITWCQMCKNWCIVYTGNFIGGLSIVVLIWLSGQIMAANGQWGLTILNTAQHKIHHSWIEAFTLGILCNIMVCLAVWMANAGKSLTDKAFIMILPIALFVASGFEHCVANMFMIPMGILIAHFAGPEFWIMIGIDASQYADLDLSHFIINNLIPVTLGNIIGGVFFISLVQWFLYIRKH

SEQ ID NO: 24989 - protein, 507 aa, Haemophilus ducreyi 35000HP
MFGFDPTTTTFLIYIIGMILIGLIAYRVTNNLSDYILGGRRLGSFVTALSAGASDMSGWLLMGLPGAVYAGGLIEGWLAIGLTLGAYFNWKLVAGRLRSQTEYSGDALTLPEYFHNRFADKTRVIKILSAAIFLLFFAIYCASGVVAGARVFENLFGVPYQYAVWYGAIATILYTFIGGFLAVSWTDTIQASLMVFALILTPLFVVINLGGIEAMQQTIAQAQQLANHDYNNMFAGTTFLGILSLLAWGLGYFGQPHIVVRFMAAESVKSLENARRISMTWMVICLTGAIGIGYFGMAYFFAYPEQATVVNQNKEQIFIELAKILFNPWITGILLSAILAAVMSTLSAQLLICSSAITEDLYKGIIRPTATDKELIWLGRVMVLAVAALAIYIAQDPNSQVFALVKDAWAGFGSAFGPVLLFSLFWKRMNGFGAISGMLTGALIVYLWKYISPVVNLTEMYSIIPGFIAASFAIWLVSLITPPPSQAVVDTFERADNAFQQQINGTR

SEQ ID NO: 24990 - protein, 69 aa, Haemophilus ducreyi 35000HP
MSKATGIVKWFNSTKGFGFITPDLGGKDIFVHFSGIIGSNFRTLEEGAKVEFEVQDSDRGPSAVNVKAL

SEQ ID NO: 24991 - protein, 406 aa, Haemophilus ducreyi 35000HP
MKLPIYLDYAATTPMDERVVQKMMQYMTKDGIFGNPASRSHKFGWEAEEAVDIARNHIADLIGADSREIVFTSGATESDNLAIKGAAHFYQTKGKHIITLKTEHKAVLDTCRQLEREGFEVTYLEPESDGLLDLTKLVEAIRPDTILISIMHVNNEIGVVQDIKAIGEICRARKIIFHVDATQSVGKLAVNVQELKVDLMSFSSHKLYGPKGIGGLYVCRKPRIRIEAIIHGGGHERGMRSGTLPVHQIVGMGEAYRIAKEEMATEMPRLKALRDRLYHGFQAIEEVYVNGSMEEGKRVDTNLNMSFNFVEGESLMMALRDIAVSSGSACTSASLEPSYVLRAIGRNDELAHSSIRFSLGRWATEEEIDYTIELVKKSILKLRELSPLWEMFKEGIDLSKIEWNHH

SEQ ID NO: 24992 - protein, 311 aa, Haemophilus ducreyi 35000HP
MNYLTQATETLSLYSQAIDRLQHNLDQHFNQAVEMILNCAGRVVVAGIGKSGLVGKKMVATFASTGTPSFYLHPTEAFHGDLGMLKAIDIVLLISNSGETDDVIKLLPSLKNFGNQIIAMTGNRHSTLAQHADLVLDISVEREACPNNLAPTTSTLVTMALGDALAIALIKARDFKAHDFARFHPGGSLGRKLLNRVKDVMQTKLPITSPTADFSTILSVMNEGRMGLALIMQGEQLCGIITDGDIRRTLAQFGATSLSKTAEQIMTKKPKTILDSVYLAKAEEMMKALHIHSLIAVNDIGQVSGILEFSN

SEQ ID NO: 24993 - protein, 443 aa, Haemophilus ducreyi 35000HP
MSATILESLPLGQKVGIAFSGGLDTSAALLWMRKKGAIPYAYTANLGQPDENDYNAIPNKAMEYGAENARLIDCRTQLAHEGIAAIQCGAFHISTGGIPYFNTTPLGRAVTGTMLVAAMKEDNVNIWGDGSTFKGNDIERFYRYGLLTNPKLKIYKPWLDQLFIDELGGRFEMSQFLISNGFDYKMSVEKAYSTDSNMLGATHEAKDLEELGTDMKIVKPIMGVAFWDESVEIKPEIVSVTFEEGIPVALNGKRIDDAVELILEANRIGGRHGLGMSDQIENRIIEAKSRGIYEAPGMAILHIAYERLVTGIHNEDTIEQYRINGLRLGRLLYQGRWFDPQALMLRETAQRWVAKAIAGTVTLELRRGNDFSILNTESVNLTYQAERLSMEKVEDAPFTPADRIGQLTMRNLDIVDTRDKLAVYTDAGLLSVQNNVIPQLNKK

SEQ ID NO: 24994 - protein, 68 aa, Haemophilus ducreyi 35000HP
MHIGIVKWFNNVKGFGFITCDTVEGDIFAHFSEIKQDGYRSLKVGQKVQFELVTNERGASATHISTIE

SEQ ID NO: 24995 - protein, 451 aa, Haemophilus ducreyi 35000HP
MSHFSVAKFGGTSVADFNAMNACANIVVKDNHTRVVVLSASAGITNYLVELANGCAPLRRVEILQNVRSVQYNIIQQLQQPEAISAEIDRLLQHISVLAESASVTTSATLTDELIAHGELMSSKIFTQLLIEREIPAIWVDVRDVIATNSHHGKATPDDKKTQQQADAIVKPLLEANKIIITQGFIARDQQGNTTTLGRGGSDYSAALLAEVLSAKDVLIWTDVPGIYTTDPRIVPNAQRIATIAFNEAAEMATFGAKVLHPATLLPAVRSNIPVYVGSSKAPEQGGTWVTRDPTCRPIFRAIALRRNQTLVTLSSLAMLHAQEFLASVFSILAKYQVSVDIITTSEVSITLTLDKTDSTASTAQILSDALVHELSQFCHIKIENDLSLLAIIGNDLHLQQGIAKELFQTIEPFNIRLINYGASTNNIYMLVKNSDADHILLALHYDLFES

SEQ ID NO: 24996 - protein, 556 aa, Haemophilus ducreyi 35000HP
MSEETLTTEVETRTNFITHIIDEDLASGKHNNVYTRFPPEPNGYLHIGHAKSICLNFGIAQEYHGKCNLRFDDTNPVKEDIEYVASIKQDVEWLGFKWQGEPRYASDYFDQLHGYAIELIEKGLAYVDELSPEEMREYRGTLTEAGKNSPYRDRSIAENLALFEKMKNGEFKEGTACLRAKIDMASPFIVMRDPVLYRVKFAHHHQTGDKWCIYPMYDFTHCISDAIERITHSLCTLEFQDNRRLYDWVLENISIERPLPHQYEFSRLNLEGTLTSKRKLLQLVTDGIVDGWNDPRMPTISGLRRRGYTPASLREFCRRIGVTKQDNVVEYAALEACIREDLNENAPRAMAVINPVRVVIENVAEPEILKAPNHPNRPELGERDLPFTREIYIDEADFREEANKQYKRLVLGKEVRLRNAYVIKAERVEKDASGKITTIFCSYDPETLGKNPADGRKVKGVIHWVSATQNKVAEFRIYNRLFNVANPGDEEDINAVINPSSLIVKHGFVEVNLANAQKEQGYQFEREGYYCLDSKEGSADNLIFNLTVSLKEGFTA

SEQ ID NO: 24997 - protein, 400 aa, Haemophilus ducreyi 35000HP
MSQNLILILNCGSSSLKFAILDPINGDEKLSGLAESFYLDDARIKWKFNGEKGNADLDAGAAHTEALNFIVSNILTDELKQSIGAIGHRIVHGGEKFTSSVVITDEVVKGIEEVIQFAPLHNPAHLIGIQEAFRIFPELKDRNVAVFDTAFHTTMPEQAYLYALPYSLYKDHGVRRYGAHGTSHYFVSREAARRLNVAEDKVNVITCHLGNGGSVSAIRHGECIDTSMGLTPLEGLVMGTRSGDIDPAIIFYMHDTLGMSVEEINNTLTKKSGLLGLTEVTSDCRYAEDNYETDDAARRAMEVYCYRLAKYIGSYMAVIGERLDAIVFTGGIGENSAHVREITLNHLKLFGYQVDDARNLAARFGNEGVITAEGSPLAMVIATNEELVIAQDTARLTITK

SEQ ID NO: 24998 - protein, 712 aa, Haemophilus ducreyi 35000HP
MSRTIILIPITTDVGLTSVSLGLVHALEQKGIKVGFLKPIAQPISGEDKLDRSTSIIQAAQTTEVGEPLLLSEAELLIGQNQADVLLEKIVERYQQLSKNNEVIIIEGLIPTRKNSYANSINYDVAQALDAEIILVAAPGSDKPVQLKERIEAVASEFGGRDNPNLLGVIINKFNAPVDESGRTRPDLTEIFDSFQHSAQNIAEVEALFAKSPINLLACIKWKSDLIATRAIDVAKHLHAAIINEGDLHTRRIRGVSFCACSIPHMVDYFKAGNLLVTSADRPEVLVAASLAVMNGIEIGAILLTGGYKIDHNVAKLCQQAFETGLPVFRVEGNTWQTALNLQSVSLEVPVDDKGRIDAIKEYVASQFDAHFVDEVSKVATRVRRLSPAAFRYQLTEYAREAKKRIVLPEGDEPRTIKAAALCAKRGIAECVLLANPVDVQRIAEAQGVVLGKGITIINPEDVSENYVSRLVELRKNKGMTEVVAREQLTDTVVLGTMMLEAGEVDGLVSGAVHTTANTIRPPMQIIKTAPGSSIVSSIFFMLLPDQVLVYGDCAVNPDPTAEQLAEIAIQSAESAKAFGIDPRVAMISYSTGSSGSGADVEKVKEATRIAQEKRPDLIIDGPLQYDAAVMEDVARSKAPNSPVAGKATVFVFPDLNTGNTTYKAVQRSADLVSIGPMLQGMRKPVNDLSRGALVDDIVYTIALTAIQATQS

SEQ ID NO: 24999 - protein, 606 aa, Haemophilus ducreyi 35000HP
MTNNTLTFSDLGLPQSILDAVNDMSFVTPSPIQQECIPHLLAGSDVLGMAQTGSGKTAAFSLPLLAQIDPNQRHPQMLVMAPTRELAIQVADACEQFTKNMKGIRVVTVYGGQRYDIQLRALKQGSQVVVGTPGRILDHIRRGTLNLSTLKSIVLDEADEMLRMGFIDDVETVMAELPEKHQTALFSATMPEPIRRITRRFMSDPKEVKIQATQRSAPDITQSYWLVNGFRKNEALLRFLEVEEFDAAIIFTRTKTGTIDITELCERNGYRTAALNGDMTQQAREQTLDKLKSGRLDILVATDVAARGLDVERISLVVNYDIPLDSESYVHRIGRTGRAGRSGRALLFVEPRERRLLRNIEQLMKKPIDPVAIPNHQVLMEKRREKFKAKISKQLEHHDLEKYRELLENLFTADQDHEELAAAMMMLQEKQKLILPPDPEVRNLRSERGRRDRNERNDRRNGREHRENNGVAMDLYRIELGREDGVEVRHIVGAIANEGDINSRYIGHIKLHDRYSTIELPKGIPNHIVQHFAHKARVLNKQMQMSLLGPAGGANNQPFEERRGSRRDQRNSGRNSRPNYREDSFNKERKNTGFKEKRFNNKSSRD

SEQ ID NO: 25000 - protein, 304 aa, Haemophilus ducreyi 35000HP
MRMIEQAPKTYCGFIAIVGRPNVGKSTLLNKILGQKISITSRKAQTTRHRIVGIQTEEQYQAIYVDTPGLHIEEKRAINRLMNRAASSAIGDVDLIIFVVEGTKWTDDDEMVLNKLRTAKAPVVLAINKVDNIKEKDELLPHITALSQKFDFAEILPISAQRGKNVHILQKIVRKSLREGVHHFPEEYVTDRSQRFMASEIIREKLMRFTGEELPYSVTVEIEQFKLNERGTYEINGLILVEREGQKKMVIGAKGQKIKTIGIEARADMERLFDNKVHLELWVKVKAGWADDERALRSLGYMDE

SEQ ID NO: 25001 - protein, 316 aa, Haemophilus ducreyi 35000HP
MPDIKLFAGNATPELAKRISERLYISLGNATVGRFSDGEIQVQINENVRGSDVFIIQSTCAPTNDNLMELIVMVDALRRASAGRITAVIPYFGYSRQDRRVRSARVPITAKVVADFLSSVGVDRVLTCDLHAEQIQGFFDVPVDNVFGSPVLIDDILKKKDLVNPIVVSPDIGGVVRARAVAKLLNDTDMAIIDKRRPKANVSQVMHIIGDVTDRDCILVDDMIDTGGTLVKAAEALKERGARRVFAYATHAVFSGSAANNLANPALDEVVVTDTIPLSDEIEALNKVRVLTLSSMLAEAIRRISNEESISAMFDA

SEQ ID NO: 25002 - protein, 582 aa, Haemophilus ducreyi 35000HP
MQETDLSIIKTFKRLFPIIRNYKWGLIAASVALILNALVDSSLIYLLKPLLDDGFGKADNAFLKQMAILVMLFILLRGVSNYIASYCLSWVSGKVVMTLRRNIFQHLMYMPVSYFDKNPTGRLLSRVTYDTEMVASSSSYVLVTIVREGAYLISLFAVMVYTSWQLSIVLFLLAPIIAFLISIVSKRFRILSRNIQNSMGELTVTTEQMLKGHKVVLSFGGQKVEKARFDRVSNDMRRKGMKIVSADGISDGLVQLIASLALSAVLYVATFPEVMSENLTAGSFTVVFSSMMAMLRPLKSLTSVNSQFQRGMAACQTLFEFLDLKTEKNNGTKQVERAQGCITFDNVIFSYEGKEEQALNQVSFTIPQGKTVALVGRSGSGKSTIASLLTRFYDVNEGQILLDGVNIEEYTLENLREQCSVVSQQVHLFNDTIANNIAYAAKDKYSRAQIIAAAQAAHAMEFIEKLEQGLDTVIGENGASLSGGQRQRLAIARALLRNAPVLVLDEATSALDTESELAIQSALAALQKNKTVLVIAHRLSTIEKADEILVVDQGKIVERGSHEQLLAKGGAYKQLYSMQFSE

SEQ ID NO: 25003 - protein, 511 aa, Haemophilus ducreyi 35000HP
MLIGIPKELLNGETRVAATPKTVEQIKKLGFDVIVERGAGVKASFEDEAFVNAGANIGTQKKVWKANIIFKVNAPTDAEIALMNEGTTLVSFIWPAQNAELMQKLTAKKINVLAMDAVPRISRAQALDALSSMANISGYRAVIEAANVFGSFFTGQITAAGKVPPAKVLVIGAGVAGLAAIGAANSLGAIVRAFDSRPEVKEQVKSMGAEFLAIDFEEDAGSGDGYAKVMSEEFNRRSMELYAEQAKDVDIIITTAAIPGKPAPRLITKEMVDSMKPGSVVVDLAAATGGNCDYTKAGEVVITDNQVKVIGYTDFPARLPTQSSQLYGTNLVNLLKLLTPNKDGQIAINFDDVVVRGVTVIRDGEVTWPAPPIQVSAQPQKPTVTPITPKVDKPARPGVKYSIIGGVIALFFWIASIAPAAFLSHFTVFMLACVVGYYVVWNVSHALHTPLMAVTNAISGIIIVGAVLQIAQPTGNLFIDLLASCAILVASINIFGGFKVTQRMLAMFRKG

SEQ ID NO: 25004 - protein, 182 aa, Haemophilus ducreyi 35000HP
MGKKAVFLDRDGTLNIDHGYVHQIDDFQFIEGVGKALKQLQDKGYLLVLVTNQSGIARGYFSEQQFQQLTEWMDWSLDEDYGVVLDGIYYCPHYPEGQGEYQQKCDCRKPKAGMFQQAIKDLNIDPAQSYMVGDKLEDLLAAETAGVKTKVLVRTGKAITAEGEKKADLVLNSLVDLVPYVN

SEQ ID NO: 25005 - protein, 406 aa, Haemophilus ducreyi 35000HP
MEPIVFNGYHTLITATLVLLVGRFFVNKIKVLQDFNIPEAVAGGLIAAVAILCLYNWFGVSLQFEQSLQNAFMLAFFSSVGLSADFSRLKQGGMPLVIFLVVVSLYIIIQNVIGVGLASALGLDPMIGLLTGSITLTGGHGTGAAWAKIFSEEYNITGVMEMAMASATFGLVAGGLIGGPIARRLINKMKKDRSQQITKRVDTSAEQYDGSTFEDHDSIRYITASSTIETMALFAACLGFSSIIVNTFPDISLPQFVWALGFGVILRNVLTKVFKFDMFDRAIDVFGNASLSMFLAMALMSIKLWELTGLAGPMLIILVVQTLVMILYGYFVTYRVMGKDYDAAILTAGHCGFGLGATPTAVANMQSVTEKFGSSHKAFLIVPLVGAFFVDILNLAVITSFVDFLR

SEQ ID NO: 25006 - protein, 330 aa, Haemophilus ducreyi 35000HP
MKKSFILQQQEISFVKNTFTQYLIDQLDIIEVQGPILSQVGNGMQDNLSGIEKAVQVNVKCIPGAVFEVVHSLAKWKRHTLARFGFKQGEGLFVHMKALRPDEDSLDPTHSIYVDQWDWEKVIPEGQRNFAYLKQTVNQIYKAIRLTELAVEARFDIPSSLPKQITFIHSEELAQRYPNMSSKERENAICKEHGAIFLIGIGGKLSDGKAHDGRAPDYDDWTTESENGYKGLNGDILVWNEELGSAFELSSMGIRVDQQALRLQVSLTGDEDRLTMDWHQDLLAGRLPLSIGGGIGQSRLVMFLLHKKHIGEVQSSVWPTEMLTQFENIL

SEQ ID NO: 25007 - protein, 206 aa, Mycobacterium smegmatis str. MC2 155
VAPAEVVVIGAGTAGYNAARVAAGMGAHVTVFDLNINTLRRVDGEFGGRIETRYSSSLELEEAVKKADLVIGAVLVPGAKAPKLVTNSTVAHMKPGAVLVDIAIDQGGCFEDSRPTTHDEPTFKVHDTIFYCVANMPGAVPRTSTFALTNSTMPYVLKLADKGWQAACASDSALAKGLSTHDGKLLSEAVAKDLDLPFTDAAQFLA

SEQ ID NO: 25008 - protein, 654 aa, Prochlorococcus marinus subsp. marinus str. CCMP1375
MCGIAGLICKDRQILALDEIGSKMNTSLLNRGPDDSGIWIDNDIGILLSHTRLSVNDLSKAGHQPMLSSSNRFVLTFNGEIYNHWDLRQELEITQGSQNWKSHSDTETLIQAIECWGVYKTLTKLIGMFAFGIFDRKENKFYLARDRFGEKPIYWGITGVGTRKVLIFGSDLKALKSYPEFNNTINRESMGLFINYNYVPDPHSIYENIWKLEAGKILEIDVTDDDYSKIYPMSWWQLEDTIKNVDGREIENESEAINLLKQELIKSVKSQSKADVKITSFLSGGIDSSLVSALLQETSNSQINTFTIGFENKRFDEATYARRISNYLGSNHSELIFTNEDALNIVPKINEYYSEPFADPAAIPTLLLCNAAKSQGYTVALSGDGADELFGGYNRYTMAPKIWKYFGIIPNFMKPMLINSVNKLSTQSIDLIGSILKIRQFRERLYKITDKISYSNSLEDLYYRLIREWSDVSSITEYKYNQPFTPISNERLNQSIHELKLDPVTFMMVIDCLSYLPGNNQVKLDRASMAVGLETRSPFLDKNVGELIWRLPINLKIKNNCGKYILKEILADYIPKKLFERPKAGFATPINEWIKGPLREWAEEMLNSNKVRDEGFLNPEITTKLLNEHIQGVKDNSKKLWSALIWESWIDKNI

SEQ ID NO: 25009 - protein, 263 aa, Prochlorococcus marinus subsp. marinus str. CCMP1375
MTKQLDKRMEPKRILLEVKNLHAGIDGNSILKGVNLTIYEGEIHAIMGRNGSGKSTLAKIIAGHSSYEISEGEILLESESITSLEPEERSNKGLFLGFQYPVEVAGVKNIDFLRAAVNARRKELKESELDTFEFDEIVNNTLGIVQMNKDFLERGVNQGFSGGEKKRNEILQMALLKPIVSILDETDSGLDIDALRIISNGINKIHSKNKATILITHYQRLLNEIKPDYVHVMKDGKIIKTGTKELAIALEKSGYEGLEQVET

SEQ ID NO: 25010 - protein, 247 aa, Prochlorococcus marinus subsp. marinus str. CCMP1375
MTAASPSKEIILVADDEASIRRILETRLSMIGYQVVTACNGNEALQQFHNCEPDLVVLDVMMPKLDGYGVIQELRKESDVPIVMLTALGDVADRITGLELGADDYVVKPFSPKELEARIRCVLRRVEKEQIAGLPNSGVIQVAAFRIDTNRRKVYRGDERIRLTGMEFSLLELLVSRSGEPFSRGEILKEVWGYTPERHVDTRVVDVHISRLRSKLEDDPANPELILTARGTGYLFQRIVDPLSLDH

SEQ ID NO: 25011 - protein, 383 aa, Prochlorococcus marinus subsp. marinus str. CCMP1375
MKTTPLYFDYQSTTPCLDKVVDAMVPYWSEFWGNPSSRQNRLGLHASAAISLARDKLGSLLQVSPQRLIFTSGATEANNLALLGYSRAKAQETGSTGHLITISTEHRSVIEPLRQLRREGFRVTELTPNVDGIISLDGLSKSFEDDTFLVSVMLANNEIGVLQPIKEIASLCKSRGVIFHSDASQGFGNLPIEIDKLQVDFLSISGHKIYGPKGIGLLVLGSNSIKIKPLQWGGDQENGIRAGTLPVPLVIGMAKAAEIAIEEIDLQVPRIRKLRDKLWQGLRDEIPELMLNGSFDKRLPNNLNFTVIGVNGSRLHKKLRPLISCSSGSACSNGSPSHVLMSLGRTINEAEASLRLSLGRATTLNDVEMAIDIISNTVNYLRK

SEQ ID NO: 25012 - protein, 329 aa, Prochlorococcus marinus subsp. marinus str. CCMP1375
MQFIDQARITVKAGRGGDGIVAFRREKYVPAGGPSGGDGGNGGNVVFQADSNLQTLLDFKFKQIILAENGRRGGPNKCTGASGNNIVLKVPCGTEVRHLETGIIFGDLTIDGESLVVAFGGIGGLGNAHYLSNRNRAPEKFTEGKDGEEWLLHLELKLLAEVGIIGLPNAGKSTLISVLSSARPKIADYPFTTLIPNLGVVRKPSGDGTVFADIPGLIEGAAEGIGLGHEFLRHIERTRLLIHLVDASALNPLEDIEIVENELSAYGHSLIDRPRILVLNKKELLDAKNLKKLERKLNQGSISEVISISAIMSNGLDILLNKIWSKLEI

SEQ ID NO: 25013 - protein, 390 aa, Prochlorococcus marinus subsp. marinus str. CCMP1375
MTSNQSLTNSRTEVIEPYGGTLQNLMVPSNSQEAIKQSASKKIDCSDRNACDIELLLIGGFSPLQGFMNQKDYDSVVNSNRTADGKLFGLPIVLDTDREDLKIGDKVLLCYKNQSLAVLTIEDKWLPDKVLEAKGCYGTTSLEHPAVKMIAIERKKFYLAGKLEGLELPKRIFPCKTPSEVRKELPHNQDVVAFQCRNPIHRAHYELFTQALHAENVSKGAVVLVHPTCGPTQQDDIPGSIRFATYERLAAEVKNPMIRWAYLPYSMHMAGPREALQHMIIRRNYGCSHFIIGRDMAGCKSQLTGEDFYGPYDAQEFAKACASELEMQTVPSLNLVYTEEEGYVTADHAQSCGLHIKKLSGTQFRKMLRNNEEIPEWFAFRSVVEVLRGG

SEQ ID NO: 25014 - protein, 244 aa, Prochlorococcus marinus subsp. marinus str. CCMP1375
MTGSANSFSRYPSQSLGMQSQNQLNPNTQVKKTLLDVIRGLDGASNEAVERSKTIFFPGDPAERVYLIRRGAVRLTRVYESGEEITVALLRENSLFGVLSLLTCHRSDRFYHAVAFTRVEMSSAPAGSVRNAIEADSGVGLLLLQGLSSRILQTETMIETLTHRDMSSRLVSFLLVLCRDFGVASDKGITIDLRLSHQSIAEAIGSTRVTITRLLGDLRNLGLLQIDRKKITVFDPIALAKRFN

SEQ ID NO: 25015 - protein, 502 aa, Prochlorococcus marinus subsp. marinus str. CCMP1375
MTTALQSPPRRRIARLQEVSLLEGPMLLLRSIRGFRSNQSLIWLATVPLALLGLGVFGFAARAGVGLSDLSGAQAASFLADNLWLFIATILVIFMNAGFAMVEAGMCRQKNAVNILAKNLFVFALAVTAYWFIGYSIMYGGTPIIGGVIFSNGFFFNPDPSDALSCAAGLGADGCSQLVPAVDFLFQAAFAGTAATIVSGLVAERVKFGEFVVFSLVLTAFIYPIAGSWQWNGAGWLSQLGFIDFAGSSIVHSVGGWAGLVGAMLLGPRIGKFVDGKPQAMPGHNMAIATLGALILWIGWYGFNPGSELAMDEYVAYVAVTTTLAAAGGAIAATLLSTLTSGKPDLTMIINGILAGLVSITAGCGNMTLSGSWLAGFVGGLIVVFAVSALDSAGIDDPVGAFSVHGVCGVWGTVVIGLWGVDGMDPGAAGIGLFNGGGLNTLLIQALGAGAYAIWTVVTCWLAWTVIGGFFGGIRVSEEEEIQGLDIGEHGMEAYPDFASSN

SEQ ID NO: 25016 - protein, 584 aa, Prochlorococcus marinus subsp. marinus str. CCMP1375
MTLSSSPFGIGDSTKKEQNQILGADALMESLKNHGVDTIFGYPGGAILPIYDAVYKAEKAGWVKHILVRHEQGGAHAADGYARSTGKVGVCFGTSGPGATNLVTGIATAQMDSVPLVVITGQVPRPAIGTDAFQETDIFGITLPIVKHSWVVRDPSEIASVIAQAFFIASSGRPGPVLVDIPKDVGQELFDYQPVQPGSLIPAGFTPPQKPDPVAISKALDLIERAKKPLLYVGGGVISASAHDTLFAIAKRYHLPVTTTLMGKGAFDERESLSVGMLGMHGTAYANFAVTECDLLVAIGARFDDRVTGRLDSFAANAKVVHFEVDPAEINKNRVADVAVLGDLAISLSDLHELSKRRTVKPNTQEWLAQIEEWKIKYPLLIPSKEGEIYPQEVLIEIRDLAPDAYITTDVGQHQMWAAQYLRNSPRHWISSAGLGTMGFGVPAALGVQVALPKQQVICIAGDASILMNIQELGTISQYQLNTKIIIINNHWQGMVRQWQQSFYDERYSATNMLNGEPNFVALANAFGVGGVIIKERNSLKEKLKEALNSEGPMLIDVHVRRDENCYPMVPPGKSNAEMVGLPD

SEQ ID NO: 25017 - protein, 350 aa, Prochlorococcus marinus subsp. marinus str. CCMP1375
MKIKRFFSGMMTLSILLTGCASTGERNASRLQLIKKRNSLICGVSGKIPGFSFLETDGTYQGLDIDICKAFAAAFIGDSKRVQYRPLTAAERFTAVRTGEIDLLSRNTTFNLSRDSIGGNGLTFAPVIFHDGQGLMVKRNSRINTIESLANKSICVGSGTTTEQNINDAFEAISLPYTPIKYQDLNQVVAGYLQGRCSAMTSDRSQLAAARSGFPKPEDHIILNDILSKEPLAPASSGGDQKLSDAMRWVIFSLISAEEQGITKGNIKEKLQIAQNNPQMKSLRRFLGVEGDLGEKIGLANDFVVKVISSTGNYGEIYNRHLGINSEVPIPRGLNKLYNKGGVQIAPPFN

SEQ ID NO: 25018 - protein, 638 aa, Prochlorococcus marinus subsp. marinus str. CCMP1375
MNPRFRSFALWLIPMVILLLVTWQIFTSNSTNATKTPDAAIGSRNTAVSRMSYGRFIDYVDAGRVTAVDIFEGGRNAIVEAVDPDLDNRVQKIRVDLPGLTPNLISKLKEEGISFDVHPAKTAPPGIGLIGNLIFPVILIGGLIFLARRSNSMPGGPGQAMQFGKTKARFAMEAETGVQFDDVAGVEEAKEDLEEVVTFLKQPERFTSVGAKIPRGVLLVGPPGTGKTLLAKAIAGEAGVPFFSLSGSEFVEMFVGVGASRVRDLFKRAKENSPCLIFIDEIDAVGRQRGAGIGGGNDEREQTLNQLLTEMDGFEGNSGIIIIAATNRPDVLDSALLRPGRFDRQVSVDAPDIKGRLSILTVHSKNKKLEEVLSLESIARRTPGFTGADLANLLNEAAILTARRRKEAIGISEIDDAVDRIIAGMEGQPLTDGRSKRLIAYHEIGHAIVGTLLKDHDPVQKVTLIPRGQAKGLTWFSPDEDQMLVSRAQLKARIMGALGGRAAEDVVFGRGEVTTGAGGDIQQVASMARQMVTRFGMSRLGPISLENDSQEVFIGRDLMTRSDISDSISQQIDEQVRKIVKECYQATFELVKSNRQSIDKLVELLIEKETINGEELVNVLSQYTEIPEKVRTENILNK

SEQ ID NO: 25019 - protein, 395 aa, Prochlorococcus marinus subsp. marinus str. CCMP1375
MDNNLEYIYLDGSATSPPLDDLANRMKIIQEGVWGNPSSLHYEGIKAAEIIESSKYDIAAKFNVLPDQIIITSGATESIQMIITSASRLYTPGRIVISSVEHPAVIFAADYLKNNGWDVLYWPVDKYGVIDITMIDELLAPPTKIVSIIWGQNEIGTVQPITQIATACKKKNLFFHTDATQVISQGCFNFNTLGISSFSASAHKFRGPKGVGLLIIDKEYLFMLKNLYDLGNHIPLFNKGTLSPALTYGMSLALNAITQNLIIDRNKVIFENTNTSNITKSLLDQLKNYDTLILTGHPLIRLPNHLSFVVKGKNGIPLSGRQLVRELSKKGICVSTGSACSSKHKKSSHVLKALNLPDNLLKSSLRISLGNWLKDIDPQSLGNIIISTIKEVSQH

SEQ ID NO: 25020 - protein, 393 aa, Prochlorococcus marinus subsp. marinus str. CCMP1375
MSNLDVISERALSLKPSLTLEISSLAQSLKQKGRDICSLSAGEPDFDTPNFIVEAAKKALDDGITKYGPAGGDPSLREEVAKKLTEINDVPTSPENVLITNGGKQAIFNLLQVIINPGDEVLIPSPYWLSYPEITKIAGGIPITINSSKGNSFSLDIEEIEKNINHKTKLLILNSPCNPTGRIIQESELQSIANLLRKHPNIYVMSDEIYEFLITDKEVHISLASIAPDLKDKIFIVNGFAKAWAMTGWRVGYLQGSSKIIKKAIALQSQSTSNVCSFAQRGALAAIKGAPKGIDYMIQSYNERRKLLTEELRQISSLSLEAQSGAFYAFPKLSDELPDSLSFCKIALEKEGLAIVPGIAFGNDRCIRLSCSVNTETLNDGITRLNRIIKDIT

SEQ ID NO: 25021 - protein, 864 aa, Prochlorococcus marinus subsp. marinus str. CCMP1375
MDIKTDNFTEESWSSILQAQSNAKGFHHQYIETEHLLKSLIQENDLAKSIIKKCNGSIDQIKMHLNDFIKNQPKLKERPENLFIGKHLQKTINESDQIKQSFDDDFISIEHLLIALSKDQRCCNKILIHEKIDPEILLKSIAEIRGNQKVTDQNPESKYESLKKYGRDLTSAAREGILDPVIGRDDEIRRTIQILSRRTKNNPVLIGEPGVGKTAIVEGLAQRIINGDVPSALQNRQLIALDMGALIAGAKYRGEFEERLKAVLKEVTSSQGQIVLFIDEIHTVVGAGATGGAMDASNLLKPMLARGELRCIGATTINEHRQHIEKDPALERRFQQVLISEPSIEDTISILRGLKEKYEVHHGVRISDSALVAAAVLSNRYISERYLPDKAIDLIDESASKLKMEITSKPEELDEIDRKIIQLQMEKLSLKRESNLASQEKLNAIDNGLNELKSKQSSLNKQWQEEKESINTLSFLKEEIEKVQLQIEQAKRDYDLNRAAELEYGTLNSLQNKLKQKEDLIMVNNNNDQKSLLLREEVTENDITEVIAKWTSIPLTKLLKSDIEKLLDLEDKLNSKVIGQKQAVQAVADSIQRSRTGLSDPSRPMGSFLLLGPTGVGKTELSKSLAKELFDSEKAMIRIDMSEYMEKHSISRLIGAPPGYVGYESGGQLSEAVRRNPYSVILFDEVEKANSDVLNIMLQILDEGRLTDGKGKNINFKNTIIILTSNVGSESIIEMTNKKNEYELIEEVVRNQLKNYFKPEFLNRLDEQIIFKSLKKEDLKKIVKLQIDKVKARLKDKGLEIELNEKVIDWIADKGYNPIYGARPIKRIIQTKLETKLAKMILKSKSEERSHYQLDIIDDQIVFN

SEQ ID NO: 25022 - protein, 107 aa, Prochlorococcus marinus subsp. marinus str. CCMP1375
MNLETRARIEDLINSHSIMVFMKGTKLMPQCGFSNNVVQILNALGKHFETFDVLSDMDIREAIKEYSNWPTIPQVYLKGEFLGGSDILIEMYNSGELLEKLEIALAS

SEQ ID NO: 25023 - protein, 603 aa, Prochlorococcus marinus subsp. marinus str. CCMP1375
MAKTKSNEDISTSNVSSNSDPSISIESETEEHISITEVDASQLENVEKASNGFEGFGFSEALLKTLKNKGYEEPTPIQKASIPELMLGRDLLGQAQTGTGKTAAFALPLLERINSKERNPQVLVLTPTRELAMQVAESFKAYSEGHANINILAVYGGSDFRSQIYSLKRGVEIIVGTPGRVMDHIRQGTLNQDSLQCLVLDEADEMLRMGFIDDIEWILEQLPNERQMVLFSATMPPEIRKLSKRYLRDPAEITIKAKKKEAQLIRQHYITVQNSYKLEVLRRVLELNYGEGVIIFARTKAITLKLAESLEASNHNVAVLNGDVPQNLRERTVERLRQGGINILVATDVAARGLDVERIGLVINYDMPFDSEAYVHRIGRTGRAGRSGEAILFISPRERSYLNNLERAVGQSIERMEIPNNESINNHRIQKIKRDLLTTASQKRKDQEETNLIKEVINEIESELEITPKEIALAAINLSIGESPLLINTDESWINQAERFRKSNDRRDNRGRSRRRNDLDIGTTEKDKERFRVDVGHRDRVKPGNIVGAIANESGLNGRMIGRIQIFESYSLVDLPKGMPTKIFQSLKRVKVMNKELNINRYT

SEQ ID NO: 25024 - protein, 377 aa, Prochlorococcus marinus subsp. marinus str. CCMP1375
MQNTNFLQNISPERVIRGESAWEEGKSLIQSICKKPLFLGRSHSTSKLRSMLEKDLINIGINIVHAELEYDCCDVDLNRIYQLCKDCSCDGIIASGGGKVLDAGKLIANNLNLPCITVPLSASTCAGWTALANIYSKKGAFIKDQTLNNCPKLLIFDYSLVRKAPNRLLASGIADALAKWYEASLSNAGSNDALVQQAVQMARVLRDQLLIDGFNALQNPYSSSWIRVAESCSLTAGLIGGVGGAKCRTAAAHAVHNGLTQLDFTQKALHGELVGFGILVQLRIEEKLLGNQLALQAKNQLITLLKELNLPTNLKSLGINLTTKKELEMACIFSCRDDSDIHNLPFKVDKETLMEAILETDRIEIEKISPRGTIFNC

SEQ ID NO: 25025 - protein, 440 aa, Prochlorococcus marinus subsp. marinus str. CCMP1375
MPMEIRRLLRNKPGIWDLPELPDIGGPTSLEGEIQISQQESALAIGAKKGWYGVNGATGLLQAALLALVKPKQSVLMPRNIHKCIINACLLGDMNPVLFDLPFLEDRGHFVPPNISWFKSVLQAIEKENVEISAVVLTNPFYQGYAVDLKPFITLLHEKNWPVLIDEAHGAYFSSNADDSLPESGLQAGADLVVHSLHKSANGLVQTAALWWQGNLVDPDQIERSIVILQTTSPSALLLASCEAAIAELTSLQGKQKLKKIISKARELNIQLRQEGLPLLENQDPLKLILHTASIGINGMEADSWLISKGMIAELPEPGTITFCLGFAIQRGLTKVMKNYWDELLSSNLERKTFPPFTKPNFPLITILGTSCLSAFIADTVKVPLEDSIGRISSDLISPYPPGIPILFPGELLDQNRIDWMIEQRNFWPTQIPSEIKVIS

SEQ ID NO: 25026 - protein, 327 aa, Prochlorococcus marinus subsp. marinus str. CCMP1375
MTAATAQNIKSSLNTDRLKLISGTSNPILAKEISSYIGIEDVPVVSKRFADGELYVQIQQSIRGCDVFLIQPTCAPVNDSLMELMIMVDACKRASARQVTAVIPYFGYARADRKTAGRESITAKLTANLLVSSGVDRVLAMDLHSAQIQGYFDIPCDHIYGSPVLIDYLSTKNLDEIVVVSPDVGGVARARAFAKQMKDSPLAIIDKRRAAHNVAQSLTVIGDVANKTAILIDDMIDTGGTICAGAELLRKEGAKRVIACASHAVFSPPAYSRLSADDLFEEVVVTNSIPVPTSQYFEQLKVLSVANMLGEAIWRVHEESSISSMFR

SEQ ID NO: 25027 - protein, 364 aa, Prochlorococcus marinus subsp. marinus str. CCMP1375
MAYSEATVLAGGLIHVPILIGLVGFFQKFHGGITKKTSKSTLTEKKSSQPSKPPEKPSSSPKAIKKPAHPNVPVNTYKPKSPFEGKVTENYSLLKDGAIGRVNHITFDLSGGNPKLEYVEGQSIGIIPAGEDAKGKPHKIRLYSIASTKYGDDFKQNSVSLCVRQLQYEKEGQTIDGVCSTYLCDIKPGDKVKITGPVGKEMLLPDDEDANIIMLATGTGIAPMRAYLRKMFEKTEREKNNWYFKGKAWLFMGAPKTANLLYDDDFENYKAQYPENLRYTKAISREQKNTKGGRMYIQDRVLEYADEIFSLIENPKTHIYLCGLKGMEPGIDEAMTTAASAKGLNWSELRPQLKKAGRWHVETY

SEQ ID NO: 25028 - protein, 298 aa, Prochlorococcus marinus subsp. marinus str. CCMP1375
MFHPRLAFVGLGTIGLPIAANLISAGFKMKVHTRSRKAEKDKRLKGAISCSSPKEVVKGCEVLLICVSDDEAIEEVLFSSQGAYKNLKKKSLVIDFSTISPAKSRSIAKRLAKQNVDYIDAPVTGGTEGANKGSLTIFLGCKDIFLKEIIPFLKPIATNIYCFGEVGKGQEVKAINQILVAGSYAAVAEAIALGEQLDLPMDAVIKALQTGAASSWALSNRSNAMLKDEYPLGFKLGLHYKDLSIALNTAESIGLELPITKKVREIEKELISEGFENEDVSVLKRSIRKSSVIFPKKN

SEQ ID NO: 25029 - protein, 380 aa, Prochlorococcus marinus subsp. marinus str. CCMP1375
MPRILIPIEVASGETRVAATPETVKKLRSIGFVVSIEKGAGSSAGFLDESYLNVGAGIFSEEDGDSLKEIDVVLCVNCPEVEFLKKLKPSALVIGLLAPYGNNSLATCLESAGLSALSLELLPRISRAQSADVLSSQANIAGYKSVLLGASALDRYFPMLMTAAGTVQPAKVVVLGAGVAGLQAIATAKRLGAVVYVSDIRQEVKEQVESLGARFIEPPEIAEERTEAGGYARQVSEAFLEAQKKQLLEQLSEADVAICTAQVPGKKAPRLIDEEMLDGMRPGSVVVDLAVSQGGNCAGTKPGEIIFRNGVKLIGASDLPCTVPNHASALYARNLLSLITPLIKQGELILNTDDELIDGSLISKDGVIRHAQLMNLGGSK

SEQ ID NO: 25030 - protein, 314 aa, Prochlorococcus marinus subsp. marinus str. CCMP1375
MSTLEPTPEGFRSGFVALIGRPNVGKSTLINQFVGEKVAITSPVAQTTRNRLRAILTINKAQLVFVDTPGIHKPHHLLGERLVNTSKKVIGEVDSILLIFDGNEPPGSGDSYIVKLLKGQNIPVTIVLNKWDLVTENQRTDRIKEYISFFNNTGWNFFCCSAINGKGCDGLIQKISSTLPVGPLLYPSGVTSDQPEEILMRELIREQVLLNTREEIPHSVAVSIDRIEEMTASKKKGVSKKRIAILATVLVERKSQKGILIGKGGSMLKKIGKGARMQIQKLLNGPVYLELFVKVVPDWRSKPARLAELGFGEK

SEQ ID NO: 25031 - protein, 152 aa, Prochlorococcus marinus subsp. marinus str. CCMP1375
MSFDFMTPNKTKNSTVGNYAIVETSGTQFWLEADRYYDIDRINANVDETVTLDKVLLINDQKGFAIGKPYIKGASVQLKVMAHKRGPKIIVYKMRPKKKTRTKNGHRQELTRVMVTSISNGEKPKKATTSAKPNTKKPSTAVKSSKVEKTPE

SEQ ID NO: 25032 - protein, 528 aa, Prochlorococcus marinus subsp. marinus str. CCMP1375
MTKVLVSDPIDHAGIDILSQVSQVDQRLGLSSNQLKEIIGDYEALMIRSGTQVNSEIIEAGVNLKIIGRAGVGVDNVDVPAATKRGVIVVNSPGGNTIAAAEHALALLLSLSRNIPQAHLSTISGKWDRKKFVGNELYKKILGVVGLGKIGSHVAKVANAMGMDVMAFDPFVSAERALQMQVRLSSIDDLFKEADFITLHLPRTSETENLVDAKLLSSMKQNARLVNCARGGIIDETALAEALNSNVIGGAALDVYSQEPLKNDSPLLNVKNNLILTPHLGASTAEAQQNVAIDVAEQIRDVLLGLPARSAVNIPGLSAEIMDSLKPHLQLAESLGLLASQVSGGQIQKIEVKLQGEFSQHPSQPLVIATLKGLLSSALGNRINYVNASLEAQGRGISVEEVKDEASPDFPGGSLQLRTFADKGTNSVTGTVLADGELRISSIDEFPINVSPSRYMLFTRHRDMPGIIGKLGSLLGTHNVNIAAMQVGRRIVRGEAVMVLSIDDPIPSELLTSILAVEGINQAHAVTF

SEQ ID NO: 25033 - protein, 379 aa, Prochlorococcus marinus subsp. marinus str. CCMP1375
MPSPVLSAPISSIGIPKEIKSDELRVAITPDGVKELVTQGLEVRVQTDAGKGLGIEDQDFSNAGARIVDRDEAWAAHLVVKVKEPQEEEFKFLREDMVLFTYLHLAAYPKVSEALLTAGTTTIGYETVQMEDGSLPLLAPMSEIAGRLAAQVGANLLEKPNGGRGILIGGCTGVRPARVIVLGAGTVGWNAARLAAAMDAEVMLLDRSPERLRKLEAYRKGRLESIVSSRGLLERLIPTADLIIGAVLTPGGRAPTLVDENMVAQMKNNSVIVDVAIDQGGCVATSVETTHTKPTINIKGVQHYAVSNMPGAVPFTSTEALVSVTLPYILGIAGRGLEGAITERPEIVSGLNTIGGSVCHPGVAKALGIPPRHPMACLN

SEQ ID NO: 25034 - protein, 1524 aa, Prochlorococcus marinus subsp. marinus str. CCMP1375
MPKQPHIPNWPYCDSSSPNALTGERDACGVGFLAQIEGNSNHWVLEQALRGLECMEHRGGCGGDSDSGDGAGLLCEIPWSFLESIWSEIKSRNNSQKLGLGMLFMPNNLEECTKAKNIFEKEAKTLGLTSRGWREVPVNPSVLGPLAKETAPFILQWLVEGNDQEENFESLLFRLRKRIQNQCANSFKEIDKQPYIASLSSRTVVYKGMVRSEVLADFYQDLRHKEFKISFAIYHRRFSTNTLPRWPLAQPMRLLGHNGEINTLLGNLNWAKATEVHLEEIWGESAKDLTPVVNSSFSDSANLDATLELLVRSGRPITDSLLTLVPEAFRDQPELEEQEEINAFYEYSACTQEAWDGPALLVFSDGHFIGATLDRNGLRPARYCVTKDNLVIMGSETGVVDIEDSQIIEKGRLGPGQMLAVDLQKGRLLKNWEVKKEAANRHPYQSWLSANRVIFKNQPWVEKTNLEQLDLLQKQTAFGFSAEDFDLIINTMASEGKEPTYCMGNDIPLAILSNKAHILYDYFKQRFAQVTNPPIDPLREKLVMSLEMHLGKKGSPLSPQKDGFSVISLNSPIINENDLIKLCSQGLSTKIISTLISIEEGLIGLEKVLKDICNDAELAVRNGTRVLILSDRGLNQSKTYIPPLLAVGAVHHHLLKHKLRLDVSIIIDTAQCWSTHHVACLIGYGASAICPWLAWETTRHWWKSPKTQKLIESQNLANLTIQTAQANLKKALEDGLRKILSKIGISLLASYNGAQIFEAVGIGADIIDIAFKGTTSRISGLTLKELANETLSFHSKAFPNIDLKKLEFFGFVQFRSGGEFHLNNPAMSKALHSAVRQGSNYDHFSTYQSLLESRPATSLRDLLTFKKAKKPLPIEQVESVENICKRFCTGGMSLGALSREAHEVLAIAMNRIGGKSNSGEGGEDPQRFKILTDVDEQNLSASFPNLKGLKNGDSACSAIKQIASGRFGVTPEYLRSGKQLEIKVAQGAKPGEGGQLPGKKVDTYIAKLRNSKAGVALISPPPHHDIYSIEDLAQLIHDLHQIHPKAKVSVKLVAEIGIGTIAAGVAKANADVIQISGHDGGTGASPLSSITHAGLPWELGLTEVHRVLLENGLRNRVLLRADGGLKTGWDVVMAALLGAEEYGFGSIAMIAEGCIMARICHTNKCPVGVATQQEALRKRFSGVPEHVVNFFLFVAEEVRQIMSLLGASTLEEIIGNTEMLQSRNVKLAKTKEVDLSSLLKPIPKVQDRSWLVHQIEPHSNGNVLENALLKDSEICNAIINHGNVSRIIPIANTDRSVCARISGEIAKEHGNKGFKGTLDLTFKGASGQSFGAFLLQGMNVRLIGEANDYVGKGINGGAITLIPPTINENASNQVILGNTCLYGGTGGKLFALGKAGERFAVRNSGVETVVEGAGDHCCEYMTGGIVVVLGETGRNVGAGMTGGITFLLNEDNQVNNRVNTEIVEIHSLLTTEQEDIVKPLIKEHYQKTKSFKAQKIINEWAYYKQKFKILVPPSEKLRLGLLDQ

SEQ ID NO: 25035 - protein, 566 aa, Prochlorococcus marinus subsp. marinus str. CCMP1375
MNNTSQSDFNSKIISIAGRKNILLDKNKTLFYSTGIRVGGGVVAMVVFPNDLFQLWQVLEECIRHEKIIIMQAANTGLTGGSTPDGNNYDREIVIINCLHIKQLILINSASQVIALPGTTLYDLEEKLLPFRRGPHSVIGSSCIGASVIGGVCNNSGGNLVNRGPAYTELSLYARLNELGKLELVNHLGINLGKSPRSIFTNLQAINFNIQNVPDTESLASDKEYQFRVRDINASSPARFNSDSRRLFESSGCAGKIAVFAVRLDTFPLPEREKVFFVGTNNAEHLTHLREKILTNMNSLPDMGEYMHFSYFDGSAKYCKDTFLFLKYFGTKYLPKLLEAKRYIDQLTGQVTFLPENISDRLMQFIADILPNHLPIRLLSFRKKFNYYMLLLASNNSIEEMKLLLDIETEKSEDFEYIECTESEGKDALLHRYVAGAAPARYKILNPDLAGDLLPLDIAFPRNFKDWDQLLPQDILNEMSDSFEMAHFLCMVFHLDFVVKKGVDSKLLKEKILKFLDSINAKYPAEHNVGHLYKAEKSLEVFYRELDPTNTFNSGIGKMSKRKNYQ

SEQ ID NO: 25036 - protein, 585 aa, Prochlorococcus marinus subsp. marinus str. CCMP1375
MTLLVQKFGGTSVGNVERIQAVAKRIALCKEEGNQLVIVVSAMGNSTDELTKLALSISGNPPSREMDMLLSTGEQVTIALLSIALNKIGIPATSMTGAQVGIITESAHGRARILEIKTERIKELLNAGQIVVVAGFQGTSLSSGKTAEITTLGRGGSDTSAVALASALEADACEIYTDVPGVLTTDPRLVHDAKLMKTVSCDEMLELASLGAAVLHPRAVEIARTYGVNLIVRSSWKNEPGTTLTSQAKQSIVRGGLELSRPVNGIELIEHQAVIGLSHVPDQPGIAADLFETLSKGGVNVDLIIQSTHEGNSNDITFTVSEQNLPTAKLLCEKLIKKLGGELTTQKQMSKLSIRGAGIMGRPGIAAKFFETLSKSGINLRLIATSEVKVSCVINSEFGTKGLKVTSKAFDLKNNQIQINPTIDCINEPEVRGVALDPNQVQVSVVNVPDVPGSAGTLCRSFADSGIILDTIVQSERKGDANGKIISFTLNKSDRENADSALTPLLRKWPNAYMKDGAAIARISAVGAGMPASIGTAGRMFRALANKKINIKMIATSEIRTTCIIAEKDGNHALEAVHTFFKLNA

SEQ ID NO: 25037 - protein, 303 aa, Prochlorococcus marinus subsp. marinus str. CCMP1375
MNKSNQNKDPIFNCDDAIYMCAKREVDNCNLGIYGVNYDGTTSFRPGARFGPSSIRQVSNGIESFCPQLNLDLEDINFTDFGNLEINFGAPEPVIKKVKTASNFIYSLGMKPLLIGGEHSITIGSIQSTIEYFPNLILIQLDAHADLREEWLGSKFNHACVMRRCLEMISSERVFQVGIRSGTKKEMHELRKTKRLVNFISGQPAKELYNALNPHKGKPIYLTVDVDWFDPSVISGTGTPEPGGFTWQDFSAIINVLQNHKIIGADIVELAPQLDPSGVSSIVGAKITRSLIMLLSISQSTIR

SEQ ID NO: 25038 - protein, 633 aa, Prochlorococcus marinus subsp. marinus str. CCMP1375
MGKVVGIDLGTTNSCVAVMEGGKPTVIANAEGFRTTPSVVAYTKNQDQLVGQIAKRQAVMNPENTFYSAKRFVGRRVDEVNEESKEVSYSVEKSGSSVKLKCPVLDKQFSPEEVAAQVLRKLSEDAGKYLGENINQAVITVPAYFNDSQRQATKDAGKIAGLEVLRIINEPTAAALAYGLDRKSNERILVFDLGGGTFDVSVLEVGDGVFEVLSTSGDTHLGGDDFDKVIVDHLAATFKANEGIDLRQDKQALQRLTEAAEKAKIELSNATQSEINLPFITATPEGPKHVDLTLTRAKFEELASNLIDRCRVPVEQALKDAKLSTGEIDEIVMVGGSTRMPAVKELVKRVTGKDPNQTVNPDEVVAVGAAIQGGVLAGEVKDILLLDVTPLSLGVETLGGVMTKMITRNTTVPTKKTETYSTAVDGQTNVEIHVLQGEREMASDNKSLGTFRLDGIPPSPRGVPQIEVTFDIDANGILSVTAKDKGSGKEQSISITGASTLSDNEVEKMVKDAETNATADKEKRDRIDIKNQAETLVYQTEKQLGELGDKVDEEAKAKVEAKRIQLKEATEKDDYETMKTLVEDLQKELYSLGASVYQQSNAASQAADGTSSESNNSTEGNDDVIDAEFTESK

SEQ ID NO: 25039 - protein, 402 aa, Prochlorococcus marinus subsp. marinus str. CCMP1375
MGDFQKVVLAYSGGVDTSACIPYLKNEYGVEEIIAFAADLGQGEELEVVRKKALLAGAKESLVDDLIEPFIHDFAFPAIRANALYEGRYPLSTALARPLIASRLVELAREMEAGAVAHGCTGKGNDQVRFDLAISSLAPHLKILTPAREWSMSRQELISYGEKFGIPAPVSKKSPYSIDLNLLGRSIEAGPLEDPFLAPREEVFQITSSIQESPDTPEEIEIQFEAGNPIAINGVTLDPVSIIKKANALAGRHGFGRIDMIENRVVGIKSREIYEAPGLMLLIKCHQEIESITLSADVLRTKVGIERQWADLVYQGFWFSPLKNALDAFIDRTQLDVNGSVKIQLFKGNATIQGRQSYSNSLYLPDIATYSAEDQYDHKSAEGFIYVWGLANRLWASINRDK

SEQ ID NO: 25040 - protein, 869 aa, Chlamydophila pneumoniae TW-183
MNFMEKFSDAVSEALEKAFELAKSSKHTYVTENHLLLALLENTESLFYLVIKDIHGNPGLLNTAVKDALSREPTVVEGEVDPKPSPGLQTLLRDAKQEAKTLGDEYISGDHLLLAFWSSNKEPFNSWKQTTKVSFKDLKNLITKIRRGNRMDSPSAESNFQGLEKYCKNLTALAREGKLDPVIGRDEEIRRTIQVLSRRTKNNPMLIGEPGVGKTAIAEGLALRLIQGDVPESLKGKQLYVLDMGALIAGAKYRGEFEERLKSVLKDVESGDGEHIIFIDEVHTLVGAGATDGAMDAANLLKPALARGTLHCIGATTLNEYQKYIEKDAALERRFQPIFVTEPSLEDAVFILRGLREKYEIFHGVRITEGALNAAVLLSYRYIPDRFLPDKAIDLIDEAASLIRMQIGSLPLPIDEKERELAALIVKQEAIKREQSPSYQEEADAMQKSIDALREELASLRLGWDEEKKLISGLKEKKNSLESMKFSEEEAERVADYNRVAELRYSLIPQLEEEIKQDEASLNQRDNRLLQEEVDERLIAQVVANWTGIPVQKMLEGEAEKLLILEESLEERVVGQPFAVSAVSDSIRAARVGLNDPQRPLGVFLFLGPTGVGKTELAKALADLLFNKEEAMVRFDMSEYMEKHSISKLIGSSPGYVGYEEGGSLSEALRRRPYSVVLFDEIEKADKEVLNILLQVFDDGILTDGKKRKVNCKNALFIMTSNIGSPELADYCSKKGSELTKEAILSVVSPVLKRYLSPEFMNRIDEILPFVPLTKEDIVKIVGIQMRRIAQRLKARRINLSWDDSVILFLSEQGYDSAFGARPLKRLIQQKVVILLSKALLKGDIKPDTSIELTMAKEVLVFKKVETPS

SEQ ID NO: 25041 - protein, 790 aa, Chlamydophila pneumoniae TW-183
MLFVSLIGIAFVGCQIFFGYNEFRSCKNLAEKQRKISEQTLAAVESVGLSVASWDTDVNGEEHKNNYAVRVGDKLFLLHNGEAAQSVYSSGESWSFVDHKCGFDNIHLALYRQQGSSFNPTNTGKVFLPTNHEGLPVLVVEFRNNKEPLVFLGEYAQGRISNKDSTIFGTALVFWRSGSDYIPLGLYDSREEKLVSLDLPITRAVIFGNDQDSAKSSDTANHYVLFNDYMQIIVSEESGSIEGINLPFASTNNKSIVNEIGFDRDLASEKSPEALFPGLSSKLPDGQQAKNSIGGYYPLLRRGLLSDSKKLLPLEYHALNVVSGRELATPVALRYRVLSYTPHSIQLESLDRSVQKVYKLPENPEEKPYVFETAITLTKETEDVWVTSGVPEVEIMSNASAPTIKYRVIKKNKGSLDKVKLPKVKEPLAVRRGVYPQWILNSNGYFGIILTPLSEIASGYGSLYISGSTAPTRLSAISPKNQLYPVSKYPGYETLLPLPKDAGTHRFLVYAGPLAEPTLKVLDKTITQEKGENPEYLDSISFRGVFAFITAPFAALLFIIMKFFKLVTGSWGISIILLTVFLKLLLYPLNAWSIRSMRRMQILSPYIQQIQQKYKNEPKRAQMEIMGLYKTNKVNPITGCLPLLIQLPFLIAMFDLLKSSFLLRGASFIPGWIDNLTAPDVLFSWQTSIWFIGNEFHLLPILLGIVMFLQQKVTSLHKKGPVTDQQKQQQVMGNMMAILFTAMFYNFPSGLNIYWLSSMILGVVQQWITNKILDSKHLKNEVVLNNKKHR

SEQ ID NO: 25042 - protein, 107 aa, Chlamydophila pneumoniae TW-183
MMEPYAVIQTGSKQYQVRSGDVIDVELLGEVASDKEVIFQDVLFVFDGTKASLGSPTIANAQVKAEYLSHVKGEKVVAYKYKKRKNYHRKHGHRQKYLRVKIREILI

SEQ ID NO: 25043 - protein, 392 aa, Schizosaccharomyces pombe
KTDDNEGYTWEGEYQRSWDIVQEDAEGSLVGVIAGLIQSGKRKRLLRDTTPLQRGIIRHMVLVLDLSNSMEERDFHHKRFDLQIKYASEFVLEFFEQNPISQLSIIGVMDGIAHRITDLHGNPQSHIQKLKSLRDCSGNFSLQNALEMARASLSHIASHGTREVLIIFGSILSSDPGDIFKTIDALVHDSIRVRIVGLAAEVAICKEICNKTNSSTKNAYGVVISEQHFRELLLESTIPPATDSAKTTDASLVMMGFPSKVVEQLPSLCACHSIPSRGGFHCPRCKAKVCTLPIECPSCSLVLILSTHLARSYHHLFPLKNWSEIPWSANPKSTHCFACQLPFPKPPVSPFDESTSSMRYACPSCKNHFCLDCDVFAHEQLHECYGCQCSGN

SEQ ID NO: 25044 - protein, 158 aa, Brassica rapa subsp. pekinensis
TMGISVKEFPWIKGFNFDVPHVVQVAQVLDGVENVGGDMFDSVPKCDAVLIKWVLHDWGDRDCIRILKNCKEAVPPNIGKVLIVESVIREKKKAMIVEDRDEKLEHVRLMLDMVMMAHTTTGKERTLKEWDFVLNEAGFARYEVRDIDDVQCVIIAYR

SEQ ID NO: 25045 - protein, 355 aa, Papaver somniferum
MDTAEERLKGQAEIWEHMFAFVDSMALKCAVELGIPDIINSHGRPVTISEIVDSLKTNTPSSSPNIDYLTRIMRLLVHKRLFTSELHQESNQLLYNLTRSSKWLLKDSKFNLSPLVLWETNPILLKPWQYLGKCAQEKSSPFERAHGCEIWDLALADPKFNNFLNGAMQCSTTTIINEMLLEYKDGFSGIAGSLVDVGGGTGSIIAEIVKAHPHIQGINFDLPHVVATAAEFPGVKHVGGDMFVDIPEADAVIMKWILHDWSDEDCTIILKNCYRAIRKKKNGKVIIVDCVLRPDGNDLFDKMGLIFDVLMMAHTTAGKERTEAEWKILLNNAGFPRYNVIRTPAFPCIIEAFPE

SEQ ID NO: 25046 - protein, 346 aa, Papaver somniferum
METVSKIDQQNQAKIWKQIYGFAESLVLKCAVQLEIAETLHNNVKPMSLSELASKLPVAQPVNEDRLFRIMRYLVHMELFKIDATTQKYSLAPPAKYLLRGWEKSMVDSILCINDKDFLAPWHHLGDGLTGNCDAFEKALGKSIWVYMSVNPEKNQLFNAAMACDTRLVTSALANECKSIFSDGISTLVDVGGGTGTAVKAISKAFPDIKCTIYDLPHVIADSPEIPNITKISGDMFKSIPSADAIFMKCILHDWNDDECIQILKRCKEALPKGGKVIIVDVVIDMDSTHPYAKIRLTLDLDMMLNTGGKERTKEEWKTLFDAAGFASHKVTQISAVQSVIEAYPY

SEQ ID NO: 25047 - protein, 662 aa, Papaver rhoeas
MASITTNLKNPLPLSSSFNSSKPLFSKSNLLSIPTKFISSRPLHITNSSYRNQSNKPKAITTETPISTTHTTSVSPPPFVSRYKDDEPRKGADVLVEALEREGVTNVFAYPGGASMEIHQALTRSSSIRNVLPRHEQGGIFSAEGYARASGLPGVCIATSGPGATNLVSGLADALLDSIPIVAVTGQVPRRMIGTDAFQETPIVEVTRSITKHNYLVLDVEDIPRVVKEAFFLATSGRPGPVLIDVPKDVQQQLVVPKWDTPMKLPGYMSRAPKSPEHNLLEQVVRLISESKKPVLYVGGGCINYSEELRRFVDLTGIPVASTLMGLGAHSCTDVLSLQMLGMHGTVYANYAVDKADLLLAFGVRFDDRVTGKIEAFASRSKIVHIDIDPAEIGKNKQPHVSICADMGVALKGLNKLLEEKMSKLKLDFVSWREELMEQKKNYPLSYKTFGEAIPPQYAIKVLDELTEGKAIISTGVGQHQMWAAQWYKYRGPRQWLTSAGLGAMGFGLPAAIGAAVAKPEAIVVDIDGDGSFMMNVQELAAVRVENLPVKILLLNNQHLGMVVQWEDRFYKANRAHTYLGNPAKDTEIFPDMLKFAEACDIPAARVTKVSELRAAIQKMLDTPGPYLLDVIVPHQEHVLPMIPAGGSFNEVIIEGDGRTKY

SEQ ID NO: 25048 - protein, 1130 aa, Solanum tuberosum
MASGSRTKHSHHSSSQAQSSGTSNVNYKDSISKAIAQYTADARLHAVFEQSGESGKFFDYSQSVKTTTQSVPERQITAYLTKIQRGGHIQPFGCMIAVDEASFRVIAYSENACEMLSLTPQSVPSLEKCEILTIGTDVRTLFTPSSSVLLERAFGAREITLLNPIWIHSKNSGKPFYAILHRVDVGIVIDLEPARTEDPALSIAGAVQSQKLAVRAISHLQSLPGGDIKLLCDTVVESVRELTGYDRVMVYKFHEDEHGEVVAESKRSDLEPYIGLHYPATDIPQASRFLFKQNRVRMIVDCHATPVRVTQDESLMQPLCLVGSTLRAPHGCHAQYMANMGSIASLTLAVIINGNDEEAVGGGRNSMRLWGLVVGHHTSVRSIPFPLRYACEFLMQAFGLQLNMELQLASQLSEKHVLRTQTLLCDMLLRDSPPGIVTQSPSIMDLVKCDGAALYYQGKYYPLGVTPTEAQIKDIVEWLLAYHGDSTGLSTDSLPDAGYPGAASLGDAVCGMAVAYITSKDFLFWFRSHTAKEIKWGGAKHHPEDKDDGQRMHPRSSFKAFLEVVKSRSSPWENAEMDAIHSLQLILRDSFKDAEASNSKAIVHAHLGEMELQGIDELSSVAREMVRLIETATAPIFAVDVEGRINGWNAKVAELTGVSVEEAMGKSLVHDLVYKESQETAEKLLYNALRGEEDKNVEIKLRTFGAEQLEKAVFVVVNACASKDYTNNIVGVCFVGQDVTGEKVVMDKFINIQGDYKAIVHSPNPLIPPIFASDENTCCSEWNTAMEKLTGWSRGEIVGKMLVGEIFGSCCRLKGPDAMTKFMIVLHNAIGGQDTDKFPFSFFDRNGKYVQALLTANKRVNMEGDTIGAFCFIQIASPELQQALRVQRQQEKKCYSQMKELAYICQEIKSPLNGIRFTNSLLEATNLTENQKQYLETSAACERQMSKIIRDIDLENIEDGSLTLEKEDFFLGSVIDAVVSQVMLLLREKGVQLIRDIPEEIKTLTVHGDQVRIQQVLADFLLNMVRYAPSPDGWVEIQLRPSMMPISDGVTVVHIELRIICPGEGLPPELVQDMFHSSRWVTQEGLGLSMCRKMLKLMNGEIQYIRESERCYFLIILDLPMTRKGPKSVG

SEQ ID NO: 25049 - protein, 590 aa, Lactococcus lactis subsp. lactis
MERGPQMANRIEGKAVDKTSIKHFIKLIRAAKPRYLFFIIGILAGIVGTLIQLQVPKMVQPLVNSFGHGVNGGKVALVIALYIGSAAVSAIAAIVLGIFGESVVKNLRTRVWDKMIHLPVKYFDEVKTGEMSSRLANDTTQVKNLIANSIPQAFTSILLLVGSIVFMLQMQWRLTLAMIIAVPVVMLIMFPIMTFGQKIGRTRQDSLANFQGIASESLSEIRLVKSSNAEKQASKKAENDVNALYKIGVKEAIFDGLMSPVMMLSMMLMIFGLLAYGIYLISTGVMSLGTLLGMMMYLMNLIGAVPTVATFFTELAKASGSTGRLTELLDEEQEVLHQGESLDLEGKTLSARHVDFAYDDSEQILRDISFEAQPNSIIAFAGPSGGGKSTIFSLLERFYQPTAGEITIDGQPIDNISLENWRSQIGFVSQDSAIMAGTIRENLTYGLEGDYTDEDLWQVLDLAFARSFVENMPDQLNTEVGERGVKISGGQRQRLAIARAFLRNPKILMLDEATASLDSESESMVQKALDSLMKGRTTLVIAHRLSTIVDADKIYFIEKGQITGSGKHNELVATHPLYAKYVSEQLTVGQ

SEQ ID NO: 25050 - protein, 164 aa, Pisum sativum
MPKDRTIGVALDFSKSSKNALKWALENLADNGDNITSSTSAKIPLMISQSAMVQIWFSFDSFERVQRPEIMNKYGVQIDIEVLDLLDTFSRQKEVNVVTKVYWGDAREKLLDAVEDLKLDSLVMGSRGLSTIQRILLGSVSNFVMANAPCPVTIVKDNISTSSK

SEQ ID NO: 25051 - protein, 299 aa, Paracoccidioides brasiliensis
MLSSGLLPLSSLRLVAFDQFCPEIAMIARCHASRLGLFTGPFDAELLGVLPKSLKFICHNGAGYDNIDIPSFTKKGIEVSSTPRAVNNATADIAVFLMIGALRQAWIPQQAIRALGHDPQGKVLGILGMGGVGMALRAQAFGMRIIYHNRNRINPEQEGMVYVSFDDLLTQSDIISLNCSLTDETRHIIGGPEFTKMKNGVIIVNTARGALIDEKALVGALKSGKVQSVGLDVYEHEPTVEKELLENPRVMLLPHIGTVTYETQRNMEQLVFDNLKSCLKEGKLLTKVPEQRIPNTILL

SEQ ID NO: 25052 - protein, 276 aa, Candida glabrata
VCFSPDGKFLATGAEDKLIRIWDIEQKKIVMVLKGHEQDIYSLDYFPSGDKLVSGSGDRTVRIWDLKTGQCTLTLSIEDGVTTVAVSPGDGKFIAAGSLDRAVRVWDSDTGFLVERLDSENELGTGHKDSVYSVVFTRDGNGVVSGSLDRSVKLWNLRNVNHNNADGKPTSGTCEVTYTGHKDFVLSVATTEDDEYILSGSKDRGVLFWDKVSGNPLLMLQGHRNSVISVAVNHGHPLGPNYHIFATGSGDCKARIWKYIKTTTEVNSNGKIQPIS

SEQ ID NO: 25053 - protein, 496 aa, Pastinaca sativa
MIGVWCMLLAYTLVSIGRIRAKATRKLPPGPFPLPIIGNIHKLGKHPHKSLANLAQVYGPIMRLKLGHMTTVVISSSTTARQVLRKQDIAFSNRALPNAVRALDHNKYSAVWLPVGSQWRGLRKIMSMNLFTANKLDANQHLRSQKVHDLIRYCEKCSQSGEAVDIGGAAFLTSLNLMSNTIFSKDMIDSYENSEAKVFRDLVWNIMVEIGKPNLVDYFPLLQWMDPQGIKRRLAYNFDTLIKLFDVMVDERLELNGPQNSRDVLDELLKLVNTDEIDKSHIQHMFLDLFGAGTDTSSSTVEWAMSEILRKPATVLVKAKAELDQVIGNGKIVEEADISKLDYLRCIVKETLRLHPPAPLLVPRQVQEEVELCGYTVPKNSQVLVNAWAIGRDPMLWENPLSFQPERFVDSEIDINGHGYELIPFGAGRRICPGMPLAMRMVPIMLGSLLNCFDWKLQGGIAPEDLNMEDKFGLTLAKLHPLRVVPTSRPTHLFAF

SEQ ID NO: 25054 - protein, 416 aa, Lactobacillus crispatus
MINQTNTLFVFVASVLVFFMTPGLAFFYGGMVSKKNAVNTMISVFMITGVAIVLFIAFGYNLALGKDVGGIFGLSKSVFLNGFDLKTLYSKDSGITILTYLMFQMMFSIITPALFVGAVVGRMKFKFLLAFVAIWSILIYYPMVHMVWTPDGILAKTGMLDFAGGTVVHITAGITALFLSIFVGPRIDFDPNGEVKHYNLPWVLMGTSILWIGWYGFNVGSALTVSDVATQAFLTTTVATGTSFVVWMFLDMFIKEKTTMIGLCTGALCGLVGITPAAGYVTVAGAFAIGFICTLASYGFIHVIKPKLKLDDPLDVFGCHGVSGIVGSILTGLFATKIVNPQIENGLLYGGGLHLITAQILGTLFTIIFVGIMTTIIVLLLKRIIPIRVSKEDELMGLDLAEHGEQADYGIEFEEK

SEQ ID NO: 25055 - protein, 134 aa, Lactobacillus delbrueckii subsp. lactis
IVDKRRPKANVSEVMNIIGDVKGKRAILIDDMIDTAGTITLAAQALKDAGATEVYACATHAVLSGPAVDRLNNSVIKSLVLTDSIQQPAEKNLDKMILVSVGPLMGDAIKLIMEHKPMSPLFDTRYDANKYKDK

SEQ ID NO: 25056 - protein, 143 aa, Lactobacillus delbrueckii subsp. lactis
MKKEGITDFNEMIDILNHKSGLLGLSGISSDMRDIRNSDDKRAKLADAVFINRVVRYVGSYIAEMGGADAVVFTAGIGEHDDEVREGVMKSLSFMGVDFDDAANKAANEGFITKEDSKLAGLIIPTDZELMIERDRCPVWPSL

SEQ ID NO: 25057 - protein, 110 aa, Lactobacillus delbrueckii subsp. lactis
  misc_feature (101)..(101): Xaa can be any naturally occurring amino acid
  unsure (1)..(110): unsure at all Xaa locations
LQPDTKIRTFAIGMDQNPIDLKYAREVADYLGTDHTEFIMTREDVLGVLREVIYTLETWDITTIRASIGMYILCKKIHETTDLKVILTGECSDELFGYKYXDFAPSPEEF

SEQ ID NO: 25058 - protein, 114 aa, Lactobacillus delbrueckii subsp. lactis
  misc_feature (33)..(33): Xaa can be any naturally occurring amino acid
  misc_feature (48)..(48): Xaa can be any naturally occurring amino acid
  unsure (1)..(114): unsure at all Xaa locations
TSAKPKIAAYQFTTLKPNLGMVLLPDGRDFSMXDLPGLIKGASQGVGXGIQFLRHVERTKVILHMVSMDPNNGRDAYEDYETILHELASYTEDDLSSKREIIVASQMDIPGADE

SEQ ID NO: 25059 - protein, 160 aa, Hevea brasiliensis
MSDEEHHFESKADAGASKTYPQQAGTIRKNGYIVIKNRPCKVVEVSTSKTGKHGHAKCHFVGIDIFNAKKLEDIVPSSHNCDVPHVNRTDYQLIDISEDGFVSLLTENGNTKDDLRLPTDENLLSQIKDGFAEGKDLVVTVMSAMGEEQICALKDIGPKN

SEQ ID NO: 25060 - protein, 160 aa, Hevea brasiliensis
MSDEEHHFESKADAGASKTYPQQAGTIRKNGYIVIKNRPCKVVEVPTSKTGKHGHAKCHFVGIDIFNAKKLEDIVPSSHNCDVPHVNRTDYQLIDISEDGFVSLLTENGNTKDDLRLPTDENLLSQIKDGFAEGKDLVVTVMSAMGEEQICALKDIGPKN

SEQ ID NO: 25061 - protein, 160 aa, Hevea brasiliensis
MSDEEHHFESKADAGASKTYPQQAGTIRKNGYIVIKNRPCKVVEVSTSKTGKHGHAKCHFVGIDIFTAKKLEDIVPSSHNCDAPHVNRTDYQLIDISEDGFVSLLTESGNTKDDLRLPTDENLLSQIKDGFAEGKDLVVTVMSAMGEEQICALKDIGPKN

SEQ ID NO: 25062 - protein, 132 aa, Hevea brasiliensis
MSDEEHHFESKADAGASKTYPQQAGTIRKNGYIVIKNRPCKVVEVSTSKTGKHGHAKCHFVGIDIFTAKKLEDIVPSSHNCDAPHVNRTDYQLIDISEDGFVSLLTESGNTKDNLRLPTDENLLSQIKDGFA

SEQ ID NO: 25063 - protein, 159 aa, Hevea brasiliensis
MSDEEHHFESKADAGASKTYPQQAGTIRKNGYIVIKNRPCKVVEVSTSKTGKHGHAKCHFVGIDIFNAKKLEDIVPSSHNCDVPHVTRTDYQLIDISEDGFVSLLTENGNTKDDLRLPTDENLLSQIKDGFAEGKDLVVTVMSSMGEEQICALKDIGPK

SEQ ID NO: 25064 - protein, 159 aa, Hevea brasiliensis
MSDEEHHFESKADAGASKTYPQQAGTIRKNGYIVIKNRPCKVVDVSTSKTGKHGHAKCHFVGIDIFNAKKLEDIVPSSHNCDVPHVTRTDYQLIDISEDGFVSLLTENGNTKDDLRLPTDENLLSQIKDGFAEGKDLVVTVMSSMGEEQICALKDIGPK

SEQ ID NO: 25065 - protein, 158 aa, Hevea brasiliensis
SDEEHHFESKADAGASKTYPQQAGTIRKNGYIVIKNRPCKVVEVSTSKTGKHGHAKCHFVGIDIFNGKKLEDIVPSSHNCDVPHVTRTDYQLIDISEDGFVSLLTENGNTKDDLRLPTDENLLTQIKDGFAEGKDLVVTVMSSMGEEQICALKDIGPK

SEQ ID NO: 25066 - protein, 88 aa, Hevea brasiliensis
EDIVPSSHNCDVPHVTRTDYQLIDISEDGFVSLLTENGNTKDDLRLPTDENLLTQIKDGFAEGKDLVVTVMSSMGEEQICALKDIGPK

SEQ ID NO: 25067 - protein, 622 aa, Streptomyces griseus
MCGIAGWVVRQDGRPREDPAVAEAMAGAMACRGPDEQGVRGGRHVTLVHTRMAVIDLLGGRQPMAADESEDPAATLTYCGEIYNAAELRSDLAGRGHRFRTRSDTEVVLRAYLEWGERCPERLEGMFAFAVWDARTRSLFLARDRFGVKPLYYAETGDGLVFGSEPKALLVHSDVSPEVDLDGLRVLFSMARAPGECVYRSLSDLPPAHTLRFGPDGRLSLRRYWQLEARPHEEDLAGTVATVRGLLESSVARELVSDVPLSVLLSGGLDSSTVAALAARALADGDGGPVRTTTVTYSGYGDNFQPDLVRSAPDSPYARAVAEHIGAEHLEIELTTADLIDPVARRTVLRAQDVPAPFGDMDTSTYQAFAGVRRHSRVALTGESADEIFGGYSWVHIPDLAHEEQFPWVAFEQWHPGTRRGLGQGLLSPAFKDRLDMGSYYAERYAQAMSRIPRLPREGEEERRAREICDLHLTHWLPRLLERNDRLSMVSGLEVRVPFCDHRLVQYAYNIPWAMKTFDGREKSVLRAAARDLLPERVLDRPKAPFPVSQDATYTKALHQELTEVLADPASPVLPLLDLEAARAVVAREGGADLQDWLHRMNVEMVLQVDAWLRELGGDVEL

SEQ ID NO: 25068 - protein, 177 aa, Yersinia enterocolitica
MSEVEKTYCGFIAIVGRPNVGKSTLLNELLGQKISITSRKPQTTRHRIMGIHTEGPYQAIYVDTPGLHIEEKRAINRLMNRAASSSIGDVELVIFVVEGTNWTADDEMVVNKLRSLQCPVLLAINKVDNVTDKTKLLPHIQFLSQQMNFLDVVPISAEKGMNVDTIASIVRKHMPEA

SEQ ID NO: 25069 - protein, 1122 aa, Stellaria longipes
MASRAQSQSSTNSGRSKHSARIIAQTIQDAKFHAEFEESSNEFDYSSSVRGSTSGVNQLPKSDKVTSSYLLQIQKGKFIQPFGCLLALDDKTFRVIAFSENAPEMLTMVSHAVPSVGDLPVIGIGTDIRTIFTGPSASALQKALGFTDVSLLNPILVHCKNSGKPFYAIVHRVTRSLVIDFEPVKPYEVPMTAAGALQSYKLAAKAITRLQSLPSGNMVRLVDTMVQEVFELTGYDRVMAYKFHDDDHGEVVSEVTKPNLDSYLGLHYPATDIPQAARFLFMKNKVRLICDCRAKNVRVVQDEKLSVDLTLCGSTLRAPHGCHAQYMENMNSIGSLVMAVVVNDEDDEDGGSAPAQPHKRKRLWGLVVCHHTSPRFVPFPLRYACEFLAQVFAIHVNKELELENQFLEKKILRTQTLLCDMLIRDAPLGIVTHSPNIMDLVKCDGAALLYNNKVWRLGSTPTDYQLQEIGGWLSRDHMDSTGLSTDSLYDAGYPAALELGDSVCGMAAVSITVNDMLFWFTSHTAAEIKWGGAKHEAGEKDDGSKMHPRSSFKAFLEVVKRRSVPWKDYEMDAIHSLQLILRNAFKDGEAADLNTSVIHSKISDLQISGLKELEAVTSEMVRLIETATVPIFAVDSDGLVNGWNTKIYELTGIPVEEAVGKHIAALVEDSSIDNVKQMLQSALQGEEKKNVQFEVKRHHSIPDSGPISLIVNACASKDVNGNVVGVCLIAQDITGQKTVMDKFLRIEGDYKAIIQSPNPLIPPIFGTDEFGWCSEWNPAMAKLTGWTREEVIDKMLLGEVFGMHKSCCRLKNQEAFVNLGVLLNGAMSGQNIEKLSIGFFTRSGKYIECLLCVNKKLNGEGDVTGVFCFLQLASHDLQHALHIQRLAEQAATKRANVLAYMKRQIKNPLAGIIFSGKILDGTNVDEKQRLVLQTSARCQGQLNKILDDSDLDSIIDGYCELEMVEFAVQDILVASISQVMAKSSEKGIQMSNNCTEHGFKETLYGDSLRLQQILADFLSISVNFTSPGGHIGVTVRLTKDKIGESVQLANLEFRIMHTGGGISEELLSEMFESRGNASEDGISLLISRKLVKLMNGDIQYLRSAGTSTFIISVELAVAGNSS

SEQ ID NO: 25070 - protein, 1128 aa, Stellaria longipes
MESRNEGSRTNNNNNSNNPSDTMSRAIAQYTIDARLHAVFEQSGESGKSFDYSQSVKTYTSAESVPEQQITAYLSKIQRGGLIQPFGCMLAIDDLTYRIIAYSQNSVELLGFITTTTTTAVPSLEAVQQRIIAVGTDIRSLFMSSSCVLLEKAFSAREITLLNPVWIHSKANGKPFYAILHRIDVGIVIDLEPARTEDPALSIAGAVQSQKLAVRAISQLQSLPGGDVKLLCDTVVESVRQLAAYDRVMVYKFHEDEHGEVVAESKRADLEPYLGLHYPATDIPQASRFLFKQNRVRMIVDCHADSVSVVQDERLRQPLCLVGSTLRAPHGCHSQYMANMGSIASLVMAVIINGNDDEGSTRNAMRLWGLVVCHHTSPRSIPFPLRYACEFLMQAFGLQLNMELQLSAQVLEKRVLRTQTLLCDMILRESPTGIVTQSPSIMDLVKCDGAALLFCGKYYPLGVTPTELQLKDIVQWLLSNHGDSTGLSTDSLADAGYPGALALADAVCGMAVAFITRSDFLFWFRSHPAKEIKWGGAKHHPEDKDDVQRMNPRSSFKAFLEVVKSRSLPWENAEMDAIHSLQLILRDSFKDEETTHSKAIVHDQAGDVAMQGIDELSSVAKEMVRLIETAMAPIFAVDADGCINGWNAKASELIGLSVEEAMGKSLVHDLVCEDSKNVTQELLLHALQGDEDKNVEIKLKAFGSQQHKKAVYVVVNACCSKDYTNKIVGVCFVGHDVTGQKNVMDKFVNIQGDYKAIVHSPSPLIPPIFASDENSCCTEWNTAMEILTGYGKEDVIGKTLVGEIFGSICRLKGHDSLTKFMVVLHNAIGGQDSDKFPFSFYNRGGRYVQGLLTANKRTNIDGHITGAFCFLQIASSDLQQALEIQRQQENVCFERMKELAYLCQEIKNPLNGIRFANSLLEATSLGEDQKQFIETSNACEKQIKKILGDIHLESVDESPFELVKTEFMLGNIINAVVSQVMIPLRERELQLIRDIPEEIKTLAVCGDQIRIQQILAEFLVNMVRYAPSPDGWVEIHVLPRLKQVADGATVAYIEYRLVSPGEGLPPDLVQDMFHNSRWTTQEGLGLSMCRKILKLMNGEVQYIRESERSYFFVILELRMPPKQLMNVE

SEQ ID NO: 25071 - protein, 1114 aa, Stellaria longipes
MSSSTSRNSSVRSRHDAHVVIQTPVDAQLASDFEQSERVFNYTSSVDLNLLASSSDVPSSTVKSYLQKVQRGGLIQSFGCLIAIDEKNFKVIAYSENAPEMLDLTPHTVPNIEQLEALTFGTDVATLFTSSGVSALQKAVNYSELNLLNPILVHSKNSGKPFYAILHRIKVGLVLDLETVNLAETLVGVSGALMSYKLAAKAISKLQSLPSQNIPLLCDVLVKEVRELTGYDRVMVYKFHDDQHGEVIGESHSPSLDSYLGLHYPATDIPQASRFLFLKNKVRMICDCRSPSVKVIQDEALTQPLSLGGSTLRAPHGCHAQYMANMGSIASLVMAVTINNEEDEVSDRHRTRKLWGLVVCHHTSSRFVPYPLRYACEFLVQVFGIHINKEVELAAQVREKHILKIQSMLCDMLMRDSPITIITQSPNVMDLVKCDGAALLYQSKLWVLGITPKSNQIKDISQWLFEYHGNTKGLITDSLKEAGYPGALELGDAVCGMAAVRISSEEMLFWFRSHTAKEIKWGGAKHEPGQNDERGIMHPRSSFNAFLDVVKWRSVPWEDMEMDSIYSLQLIFIKCLVKNKTMSDTSKMIVNVPGVGVGGPLSSALKVEPLTGEVIRLIETAAVPIFSVDVTGAINGWNFKVAELTGVPMEQVIGSQLVDVVVEGTVEVLKNILSSALQGTEEKNVEIRLRTLGSHGKTSYVVLVVNACCSRDVDENVTGICFVGQDVTEEKRIVDQITELQGDYSGIMRNPCHLIPPIFLIDDQGVGLEWNDAMAKISGLSKEYTVGRMLIGEVFTNGNDGCQVKDYETLLRLKIFLSKMIDGEESDKVLFGFFDHRKKCIDALLCATPRFNADRNITGVLCFLHLPSPELQYSIHMQKVSEKAATSTLKKLTYFREQVRSPIKGMAFTRNLLESSELNIEQKQILTTISLCESQLMKIIEDTDIPSIEEGYLETSSDDFNLLEALDAVVSQVMPLSQESQVHIKHDFPSDLSPVCLFGDNVRLQQILSNFLTIAVRFTPPSTGSSVKFAVSSRTEHVGSKMQMFHVEFRITHPLPGVPENLIREMFQRSPGMSRGGLSLYISHKLVKIMNGTLQYLRGEDYSSFIVFLEFPVA

SEQ ID NO: 25072 - protein, 454 aa, Stellaria longipes
ALGFTDVFLLNPILVHCKNSGKPFYAIVHRVTRSLVIDFEPVKPYEVPMTAAGALQSYKLAAKAITRLQSLPSGNMDRLVDTMVQEVFELTGYDRVMAYKFHDDDHGEVVSEVTKPNLDSYLGLHYPATDIPQAAKFLFMKNKVRLICDCRAKNVRVVQDEKLSVDLTLCGSTLRAPHGCHAQYMENMNSIGSLVMAVVVNDEDDEDGGSAPAQPHKRKRLWGLVVCHHTSPRFVPFPLRYACEFLAQVFAIHVNKELELENQFLEKKILRTQTLLCDMLMRDAPLGIVTQSPNIMDLVKCDGAALLYNNKVWRLGSTPTDYQLQEIGRWLSRDHMDSTGLSTDSLYDAGYPAALELGDSVCGMAAVRITVNDMLFWFRSHTAAEIKWGGAKHEAGEKDDGSKMHPRSSFKAFLEVVKRRSVPWKDYEMDAIHSLQLILRNAFKDGEAADLNTS

SEQ ID NO: 25073 - protein, 424 aa, Stellaria longipes
VWIHSKANEKPFYAILHRIDVGIVIDLEPARIEDPALSIAGAVQSQKLAVRAISQLQSLPGGDVKLLCDTVVESVRQLTAYDRVMVYKFHEDEHGEVVAESKRADLEPYLGLHYPSTDIPQASRFLFKQNRVRMIVDCHADSVSVVQDERLRQPLCLVGSTLRAPHGCHSQYMANMGSIASLVMAVIINGNDDEGSTRNAMRLWGLVVCHHTSPRSIPFPLRYACEFLMQAFGLQLNMELQLSAQVLEKRVLRTQTLLCDMILRESPTGIVTQSPSIMDLVKCDGAALLFRGKYYPLGVTPTELQLKDIVQWLLSNHGDSTGLSTDSLADAGYPGALALADAVCGMAVAFITRSDFLFWFRSHTAKEVKWGGAKHHPEDKDDVQRMHPRSSFKAFLEVVKSRSLPWENAEMDAIHSLQLILRDS

SEQ ID NO: 25074 - protein, 452 aa, Stellaria longipes
AVNYSELNLLNPILVHSKNSGKPFYAILHRIEVGLVVDLETVNLAETLVGASGALMSYKLAAKAISKLQSLPSQNIPLLCDVLVKEVRELTGYDRVMVYKFHDDEHGGVIAESHSPSLDSYLGLHYPATDIPQASRFLFLKNKVRMICDCRSPSVKVIQDETLTQPLSLGSSTLRAPHGCHAQYMANMGSIASLVMAVTITNEEDEVSDRHRTRKLWGLVVCHHTSSRFVPYPLRYACEFLVQVFGIHINKEVELAAQVREKHILKIQSMLCDMLMRDSPITIMTQSPNVMDLVKCDGAALLYQSKLWVLGITPKSNQIKDISQWLFEYHGNAKGLITDSLKEAGYPGALELGDAVCGMAAVRISSEEMLFWFRSHTAKEIKWGGAKHEPGQNDEQGIMHPRSSFNAFLDVVKWRSVPWEDMEMDSIYSLQLIFIKCLVKNKTMSDTSKMIV

SEQ ID NO: 25075 - protein, 454 aa, Stellaria longipes
ALGFTDVSLLNPILVHCKNSGKPFYAIVHRVTRSLVIDFEPVKPYEVPMTAAGALQSYKLAAKAITRLQSLPSGNMDRLVDTMVQEVFELTGYDRVMAYKFHDDDHGEVVSEVTKPNLDSYLGLHYPATDIPQAARFLFMKNKVRLICDCRAKNVQVVQDEKLSVDLTLCGSTLRAPHGCHAQYMENMNSIGSLVMAVVVNDEDDEDGGSAPAQPHKRKRLWGLVVCHHTSPRFVPFPLRYACEFLAQVFAIHVNKELELENQFLEKKILRTQTLLCDMLMRDAPLGTVTQSPNIMDLVKCDGAALLYNNKVWRLGSTPTDYQLQEIGRWLSRDHMDSTGLSTDSLYDAGYPAALELGDSVCGMAAVRITVNDMLFWFRSHTAAEIKWGGAKHEAGEKDDGSKMHPRSSFKAFLEVVKRRSVPWKDYEMDAIHSLQLILRNAFKDGEAADLNTS

SEQ ID NO: 25076 - protein, 424 aa, Stellaria longipes
VWIHSKANEKPFYAILHRIDVGIVIDLEPARTEDPALSIAGAVQSQKLAVRAISQLQSLPGGDVKLLCDTVVESVRQLAAYDRVMVYKFHEDEHGEVVAESKRADLEPYLGLHYPSTDIPQASRFLFKQNRVRMIVDCHADSVSVVQDERLRQPLCLVGSTLRAPHGCHSQYMANMGSIASLVMAVIINGNDDEGSTRNAMRLWGLVVCHHTSPRSIPFPLRYACEFLMQAFGLQLNMELQLSAQVLEKRVLRTQTLLCDMILRESPTGIVTQSPSIMDLVKCDGAALLFRGKYYPLGVTPTELQLKDIVQWLLSNHGDSTGLSTDSLADAGYPGALALADAVCGMAVAFITRSDFLFWFRSHTAKEVKWGGAKHHPEDKDDVQRMHPRSSFKAFLEVVKSRSLPWENAEMDAIHSLQLILRDS

SEQ ID NO: 25077 - protein, 452 aa, Stellaria longipes
AVNYSELNLLNPILVHSKNSGKPFYAILHRIEVGLVVDLEIVNLAETLVGASGALMSYKLAAKAISKLQSLPSQNIPLLCDVLVKEVRELTGYDRVMVYKFHDDEHGEVIAESHSPSLDSYLGLHYPATDIPQASRFLFLKNKVRMICDCRSPSVKVIQDETLTQPLSLGGSTLRAPHGCHAQYMANMGSIASLVMAVTINNEEDEVSDRHRTRKLWGLVVCHHTSSRFVPYPLRYACEFLVQVFGIHINKEVELAAQVREKHILKIQSMLCDMLMRDSPITIMTQSPNVMDLVKCDGAALLYQSKLWVLGITPKSNQIKDISQWLFEYHGNTKGLITDSLKEAGYPGALELGDAVCGMAAVRISSEEMLFWFRSHTAKEIKWGGAKHEPGQNDEQGIMHPRSSFNAFLDVVRWRSVPWEDMEMDSIYSLQLIFIKCLVKNKTMSDTSKMIV

SEQ ID NO: 25078 - protein, 610 aa, Pichia angusta
MSRYFLLACTLALQCVAASQEDYIVKDLPGLSNIPAVVRPVMHAGHLEIDEEHNTELFFWRFQNPKNNGTHQTLHRNELIVWLNGGPGCSSMDGAMMETGPLRVSDKLEVELNPGSWTQVADILFVDQPAGTGFSYTDSYDTELKQAAQHFWQFLKTYYQLFPEDRTKKLYLAGESYAGQYIPYFAKEIIENNSLNISLEGLLIGNGWIDPDIQSLSYVPFSLEAGFLDRQSPSMAQVLKQHEKCQQAIDDPSNHDFEKVECVKIFHSILAASRDETKPAKEQCVNMYDYRKHDYFPACGSNWPEGLPTVTKFLNLDAVQKALNLKSAKRWHECDGKVEFFFQPEHSVKSFDLLPKLLEKMKIALFAGDKDIICNHKSIEMVIEKLQITPGQFGFTNSRKSGWIYDGQEVGEVETQSNLTYIKVFNSSHMVPYDLPEVSRGLFDIITNSIEKRSTDIVTPVYDSRGNYKFVEEKQDTDQNEEEEKEKPPKHHHSLTFYVAEVAILAVLAYLLYSFYKSFAKSRKSAFLSLSSKKKKKQVHWFDESDIGMDQEAGEADHKPKSMLESVFNKLGYGGQYDTVQDGRDIEMAPVEEHEDQFIIQSDEEEFGHR

SEQ ID NO: 25079 - protein, 271 aa, Catharanthus roseus
MDQQASYNLAGDTVPYNLAEIWPFPMNSATAATSFHNNNNAANSLAAAAAAGISMNMNVNLSVNRDHDPMVMDQAPNLNGGVRRRREDDDSAKGVSTSNDANAMNEGDNKRLKTGGSNENHESKAEGEETAKPAEPPKQDYIHVRARRGQATDSHSLAERARREKISERMKILQDLVPGCNKVIGKALVLDEIINYIQSLQRQVEFLSMKLEAVNSRLSPGIEGFPSKEFGQPPYDPSGMAFGSQSSREYGRDTSPEWLHMQIGGGFERTT

SEQ ID NO: 25080 - protein, 386 aa, Gossypium hirsutum
MDQVQHPSVMQKVAGQLFRSSHSQDFQGYNGSFRSPALYQRRAAYGNYSNAALQHPVRAFGDLSMVPSTASAICVQAPAEKGFSSFAIDFLMGGVSAAVSKTAAAPIERVKLLIQNQDEMIKSGRLSEPYKGIGDCFKRTIKDEGFGSLWRGNTANVIRYFPTQALNFAFKDYFKRLFNFKKDRDGYWKWFAGNLASGGAAGASSLLFVYSLDYARTRLANDAKAAKKGGERQFNGLVDVYRKTLKSDGIAGLYRGFNISCVGIIVYRGLYFGMYDSLKPVLLTGSMQDSFFASFVLGWLITNGAALASYPIDTVRRRMMMTSGKAVKYKSSLDAFSQILKNEGGKSLFKGAGSNILRAIAGAGVLAGYDKLQLIVFGKKYGSGGA

SEQ ID NO: 25081 - protein, 331 aa, Triticum aestivum
MTQNLGISVPIMSPSPMFANAPPEKKGVKNFAIDFLMGGVSAAVSKTAAAPIERVKLLIQNQDEMIKAGRLSEPYKGIGDCFGRTIKDEGFGSLWRGNTANVIRYFPTQALNFAFKDYFKRMFNFKKDKDGYWKWFGGNLASGGAAGASSLFFVYSLDYARTRLANDAKASKGGGERQFNGLVDVYRKTLKSDGIAGLYRGFNISCVGIIVYRGLYFGLYDSLKPVLLTGTLQVCFFASFALGWLITNGAGLASYPIDTVRRRMMMTSGEAVKYKSSLDAFQQILKKEGAKSLFKGAGANILRAIAGAGVLSGYDQLQILFFGKKYGSGGA

SEQ ID NO: 25082 - protein, 331 aa, Triticum aestivum
MTQNLGISVPMMSSSPLFANAPPEKKGVKNFAIDFLMGGVSAAVSKTAAAPIERVKLLIQNQDEMIKAGRLSEPYKGIGDCFGRTIKDEGFGSLWRGNTANVIRYFPTQALNFAFKDYFKRMFNFKKDKDGYWKWFGGNLASGGAAGASSLFFVYSLDYGRTRLANDAKASKGGGDRQFNGLVDVYRKTLKSDGIAGLYRGFNISCVGIIVYRGLYFGLYDSLKPVLLTGTLQVCSFASFALGWLITNGAGLASYPIDTVRRRMMMTSGEAVKYKSSLDAFQQIPAKEGAKSLFKGAGANILRAIAGAGVLSGYDQLQILFFGKKYGSGGA

SEQ ID NO: 25083 - protein, 350 aa, Glycine max
MSFLRSFARNKDISKVGRRGIHCMQKLCAEKISPDSLEKAQNRVIDAALTLVRENTGLRKNLCHSLGGAVATSTLLGVPLGHNSSFLEGPAFAPPFIREGIWCGSANSTTEEGKDLKDLRIMVDVGDIPIQEMRDCGIGDERLMKVVSDSVKLVMEEDPLRPLILGGDPSISYPVVRAISEKLGGPVDVLHFDAHPDLYDEFEGNYYSHASSFARIMEGGYARRLLQVGIRSINKEGREQAKKFGVEQFEMRHFSKDRPFLENLNLGEGAKGVYISIDVDCLDPGYAVGVSHYESGGLSFRDVMNMLQNLKGDIVGGDVVEYNPQREPPDRMTAMVAAKFVRELAAKMSK

SEQ ID NO: 25084 - protein, 246 aa, Houttuynia cordata
MGRGRVELKRIENKINRQVTFAKRRNGLLKKAYELSVLCDAEVTLIIFSNSGKLYEFCSSSSMMKTLERYQKCSYSMPEATGPSRETEKSYQEYLKLKGKVEHLQRIQRNLLGEDLGPLSSKELEQLENQLEQSLRQIRSTKTQSLLDQLSDLRRKEQQLLESKKILNKKLAEHGPENPLQLSWQSCGQSNPYSSQPAHSEAFFQPLDCNPTLQIGYPSVGQEQIMAAPATAAPQNANGFIPGWLV

SEQ ID NO: 25085 - protein, 247 aa, Houttuynia cordata
MGRGRVELKRIENKINRQVTFSKRRNGLLKKAYELSVLCDAEVALIIFSNRGKLYEFCSSSSMMTTLERYQECSYSMPEATGPTRETEKSYQEYLKLKGKVELLQRTQRNLLGEDLGPLSSKELEQLENQLEHSLRQIRSTKTQALLDQLSDLRRKEQQMLESNKILKKKLAEHGPENLLQLAWQSCGQSNPYSRQPAHSEAFFQPLDCNPTLQIGYHPVGQEEITMAAPAIAPPQNVNGFIPGWMV

SEQ ID NO: 25086 - protein, 147 aa, Pisum sativum
MGFTDKQEALVNSSWESFKQNLSGNSILFYTIILEKAPAAKGLFSFLKDTAGVEDSPKLQAHAEQVFGLVRDSAAQLRTKGEVVLGNATLGAIHVQRGVTDPHFVVVKEALLQTIKKASGNNWSEELNTAWEVAYDGLATAIKKAMT

SEQ ID NO: 25087 - protein, 286 aa, Medicago sativa subsp. x varia
MSHFGRSGPPDISDTYSLLVLNITFRTTADDLFPLFDKYGKVVDIFIPKDRRTGESRGFAFVRYKYADEASKAVDRLDGRMVDGREITVQFAKYGPNAERIQKGRIIETSPRSKSSRSRSPSKRRHRDDYKEKDYRRRSRSRSYDRHERDRHRGRDRDHRRRSRSRSASPGYKGRGRGRHDDERRSRSRSRSVDSRSPVRRSSIPKRSPSPRRSPSPKRSPSPKRSPSPKRSPSLKRSISPQKSVSPRKSPLRESPDSRSRGGRSFTPRSPGASRSPSPRNSNGDE

SEQ ID NO: 25088 - protein, 449 aa, Thermus thermophilus
MGLIIVANRAPFRLTPEGLVPAVGGLATALLPVLERRHGVWVAAGEWREKGQAATPRESQVRLEQVFLPEKEWQGYYGGFSNRVLWPLCHYFLERVELRRDFYQDYQRANRRFAERVAQVFREGDTVFVQDYHLLLLPRLLRERIPAKIGFFFHIPWPSSGVFRILPWGRALVEGVLGADLIGFHTPEYVENFLRTAAYYGYQVEENRVRVGERWVRVEAHPLGIDTGRFGELAQDPHIGLHARALKRLAGAERLILGVDRLDYTKGILERLLAYERLLQSYPQWRGRVAFFQIATPSRTSVHAYRELKRRVDEVVGRIMGSFLREDWVPLRYFYQTYTQEELAAFYRAADVALITPLRDGMNLVAMEYAYTTEDGVLVLSNLAGAAEYLKEALLVNPYDLDGMAQALDRALRMPGGERRERLSALKARIEALDVQGWAERFLASLEEG

SEQ ID NO: 25089 - protein, 239 aa, Zea mays
RIIAEYIWIGGSGIDLRSKARTVKGPITDPSQLPKWNYDGSSTGQAPGEDSEVILYPQAIFKDPFRKGNHILVMCDCYTPQGEPIPTNKRYSAAKVFSHPDVAAEVPWYGIEQEYTLLQKDVSWPLGWPVGGYPGPQGPYYCAAGADKAFGRDVVDAHYKACLYAGINISGINGEVMPGQWEFQVGPSVGISAGDEIWVARYILERITEMAGIVLSLDRSQSGATGTAPAPTPTTAPSR

SEQ ID NO: 25090 - protein, 389 aa, Thermotoga maritima
MGSDKIHHHHHHMVSRRISEIPISKTMELDAKAKALIKKGEDVINLTAGEPDFPTPEPVVEEAVRFLQKGEVKYTDPRGIYELREGIAKRIGERYKKDISPDQVVVTNGAKQALFNAFMALLDPGDEVIVFSPVWVSYIPQIILAGGTVNVVETFMSKNFQPSLEEVEGLLVGKTKAVLINSPNNPTGVVYRREFLEGLVRLAKKRNFYIISDEVYDSLVYTDEFTSILDVSEGFDRIVYINGFSKSHSMTGWRVGYLISSEKVATAVSKIQSHTTSCINTVAQYAALKALEVDNSYMVQTFKERKNFVVERLKKMGVKFVEPEGAFYLFFKVRGDDVKFCERLLEEKKVALVPGSAFLKPGFVRLSFATSIERLTEALDRIEDFLNSR

SEQ ID NO: 25091 - protein, 354 aa, Papaver somniferum
MGSSIDAETHEVDIKDQAQLWNIIYGYADSLVLRCTVEIGIADIIKNNNGSITLSELVSKLPLSNVNSDNLYRLLRYLVHLNILGQQTCAAGVDRVYSLKPVGTLLLKDSERSMAPVILGLSQKDFLFVWNFVKEGLGTGSTTAFEKAMGMDMWKYLEVNPNQSQLFDEGQAGETRLLTKTLLVDCRDTFQGMDSLVDVGGGNGTTIKAIHEAFPHIKCTLYDLPHVIANSDDHPNILKVPGDMFMSVPSAQVLLLKCVLHDWTDEHCVNILKKCKEAIPKETGKVIIVDVALEEESEHELTKARLILDIDMLVNTGGRERTAEDWENLLKRAGFRSHKIRPIRAIQSVIEAFP

SEQ ID NO: 25092 - protein, 357 aa, Papaver somniferum
MGSLDAKPAAATQEVSIKDQAQLWNIIYGFADSLVLRCAVEIGIADIIKNNDGAITLAQLAAKLPITNVSSDYLYRMVRYLVHLNIIEQETCNGGVEKVYSLKPVGTLLLRDAERSMVPMILGMTQKDFMVSWHFMKEGLGNGSTTAFEKGMGMDIWKYLEGNPDQSQLFNEGMAGETRLLTKTLIEDCRDTFQGLDSLVDIGGGNGTTIKAIYEAFPHIKCTLYDLPHVVANSHDLPNIEKVPGDMFKSVPSAQAILLKLILHDWTDEECVNILKKCKEAIPKETGKVIIVDVALEEESNHELTKTRLILDIDMLVNTGGRERTADDWENLLKRAGFRSHKIRPIRAIQSVIEAFP

SEQ ID NO: 25093 - protein, 346 aa, Papaver somniferum
METVSKIDQQNQAKIWKQIYGFAESLVLKCAVQLEIAETLHNNVKPMSLSELASKLPVAQPVNEDRLFRIMRYLVHMELFKIDATTQKYSLAPPAKYLLRGWEKSMVDSILCINDKDFLAPWHHLGDGLTGNCDAFEKALGKSIWVYMSENPEKNQLFNAAMACDTRLVTSALANECKSIFSDGISTLVDVGGGTGTAVKAISKAFPDIKCTIYDLPHVIADSPEIPNITKISGDMFKSIPSADAIFMKCILHDWNDDECIQILKRCKEALPKVGKVIIVDVVIDMDSTHPYAKIRLTLDLDMMLNTGGKERTKEEWKTLFDAAGFASHKVTQISAVQSVIEAYPY

SEQ ID NO: 25094 - protein, 262 aa, Nicotiana tabacum
  misc_feature (218)..(218): Xaa can be any naturally occurring amino acid
  unsure (1)..(262): unsure at all Xaa locations
MDTSHWPQGIGLVKAVEPSKPVPTERKPRPQKEQAINCPRCNSTNTKFCYYNNYSLSQPRYFCKTCRRYWTEGGSLRNVPVGGGSRKNKRSSSSSNNSSSSTSSSYKKIPDLTIPTSSQNPKIINEPHDLNLAFNPSATSNFSNISEFMALPLMNPNSTTSFMSSIMPQLSDSNNIMYSSSSTGLPNLHDLKPTLNFSLDGFDNNNGYGSLQGETAGXKLFFPLDDLKNVSTPNDDHEFDEQNRGQAAESHGFWNGMLGGGS

SEQ ID NO: 25095 - protein, 428 aa, Rhodobacter capsulatus
MTPFLTRRRFLTTTGMAATAAAAQSLIPGGAWATTSGPEVSGATLGYIALTDAAPLIIAQEKGLFAKHGLPEMKIVKQASWGATRDNMALGSANGGIDGGHILRPKVHLYATGKVMQGGVPLPMVNLMGLNEQCQGISVSQAHADKGVGLNSAPLKEVFAAKKAAGAEVPVAMTFPGGTHDLWMRYWLAAGGIDPTKDVDLIVVPPPQMVANMKVGNMEAFCVGEPWNEQLVNQGIGFTACTTGEIWAKHPEKVLGMRADWVDANPKATKAILMAVIEAQIWCDAAENKAEMAQIISARQWMKVPVPDILGRLNGEINYGNGRKEVRPDLAMRFWGENGSASFPWKSLDTWFITENQRWGYLPGDLDAAALVAQTNRSDLWLAAAADLGLPTAGFGDSRGFETFFDGKVFDPANPAAYLDSLSIKAMV

SEQ ID NO: 25096 - protein, 627 aa, uncultured bacterium
MPMRRRTRASTCWSLSPAPSPACACADPGPARRGSRARPWHRACNRIGSMSIPDGSTPQGRRTLDWRAWAAGLNLAPFRPRLLDALKDYNRGRFFVDLAAGLTVGIVALPLAMAFAIASGVEPEAGLFTAIIAGFLISALGGSSVQIGGPAGAFIVIVYGIIEQYGLANLLISTVLAGVLMFLLGLFRLGVLVRYIPVSIVIGFTNGIAVLIAVSQFKELLGLMPARMPADVVGQISTLWAHQHQFNVFAFGLGVATLVLLFAWPRLFTAQRLPASPRLARSLTMASRMPGPIVALLLLGVLTAVLELPVQTIGSKFGGIPQALPAFAWPAFTWDGIRQLFMPTVTIALLGSIESLLCARIADNMGDQPRHDPNQELMAQGVANVVAPFFGGIPATGTIARTVTNVRAGATSPVAGMVHAVALLLVVLVAAPLAVHVPLPVLAGILLFVAWNMGEWREFGKLRHFNYTYRTILVGTFLLTVIFDLTVAVQVGLVLACVFFIYRMSTLFRIELLPGHEPQLAVFKLYGVLFFGAVGKVEDLVDQLPAGTRVVVLEAHRLISIDTSGLDALLQLRRALARQDVKLVLCEVNEQPLGLIRRTHHHDTLGPDNVLPDLPTALLRARQLLRH

SEQ ID NO: 25097 - protein, 115 aa, Vibrio cholerae
MQAILHTLAKQNKSGVTYLYACNSAKEHIFAQEAAQLIAQQGWMQQVWYRDESADDVLQGEMQLAELILPIEDGDFYLCGPIGFMQYVVKQLLALGEDKARIHYEVFGPHAQLAA

SEQ ID NO: 25098 - protein, 386 aa, Arabidopsis thaliana
MASIVQPSPTFPALNLRRSSLIRPPSSVRFPLKCNAADPYKFDGGNSAGFHLLTGDTVPASFSRTRLEDSIYQNTTRLRIFSGTANPILAQEISCYLGLDLGKIKIKRFADGEIYVQLQESVRGCDVFLVQPTCPPANENLMELLVMIDACRRASAKTITAVIPYFGYARADRKTQGRESIAAKLVANLITQSGADRVLACDLHSGQSMGYFDIPVDHVYGQPVILDYLASKAISSEDLVVVSPDVGGVARARAFAKKLSDAPLAIVDKRRHGHNVAEVMNLIGDVKGKVAIMVDDMIDTAGTISKGAALLHQEGAREVYACTTHAVFSPPAISRLSSGLFQEVIITNTIPLSEKNYFPQLTVLSVANLLGETIWRVHDDCSVSKT

SEQ ID NO: 25099 - protein, 234 aa, Solanum lycopersicum
MDQQLPPTNFPVDFPVYRRNSSFSRLIPCLTEKWGDLPLKVDDSEDMVIYGLLKDALSVGWSPFNFTAGEVKSEPREEIESSPEFSPSPAETTAAPAAETPKGRHYRGVRQRPWGKFAAEIRDPAKNGARVWLGTYETAEEAAIAYDKAAYRMRGSKAHLNFPHRIGLNEPEPVRVTAKRRASPEPASSSGNGSMKRRRKAVQKCDGEMASRSSVMQVGCQIEQLTGVHQLLVI

SEQ ID NO: 25100 - protein, 904 aa, Lotus japonicus
MGDGAVTTTSAAMMEAPTNETSMDFEYMSDLLLDGCWLEASADGSNFLLQQSPPFSSPLFDPSFSWPALETNEPTHVEDQHESQEAPLGNTQLVSQSQNMVNVVDGRYNNQSETETHSVVEGTSDGVKRWWIAPTCSPGLGPSIMEKLIRALKWIKQFNWNKDMLIQIWVPVPRGDRPILSANNLPFSLDSGSENLARYREISEGFQFSAEEDSKELVPGLPGRVFRDKVPEWTPDVRFFRSDEYPRVEHAREFDICGTLAVPIFEQGSRTCLGVIEVVMTTQQINYVPQLESVCKALEVVDLTSLKHSSIQNAKQARDKSYEAALPEIQEVLRSACHMHKLPLAQTWVSCFQQGKDGCRHSEDNYLHCISPVEQACYVGDPSVRFFHEACMEHHLLKGQGVAGKAFMINQPFFSTDITMLSKTDYPLSHHARLFGLRAAVAIRLRSIYSSADDYVLEFFLPVNCNDSEEQKNMLISLSIIIQRCCRSLRVITDKELERTSSSVEVMALEDSGFARTVKWSEPQHITSVASLEPEEKSSETVGGKFSDLREHQEDSILKGNIECDRECSPFVEGNLSSVGISKTGEKRRAKADKTITLEVLRQYFPGSLKDAAKNIGVCTTTLKRVCRQHGIKRWPSRKIKKVGHSLQKLQLVIDSVQGASGASFKIDSFYSNFPDLASPNLSGASLVSALNQSENPNSLSIQPDLGPLSPEGATKSLSSSCSQGSLSSHSCSSMPEQQPHTSDVACNKDPVVGKDSADVVLKRIRSEAELKSHSENKAKLFPRSLSQETLGEHTKTEYQSYLLKTCHKATPKEDAHRVKVTYGDEKTRFRMPKSWSYEHLLQEIARRFNVSDMSKFDVKYLDDDLEWVLLTCDADLEECIDVCLSSESSTIKLCIQASSGMRS

SEQ ID NO: 25101 - protein, 457 aa, Alcaligenes faecalis
MSRFEQIQSREAGLHKRLNARQMSMIAIGGAIGTGLFLGSKFAIGFAGPGVVLSYVIGGFIALVLMGCLAEMTVEHPTSGSFGAYAEFYIHPLAGFLVRYSYWACIVLAVGTEVTAVADYMKFWFPEVSPWIWIVFFSAVLIAVNAYSVKAFGSVEYWFALIKVFAIIAFIVLAIGMLTGYYQPAQVQENLLGQGGFMPNGWYGVWVGVIISIFSYLSIEMIAVAAGEAENPEQAVRQAFKATIWRLIIFYLLSLSLIVMLVPWQVLIADGTSSPFITVMQSVGIPYADSILNFIVIIAALSAMNSMLYISTRMMFSLSRAGDAPLVLGKVARNGVPLNALALSASGVGVAAVVYAYNPETAFPVMIALSMFGALFTWGMIFLTHLFFRRRVAQEGVQLRFRMPAYPIGTLLGLIGIVAILITTWFINIFHYTLLFGVPFLLTLIVIYFVRSKSRVA

SEQ ID NO: 25102 - protein, 573 aa, Alcaligenes faecalis
MTASTQRTDLLQQLRSIVGQAHVLTDDRSTRRYRKGHRTGEGKVLAVVRPGTLLEQWRSLQAAVAADCIVIMQAANTGLTGGSTPDGDDYDRDIVLMNTMRLQGIQVINDGEQVVCLPGATLDRLEQTLAPLGREPHSVIGSSCIGASVLGGVCNNSGGALVRRGPAYTELTLYAQVRDDGSLQLVNHLGIHLGDTPEEILSRLEQGNYRAADILNDPQRKASDPRYADDVRDVDAQTPARFNADPSRLYEASGSAGKLCIFAVRLDTFPKESSTVFYIGTNEPDELTAVRRHLLTQLPRLPIAGEYIHRTAYDIGEQYGKDTFLLIDRFGTAKVPSAFAMKSRIDGFFERFGWRGVTDRVIQAVMNRLPSHLPARMRQWRDRFEHHLLLRVSNDTAQATRDYLQQQFGDSTQGAYFECDAEEGRKAFLHRFAIAGAAIRYRESHPNSVEDIVALDIALRRNDREWVEQLPDDMEKDIVHKLYYGHFLCHVFHQDYIIKKGVAPLEMEHRMWKLLDERQAEYPAEHNVGHLYVAKPALAGFYRELDPTNTFNPGIGHTSRRKWWSACCAGKHD

SEQ ID NO: 25103 - protein, 364 aa, Ipomoea batatas
MASFMKQLSLVLSFIALALAGCAVYQNTQTAMKDQLKVTPTWLDNTLKSTNLLSLGLGKPSGGKLGDEACVFSAVKEVVVAAINAEARMGASLIRLFFHDCFVDGCDAGLLLNDTATFTGEQTAAGNNNSVRGFAVIEQAKQNVKTQMPDMSVSCADILSIAARDSFEKFSGSTYTVTLGRKDARTANFTGANTQLVGPNENLTSQLTKFAAKGFNGTEMVALLGSHTIGFARCPLLCISTFINPARVSTLNCNCSGTVNATGLVGLDPTPTTWDQRYFSDVVNDQGLLFSDNELLKGNTTNAAVRRYRDAMGAFLTDFAAAMVKMSNLPPSPGVALEIRDVCSRVNANSVDPCEESRLLASPD

SEQ ID NO: 25104 - protein, 348 aa, Ipomoea batatas
MASFVARLTLALSFIALALAGYSLVQNTLSSPTHTRLNLIPTWLDSTFDSADVLSYLGFGKSSGRLSDSNCVFSAVKEIVDAAITAETRMGASLIRLHFHDCFVDGCDGGILLNDTANFTGEQGAPANSNSVRGFSVIDQAKRNAQTKCADTPVSCADVLAIAARDAFRKFTNQTYNITLGRQDARTANLTGANTQLPAPFDNLSIQTAKFADKGFNQREMVVLAGAHTVGFSRCAVLCTSTNLNQNRSATLQCTCPASANDTGLVGLDPSPGTFDKKYFEELVKGQGLLFSDQELMQSNATVTAVRRYRDATGAFLTDFAAAMVKMSNLPPSAGVQLEIRNVCSRVN

SEQ ID NO: 25105 - protein, 558 aa, Candidatus Blochmannia floridanus
MESQRSFFIIVFLIVSFILWKIWDDEHHINLLNIENNHSTLQPYSIQSHESNQNTPITHTNNPYSHIITIKTDVFLLKINTYSGNIEEAYLNNYQENLNSQKPLKLLHTSKENKYQAYIDIETLNEYFTNDLNQKNKKHYLYYSNTTNQCEYILKNNENKLQFDLTYQGPNNIIYTKRYLLNRNDYSIYITYIIDNQSTYPIHIKLYGNLIQSIHSDVIQSKHNDHCPLYTYQEAAYSTDTEKYQKYNLKDIKHTNLNIHSTNGWIALLQKYFIIALLPITPKDNTFYTTYLNNHDISIGFKSDFIHIPPGKKNELQSILWMGPKIQDNMKLVAPNLDLVIDYGWLWFISHPLFKLLQFIHTYTIDNWGISIILITVIIRLIMYPLTKAQYTSMAKIRMLQPKLISIQEEYKHDKYQYHQKTIELYKKEKVNPLGGCLPLLIQMPIFLALYYMLSESVELRHAKFAFWIKDLSDQDPYYILPIIMGITMFFIQKLSPTTITDPIQKKIMNIMLVIFTIFFLWFPSGLVLYYIISNIITIIQQQVIYHDLSKKGLHNKK

SEQ ID NO: 25106 - protein, 127 aa, Candidatus Blochmannia floridanus
MYAVFQIGSKQYYVRTGQVIFIDRVKLDIGNQIEFNQVLLIRDMKNIYIGNPFIQNGKIIADILDHSLGKKIRIVKFRRRKHFRKFQGHRQCMTKIKVVKINSNNSDIECYKSVDIETKIGEEVHGA

SEQ ID NO: 25107 - protein, 305 aa, Candidatus Blochmannia floridanus
MADPKLNTLSHFNHNNHVFRAENGKSGGSGSCTGRRGKDVVIQVPLGTKIFCSKTHKLLGDMIQYRNIPLMVARGGRRGLGIRNNRVKKNIIHKKNKDVIQNRIQGEVGECKNLLLELNLIADVGIVGLPNSGKSSFVRIISKATPKVADYPFTTLVPQLGSVKVDGYADNNRFIIADIPGIIKGASSGCGLGLRFLKHLTRCRMLLHFVDINSVDDSDPVKNIIDIEQELSNYDAQLINKPRWLVFNKIDLLTQSELFKKIDVIVKSVQWSGRYYAISIKHNVNISELCYDIMNCIVHHAEVYR

SEQ ID NO: 25108 - protein, 644 aa, Candidatus Blochmannia floridanus
MSDMIKNLILWLAIAVVLISLFQSFGSNDSSNRKVDYSTFMYELNQDQIKEARINGREIVVIKKDSSRYTTYIPVNDPKLLDILLTKKVKVVGEPPEEPSLITSIFISWFPMLLLIGVWIFFMRQMQGGGKGAMSFGKSKARMLSENQIKTTFDDVAGCDEAKEEVKELVDYLREPNKFQKLGGKIPKGILLIGPPGTGKTLLAKAIAGEAKVPFFTISGSDFVEMFVGVGASRVRDMFDQAKKSAPCIIFIDEIDAVGRQRGAGLGGGHDEREQTLNQMLVEMDGFEGNEGIIVIAATNRPDVLDPALLRPGRFDRQVVVGLPDIRGRAQILQVHIKSVPLGSDVDISVIARGTPGFSGADLANLVNEAALFAVRDSKQAVSMLQFEKAKDKIMMGSERRSMVMTEIQKEFTAYHEAGHAIIGRLVPEHDPVHKVTIIPRGRALGITFFLPESDSISISKQKLESQISTLYGGRLAEEIIYGVNRVSTGSANDIKVATSIARNMVTQWGFSEKLGPLLYAEEEGEIFLGRSVAKVKHVSDETARIIDQEIKLLIERNYLRARTLLTENMDILHSMKDALMQYETINASQIDNLMNRKSIQSLSYDKDCDEINDDEKNNICVDHEMQSKSMDKKSYDNKPNVVS

SEQ ID NO: 25109 - protein, 818 aa, Candidatus Blochmannia floridanus
MRVLKFGGTSLSNASQFIHVANILEKNAQKEQIAVVLSAPARVTNYLVEAINNTLRGNNILESVLNIENIFNTLLKDIAQFQSKFNYVVFHNTLKQEFNSLKQLLQGISLLNFCPDSVNAHIICLGEKWSVILMQGILIAKDLKIINLDPVKSILTQGDGYSTSVVNIEESTCRIHNVLLSHYADIILMAGFMAGNKKGELVTLGRNGSDYSAAILAACLQARRCEIWTDVDGIYTCDPRQVPDARLLHELSYQEAMELSYFGAKILHPRTIVPIAQFHIPCLIKNTSKPDFSGTLISAKNKDINIIAKGITYLKDMVMINVSGPGMKGMIGMAARVFAAMSRATCSVVLITQSSSEYSISFCVPYQEYAKACDALDEEFNLELKNGLLEPIGVICDLAIISVVGDGMRTQLGLSGKLFGALARASINIIAISQGSSERSISVVVKNNVTTIGVKAVHQTLFNTDQIIEVFIIGVGGVGSALIEQIKKQYSWLKNKHIDLRVCGIVNSQVMLTDSDGINLNNWKSLLIQSCKSSDLEKLIITIKQYHLLNPVIVDCTSSEKVANYYVNFLSGGCHVIAPNKKANTGPIGYYRKLRETMVIARRKFLYDTNVGAGLPVIENLQNLLNAGDELIKFSGILSGSLSYIFGKLDEGLSLSEATILAKKNGYTEPDPRDDLSGMDVARKLLILAREVGYVLEMKDIKIEPVIPDNFIKNDVISVDNFFEKLLSLDNMFTLKVKKARESGCVLRYIGNIQEGKCCVKMESVNDEHPLFQVKDGENALAFLTKYYQPLPLILRGYGAGNNVTAAGVFADLLRTVY

SEQ ID NO: 25110 - protein, 643 aa, Candidatus Blochmannia floridanus
MGKIIGVDLGTTNSCVAIIESNKPRVLENSEGDRTTPSVVAYTQDGEILVGQPAKRQSVTNPKNTLFAIKRLIGRRFQDQEVQRDVKIMPYKIISSNNGDAWLDIKGQKIAPPQISAEILKKMKKTAEDYLGENVTEAVITVPAYFNDAQRQATKDAGRIAGLEVKRIINEPTAAALAYGLDKEAHGNRIIAVYDLGGGTFDISIIEIDNVDGEKTFEVLATNGDTHLGGEDFDSLLINYLVEEFKKDQGIDLYNDPLAMQRLKESAEKSKIELSTSQQTDVNLPYITADSTGPKHMNLRVTRAKLESLVEDLVNRTLDPLKTALKDANLSVSSVNDVILVGGQTRMPLVQKKVSEFFNKEPRKDVNPDEAVAIGAAVQGGVLSGDVKDVLLLDVTPLSLGIETMGGVMTSLIAKNTTIPTKHSQVFSTAEDNQSAVTIHVLQGERKRASDNKSLGQFNLDGIAPAMRGIPQIEVTFDIDADGILHVSAKDKNSGREQKITIKASSGLNEEEIKKMVQEAEANAESDRKFEELVQIRNQADHLLHSTRKQLKEVGDRISLDDKNSIEQSLKELELVMKNENKGDIESKVQELIKVSGKLLEASSQKYKEKVNDSKSDLNKDKSETDASGDVVDAEFEEIKNKK

SEQ ID NO: 25111 - protein, 872 aa, Candidatus Blochmannia floridanus
MRLDRFDRSFQLALSDAQSIAIGKDNQFIEPVHVMYTFLKEKKYKSIRNLLIHAGSNVDQLYKSVEQVCNDLPRVESVDGDREVQCSHALVKILNLCDKLAQKYHSNIIFSEVFIIAALQSQDVLSILLKKSGIVKELLEKLVQYEQSNYSIHDDSFKNRTQILEQFTVDITSLAEQNNLDPVIGRDEEIRRTIQVLQRRTKNNPVLIGNPGVGKTAIVEGLAQRIINKEVPEGLKNSRILSLDIAALLAGTKYRGEFEERFKKVLYAVSKDNNTILFIDELHVMVGAGKTDGSMDASNMIKPKLARGELHCVGATTLDEYSRYIEKDAALERRFQKIFIIEPNIENTIAILRGLKERYELHHNVHITDPAIVAAATLSNRYISDRQLPDKAIDLIDEAASSIRIQIDSKPEDLDRLDRRIIQLKLECQALKKESDELSKKRLEILSMELSQKEQEYSVLESEWKRERSSLFDIQNIKSDLEKAKTILDQSRRIGDLAQMSELQYGRIPELEKKLFNAIQSSNKKMRLLRNYVSEVEIAEVLSKWTGIPISRILANEKNKLLNMETILHQLVIGQDEAVRVISNAIRRSRSGLSDPKRPIGSFMFLGPTGVGKTELCKALSQFLFDTDNAMVRIDMSEFMEKHSVSKLLGAPPGYIGYESGAYLTESIRRRPYSIVLLDEIEKAHLDVFNILLQVLDDGRLTDNQGRMVDFNNTVIIMTSNLGSDLIQKKFDISDYDTMKKTVLNVVNQYFRPEFINRIDEIVVFHPLSIKHLIDIANIQLKYLYSRLEERGYPRTGITNKALLFLSKIGFDPIYGARPLKRIIQQYIENPLSQKILSDDLLPGRSITIDVQNDNIVFIQNDVIDDKDIYIN

SEQ ID NO: 25112 - protein, 303 aa, Candidatus Blochmannia floridanus
MCTLMHKHDDSLFSNSFGFLRLPLEFYPYTRHNDWVITGVPFDIATSGRSGSRFGPASIRKASINLAWENCRWPWNFDIRQKLKIIDCGDLIYKSGNVQDFTNILQKHIENLLRFRKKILLLGGDHYITLPVLRAYSKFFGTISIIHFDAHADYYDNNNQYDHGAVILYALHEKLINPNRSVQIGIRTEYDKNFGFTVLDAEYVNTTAVHVLINQIVSVIQNRPVYLTFDIDCLDPSVAPGTGTPVIGGLTTSCALQIIRGFQKLNIIGIDIVEVAPVYDCAQITALAAATLGLEMLYTQVKF

SEQ ID NO: 25113 - protein, 556 aa, Candidatus Blochmannia floridanus
MDNKSNFIYNIINQDLNFKKYTIIHTRFPPEPNGYLHIGHVKSIYLNFNIAKYYHGKCNLRFDDTNPDKESKEYVEAIKSDIQWLGFMWNGEVCYVSDYFEQLYNYAVELIQKGLAYVDELSIYAIREYRGTLKKSGQNSPYRSRSIKDNLFFFSKMRNGEFPEGSVCLRAKINMSDSSMIMRDPVLYRIKYTTHHRVGKSWCIYPTYDFSHCISDAIEGITHSLCTLEFQENRRLYNWILKNISITKHPIQYEFSRLNIKYIITSKRKLNLLVVNNIVDGWDDPRMPTISGLRRRGYTARSICEFCKRIGISRQDSYIELSELESCIRDDLNKHSLRLMAIINPIMVKIINLPTGYIEKIPMPNHPNDCSMGIRYVFFTQEIFIDRFDLDQYCKNSRFPKLTIGREIRLRHAYVIKVDHFKKDTEGNIISVHCYYDPTTLNRKPIDGRKIQGVIHWVSATKNISAEFRLYDKLFIHPTPDIVINILNIVNPRSLVISHGFVELNPIFSNNPGPYQFEREGYFILDYQYSKPTYLVFNRTVTLKKSNKSIRFIKPQ

SEQ ID NO: 25114 - protein, 314 aa, Candidatus Blochmannia floridanus
MKLFTGNAIPELAQRIADKLYITLGNASVGRFSDGEVSVQINENVRGGDIFIIQSTCAPTNDNLIELIVMVDALRRASAARITAVIPYFGYARQDRRVRSARVPITSRVVANFLSSVGVDRILTVDLHAEQIQGFFDVPVDNVFGSPILLEDMLQQKFNNPIVVSPDIGGVMRARAIAKLFNDTDMAIIDKRRPRSNVSQIMNIIGDVYNRDCILIDDMIDTGGTLCKAADVLKDKGACRVFAYATHPIFSGNAYENIQKSMIDEIIICDTIPLKSKIRTLPNIRILTLSGMLAETIRRISNEESISAMFDYSI

SEQ ID NO: 25115 - protein, 245 aa, Candidatus Blochmannia floridanus
MLSIHNLNVSVKGSSILNKLNLEISPGEIHIIMGPNGSGKSTLSAVISGQPDYIVTDGTILFKKKDLLLLKPEERAGEGIFVAFQYPIEIPGISNQLFLYSAINAIRKYRNQPPVERFEFLQSVQKKMQLLHIPDDLLTRSVNVGFSGGEKKRNDILQMMMLEPTLCILDETDSGLDIDAIKIVYNGLNLLRNTTRSFIIITHYERILEYIKPDYVHILHKGCIIKSGDLTLVKKLEEKGYGWLY

SEQ ID NO: 25116 - protein, 111 aa, Candidatus Blochmannia floridanus
MSNNTVEKIKKQIQANPILLYMKGTPDSAKCGFSAKSAQILHLYVKSFYYIDVLIDTDIRSVLPTFSNWPTFPQLWLEGKLIGGCDIIMDMHQNGTLKQAIDPIKLKYNLN

SEQ ID NO: 25117 - protein, 326 aa, Candidatus Blochmannia floridanus
MINDKLLLQYAKETLAIEIDEAQHMLERLDDSIVLACRILLECKGKVIVSGMGKSGHIGKKIAASLASTGTSAFFVHPAEALHGDLGMIGEQDVVIFISYSGYAYEIMTLMPLLSDSGIPVIALTGDLQSPLAVGAECVLNIKRKREACPMELVPTSSSVNALMMGDALTISLMRYKGFSTEQFARSHPGGRLGSKLLNCVHHIMRVGEHISKVFCTGTVMDAMFELSRTGLGLTAVCDINDHVIGVFTDGDLRRWIVQGKSLTDSVNLAMTCPGCVIDRDWKVDVALKMLHKLNITAAPVVNKLGIIVGSINVHDLHRRCNGIIK

SEQ ID NO: 25118 - protein, 357 aa, Candidatus Blochmannia floridanus
MNDKILFIDRDGTLIHEPKDNFQIDSLDKLLLEPYVIPTLIALKNIKFKFIIVTNQNGLGTDLFPKTKFNKPHQFMIQIFKSQGIKFDQILICPHLPEDQCNCRKPKTGLISCWLKNKSLDMPNSYVIGDRDTDIQFAHNIGIQGIKYHQIHFNWKKIHKYLMQNSHRVAHIQRITNETNVDVKIWLNQCDQNKINTGIHFFDHMLEQIAIHAKIRMHIITKGDLHIDDHHTIEDTALSLGEALNQALGDKRGIGRFGFTLPMDESIAQCILDLSGRTYFDYQAEYSLQKIGNFSTHMIEHFFRSLSSKMHCTLHLKVIGNNDHHKAESLFKSFGKSLNQAIYIQHNQIPSSKGILL

SEQ ID NO: 25119 - protein, 395 aa, Candidatus Blochmannia floridanus
MKLPIYFDYAATTPVDPRVVEKMMQYFTLDGVFGNPASRSHYYGWKAEEAIDLSRKYIAELIGSKLDEIIFTSGATESINLAIKGIAQANYKKGKHIITSMTEHVAVLDTCQYLENQGFEITRITPRSDGLIDLNQISCALRDDTILLSIMHVNNEIGIIQDIMEFGKLCRDNNIIFHVDATQSVGKLDIDLSVLPVDLMSFSAHKLYGPKGIGVLYIRKYNNVDDGNLLNINIMTQIHGGGHEYGIRSGTLPVHQIVGMAEACRIAKKEMKTEMSYLKKMRDRLWMGLQQIEGIVVNGNLNSSIGTLLNVSFRNIDGETLMIALKDFALSSGSACTSNMVQVSHVLQSIGLHNALVYNSLRFSLGRFTTEEEIDYAIHQVVMTVMKLNEMIHLL

SEQ ID NO: 25120 - protein, 270 aa, uncultured bacterium
MAYLAPAEFVTKMVDAGESKLLMSTRDTLIRSFMAGAILALGAAFAVTITVNTGNPLLGALLFPVGFIMLYLLGFDLLTGVFTLAPLAVFDKRPGATWGGVFRNWSLVFVGNFGGAFMVAVFMAIIFTFGFSEAPNAVGQKIGHIGEGRTVGYAAHGAAGMLTLFIRGVMCNWMVSTGVVAAMMSTTVSGKAIGMWMPIALFFYMGFEHSIVNMFLFPSGLLLGGNFTLMDYLIWNEIPTVIGNLVGGLTFVGATLYSTHYKTAPKRVGV

SEQ ID NO: 25121 - protein, 113 aa, Arabidopsis thaliana
MAPPPPAPPSVTLRTVLLLLRVLTAAFLLITVVLISTNTVTLEISSTSIKLPFNDVYAYRYMLSAAVIGLVYAVVQLFLTISQFATGKTHPLTYQFDFYGDKVFISFLRKYYL

SEQ ID NO: 25122 - protein, 355 aa, Comamonas testosteroni
MSSEATTTASRYHPLRVRAVIDETHDTKSIVFEVPEALAEQFSYRPGQFLTLRLPIEGRYVPRCYSMSSAPMLDDALRVTVKRVDKGRGSNWVCDRVQVGDSIELMPPSGLFSPRNLSQNFLLLAGGSGITPVFSILRTVLKQHQGNVVLFYANRDERSVIFKKDLQQLAAEYPDRLQVIHWLDSVQGAPSQKQLAAWATPWVADAGQAFICGPGPFMDAAQTAMIEAGMPAEQVHVERFVSLPDEETLLLMQEATAPVEAAVDQALVQLRLDGEEYEFNCSGTETILEAGLRAGINVPFSCQAGMCASCMCQVQDGSVHLRHNEVLDAKDLSKKWTLACQSVPTSEKLRVKFPE

SEQ ID NO: 25123 - protein, 554 aa, Bordetella bronchiseptica RB50
MIFSFSLLLLWNNWQIHNGKPSLFGGPAPEAAATQQPKADANGTAASSTASIPSSPAAAPAAASVPGAAAPAAAKSEQVVITTDVLRLTFDSNGAQLIRAELLKYPSSSQSDKPTVLMDRSADLVYVAQTGVVGAPQGESFPTHQTPFHLVSSERSLTGDTLDVVFEAESGGLKVTKTYTLHRGRYDVDVRHAMANTGGAPLNPALYLQLERDGTDPAGTSSFYHTFTGVAVYSEQDKFQKVTFSDIEKKKGTYIKQADNGWIGIVQHYFATAWIPAQGKQRTNELLQVQQNLYAARTIEAVGTIAPGSSANVDAHLWVGPQDQKAMAAVAPGLELVVDYGWLTIIAKPLFTLMTWLHGLLGNWGWTIVALTVIIKAVFFPLAAASYRSMARMKQVAPRLQALKEKYGDDRQKLNQAMMEMYRTEKINPLGGCLPMVVQIPVFIALYWVLLASVEMRGAPWILWVHDLSVRDPFFILPAIMMATMFLQIKLNPTPPDPVQAKVMMIMPLVFGGMMFFFPAGLVLYWCVNNTLSIAQQWTITRNLERQAAAAANR

SEQ ID NO: 25124 - protein, 554 aa, Bordetella parapertussis
MIFSFSLLLLWNNWQIHNGKPSLFGGPAPEAAATQQPKADANGTAASSTASIPSSPAAAPAAASVPGAAAPAAAKSEQVVITTDVLRLTFDSNGAQLIRAELLKYPSSSQSDKPTVLMDRSADLVYVAQTGVVGAPQGESFPTHQTPFHLVSSERSLTGDTLDVVFEAESGGLKVTKTYTLHRGRYDVDVRHAMANTGGAPLSPALYLQLERDGTDPAGTSSFYHTFTGVAVYSEQDKFQKVTFSDIEKKKGTYIKQADNGWIGIVQHYFATAWIPAQGKQRTNELLQVQQNLYAARTIEAVGTIAPGSSANVDAHLWVGPQDQKAMAAVAPGLELVVDYGWLTIIAKPLFTLMTWLHGLLGNWGWTIVALTVIIKAVFFPLAAASYRSMARMKQVAPRLQALKEKYGDDRQKLNQAMMEMYRTEKINPLGGCLPMVVQIPVFIALYWVLLASVEMRGAPWILWVHDLSVRDPFFILPAIMMATMFLQIKLNPTPPDPVQAKVMMIMPLVFGGMMFFFPAGLVLYWCVNNTLSIAQQWTITRNLERQAAAAANR

SEQ ID NO: 25125 - protein, 141 aa, Euryale ferox
FSEEQEALVVKSWGVMKKDAGQLGVKFFAKIFEIAPSAKRMFSFLRDSDLPLEQNPKLKPHALSVFAMTCESAVQLRKAGKVTVRESSLKDLGATHFKYGVVDEHFDVRFAFSRSVFSSIRDLFQPEMKIAWGEAYDKLAA

SEQ ID NO: 25126 - protein, 147 aa, Euryale ferox
MGSIGFSEEQEALVKEAWELMKPNVQELGLKMFFLSWADVAGGAGMFYFLKDQNEIPRNNPQLRSHVVKVFTMTCESAAQLHKNGKVEAVGSTLKKMGAIHLKKGVQESHFEVIKVAFLKVVKEAVEEKWSEEMGAAWAEAYDKLAA

SEQ ID NO: 25127 - protein, 179 aa, Bordetella pertussis Tohama I
MKLIILDRDGVVNQDSDAFVKSPDEWIALPGSLQAIARLTQADWTVVLATNQSGLARGLFDTATLNAIHDKMHRALAQMGGVVDAIFMCPHGPDDGCACRKPLPGMYRDIARRYDVDLAGVPAVGDSLRDLQAAAQAGCAPWLVQTGNGRKTLAQGGLPEGTRVCEDLAAVAEQLLQEA

SEQ ID NO: 25128 - protein, 299 aa, Bordetella pertussis Tohama I
MKISTVFFAALVGVAASAPAHAEGRLDKIKSSGTITIGHRDASIPFSYLDDKQKPIGYSMEICEKAVEAIKAKLGMAQIKVNLVPVTSSTRIPLVANGTVDLVCGSATNTVERQQQVAFAPTTFVTATRFAAKKSSNLKKLDDMKGKTVVSTAGTSNIRWLTQANEKDSLDMRIIPTKDHPAAMLTVANGRAAAFFMDDVLLAGLVATERKPDEWMISEDTYTVEPYALILPKDDPAFKKVVDDTVTGMMRDGSLAKLYKKWFESPIPPRNVNLHLPMSAALQRVIANPTDSADPATYR

SEQ ID NO: 25129 - protein, 406 aa, Bordetella pertussis Tohama I
MLYRQPNMAQIVLFENIHPSARAVFSAAGYTDIVAHAAALPSGELREALRGAEVVGIRSRTHLDADLLAANPDLRVVGCFCIGTNQVDLDAAMMRGVPVFNAPFSNTRSVAELVLGEAILLLRRIPEKNARVHLGHWDKSAAGAYEARGKTLGIVGYGNIGSQISTLAEAIGMRVVFFDVEAKLPLGNARAAGSLAELLEQADVVTLHVPGGKSTQNIVNADTLARMKRGAILINASRGTVVDIQALHDALASGHLAGAALDVFPTEPKSADEPLASPLIGMPNVVLTPHIGGSTQESQENIGREVAEKLVRFLQAGTTKSAVNFPELSYQAPVGGSRIIHVHRNAPGALGALDNLMAQHGLNIVSQSLQTKGQIGYAVTDVDGEVSDTVLADLRSHPVTVRCEKL

SEQ ID NO: 25130 - protein, 401 aa, Bordetella pertussis Tohama I
MISLTPVQSLLACCLVLVAGRILTTRIGVLSRYSIPDPIVGGLLFAVLATALDTWGGIQISLETNIKPTLLLIFFGCIGLTADLKLLARGGPRLIAFLLALIPFLVLQNAVGLGLAWLLDMHPLMGLIGGTITLVGGHGTGAAYAARFADINNIQDVMALAMTAATIGLVLGGIIGGPVAEWLIRRHKLDPRMAGKDANQVLPEVETTAEAPTATSFITSLTAVFVTVVVGTYLAGLVEDAPISLPNFLWCLATGAIIRNFGGYVGIRLDDRVSEIIGSISLSLFLGLTMMTLDLSSVVRLAGPLALMLVAQALVCALYAGWAVFRMLKRDYEAAVMAAAFCGFAMGATATAIANMQALTRRHGPAPESFIVVPVTGAFLVDILNVIVLTSLIALPFVGGM

SEQ ID NO: 25131 - protein, 397 aa, Bordetella pertussis Tohama I
MSVHPDPVVIVAARRTPIGAFQGALAHYSAPQLGAHALAAAVRQAGLQPDAAQEALMGCCLFAGLGQAPARQAVLGAGLPTDVQATTLSKMCGSGMKAAMLAHDMLRAGSADVVLAGGMESMSNAPHLIPKARQGYRLGDGQLLDHMYRDGLQDAYEGRLMGHYADLAAREYGFSREQQDAYAHESVLRAQRSVAEGEFAEEIAPIAGLARRGAPAAMVAVDETPGLCDVSRLASLKPVFNADGTVTAGNASSISDGAAALVLTRQAHAERLGLAPQARIVGHATAALPPGQFPAAPVRAIARLFERVGWDRDSVDLFEINEAFAVVTMIALRELGLPAERVNVNGGACALGHPVGATGARLIVTLMHALRRRGLRRGVACLCLGGGEATAIAVERA

SEQ ID NO: 25132 - protein, 67 aa, Bordetella pertussis Tohama I
MQTGIVKWFNDEKGFGFIMPENGGPDLFAHYSEIQGEGHKVLVEQQRVSYVPGHGPKGPMATKITPL

SEQ ID NO: 25133 - protein, 1128 aa, Bordetella pertussis Tohama I
MGKGNMKQVTGYCTLCRSRCGSVNHVENGRLVAVTPLAGHPTGGALCAKGRAAPEMMAESHRLLRPLRRTNPRGAADPGWREIEWSEALDEVAARLAVARRRDGAESVAFAVTTPSGTPMVDSFEWVERFVRVFGSPNLIYAVEVCGWHKDYAHALTFGRGIGVPDLEHTDTMLLWGHNPARTWLAQAARIAAARQRGARVVVVDPNREGSSQQADLWLRVRPGADGALALGAIRHLLHTGRFDHDFVARWSNGPYLVDGASGALLRAVDLWPDADPAARVVMQDGSPAASGRGADTARAELFGSWTLRLHDGRACEAVTVMHALRVAVERYTPDEVARLAWLDEAELAQFNAIFENAPRLSYHSWTGVGQHTNATQTDRAIATLYALTGACDRKGGNLWTVAPPYRAVNGYRELLSPVQRAKALGLDELPLGPPSLGWITARDFCRAVLQQDPYPVRTLVSFGSNLLVSQAETARNLEALQALDFHVHVDMSMNPTAMNADIVLPANMPWEREALKLGFEITQAAVEHVQLRPRMVEPAGESRADYEIVLELARRLGLRDAFFGADMDACWNHQLAPLGIDVQALRRQPEGIRFPQPFVHEKYKAVRDGQPVGFPTQDGRVQIHCAALRDIGQPALPVHVEPADTPARHAGAYPLVMSTAKSGWFVHSSHRYVASLRRKSPEPQVYLSVQAARARGIASGDWVRVRTPYGEVALRAKINADLHENVAIAEFGWWQGCEGLGRVDGAIVGPASSNINAIMTDRHRDPVSGSVPLRATVCDIVRDDARNRGSWSGAREFVLAQKRGIAHDVAEFRLLPCDAQALPDFLPGQHVIVSMPGGAARRAYSLTGPNREPAHLSIAVRRVRDGDGPAGVMSNALHELAEGARVLLSAPAGVFTPPLRTARPVILMASGIGITPFHGYLEALAQDAGPAPSVLLVHACRDGSSHPYGAELKRLAQRIGSVCTLTVYAEPASDDAPGRDYQQRGRLDFAWLPPATVAARPLVYLCGSPGFLAFCTDALAARGIPRFDIFSETFTSEKRVPATLAPQPIEIEAEQGGFTWDPSAGTLLDAAERAGLSLPSGCRVGQCESCAMHIVSGQVAHLIDFDGSADTCLTCQAVPITPLTLRR

SEQ ID NO: 25134 - protein, 389 aa, Bordetella pertussis Tohama I
MLSFPSPARPWAACWACLSGLAAHELGSAAIKAAIERAGIKPEQVDEVIMGNVLQAGQGQAPARQAALGAGLPLGVGCTTIHKVCGSGLKAAMFGHDLLTADSVDVVVAGGQESMSNAPYLLLKGRQGYRYGHNTVYDHMALDGLEDAYDRGKAMGVFAEDCATKYSFTREQQDAFSLESLRRARAASEDGSFKWEITPVTVAGRKGDTVIDTDEAPTKAMPEKIPTLKPAFKKDGTVTAANSSSISDGAAAMVLMRASTAEKLGVKPLARIVAHAQHAQEPNWFTTAPVGALKNLFKKTGWQASDVDLYEINEAFAVVTMATMKDFDLPHDKVNVHGGATALGHPIGASGARLMATLVGALRKTGGKRGVATLCIGGGEAVAMAIEML

SEQ ID NO: 25135 - protein, 169 aa, Bordetella pertussis Tohama I
MRPMTEIIKPWHSVRRSRLHGNGVFATRKIPAGTRIIEYGGKRISAEEADRRHPTNPDDPFHTFFFSLSSGRVIDGGDEGNDARWINHSCDPNCEAQEGRHGKRVYIVALRDIARGEELFYDYGLVLDGRITRKLKEGYRCLCGTTPCRGTMLALPEKKKTKARSAEKA

SEQ ID NO: 25136 - protein, 563 aa, Bordetella pertussis Tohama I
MDIRRTVLWMIFSFSLLLLWNNWQIHNGKPSLFGGPAPEAAATQQPKADANGTAASSTASIPSSPAAAPAAASVPGAAAPAAAKSEQVVITTDVLRLTFDSNGAQLIRAELLKYPSSSQSDKPTVLMDRSADLVYVAQTGVVGAPQGESFPTHQTPFHLVSSERSLTGDTLDVVFEAESGGLKVTKTYTLHRGRYDVDVRHAMANTGGAPLNPALYLQLERDGTDPAGTSSFYHTFTGVAVYSEQDKFQKVTFSDIEKKKGTYIKQADNGWIGIVQHYFATAWIPAQGKQRTNELLQVQQNLYAARTIEAVGTIAPGSSANVDAHLWVGPQDQKAMAAVAPGLELVVDYGWLTIIAKPLFTLMTWLHGLLGNWGWTIVALTVIIKAVFFPLAAASYRSMARMKQVAPRLQALKEKYGDDRQKLNQAMMEMYRTEKINPLGGCLPMVVQIPVFIALYWVLLASVEMRGAPWILWVHDLSVRDPFFILPAIMMATMFLQIKLNPTPPDPVQAKVMMIMPLVFGGMMFFFPAGLVLYWCVNNTLSIAQQWTITRNLERQAAAAANR

SEQ ID NO: 25137 - protein, 314 aa, Bordetella pertussis Tohama I
MIAASFPHGVSLIGAPTDIGAGQRGASMGPEALRVAGLVRLLERRGLQVTDRGNLQGAPNPWRPPANGYRHLNEVIGWNQLVHDAVSAELRQERLPILLGGDHSLAIGSISAVARYCRASGRKLRVLWLDAHADFNTNRLTPTGNVHGMPVACLCGNGPAALTSMAGRTPAIEPGWVRQIGIRSVDEGERNLVYDAGLEVYDMRYLDEVGMRAVMEAALAGLDPQTHLHVSFDVDFLDPELAPGVGTTVPGGPTYREAQLCMEMIADTGLMRSRDIVELNPALDVRNKTAQVAVDLVESLFGKSTLMRRRPGSA

SEQ ID NO: 25138 - protein, 573 aa, Bordetella pertussis Tohama I
MVHATPPTPGPGDSRGFVEQLRGIVGAAHVLTDEHRTRRYRAGFRFGFGRAIAVVRPGSLLEQWRIVQACVAHGKIVIMQAANTGLTGGSTPDGNDYDREIVIISTMRMKKIQLILDGRQVICFPGSTLDQLEQTLAPLGREPHSLIGSSCLGASVFGGICNNSEGSLIQRGPAYTELAVYAQLGEDGRLRLVNHLGVALGDSPEEILGRLDQGQFGANDVETAVGSGSDHEYAEHVRAVDADSPARYNADPRRLFEASGSAGKLILFAVRLDTFPAETQTRVFYIGTNDPGELTAIRRHMLTRLPALPIAGEYLHRDAFDIADVYGKDTFLAIRQLGTARLPRLFAIKARIDSFCERVPLLPKYLSDRVLQFASRLFPDHLPRRLREYRDAYAHHLMIKVPGKIGDQTRRFLQAYFDDATGASFECTPEEGKAAFLLRFAAAGAAVRYRAVHAGQVEDIVALDIALKRNDRDWLEQLPPDVEAPILMKLYYGHFFCHVFHQDYIVKKGEDCLALEHRMWKLLDERGAEYPAEHNVGHLYDAKPELKAFYRGLDPCNQFNPGIGRTSKLQGWR

SEQ ID NO: 25139 - protein, 108 aa, Bordetella pertussis Tohama I
MSDVQEFIRETVTQHPVVLFMKGTTQFPQCGFSGRAIQILKGCGVKKLVTVNVLEDDEVRQAIKTFSNWPTIPQLYVGGEFIGGSDIMSEMNESGELKQLLDDSGATA

SEQ ID NO: 25140 - protein, 329 aa, Bordetella pertussis Tohama I
MSAHPDPTPEAILASARRTLQTEAQAIADLAARLDDSFVQVVGMLLACRGRVVVSGIGKTGHIARKLAATLASTGTPAFFVHAAEAIHGDLGMVTRDDVLIAISYSGTGQELLTILPVVRRMGAGLIAITGNAESELARLADVHLDASVSQEACPLNLAPTASTTAALALGDALAVACLEARGFGREDFARSHPGGALGRRLLTHVRDVMRHGPALPIVAEDAPLPRALEEISAKGMGMTAVVDAQRKPVGIFTDGDLRRLIERVGDIRSLTVADGMTRAPRTIGPDALAAEAAQQMDDRRLNQMLVVDTAGVLIGALHTHDLMAAKVV

SEQ ID NO: 25141 - protein, 377 aa, Bordetella pertussis Tohama I
MKFVDEATIEVIAGKGGNGVASFRREKFIPKGGPDGGDGGRGGSIYAVADRNINTLIDFRYARLHRAKNGENGRGSDQYGAAAPDITLRVPVGTVVHDADTGEVLFDLDRHDQKVTLAAGGAGGMGNIHFKSSTNRAPRQWTPGKEGEQRRLRMELKVLADVGLLGLPNAGKSTLISRISNARPKIADYPFTTLHPNLGVVRTSPSRSFVVADIPGLIEGASEGAGLGHLFLRHLARTRVLLHLVDISSPDPEADPIEQAVVDANAIVEELRRYDPELAAKPRWLVLNKLDMVPDAQDAQQRFCAEFGWTGPVFAISGLNGEGTQDLIWALQDYLDAEKRKDQDAQDQADGTYVFEDPRFDASRGGAAPATPPGGDE

SEQ ID NO: 25142 - protein, 103 aa, Bordetella pertussis Tohama I
MYAVIKTGGKQYRVATGEKLKVEQIPADIGQEITLDQVLSVGEGDQLKVGTPLVSGAVVKATVLAHGRHDKIKIFKMRRRKHYQKHQGHRQNYTEIRIEAITA

SEQ ID NO: 25143 - protein, 304 aa, Bordetella pertussis Tohama I
MKRLLNALTAALAIGAAAAGQAHAADLDGTLKKISDTGVITIGHRETSIPFSYYDANQKPVGYSIDICTRIVDAVKTRIKRDDIQVKYLPVTSATRIPLMGNGTIDLECASTSNTLDCQKQVAFSVTTFVTGNRFISLKSANLKTIDDLKGKTVASTSGTANIRQANEINEARSLGMKVVPVKEHAEGFLMVETGRAAAFIMDDILLYGLAANAKEPDRYQVSGDSLSIEPYAIMLRRDDPQFKALVDDTIKSLYASGDFEALYKRWYQSPLPPKGINLNVAMSEVLKRVVATPTDSGDPVAYK

SEQ ID NO: 25144 - protein, 571 aa, Bordetella pertussis Tohama I
MELNGADIVVRCLAEEGVEHVFGYPGGAVLYIYDAIFKQDKFQHILVRHEQAAVHAADAYSRASQKVGVCLVTSGPGVTNAVTGIATAYMDSIPMVIISGQVPTAAIGEDAFQECDTVGITRPCVKHNFLVRDVKDLAETMRRAFFIARTGRPGPVLVDIPKDITVAQCKYAPPKGEISMRSYAPVNKGHQGQIKKAVQMLLHAERPMIYTGGGVILSDAAEALRHLVDQTGAPCTNTLMGLGAMPATDHRFLGMPGMHGTYEANMAMQHCDVLLAIGARFDDRVIGNPRHFAQNARKIIHIDIDPSSISKRVRVDVPIVGNVKDVLADLSAQYDLARADAKPAPIEKWWQQIEAWRGKECLKYAGSDEVIKPQFVVEKLWEVTGGDAFVTSDVGQHQMWAAQYYKFNKPRRWINSGGLGTMGVGLPYAMGVQMANPGADIAVITGEASIQMNIQELSTCHQYHLTPKIICLNNRFLGMVRQWQQIDYGSRYSESYMDSLPDFVKVAEAYGHVGLRIERPADVEPALREAFKKHKDRLVFLDFITDRTENVWPMVKAGRGLTEMLLGSEDL

SEQ ID NO: 25145 - protein, 743 aa, Bordetella pertussis Tohama I
MSITPPDDEGAEPGPSSQAPHAQAAALRRPIERSRFGGSQRRPERQDGDDAPVSRSDLSKGPEEVLERRTASINWRVLLVSSAVIVAFSVWAILVPGDARMRMKTAVDWIAANLGWYYVLTMTLVIGFVLWVAFSKEGDVRLGPDHSRPQYRLSTWVAMLFAAGVGIDMLFFSVTGPVVQYLHSPSGEGGTAAAMQDAVVWTMFHYGVAGWSMYALLGMAMGYFAYRWGMPLSIRAALYPLLGKRVRGPLGDGISIIALVGTVFGVATSMGIGVVLLNVGFSLIFGLEQGLSLQIALVVGAVILTIGATTSGVDRGIRWISELNLWSAVAMMVYILLTGQTAFLLNALSENIGRFLVTFPARTLQTFAYEPGGPEWMGGWTLFFWAFWLAWGPFVGVFLARISRGWTLREFVIAAITAPVLCDFIIVSLFGNSALYHVLQGDTAFAALAVESSERGWYALLAMFPGAMFLIGLATLSGLLFYLTSANSGAMVMSNFSASIPDPSHDGPKWLRIFWAVLTAVLTVAMLLAGGVTTMEYATLIFALPVTIIAYTVMASFYKVLRMERAEREGQVLRRPSMAPMGGHLPERSWKQRLEQLHAFASLRQATQFLDHTVRPALGDVAAEFRNQGYEVASESLASERGIEEPLLRVSMDGFRAFQYHVAVVEAPVPMFSGRMSRETDVYYRLEVFTQTGSGGYDLMGLTRQQVIDDVLERFEAHLAFLTFSTNTDTASVLTPPAPARNP

SEQ ID NO: 25146 - protein, 652 aa, Bordetella pertussis Tohama I
MQNELKPTINKPVFLTSALFILLLVVFTIAAPATAQDFFNVIQAWILGNASWFYILTVAIILLAVIFVAVSRYGNIKLGPDHSEPDYRDITWFAMLFSTGMGIGLMFFGVAEPVMHFIDPPVGEGGTALAAREAMKITFFHWGLHAWAIYASVALVLAFFCFRHGLPLTLRSALYPLIGERIYGPIGHAVDIFAIIGTVFGVATSLGLGVAQINSGLNHLFGVPVGIPTQIILIVISCGLATISVASGLDRGIRILSETNLLLAVVLLLFVLVLGPTVFLLQTFVQNTGAYLSDIVNKTFNLYAYEPTDWIGGWTLFYWGWWIAWSPFVGLFIARISRGRTIRQFVGGVLLVPAGFTLFWMTVFGDAAIHAILVEGMGSLAETVKADSSLALFAFLEHLPWGSVTSVVAIVMVVVFFVTSADSGALVVDQLASGGAESTPVWQRIFWSTLMGVVAIALLLADGLQALQTATIASALPFSIILLLALWGLFKALRLDATKRSLLHRTITRTQPVRGQNWEHRLRNIVMMPRRAHVLRFISDVVRPAMDDVAEALRKEAYEAQVVDGEEGEVRLEVSHGVYLDFSYAVYPRSEVRPSLTPQEANDEEERRYFRAEVHLREGGQDYDIMGWTRDEVIGDILDQYERHRHYLHVVH

SEQ ID NO: 25147 - protein, 221 aa, Bordetella pertussis Tohama I
MAQPWETANQGLARVDERLLTPPELRSSLRPADHWRLDPLCAAEPRAPGREGSLVAAAVLIPLVMRADGVRVMLTQRAAHLHDHAGQVSFPGGRIEVSDATPVAAALREAQEETGLPVQQVEVLGSMPQYFTATGFAITPVVSLVQPDFELAPDAFEVAEVFEVPLSFLMDPANHRLYRAALPDGYVRQYYAMPWQRYFIWGATAGMLRNLYQTVREALPG

SEQ ID NO: 25148 - protein, 396 aa, Bordetella pertussis Tohama I
MSDNLLVINAGSSSLKFYLYEIAEGDELRPTLGGQLDGIGGSRPHLRIRAQDGHTLLERDVAPTHAADVPGAQEVLGTWLSGHLGGAPCAIGHRVVHGGTQYDAPVLVDDDVLAQLDDLTPLAPLHQPNNLAPIRVIRERRPNIPQVACFDTAFHRTHSPLADRYALPEHLYQEGVRRYGFHGLSYEYIAQRLRRALPEIAGGKIVAAHLGNGVSACTMVDGRSVDSTMGFTALEGLPMGTRPGRLDPGVVLWMMERGMSHDDIEHLLYHDCGLKGLSGIGNDVRELLASDAPAARLALDYFAWRVAEGIAGLGCAMNGIDAIVFTAGIGENAAPVRAAIARHWEWLGVRLDEARNARHGPRISSDDSAIGVYVVRTNEELIIAQHTLALVRQRQA

SEQ ID NO: 25149 - protein, 384 aa, Bordetella pertussis Tohama I
MPRLATRTNDFLTFQVVELFKEAQALQAAGRDIISLGIGEPDFTAPPQVVEALERATRAGLNGYSAPAGLSALREAIAAFYESEFGARVDPARIIVTAGASGALALACAALVNPGAQVLMPDPSYPANSNFVLAAGGQPRLIPSTAAKRFQLSAQDVRDHWNDATQGVLIASPSNPTGTSIAHDELAELLAAVRERQGFSIVDEIYLGLSYESQPRSALLLDDNIIVINSFSKYFHMTGWRLGWMIVPESMAAKVEKMAASLAICAPTLAQHAALACFTPDALKIFEHRREAFKQRRDYLLPEFERLGIPVPVRPDGAFYIYADIAALGTTSMAFSHRLLHEGGVAAVPGLDFGPAHGERTMRFSYATGLDRLQEAVARIEKLL

SEQ ID NO: 25150 - protein, 762 aa, Bordetella pertussis Tohama I
MDANFRKAALEYHEHGRPGKISVTPTKQLSNQRDLSLAYSPGVAAACEEIVDDPVNVFRYTGRGNLVGVITNGTAVLGLGNIGALASKPVMEGKAVLFKKFAGLDVFDIEINETDPDKLVEIIAGLEATFGGINLEDIKAPECFTVERKLRERMKIPVFHDDQHGTAITVCAAVVNGLAVAGKRIEDVKLVTSGAGAAALACLDLLVDLGLPLEHIWVTDIEGVVYEGRKKLMDADKERFARKTKARTLAEVIEGADVFLGLSAGNVLKPEMVATMAANPLILALANPNPEILPEAAHAVRDDIVMATGRSDYPNQVNNVLCFPYIFRGALDVGATTITREMEKAAVLAIASLAREEQNEVVAAAYGTYDISFGRDYLIPKPFDPRLIVRIAPAVAKAAMEGGVATRPIADLDAYAEQLQQFVYHSGAFMKPLFSQAKQIVRDGGRARIVFTEGEDERVLRAVQVIVDEKVAKPILVGRPQVLLSRIEKFGLRLRLGQDVEVCNPEYDERFHQYWTTYWDMMCRNGITKEMARVEMRRRLTLIGAMMVHLGDADGMICGAVSGFHDHLRFIDQVIGRKPGAQTYAAMNILLLNERTVALVDTHVNEDPSAEQIAEYTVAAAEEMQRLGLAPKVALLSRSNFGSGSSASGAKMRHALELVNRQAPGLEIDGEMHGDCALDESLRLRLLPDSPLKGSANLLVCPNVDSGNIAYNLLKTTAGGNVAVGPFLLGANAAVHILTSSSTVRRIVNMAAMAVVNADAVR

SEQ ID NO: 25151 - protein, 628 aa, Bordetella pertussis Tohama I
MNNSFSKVAVWMVIALVLFTVFKQFDGRAQTQDGVSYTQFMDDAKAGRIRKVDVQGDVLYVTPDAGRPYSLTSPGDLWMVSDLLKYGVQVSGKAREEPSLLMSIFVSWFPMLLLIGVWIFFMRQMQGGGRGGAFSFGKSRARMLDENTNQVTFADVAGCDEAKEDVQELVDFLRDPSKFQKLGGRIPRGVLMVGSPGTGKTLLAKAIAGEAKVPFFSISGSDFVEMFVGVGAARVRDMFENAKKHAPCIIFIDEIDAVGRQRGAGLGGGNDEREQTLNQMLVEMDGFESGQGVIVIAATNRPDVLDPALLRPGRFDRQVVVPLPDIRGREQILKVHMRKVPLSPNVDATILARGTPGFSGADLANLVNEAALFAARRNGRTVDMSDFEKAKDKIIMGAERRSIVMPEEERKNTAYHESGHAIVARMLPKTDPVHKVTIIPRGRALGVTMQLPETDRYSMDKERLLNTIAVLFGGRIAEEIFMNQMTTGASNDFERATAIARDIVTRYGMTDELGPMVYAENEGEVFLGRSVTKTTHVSEATMQKVDSEIRRIIDEQYGVARKILEDNRARVEVMTSALLEWETIDADQIDDIVNDRPPRPPKTPQGPSDTFDTPPTGLAAGGNTAAAV

SEQ ID NO: 25152 - protein, 760 aa, Bordetella pertussis Tohama I
MDENLTKLALDYHAYPTPGKISVTPTKTLANQDDLSLAYSPGVAAACMAIFDQGNDAASKYTSRSNLVGVITNGTAVLGLGNIGSLAAKPVMEGKGCLFKKFAGIDVFDIELAENDPDKLVDIIAALEPTLGGVNLEDIKAPECFYIEKKLRERMNIPVFHDDQHGTAIISSAAILNGLKVVGKDIGQVKLACSGAGAAAIACLDLLVHLGIKREHIYVVDSRGVIWEGRDENMEPNKRRYAQKTEARTLADVVNGADVFLGCSTAGVLTPEMVKTMAAQPLILALANPEPEIRPELAKAARPDCIVATGRSDYPNQVNNVLCFPFIFRGALDAGATRITEEMKLACVKAIAELAQAEQNDEVARAYAGQELSFGPDYIIPKPFDPRLIVQIAPAVAQAAADSGVATRPIEDIEAYRQKLMGFVYHSGQLMRPLFQQAKQAPKRVVYADGEDERVLRAVQTVIDEKLAEPILVGRPSVIEMRIKKFGLRMVPGQNVEIVDPEDDSRFNDTWNGYYQLRGREGVTPAIAKAMIRKHNTLIGAMLLRRGDADALLCGVASKYDNQLKYVEEVIGRKPGQTYGALNVLMLPNQTLFVTDTHVNENPSADEIANITIQAAEEMLRFGVMPKIALLSHSNFGSRPTDSSRKMAHARKLVAERAPHLEVDGEMHADAALSESIRLQAYPDSTLKGRANLLVMPNLDTGNITYNMLKMTGSNGIAMGPILLGSARPVHILTTSATVRRIVNMTALAVVDAQQEAAEG

SEQ ID NO: 25153 - protein, 305 aa, Bordetella pertussis Tohama I
MMQTLGFVGLGMMGLPMLENLAGDERWQILAYDRSPAPFERLAGHPAWGKRLRAAAGLQELAACDTVITMLPNSAITNAVVLGGDGQPGLIDLLESGAAIVDMGSSNPADTRRLSEQLAARGLTLIDAPVSGAVAKASTGTLAIMAGAAEADLRRVRPILERMGAAIIHTGAVGSAHAMKALNNYVYAAGLLAVSEAMVIARRMELDLEVFTDVLNASSGRNVASETKLRQFIIPGTYNGGFALALMAKDLGTAQSLQALTGVQADQLALCAELWRQALAQLPGGADNTEIHRFLAQRTPATEPA

SEQ ID NO: 25154 - protein, 400 aa, Bordetella pertussis Tohama I
MSIVADKIKRIKLSPSVATRAIVAQLREEGRRVIDLTVGEPDFSTPAHICEAAIAAMQRGETKYPPAQGTMPLRKAVRARLREETGVDYPEGRIIVGTGAKQVLYNGLAATLNEGDEVIIPAPYWVSYPDMVLVNGGVPVAVTATPATQYKLTPQALEAAITPRTKWLMMNAPSNPTGAIYTADEWRGLAEVLRRHPHVWLMTDDIYARLNFTATPTVHPLQVAPELAERTLVVNGVSKAYAMTGWRIGYGAGPEALIKAIAILQSQSTSGACSISQAAAREALAGPQDCVAEFARTFKARRDAAVAALQGAPGLSVVMPEGAFYVFPDCAGVLGKTTPDGRVLETDTDFVHYLLREAGVAVIDGTPYGVPGTFRLSFAAALEDIQQGCAAIRAACERLA

SEQ ID NO: 25155 - protein, 865 aa, Bordetella pertussis Tohama I
MRFDKLTTKFQQALADAQSLAARNDHPYIEPVHVLAALLGDPDSGAASLLARAGVAVNRVQPAIDSALKGLPQVQGDDNVQVGRELQSVLVRTDKEAARRGDTYIASELFLLALADDKGDAGRILREAGLQKKALEAAIDAVRGGENVSGAEGESNREALSKYTLDLTERARQGKLDPVIGRDDEIRRTIQILQRRTKNNPVLIGEPGVGKTAIVEGLAQRIVNDEVPETLRGKRVLSLDLAALLAGAKFRGEFEERLKAVLKELAQDDGQNIVFIDELHTMAGAGKAEGAMDAGNMLKPALARGELHCIGATTLDEYRKYIEKDAALERRFQKVLVGEPDVESTIAILRGLQERYELHHGVEITDPAIVAAAELSHRYITDRFLPDKAIDLIDEAGARIRMEIDSKPEVMDRLDRRIIQLKIEREAVKKETDDASMRRLAVIEEELEKLQREYNDYEEIWKAEKAAVQGTQAIKEEIDRVRAEMAELQRKGQFDKLAELQYGKLPELEARLKAADSAEREAGESDSGKPRLLRTQVGAEEIAEVVSRATGIPVAKMMQGERDKLLRMEDFLHKRVVGQDEAVRLVSDAIRRSRAGLADPSRPYGSFLFLGPTGVGKTELTRALADFLFDSEEHMIRIDMSEFMEKHSVARLIGAPPGYVGYEEGGYLTEAVRRKPYSVILLDEVEKAHPDVFNVLLQVLDDGRLTDGQGRTVDFRNTVIVMTSNLGSQHIQSMAGKPYEVIKEVVWDELKHTFRPEFLNRIDEVVVFHGLEAQHIESIARIQLKRLGERLEKQEMRLDVSDAALAEIARSGFDPVFGARPLKRAIQQQIENPVAKLILEGVFGPRDVVPVDWQDGKFVFTRTLQ

SEQ ID NO: 25156 - protein, 201 aa, Bordetella pertussis Tohama I
MNAPLSLAAQEQIFQAARTFNRYTEQSISDATLHELYELMKWGPTAMNSQPGRFIFLRSAEARQRLAPALSPGNLEKTLAAPVTVIVAQDTQFYEHLPTQFSAYDARPVFENNADAARATAMRNSSLQGAYLIVAARMLGLDAGPMSGFDAAKVDAEFFPDGRCRANFLVNLGYGDPAGNYPRGPPPGLRHRGANPLIARP

SEQ ID NO: 25157 - protein, 412 aa, Bordetella pertussis Tohama I
MTQQSPLKNATIAAVMTAVIVTPIFGLQLVRQGARTLMEPRWDLVALACALVFAFQLLRPWISKPFKALKTGLPTLPSALARGHKWLVVLLIAVSVIWPFFSGRSSVDIATLVLIYVMLGLGLNIVVGFAGLLDLGFVGFYAVGAYTYALLYHWGGWSFWEALPFSGAVAALFGFVLGFPVLRLRGDYLAIVTLGFGEIIRLLLINLNMLTGGPDGISGLPKPSVLGMEMARRASTEGGQTFHEIMGWTFQNQHMVIYLYLMALALALATLFVSTRLIRMPVGRAWEALREDEIACRSLGLNPTRIKLSAFTLGAMFAGFGGAFFAARQGMVNPESFTFIESALILAIVVLGGMGSQIGVILAAILLTVLPELAREFAEYRMLMFGLVMVLMMMWRPQGLLPMKRPHVELRK

SEQ ID NO: 25158 - protein, 297 aa, Bordetella pertussis Tohama I
MSSIAFIGLGNMGAPMALNLVKAGHDLTVFDLVPAAVKTLTDAGARAAGSAAEAVQGAELVISMLPASKHVEGLYLGQDLLASIGASALVIECSTIAPDSARKVAAAAQARGIAMIDAPVSGGTGGAAAGTLTFIVGGEAPALERARPVLASMGKNIFHAGGAGAGQVAKICNNMLLGILMAGTSEALALGVANGLDPKVLSDIISKSSGRNWATELYNPWPGVMEHAPASKGYAGGFGVDLMLKDLGLAAEAALGTRSSIPLGELARNLYSLHSQGGSGGLDFSSIVNLYSPGERN

SEQ ID NO: 25159 - protein, 301 aa, Bordetella pertussis Tohama I
MGVPARRPAGEAALACVLGIPFDCGTHPFRVGARQGPDAIREQSRLLRPYDLARRAGVDNPVEFLRLLDLGNVACVPGDPQASYPAIEQAVAQVLQAGAIPITMGGDGAVTLPQLRAVARRWPGVAVLHFDSHTDTYPIAGYNTATTFTRAAEEGLIDLSHSFHVGTRGNSFMGGVIEYGREVGYTVIPYDDFDRDQAGTLARLRGQLGDRPVYLCFDMDIFDPSCAPGVCTPEWGGLSPKEGLNLLRALSGLNFVAFDVNTVSPPQDVGGATAFLAASVMQEFCALAAAAVQAYPQGRPD

SEQ ID NO: 25160 - protein, 67 aa, Bordetella pertussis Tohama I
METGVVKWFNAEKGYGFITPEAGGKDLFAHFSEIQANGFKSLEENQRVSFVTAMGPKGPQATKIQIL

SEQ ID NO: 25161 - protein, 66 aa, Bordetella pertussis Tohama I
MATGIVKWFNAEKGYGFIMPDDGSKDLFAHYSEICSEGYKSLQENQRVSFEVGQGPKGPRGQAPRT

SEQ ID NO: 25162 - protein, 403 aa, Bordetella pertussis Tohama I
MSNRPIYLDYSATTPVDPSVVEKMIPWLYESFGNPASRSHAFGWEAEDAVEKAREEVAKLVNADPREIVWTSGATESDNLAIKGAANFYAERGKHIITVKTEHKAVLDTCRELERQGFEVTYLDVQDDGLLSLDAFKAALRPDTILVSVMMVNNEIGVIQDIAALGEICREKGIIFHVDAAQATGKVEIDLQKLKVDLMSFSAHKTYGPKGIGALYVRRKPRVRIEAQMHGGGHERGFRSGTLATHQIVGMGEAFRLAREEMGTENERVRMLRDRLLAGLTQIEEVYVNGSMEHRVPHNLNISFNYVEGESLIMAIKELAVSSGSACTSASLEPSYVLRALGRNDELAHSSIRFTLGRFTTEQEIDFTIELIKSRVGKLRDMSPLWEMAQEGIDLNSVQWAAH

SEQ ID NO: 25163 - protein, 122 aa, Bordetella pertussis Tohama I
MQRIMLRAKLHRVTVTEADLHYEGSCGIDEDLLDAAGMREFERIELYNVTNGERFDTYIIKAARGSGAISLNGAAARRAQVGDLLIICTYGPMSEEQSAAHKPQVVLVDDANRVKEIRKFPA

SEQ ID NO: 25164 - protein, 247 aa, Bordetella pertussis Tohama I
MTTRRQLLTAALTLNLAWGAGAAHAQETIRAVTDATFPPMEFVKDGKRTGFDIELVEALAQAMGKKIEWIDIDFKGLIPALQAGRADIAVSAIYITAERQKVVDFTDPYYAGGLVVLTKKDGPVKSLKDLEGRKVSVQVGTKSVNYLKEHFPKVQRVEVEKNQEMFNLVQIGRADAAVTGKPAAKLFAQSTQNLAVLSEQITTEEYGIAVPKSKSGLTRELNEALKKLKADGTYERIVNKWFEAQAK

SEQ ID NO: 25165 - protein, 421 aa, Bordetella pertussis Tohama I
MSLIVQKYGGTSMGSVERIKNVARRVAKWHAAGHKVVVVPSAMAGETNRLLSLAREISPQPDGRELDMIAATGEQASSGMLAIALQAEGVPARSYAGWQVPVRTDSSYTKARIKSIDDKRVLADLDAGRVVIVTGFQGVDDDGHITTLGRGGSDTSAVAVAAAIKADECLIFTDVDGVYTTDPRVVPEARRMAVVSFEEMLEMASLGSKVLQIRSVEFAGKYHVPTRVLSSLTDPLIPLEEEMRSGTLITFEEDEKMEAAVVSGIAFSRDEAKITLLAVPDKPGIAYSILGPVAAANIDVDMIVQNQSVAGTTDFSFTVNRNEYQRTLDLLKREVIPAVSARELVTDEKVAKVSIVGIGMRSHVGVASLMFQTLSQEGINIQMISTSEIKTSVIIDDKYMELAVRSLHKAFGLDQVPGDQV

SEQ ID NO: 25166 - protein, 383 aa, Bordetella pertussis Tohama I
MQGKPRIAVIGAGLGGTAGAALMARAGFNVRLYEQAPAFSLLGAGIHLGPNVMKIMRRIGIEDELNRQGSHPDYWYSRDWQTGAELARIPLGDYAVSHYGATYLTVHRGDFHALMTAALPAGLLQFNKRLTRVDEDDDVVRLHFADGSVEEAEIVIGADGVNSRLREHLLGAELPKYTGYVAHRAVFPTPLDSGSLPFDMCVKWWSDDRHMMVYFVTGKRDEIYYVTGVPEQQWDMGKSWVPSSKEEMRAAFAGWHPTVQALIEATPEVSKWPLLERDPLPLWSRGRIVLLGDACHPMKPHMAQGAAMAIEDAAMLTRIFEQTGLQDHAAAFRLYEDNRAERASRVQRVSHDNTWLRTNENPDWCFGYDVYAEPLVEGRRAAA

SEQ ID NO: 25167 - protein, 601 aa, Bordetella pertussis Tohama I
MGKTVRGGAAAILGCWVNDITPGTLRADAQAGLLGALLVLPQGVAFAMLAGLPPEYGLYSAIVPCIVAALFGSSRHVLSGPTNANSLALFAVLAPLALPGSPGYIQMALAVTILVGVMQLAVGLLRLGSLANFISPSALFGFTSGAALLIAVHALKDALGLEGVQAHSAGAVLAAVGSRLGEAHWGASVVALTTIIVTLLVRHWDRRKPHMLAGLAAGTLLAAALNAGVFTAAGQPISVLGGLAQPWPPFHVPAVQWSVLPDLVGVAVPLTIVALAQSISIAKAVAMRSGQLIDANREFIGQGLSNVVGGLFSSYLSCGSLNRSVPNYEAGARTPMAAVFAALLLVLLVLVSSPVLALIPHAAIAGLLIVVAWSLLDLPRWRVLVRIAPREALIAAATLAATVTIRMEIAILLGTLLSLTAYLYRTARPAMRPMGFDAADPQRHFAVLEGQPGELPECPQLKLLRMEGSVYFGAATHVTDRLQALRAGASAGQRHLLVMSKSMNFIDHAGAQVWEEELRRRRAGGGDLYFHRPRPEVLRDWRRSGFIDRLGADHIFPDKATAIHTIYERLDPEICRGCTARIFTECGPPGTAHQPGAERAE

SEQ ID NO: 25168 - protein, 395 aa, Bordetella pertussis Tohama I
MNEVVVVVVAAARTAIGDFGGGLKDVAPCDLGATVIREALARAGVAGPEVGHVAVGHVINTEPRDMYLSRVAAINAGIGKETPAFNVNRLCGSGLQAIVSAAQTIMLGDTEIAVGAGAESMSRAPYIAPAQRWGARMGDSAMVDMMTGALSDPFGRMHMGVTAENVAARYSISRADQDALAVESHRRAAAAIDAGRFRDQIVPVTLKTRKGETVFDTDEHVRRDITIEGMAALRPVFQKENGTVTAGNASGLNDGAGAVVLMSAAAAAQRGIAPMARLVAYAHAGVDPEIMGIGPVPATQAALKRAGLTVDQLDVIEANEAFAAQACAVTRQLELDPAKVNPNGSGISLGHPIGATGAIITVKALYELQRVGGRYALVTMCIGGGQGIAAIFERV

SEQ ID NO: 25169 - protein, 402 aa, Bordetella pertussis Tohama I
MLSPEVRALVKATAPVLKEHGEALTRHFYTRMLGGNPELRQLFNQGHQQSGQQQQALAAAVAAYAEHIDDPSVLLQVVERIAHKHVSLGVRAEHYAIVGKHLLASIREVLGEAATDELIDAWAAAYGQLADLLIGRERALYAAAASRDGGWTGWRAFKVVRKTPESAEITSFYLAPADGGATPDYLPGQYVSVRVYVPELGLMQPRQYSLSEAPGMPGQLRISVKREAGSPAGMVSGTLHNRINEGDVLDVSPPQGDFTLDAEDGRPVVLLSGGVGLTPMVSMLNHLTARDDGRQIRFVHACREAGVHAMKEHINALAAKRPNVRKAVFYERVGADDRRGVDYDYEGRVDLHAIRDEVILPDADYYLCGPLPFMQAQRRALADLGVAEHRIHAEVFGTGGVA

SEQ ID NO: 25170 - protein, 296 aa, Bordetella pertussis Tohama I
MSNPQFRAGFVAIVGRPNVGKSTLTNALIGTKISIVSRKAQTTRHRIHGVLTREHEQFVFVDTPGFQTRHGGAMNRMMNRVVTQALADVDVVVHVVEAGKWSEGDAKLLPLLPKSRRSILVVSKIDALKNRDELFPFVSKLMALHAYDAVVPVSATKGQQLDQLLDEIAAGLPQGDPMFEEDTLTDRPVRFIAAELVREKIFRLVGDELPYGCTVVIEQWEETERGVRIAACVVVERESHRPILLGAGGMHMKRIATEARQDIAKLLDMPVHLEIYIKVRKGWSDREGALRDLGYE

SEQ ID NO: 25171 - protein, 688 aa, Bordetella pertussis Tohama I
MPFTGNTPQEFEQRLRRIYTLYTLGFILLVLLLALAELMGMARSWIGYVFLLVTVSLYACIGIVCRTSDQVEYYVAGRRVPAFYNGMATAADWMSVASFIGVAGTLYLTGYGGLAYIMGWTGGYVLVALLLAPYLRKFGQYTIPDYLGARYGGKLPRLAGVFCAILCSFTYLVAQIYGVGIITTRLTGISFELGIFVALGGMLVCSFLGGMRAVTWTQVGQYIILVIAYLVPVVWLSVKHTGMPVPQLSAGTVLQEITEKEVYLAHDPGERAVRQLWRSRADEMDERLRALPDSLAHEKDRLRGRLAQLNASDAPMVEIRSLERELASYPATVEEARTLWSQARAAFEARATPPVPHAEPFPAEDPRERENMRINFLALVLCLMLGTAGMPHILMRSYTTPSVGEARRSVCWSLLFILLLYFMAPALALLVKYEVYTQVVGTSFLSLPSWVHAWSAVDIHLLDVLDVNRDGIVQLGEISMGADVVVLAMPEIGGLPYVVSGLVAAGGLAAALSTADGLLLTLSNSLSHDTWYRVVSPRMSAGRRVMVSKILLLLVAFGAAWVAARKPADILFMVSAAFSFAASSFFPALVMGVFWRRANKWGATLGMFAGLAATFAYMAHTHPWLREWVFGVTRAEPVDLWWGIQPVAAGVFGAPMAFLTIIVVSLLTPRPDSATEALVDYLREPGGR

SEQ ID NO: 25172 - protein, 641 aa, Bordetella pertussis Tohama I
MSKIIGIDLGTTNSCVAVLDGGQVKIIENAEGARTTPSIVAYMDDGETLVGAPAKRQAVANPKNTLYAVKRLIGRKFDEKAVQKDIDLMPYSIVKADNGDAWVEVRGKKLAPPQVSAEVLRKMKKTAEDYLGEEVTEAVITVPAYFNDSQRQATKDAGRIAGLEVKRIINEPTAAALAFGLDKTEKGDRKIVVYDLGGGTFDVSIIEIADVDGEMQFEVLSTNGDTFLGGEDFDQRIIDYIISEFKKEQGVDLSKDVLALQRLKEAAEKAKIELSSSQQTEINLPYITADASGPKHLNLKITRAKLEALVEELIERTIEPCRVAIKDAGVKVSDIDDVILVGGMTRMPKVQDKVKEFFGREPRKDVNPDEAVAAGAAIQGSVLSGERKDVLLLDVTPLSLGIETLGGVMTKMIQKNTTIPTRYSQTFSTADDNQPAVTIKVFQGEREIAAGNKGLGEFNLEGIPPAPRGLPQIEVTFDIDANGILHVSAKDKGTGKENKITIKANSGLSEDEIQRMVKDAEANAEEDHRLAELAQARNQADALVHATRKSLTEYGEKLEAAEKESIEAAIKDLEDILKTGDKAEIDAKVEALSTASQKLGEKMYADMQAQQQAQQQQAADNAKPVDDNVVDADFKEVKRDQ

SEQ ID NO: 25173 - protein, 575 aa, Bordetella pertussis Tohama I
MASSPADTPHRSWLRWLPGLAVLKTYQAAWLPRDLAAGLVLTAMLVPVGIAYAEASGVPGVYGLYATIVPLLAYALFGPSRILVLGPDSALAAPILAVVLSVSEGDPMRAVATASLMAIVSGLFCIILGLLRLGFITELLSKPIRYGYMNGIALVVLASQLPKLFAIPTDDGGPLRELWQLAQAVLDGKTNGYSLAVGSATLVLILLLKRFKRLPGILIAVVLATLAVSLFGLDGRGVQVLGEIPQGLPGFTIPWLSNADLATIVLGGCAVALISFADTSVLSRTYAARTHTRVDPNQEMVGLGVANLATGFFQGFPVSSSASRTPVAEAAGSRTQLAGVVGALAVAALLLAAPNLLRHLPSSAMAAVVIAAAIGLFEFKDLRRIFRIQQWEFWLSMLCFAAVVAFGAIPGICLAVVVAVLEFLWDGWRPHFAVLGRVPDLRGYHDLKRYPHAALIDGLVLFRWDAPLFFANAELFQQRLLEAVQASPTPVRRVVVTAEPVTSVDVTSADMLRELSHHLAESGIALHFAEMKDPVRDKLKRFELSEVFGADRFHPTVESAVDDYLKRPPHGTIDP

SEQ ID NO: 25174 - protein, 81 aa, Bordetella pertussis Tohama I
MSDTTATAVQGDNPKATGTVKWFNDAKGFGFITPDDGGEDLFAHFSSIQMNGFKTLKEGQKVSFEIIQGPKGKQALNITSA

SEQ ID NO: 25175 - protein, 401 aa, Bordetella pertussis Tohama I
MAVQAFICDAIRTPFGRYGGALSSVRADDLAAVPIKALMARNPGVRWEELDDVLYGCANQAGEDNRNVARMAALLAGLPIEVPGATINRLCGSGLDAVGSAARAIAAGQTSLMLAGGVESMSRAPFVMGKADSAFSRNAAIYDTTIGWRFVNKLMKAQYGVDSMPETAENVADDFKISRADQDKFALASQQKALRAQQSGFFDAEITPVSIAQKKGDPVVVSKDEHPRDTSLEALAKLKGVVREGGSVTAGNASGVNDGAAALLLADEKAAASHGLTPRARVVGMVTAGVAPRIMGMGPAPATRKVLAQTGLSLAQMDVIELNEAFAAQGLAVMRDLGIADDDARVNINGGAIALGHPLGASGARLVTTAINQLQRGGGRYALCTMCIGVGQGIALIIERV

SEQ ID NO: 25176 - protein, 372 aa, Bordetella pertussis Tohama I
MQIGVPKETRDGETRVAATPETVKKYIGGKHSVIVERGAGVAAHYPDSAYEEAGATLGTAETALGCELVLKVRAPADNELPHMKRGAVLAGMLDPFDADDLQRLAAAGLTAFALEAAPRITRAQSLDVLSSQANLAGYKAVLLAANYYGRLLPMMMTAAGTLKAARVVVLGAGVAGLQAIATARRLGAVVEASDVRPAAKEQIESLGAKFIDVPFETDEEREIAQGVGGYARPMPPAWMARQAELVAQRCKQADIVITTALIPGRPAPTLLTAETVQAMKPGSVVVDLAVERGGNCPLTQKGLVADHHGVTLVGLTNLPGMLPTDASALYARNLLDFLKLIVDAEGALAIRRDDEIVTACLMCEGGQVTRRS

SEQ ID NO: 25177 - protein, 277 aa, Bordetella pertussis Tohama I
MGLPMAGHLARAGHQVTVYNRTAAKAQAWAAEFGGKAAATPREAAAGAQIVFCCVGNDDDLRSVVLGADGAFAGMQAGAVFVDHTTASADVARELYAAARELNLQFIDAPVSGGQAGAVNGALTIMCGGDSATFEDIKPVAHAFGRAVTLVGPPGAGQLAKMVNQVCIAGVVQGLSEAIAFGQTAGLDMKLVLDVISKGAAQSWQMENRGATMVDDQFDFGFAVDWMRKDLGLVLAEARNNGARLPLTALVDQFYGDVQKMGGNRWDTSSLIKRLRD

SEQ ID NO: 25178 - protein, 316 aa, Bordetella pertussis Tohama I
MANDSFMIFTGTANTRLAVDVVNHLDMSLGKMTVGRYSDGEVMVEINENVRGKDVFVLQPTCAPTNDNLMEIMVMVDALRRASAGRITAAIPYFGYARQDRRPRSARVAISAKVVANMLQVAGVDRVLTMDLHADQIQGFFDIPVDNIYAGPILLGDIWRRNFSNLVVVSPDIGGVVRARALAKQLEADLAIIDKRRPRANVSEVMNIIGEVDGRTCIIMDDMVDTAGTLCKAAQALKDRGAGAVYAYCTHPVLSGGAIERIETSSLDELVVTDTIPLSEQAQACGKIRQLSCAALLGETILRISNAESVSSLFAD

SEQ ID NO: 25179 - protein, 641 aa, Bordetella pertussis Tohama I
MCGIVGIWGPLRDKANVLAESCRRIRHRGPDSNGYWEDAEADLALAHVRLAILDLTEAGHQPMVSACGRYVIVLNGEIYNHMELRERLQQDGLAPAWRGHSDTETVLACFAGWGIEQTLQAAVGMFAIVLWDRAERKLALMRDRMGEKPLYYGYSQANLLFGSELKAFMPVPGFGRELDRNALASFMRHNYIPAPQSIYAGIRKLPPGAWVEIDAAQMRRGELPEPQVYWSARRAADQGLGDRRRFESDAQAIDALEQVVSQAVRGQMLSDVSLGAFLSGGIDSSTVVALMQAQSAQPVRTFAIGFHEKGYNEAEHAKAVAAHLGTEHTELYVTAEDGLAVVPSLADMYDEPFADSSQIPTSLVTRMARQHVTVALSGDGGDELFGGYSRYFRVDNWWRKCAAMPGPLRHLAGAALRGSAALPGAGAWRGKVGKLGELLGADTRGEFYRLFVSYWADPGRVVIGGTEPLSPFEQPMEGSTFDAMMKLDTVTYLPDDILVKVDRAAMAVSLETRVPLIDHRVYEFAWQLPFEYKVRGGTGKWLLRQLLYRHVPQAMVDRPKRGFAVPLAAWLRGPLRDWAEALLDPARLRQEGWFEPEPILRKWREHLSGHRNWDSHLWGVLMMQAWLDRYRAGAGDEAGRR

SEQ ID NO: 25180 - protein, 587 aa, Bordetella pertussis Tohama I
MTHAPTPPAASNFLRPIIEDDLQANRFQGKLWAGKPGPAALQAQGQPDPARIRTRFPPEPNGYLHIGHAKSICVNFGLARDYGGVCHLRFDDTNPEKEEQEYVDAIIEAVHWLGFDWQADGNDNLYFASDYFEFMYEFAEALVQAGHAYVDEQSAEEIRASRGTLTEPGTDSPWRDRPADESLLRLREMRDGKHPDGSLVLRARIDMASPNINLRDPVMYRVRHATHHRTGNAWCIYPMYSWAHPVEDALEGITHSICTLEFEDQRPFYDWILARLAELGKLARPLPHQYEFARLNLTYVVTSKRKLLQLVREGYVDGWDDPRMPTLFGLRRRGYTPSSIRLFCDRTAVSKSDSRIDYSLLEQAVRDDLDPVAPRSVAVLDPLKLVITNYPEGRSETCSAPRNPHDPQAGVREFPFTRELWIEQDDFREEPPKKYFRLFPGNTVRLKYGYVVRCTGFTKDESGKVVEVQAEYLPDTKSGTPGADSVKVKGNITWVSAAHAVPAQVHLYDRLFADAHPDGGDKDFLACLNPNSKQTVQAWLEPGIEAVPGATWQFERLGYFTVDSKDSRPEAPVLNRIVTLRDSWQAA

SEQ ID NO: 25181 - protein, 311 aa, Bordetella pertussis Tohama I
MAERYADWTTLGAQARVQVFRDALPSGPARAVALQPFDVIVAMRERTPFPAELIQALPALRLLVTTGMRNNAIDMQACAAGGILVCGAPGSAEAGAATAELAWAHILALFKRLPQEDAAMRRGLWQTGMPQPLARRRLGVLGLGKLGSAVAQVGRAFGMEVVAWSPNLTDERAAQAGVTRVDKHTLFSTADVVSLHLILGESTRHIVDAAALSAMKPSAYLVNTSRAGLVDQDALLDALRKGRLAGAGLDVYESEPLPPTDVWRTLDNVLLTPHLGYVNAENFQAFYANALEAVRAWAAGAPVHVLGGARG

SEQ ID NO: 25182 - protein, 580 aa, Bordetella pertussis Tohama I
MYVYDPVDQQLVEERVKQFSDQTRRFLDGQLTEDEFRTLRLQNGLYIQRHAPMLRIAIPYGMLAARQLRKLAHIARTWDRGYGHFSTRQNMQFNWPRLEDVPAILAELASVQMHSIQTSGNCIRNTTSDHFAGVAPDELVNPLVWCEIIRQWSTLHPEFAFLPRKFKIAVSGAVEDRAAVGVHDIGLQAVERDGQLGFRFWVGGGLGRTPMVGHLINPFVPWQHLLTYLQAALRVYNLHGRRDNKFKARIKILVKDLTPEVYAREVEQEWQSLKDGPDTITEDQLNTIAGRFVWPDYDSAAASEPDPTDARAQAYPRFARWLRTNVRAHKVAGYAAVTVSLKATGVPPGDITADQMDAVAGLSERYGFGELRVSHEQNLVLADVRRARLHDLWQELQQLNLATPNIGLLTNIIACPGGDFCALANAVSIPVAESIQRRFDDLDYLFEIGELDLNISGCINSCGHHHVGHIGILGVDKAGEEWYQVTLGGRQNGAAKPLPDLESPRGGGAAIGRIIGPSFARTQIPDVIDRLIRTYLELRDSDAERFIDVVDRVGIDPFKRDVYADPAVAKLASQQEPAHA

SEQ ID NO: 25183 - protein, 553 aa, Bordetella pertussis Tohama I
MNPTLAARTGGRILVDALKVHGVDQAFCVPGESYLPVLDALRDDAQDIRLTVCRQEGGAAFMAEAYGKLTGKPGICFVTRGPGATNASIGVHTAFQDSTPMILFVGQVGADVAEREAFQEIDYRRMYGQMAKWVASIDDAQRIPEFVHRAHQVALSGRPGPVVLALPEDVLRATAHAADRVPHRIARACATSADMKRLHELLAAARRPLLIVGGGGWNEAASAAITRYAERAGLPVATAFRRQDRFDNRHPCYAGHIGLGIAPSLARHVRQADLLLVVGARLADATTDSYALITPEHPGQTLIHVHPDPQELGRVYPADLPIAADVQAFAAQLDACDNPPARCDAWLRELADDYRTDLAVAPSRRDTDLAQVMHWLNQHLPQNAIVTNGAGNYAGWVHRYFQYSPQRRQLAPTNGAMGYGVPAAIAAKLAAPARTVVCFAGDGCFMMNGQELATAIQHDAAVVFIVVNNGMFGTIRMHQEMHYPGRVSGTSLRNPDFVALASAYGAHAERVAHHDDFPAAFERACASGRAALIEIRTDPAAISARRDLPTLAA

SEQ ID NO: 25184 - protein, 762 aa, Bordetella pertussis Tohama I
MKDTDRQAALDYHAYPHPGKISVTATKPLVTQRDLSLAYSPGVAAACEEIVDDPVNVFRYTGRGNLVGVITNGTAVLGLGNIGALASKPVMEGKAVLFKKFAGLDVFDIEINETDPDKLVEIIAGLEATFGGINLEDIKAPECFTVERKLRERMKIPVFHDDQHGTAITVCAAVVNGLAVAGKRIEDVKLVTSGAGAAALACLDLLVDLGLPLEHIWVTDIEGVVYEGRKKLMDADKERFARKTKARTLAEVIEGADVFLGLSAGNVLKPEMVATMAANPLILALANPNPEILPEAAHAVRDDIVMATGRSDYPNQVNNVLCFPYIFRGALDVGATTITREMEKAAVLAIASLAREEQNEVVAAAYGTYDISFGRDYLIPKPFDPRLIVRIAPAVAKAAMEGGVATRPIADLDAYAEQLQQFVYHSGAFMKPLFSQAKQIVRDGGRARIVFTEGEDERVLRAVQVIVDEKVAKPILVGRPQVLLSRIEKFGLRLRLGQDVEVCNPEYDERFHQYWTTYWDMMCRNGITKEMARVEMRRRLTLIGAMMVHLGDADGMICGAVSGFHDHLRFIDQVIGRKPGAQTYAAMNILLLNERTVALVDTHVNEDPSAEQIAEYTVAAAEEMQRLGLAPKVALLSRSNFGSGSSASGAKMRHALELVNRQAPGLEIDGEMHGDCALDESLRLRLLPDSPLKGSANLLVCPNVDSGNIAYNLLKTVAGKNVAVGPILLGANAPVHIVTSSATVRRIINMAALCVLDANRPQ

SEQ ID NO: 25185 - protein, 445 aa, Bordetella pertussis Tohama I
MTTILPNLPTGQKVGIAFSGGLDTSAALLWMRQKGAVPYAYTANLGQPDEPDYDEIPRRAMQYGAEAARLVDCRAQLVAEGIAALQAGAFHISTAGLTYFNTTPIGRAVTGTMLVAAMKEDGVNIWGDGSTFKGNDIERFYRYGLLTNPDLKIYKPWLDQTFIDELGGRAEMSEYMRQAGFDYKMSAEKAYSTDSNMLGATHEAKDLELLSAGIRIVQPIMGVAFWQDSVQIKAEEVTVRFEEGQPVALNGVEYADPVELLLEANRIGGRHGLGMSDQIENRIIEAKSRGIYEAPGLALLFIAYERLVTGIHNEDTIEQYRENGRKLGRLLYQGRWFDPQAIMLRETAQRWVARAITGEVTLELRRGNDYSLLNTESANLTYAPERLSMEKVENAPFTPADRIGQLTMRNLDIVDTREKLFTYVKTGLLAPSAGSALPQIKDGKK

SEQ ID NO: 25186 - protein, 317 aa, Bordetella pertussis Tohama I
MTTKHRIIQVGSLAGSPTANRRLADEYDVLELWQQADRAAALARHGKGVTALVTSANFGADAALIDALPDLKAICSWGVGYETIDVDAARKRGVLVSNTPDVLTDCVADLAWGLLISGARRMAQGDRFVRAGQWGQVHGSIPLGTRVSGKNLGIIGLGRIGEAIARRGDGFDMQVRYHNRRRRDDVSYGYESSLADLARWADFLVVATVGGPSTRHLVNQEVLEALGPKGLIINIARGPVIDEAALVAALQAGKLGGAALDVFEHEPLVPDALKASDDTVLLPHISSATFETRMAMENLMLDNLASFFKTGDVITPV

SEQ ID NO: 25187 - protein, 314 aa, Bordetella pertussis Tohama I
MKLVVRAVTPLTAEIRHFELAAPDGAALPAYTPGAHLSVHVVLPDGTPARREYSLLGDGSATASYEIAVQCREPAAGSAWMHRLAPGDRIEAEAPVNAFALAADAAEHVLIAGGIGITPILSMARHLRGAGAAFTLHYAGRARAAMAFAEEAAAMGAACRLYHDDGAPLHEALPNILAAPAPGRHLYVCGPRALIADTVDGAAAAGWPPASVHYELFQGALALRGDQPFDLVLRQSGITVSVPAGQIMLDALLQAGVEPLYDCRRGECGMCLTPVLEGKPDHRDHYLSPREREAGDAVCVCVSRACGASLTLDL

SEQ ID NO: 25188 - protein, 338 aa, Bordetella pertussis Tohama I
MKMLKLAAAGAALFAAGSVAHAGATFDNVKKKGFVQCGVSTGIPGFSIADSKGEWKGLDVDMCRAIAATMFGDASKFKVTPLNTQQRFTALQSGEVDVLTRNTTVTLTRDTTLGLIGVGVNYYDSQGVMVSKELGVKSAKELNGATVCVQPGTTTELNLADWFRGNKIEFKPVVIDKYDEIVRAFSAGRCDAFTTDKSQLASTRTTLEKPDNYVILPEDFSKEPLGPMVRQGDEQWFNVVRWSLNAMLEAEEYGITSKNVDEMAKSSNPNIQRILGVTPGMGKNLGVDDKWAFNIIKQVGNYGESFEATLGKSSAMKLERGLNASYKQGGLMYGWPVR

SEQ ID NO: 25189 - protein, 388 aa, Bordetella pertussis Tohama I
MIRSKLPDVGTTIFTVMSRLAIEHKAINLGQGFPDFDPDPELCVLVGKAMAAGHNQYPYMPGVAPLREAIAAKVKTLYGHAYDPETEITVTSGATEALMATVLAAVGPGDEVVVIEPCYDSYLPAIRLAGGTAVPVPLRAPTRDDPYYRIDWQRVRDAIGARTRLLMLNFPHNPTGAVLDESDLDALESIVRETGVLLLSDEVYEHIVFDGKPHASLSRRPLLAEHAFVISSFGKTYHTTGWKVGYCCAPRQLSAELRKVHQFMVFTVSSPMQFALAEYMANPKPYLDLPAFYQAKRDRLAAGLANTRFRPLPSPGTFFMLADYSEITKHAEADFARHLTIDHGVTVIPVSAFYQNPAAPESNHHLVRFCFAKQDATLDAAIERLAHV

SEQ ID NO: 25190 - protein, 68 aa, Bordetella pertussis Tohama I
MAQKGKVKWFNADKGYGFITPDSGGTDVFAHFSAIQGRGYRSLNEGQEVEFEVKDVPKGPQAAEIRPL

SEQ ID NO: 25191 - protein, 624 aa, Bordetella parapertussis 12822
MCGVAGLIHLDGAAVDPAVLQGMTDAIAHRGPDGEGHWIDGNVGLGHRRLAIIDLSPAGHQPMISADSRYVLSYNGEIYNFRELRAELETAGYRFKSRTDSEVLLYAVIAWGLKALKRFNGMFAFALWDCHERRLILARDRYGIKPLYYAEQGGTLAFGSEQKAILALPGFRRKLDKAALLEYFTFQNIFTSKVLLEDIQILPAGHYAIVEPDRCASISLTQYWDFCFREPDVAATDQEYREELDRLFVQAVKRQLVTDVELGSYLSGGMDSGSIAAVAAAEHPYIKTFTCGFDLNSASGIELGFDERSKAEYMSYCFKTEHYEMVLKAGDMERILPHVACHLEEPRVGQSYPNFFAAKLASRFVKVVLSGAGGDELFAGYPWRYYRAVVNDDFEHYVDKYYNFWQRLLPNSELKRVFAPIAGEVEHVWTRDIFRNVFRHHADQLYRPEDYINHSLYFEAKTFLHGLLVVEDKLSMAHGLETRVPFLDNDLVEFAMRCPIRLKLNNLAEVVKINENETGNKVRKFFEKNRDGKTILREVMNHRLPADISKAEKQGFSAPDASWFKGESLEFVRRKLLDGHSPLYEIMDAATVRELVNEHLGGIRNRRLLIWSLLSVDAWMRQTF

SEQ ID NO: 25192 - protein, 636 aa, Bordetella parapertussis 12822
MCGIFGALWHQGKSVSAIEQQLQVGIARQQHRGPDGHGTWIDPQGRLGLAHVRLSIIDLVSGAQPMRGNSGNVITYNGEIYNYIELRRELGEDSFETTSDTEVILRAYEKWGERCVDRLEGMFAFAIWDAKRGEMFVARDRFGIKPFYYACVQGGFYFGSEVKALTPFLNRVETDANALHDYFAFQFCLGEKTLFAGVRQLKPAHCGYVGRDLELKQRQYWEVQYDLDWDHTEKYFVEQVREKLQHSVDMHMRSDVEVGAYISGGVDSSLVAAMARHGRRSSRFQGFTGKFALGDAFDESRYAQALADEHDILLHQVDITEDDFVNDIAKVIYHLDQPVAGPGSFPQYAVSRLAKDHVKVVLGGQGSDEMFGGYARYLIAYWEQCIKGALDGTMHDGNYIVTYESIIPNLRTLRNYKPLIQEFMAEGIFDSRDKRYYRLINRSNTFGNVVNWGMFEGIASSFDDFKQIFWGKNVGKESYFDSITHFDFKTLLPALLQVEDRMSMAHGIESRVPFLDHKLIELVATVPANVKFQNGELKRLLRVAFQDMLPQAIRERKDKMGFPVPLQVWMRKGGKAREFILDTFRSQNARSRAYLAPGFDIEKMMEQEGLFSRNIWAFLSLELWQQQFHDVHRQTI

SEQ ID NO: 25193 - protein, 628 aa, Bordetella parapertussis 12822
MCGVLGAWWRHHDEHEDARFAAGLRKLAHRGPDDRGSEHFAAPHGRLSLGHTRLAVIDLSAAGHQPMHADADRLAVVFNGEIYNYRELRSELRQIDAIFRGDSDTEVLLAAWQHWGVAALRRFKGMFAFALYDRRQQTLTLARDAFGIKPMYYHAAPERLLFGSELPAVQALLPHPPRLNWQRAYDYLAYGQYDQPPDTFIAGIRQLPAGHLLTLDLRTGRAGEPMAWDDPASQECRPIGFQEAAEELRARFLDNVRLHLRSDVPIGAALSGGIDSSAIVCAMRWLEPDLPIQTFSFISDDAHRSEERWVDLVNQHCGATGHKIHIAPHELLDDLDDLIRVQGEPVGSTSIYAQYRVFKLAREHGVVVTLDGQGADELLGGYGGYPTERLASLLETSRLGAAARLLRQQGRGAPARLLQAAALAAGGRHLANLRHATGRQHAPAWLDAQVLRDQGVTMREPAHAWAAATPLRGRRLVNELAHALYHRGLGALLRHGDRNSMRFSVESRVPFLTQDLAEFALSLPERYLVSDSGQTKHIFRKAMRGIVPDLILDRDDKIGFATPEQQWMQATAPQMRQWLVDAADIPFLRNAEVTAQFDAMIAGATPFSWQAWRWVNFQRWMQHATVLP

SEQ ID NO: 25194 - protein, 265 aa, Bordetella parapertussis 12822
MSNQTRAQRIGDVMLDMQNISLSFGGVKALTDISFNVREHEIRAIIGPNGAGKSSMLNVINGVYTPQNGAIMLRGEHFSRMSPRRAAEMGIARTFQNLALFKGMSVLDNIMTGRNLRMKSGLLAQALRLGPAEREEIAHREYVENIIDFLEIQAYRKVPVGRLPYGLQKRVDLGRALAMEPRLLLLDEPMAGMNIEEKQDMSRFILDVNDEFGTTIVLIEHDMGVVMDISDRVVVLDYGKKIGDGSPDEVRSNEDVIRAYLGVAH

SEQ ID NO: 25195 - protein, 304 aa, Bordetella parapertussis 12822
MKRLLNALTAALAIGAAAAGQAHAADLDGTLKKISDTGVITIGHRETSIPFSYYDANQKPVGYSIDICTRIVDAVKTRIKRDDIQVKYLPVTSATRIPLMGNGTIDLECASTSNTLDRQKQVAFSVTTFVTGNRFISLKSANLKTIDDLKGKTVASTSGTANIRQANEINEARSLGMKVVPVKEHAEGFLMVETGRAAAFIMDDILLYGLAANAKEPDRYQVSGDSLSIEPYAIMLRRDDPQFKALVDDTIKSLYASGDFEALYKRWYQSPLPPKGINLNVAMSEVLKRVVATPTDSGDPAAYK

SEQ ID NO: 25196 - protein, 108 aa, Bordetella parapertussis 12822
MSDVQEFIRETVTQHPVVLFMKGTAQFPQCGFSGRAIQILKGCGVKKLVTVNVLEDDEVRQAIKTFSNWPTIPQLYVGGEFIGGSDIMSEMNESGELKQLLDDSGATA

SEQ ID NO: 25197 - protein, 580 aa, Bordetella parapertussis 12822
MYVYDPVDQQLVEERVEQFSDQTRRFLDGQLTEDEFRTLRLQNGLYIQRHAPMLRIAIPYGMLAARQLRKLAHIARTWDRGYGHFSTRQNMQFNWPRLEDVPAILAELASVQMHSIQTSGNCIRNTTSDHFAGVAPDELVNPLVWCEIIRQWSTLHPEFAFLPRKFKIAVSGAVEDRAAVGVHDIGLQAVERDGQLGFRFWVGGGLGRTPIVGHLINPFVPWQHLLTYLQAALRVYNLHGRRDNKFKARIKILVKDLTPEVYAREVEQEWQSLKDGPDTITEDQLNTIAGRFVWPDYDSAAASEPDPTDARAQADPRFARWLRTNVRAHKVAGYAAVTVSLKATGVPPGDITADQMDAVADLSERYGFGELRVSHEQNLVLADVRRARLHDLWQELQQLNLATPNIGLLTNIIACPGGDFCALANAVSIPVAESIQRRFDDLDYLFEIGELDLNISGCINSCGHHHVGHIGILGVDKAGEEWYQVTLGGRQNGAAKPLPDLESPRGGGAAIGRIIGPSFARTQIPDVIDRLIRTYLELRDSDAERFIDVVDRVGIDPFKRDVYADPAVAKPASQQEPAHA

SEQ ID NO: 25198 - protein, 67 aa, Bordetella parapertussis 12822
MQTGIVKWFNDEKGFGFIMPENGGPDLFAHYSEIQGEGHKALVEQQRVSYVQGHGPKGPMATKITPL

SEQ ID NO: 25199 - protein, 401 aa, Bordetella parapertussis 12822
MRRAAIVSPLRTPVGAFGGALKAVPVEELGAAVARAIVQRTGLDPARIDDVVFAQSYASGETPCTGRWVALQAGFPIEVAGMQLDRRCGGGVQTVATAAMMVQTGAADVVMAGGVESMSNVEHYTTDMRWGKRAGSVTLHDRLDRGRERSQPESRFGRISGMIETAETLAREYGISREQADLFAARSHQRAAAAQAAGHFDAEIVPISVAQRKGEPLLVGQDEGVRGETSAESLGRLRTIMKEGVVTAGNACQQNDAAAACLIVAEDRLEELGLEPMGWLVGWAAAGCDPARMGIGPVPAVSKVLARTGLGFDQMDLIELNEAFACQALACVKGWGSSMDALEDRLNVNGSGISLGHPVGATGVRIMTTLLHEMQRRKARYGLETMCIGGGQGIAMIVERA

SEQ ID NO: 25200 - protein, 411 aa, Bordetella parapertussis 12822
MNTISDSAAVAAGRRVAARMARVTTSKIYLAIAKVADMQAQGMQVASLTAGEPDFDTPAHVIEAAVQAMRGGDTHYTPVRGSLAMREAVRQKFQRENGLAFRDEEVMVGTGSKQVIANALAVTLETGDEVLLPVPYWAAYTGMVYAAGGVPTFVGTRAEDGYKLTPQALRAALGPRTRWVILNTPSNPSGLVYGSDELRALGEVLRERPDVLILTDEIYEHLNYTAEPPASLRKLCPDLAERIVVVNGVSKAYAMTGWRLGFAGGPADIIEAMANLQAQTTLAPCSISQAAAVAALNGPRESIDAMAAAYRRRRDLVMQIAGGQSGVRLQRPDGAFYAMLDLSEALAGGERFRGDPEPDQAFCEWLLETRHVAAVPGSVFGAPGSVRISFATDEQTIERGLTGLLDAAAHC

SEQ ID NO: 25201 - protein, 857 aa, Bordetella parapertussis 12822
MSDIGRAELFGKLDSLSYRALEDATALCKLRGNPYVELAHWVHAIAHAQDSDLHHIARAFELDLGALQQDLVRALDQLPRGAGAVSDLSEHVDHVVERAWALASLRYGAARIRSGHLLLALLRDPSLRGVLAGMSGQFARVVPDLLLQGLPEMTRGSPEARADAAVADAPPDGGGAAGALARYAVDLTAQARAGRLDPVTGRDDEIRQLIDVLMRRRQNNPLLTGEAGVGKTAVVEGLALRLARGDVPAPLREVALYLLDIGLLQAGAGVKGEFEQRLRQVIDAVQGSERPIVLFIDEIHTLVGAGGAAGTGDAANLLKPALARGQLRTIGATTWAEYKQYIEKDPALTRRFQAIQVHEPDEAGARRMLRGLAGALQAHHGVLLLDEAVEAAVRLSHRYIPARQLPDKAVALLDTACARVAVSQQATPAALEDARRRIDALDLELEIAAREARLDAGPAERVAGLREQGQAARWEREAALAGQVFGLREQLDAADEQSAPALRAALREAADALARSQGEAPLIHPAVDAAAVVADWTGIPVGRMVRDEAQAVLALADTLERRVVGQRHALELIARRIQTARAGLTDPGKPVGVFLLCGPSGVGKTETALALAEALYGGEQNLITINMSEFQESHTVSTLKGAPPGYVGYGEGGVLTEAVRRRPHSVVLLDEVEKAHADVHEIFFQVFDKGWMEDGEGRYIDFRNTVILLTANVGADLIASLCADPELAPEPDALAAALRAPLRDVFPAALLGRLAAVPYLPLSDSMLAHIVALQFERVGQRLRERHGMDLEVEPAAAELVVARCVEVESGARMVDAILSQRVLPQIGRELLGASLQQRTWRRVRVRAVDGEFACEYE

SEQ ID NO: 25202 - protein, 314 aa, Bordetella parapertussis 12822
MIAASFPHGVSLIGAPTDIGAGQRGASMGPEALRVAGLVRLLERRGLQVTDRGNLQGAPNPWRPPANGYRHLNEVIGWNQLVHDAVSAELRQERLPILLGGDHSLAIGSISAVARHCRASGRKLRVLWLDAHADFNTNRLTPTGNVHGMPVACLCGNGPAALTGMAGRTPAIEPGWVRQIGIRSVDEGERNLVYDAGLEVYDMRYLDEVGMRAVMEAALAGLDPQTHLHVSFDVDFLDPELAPGVGTTVPGGPTYREAQLCMEMIADTGLMRSLDIVELNPALDVHNKTAQVAVDLVESLFGKSTLMRRRPGSA

SEQ ID NO: 25203 - protein, 641 aa, Bordetella parapertussis 12822
MCGIVGIWGPLRDKANVLAESCRRIRHRGPDSNGYWEDAEADLALAHVRLAILDLTEAGHQPMVSACGRYVIVLNGEIYNHMELRERLQQDGLAPAWRGHSDTETVLACFAGWGLEQTLQAAVGMFAIALWDRAERKLALMRDRMGEKPLYYGYSQANLLFGSELKAFMPVPGFGRELDRNALASFMRHNYIPAPQSIYAGIRKLPPGAWVEIDAAQMRRGELPEPQVYWSARRAADQGLGDRRRFESDAQAIDALEQVVSQAVRGQMLSDVSLGAFLSGGIDSSTVVALMQAQSAQPVRTFAIGFHEKGYNEAEHAKAVAAHLGTEHTELYVTAEDGLAVVPSLADMYDEPFADSSQIPTSLVTRMARQHVTVALSGDGGDELFGGYSRYFRVDNWWRKCAAMPGPLRHLAGAALRGSAALPGAGAWRGKVGKLGELLGADTRGEFYRLFVSYWADPGRVVIGGTEPLSPFEQPMEGSTFDAMMKLDTVTYLPDDILVKVDRAAMAVSLETRVPLIDHRVYEFAWQLPFEYKVRGGTGKWLLRQLLYRHVPQAMVDRPKRGFAVPLAAWLRGPLRDWAEALLDPARLRQEGWFEPEPILRKWREHLSGHRNWDSHLWGVLMMQAWLDRYRAGAGDEAGRR

SEQ ID NO: 25204 - protein, 310 aa, Bordetella parapertussis 12822
MIFTGTANTRLAVDVVNHLDMSLGKMTVGRFSDGEVMVEINENVRGKDVFVLQPTCAPTNDNLMEIMVMVDALRRASAGRITAAIPYFGYARQDRRPRSARVAISAKVVANMLQVAGVDRVLTMDLHADQIQGFFDIPVDNIYAGPILLGDIWRRNFSNLVVVSPDIGGVVRARALAKQLEADLAIIDKRRPRANVSEVMNIIGEVDGRTCIIMDDMVDTAGTLCKAAQALKDRGAGAVYAYCTHPVLSGGAIERIETSSLDELVVTDTIPLSEQGQACGKIRQLSCAALLGETILRISNAESVSSLFAD

SEQ ID NO: 25205 - protein, 565 aa, Bordetella parapertussis 12822
MPIIARLPIQKIMNPTLAARTGGRILVDALKVHGVGQAFCVPGESYLPVLDALRDDAQAIRLTVCRQEGGAAFMAEAYGKLTGKPGICFVTRGPGATNASIGVHTAFQDSTPMILFVGQVGADVAEREAFQEIDYRRMYGQMAKWVASIDDAQRIPEFVHRAHQVALSGRPGPVVLALPEDVLRATAHAADRVPHRIARACATSADMKRLHELLAAARRPLLIVGGGGWNEAASAAITRYAERAGLPVATAFRRQDRFDNRHPCYAGHIGLGIAPSLARHVRQADLLLVVGARLADATTDSYALITPEHPGQTLIHVHHDPQELGRVYPADLPIATDVQAFAAQLDACDNPPARCDAWLRELADDYRTDLAVAPSRRDTDLAQVMHWLNQHLPQNAIVTNGAGNYAGWVHRYFQYSPQRRQLAPTNGAMGYGVPAAIAAKLAAPARTVVCFAGDGCFMMNGQELATAIQHDAAVVFIVVNNGMFGTIRMHQEMHYPGRVSGTSLRNPDFVALASAYGAHAERVAHHDDFPAAFERACASGRAALIEIRTDPAAISARRDLPTLAA

SEQ ID NO: 25206 - protein, 762 aa, Bordetella parapertussis 12822
MKDTDRQAALDYHAYPHPGKISVTATKPLVTQRDLSLAYSPGVAAACEEIVEDPANVFRYTGRGNLVGVITNGTAVLGLGNIGALASKPVMEGKAVLFKKFAGLDVFDIEINETDPDKLVEIIAGLEATFGGINLEDIKAPECFTVERKLRERMKIPVFHDDQHGTAITVCAAVVNGLAVAGKRIEDVKLVTSGAGAAALACLDLLVDLGLPLEHIWVTDIEGAVYQGRTALMDPDKARYAQPTEARTLAEVIEGADVFLGLSAGNVLKPEMVATMAANPLILALANPNPEILPEAAHAVRDDIIMATGRSDYPNQVNNVLCFPYIFRGALDVGATTITREMEKAAVLAIASLAREEQNEVVAAAYGTYDISFGRDYLIPKPFDPRLIVRIAPAVAKAAMEGGVATRPIADLDAYAEQLQQFVYHSGAFMKPLFSQAKQIVRDGGRARIVFTEGEDERVLRAVQVIVDEKVAKPILVGRPQVLLSRIEKFGLRLRLGQDVEVCNPEYDERFHQYWTTYWELMCRNGITKEMARVEMRRRLTLIGAMMVHLGDADGMICGAVSGFHDHLRFIDQVIGRKPGATTYAAMNILLLDERTVALVDTHVNEDPSAEQIAEYTVAAAEEMQRLGLAPKVALLSRSNFGSGSSASGAKMRHALELVNRQAPGLEIDGEMHGDCALDESLRLRLLPDSPLKGSANLLVCPNVDSGNIAYNLLKTVAGKNVAVGPILLGANAPVHIVTSSATVRRIINMAALCVLDANRPQ

SEQ ID NO: 25207 - protein, 552 aa, Bordetella parapertussis 12822
MKYTVGALLADCLAANGVDTVFGIVSVHNMAIMDAIAARPALRMVMTRGETGAAHMADGHARARQGLGVVITSTGPGATNAVPGLAEAQFAGSPVLHITGQTATPYLGSRRGTVHDMPSQHDMLRSVGKAVLRVTDADSALAVIQEAIRVCLQAPAGPVSLEIPVDLQGREVAMPDPASLKVSPAAAPPPEPAAIAELVRRIKAARRPMLWVGAGAKGAASQLAALVDLGFGVVSSWSGRGVVDDHHPRNLGALNGAGSPAVLDLYRSADLMLVVGSRLRGQETDNQAVPLPTPLLRVDIDAARDSLGYANELFVQGDCAEVLDRLLAGLADGLDIDPAFDADVRAARQAAIDDYLGRLGPYRDFPAMLRRVLPDDALWVRDITKSNSTWGHRLFPLRKAHQNIYPVSAGIGQGLQLGIGAALASPGRKTAVLTGDGGFYFNMTELWTAAQERLDMLVIVMNDQGYGAIRGIQDVVCDGRHRYDALGGPAFADIAQLAGAKFWKVEAARDFERIAAEAYASPGLCVVEVDMVAIGALPMYYPYIKAGTPRQD

SEQ ID NO: 25208 - protein, 384 aa, Bordetella parapertussis 12822
MPRLATRTNDFLTFQVVELFKEAQALQAAGRDIISLGIGEPDFTAPPQVVEALERAARAGLSGYSAPAGLSALREAIAAFYESEFGARVDPARIIVTAGASGALALACAALVNPGAQVLMPDPSYPANSNFVLAAGGQPRLIPSTAAKRFQLSAQDVRDHWNDATQGVLIASPSNPTGTSIAHDELAELLAAVRERQGFSIVDEIYLGLSYESQPRSALLLDDDIIVINSFSKYFHMTGWRLGWMIVPESMVAKVEKMAASLAICAPTLAQHAALACFTPDALKIFEHRREAFKQRRDYLLPEFERLGIPVPVRPDGAFYIYADIAALGTTSMAFSHRLLHEGGVAAVPGLDFGPAHGERTMRFSYATGLDRLQEAVARIEKLL

SEQ ID NO: 25209 - protein, 795 aa, Bordetella parapertussis 12822
MRSRPARAGAGSIFPACAAASFTFAAPTYVIAIMDANFRKAALEYHEHGRPGKISVTATKPLVTQRDLSLAYSPGVAAACEEIVEDPANVFRYTGRGKLVGVITNGTAVLGLGNIGALASKPVMEGKAVLFKKFAGLDVFDIEINETDPDKLVEIIAGLEATFGGINLEDIKAPECFTVERKLRERMKIPVFHDDQHGTAITVCAAVVNGLAVAGKRIEDVKLVTSGAGAAALACLDLLVDLGLPLEHIWVTDIEGAVYQGRTALMDPDKARYAQPTEARTLAEVIEGADVFLGLSAGNVLKPEMVATMAANPLILALANPNPEILPEAAHAVRDDIIMATGRSDYPNQVNNVLCFPYIFRGALDVGATTITREMEKAAVLAIASLAREEQNEVVAAAYGTYDISFGRDYLIPKPFDPRLIVRIAPAVAKAAMEGGVATRPIADLDAYAEQLQQFVYHSGAFMKPLFSQAKQIVRDGGRARIVFTEGEDERVLRAVQVIVDEKVAKPILVGRPQVLLSRIEKFGLRLRLGQDVEVCNPEYDERFHQYWTTYWELMCRNGITKEMARVEMRRRLTLIGAMMVHLGDADGMICGAVSGFHDHLRFIDQVIGRKPGATTYAAMNILLLDERTVALVDTHVNEDPSAEQIAEYTVAAAEEMQRLGLAPKVALLSRSNFGSGSSASGAKMRHALELVNRQAPGLEIDGEMHGDCALDESLRLRLLPDSPLKGSANLLVCPNVDSGNIAYNLLKTVAGKNVAVGPILLGANAPVHIVTSSATVRRIVNMAAMAVVNADAVR

SEQ ID NO: 25210 - protein, 396 aa, Bordetella parapertussis 12822
MSDNLLVINAGSSSLKFYLYEIAEGDELRPTLGGQLDGIGGSRPHLRIRAQDGHTLLERDVAPTHAADVPGAQEVLGTWLSGHLGGAPCAIGHRVVHGGTQYDAPVLVDDDVLAQLDDLTPLAPLHQPNNLAPIRVIRERRPNIPQVACFDTAFHRTHSPLADRYALPEHLYQEGVRRYGFHGLSYEYIAQRLRRALPEIAGGKIVAAHLGNGVSACAMVDGRSVDSTMGFTALEGLPMGTRPGRLDPGVVLWMMERGMSHDDIEHLLYHDCGLKGLSGIGNDVRELLASDAPAARLALDYFAWRVAEGIAGLGCAMNGIDAIVFTAGIGENAAPVRAAIARHWEWLGVRLDQARNARHGPRISSDDSAIGVYVVRTNEELIIAQHTLALVRQGQA

SEQ ID NO: 25211 - protein, 575 aa, Bordetella parapertussis 12822
MASSPADTPHRNWLRWLPGLAVLKTYQAAWLPRDLAAGLVLTAMLVPVGIAYAEASGVPGVYGLYATIVPLLAYALFGPSRILVLGPDSALAAPILAVVLSVSEGDPMRAVATASLMAIVSGLFCIILGLLRLGFITELLSKPIRYGYMNGIALVVLASQLPKLFAIPTDDGGPLRELWQLAQAVLDGRTNGYSLAVGSAALGLILLLKRFKRLPGILIAVVLATLAVSLFGLDGRGVQVLGEIPQGLPGFTIPWLSNADLARIVLGGCAIALISFADTSVLSRTYAARTHTRVDPNQEMVGLGVANLATGFFQGFPVSSSASRTPVAEAAGSRTQLAGVVGALAVAALLLAAPNLLRHLPSSAMAAVVIAAAIGLFEFKDLRRIFRIQQWEFWLSMLCFAAVVAFGAIPGICLAVVVAVLEFLWDGWRPHFAVLGRVPDLRGYHDLKRYPHAALIDGLVLFRWDAPLFFANAELFQQRLLEAVQASPTPVQRVVVTAEPVTSVDVTSADMLRELSHHLAESGIALHFAEMKDPVRDKLKRFELSEVFGADRFHPTVESAVDDYLKRPPQGTIDP

SEQ ID NO: 25212 - protein, 273 aa, Bordetella parapertussis 12822
MILGGAPGHEYDLHYIPAPLRRRHHSQAMSQAANPTALPAWDPPAILAQLRANTCFGHMAEPTLAAFAAIAQWRRLDHGELLAGRGTPAPGVVIILKGAIHTSSFSDDGHEFALSMLEFDGLWGVAAVLDGGGMLRDSRAYQQTDILLLPRAAFLDILDGDPGLYRYFVKLLCSRIRTAHAIIDELALRSLPQRLPRLLGALTAGRPGDDERGIAVAQTQDALATLLGVSRHAVNRELRQLANQGLVGLGYGEIWVRDLERLKQLWHERGAQP

SEQ ID NO: 25213 - protein, 297 aa, Bordetella parapertussis 12822
MSSIAFIGLGNMGAPMALNLVKAGHDLTVFDLVPAAVKTLTDAGARAAGSAAEAVQGAELVISMLPASKHVEGLYLGQDLLASIGASALVIECSTIAPDSARKVAAAAQARGIAMIDAPVSGGTGGAAAGTLTFIVGGEAPALERARPVLASMGKNIFHAGGAGAGQVAKICNNMLLGILMAGTSEALALGVANGLDPKVLSDIISKSSGRNWATELYNPWPGVMEHAPASKGYAGGFGVDLMLKDLGLAAEAALGTRSSILLGELARNLYSLHSQGGSGGLDFSSIVNLYSPGERN

SEQ ID NO: 25214 - protein, 402 aa, Bordetella parapertussis 12822
MLSPEVRALVKATAPVLKEHGEALTRHFYTRMLGGNPELRQLFNQGHQQSGQQQQALAAAVAAYAEHIDDPSVLLPVVERIAHKHVSLGVRAEHYAIVGKHLLASIREVLGEAATDELIDAWAAAYGQLADLLIGRERALYAAAASRDGGWTGWRAFKVVRKTPESAEITSFYLAPADGGATPDYLPGQYVSVRVYVPELGLMQPRQYSLSEAPGMPGQLRISVKREAGSPAGMVSGTLHNRINEGDVLDVSPPQGDFTLDAEDGRPVVLLSGGVGLTPMVSMLNHLTARDDGRQIRFVHACREAGVHAMKEHINALAAKRPNVRKAVFYERVGADDRRGVDYDYEGRVDLHAIRDEVILPDADYYLCGPLPFMQAQRRALADLGVAEHRIHAEVFGTGGVA

SEQ ID NO: 25215 - protein, 258 aa, Bordetella parapertussis 12822
MHGGVTLAAALFLFRCRMSDSAPSRPRRTPVRPLFDPMAQPWETANQGLARVDERLLTPPELRSSLRPADHWRLDPLCAAEPRAPGREGSLVAAAVLIPLVMRADGVRVMLTQRAAHLHDHAGQVSFPGGRIEVSDATPVAAALREAQEETGLPVQQVEVLGSMPQYFTATGFAITPVVSLVQPDFELAPDAFEVAEVFEVPLSFLMDPANHRLYRAALPDGYVRQYYAMPWQRYFIWGATAGMLRNLYQTVREALPG

SEQ ID NO: 25216 - protein, 362 aa, Bordetella parapertussis 12822
MSHNPFHMLKVASVARNTRDAVVVTFDLPPELAGDFRFRPGQYLTLRTRLDGEEVRRSYSICSAPGDGVLRVAIKKVDEGVFSNWANHELQPGQSLEVMPPAGNFTVDFDPDNARHYVAFAVGSGITPVFSLVKSALSAEPRSRFTLFFGNRASSSVLFREEIEDLKNLYMERFSLVYIMSRESQDIELFNGRLDGDKVDQLLTAWMRPGDIDYAFVCGPQTMIESVVEHLQARGMPKSHIKFELFGAPKGPRALRTGRDAPAAPGKGQCEVTVVQDGHSRTFFIDKNKDSVLDSALAQGVELPYSCKGGVCSTCRCKVVEGEVDMDANFALEDYEVARGFVLSCQSYPVSDRLVIDFDQET

SEQ ID NO: 25217 - protein, 401 aa, Bordetella parapertussis 12822
MKTGGIDIMNEVVVVAAARTAIGDFGGGLKDVAPCDLGATVIREALARAGVAGPEVGHVAVGHVINTEPRDMYLSRVAAINAGIGKETPAFNVNRLCGSGLQAIVSAAQTIMLGDTEIAVGAGAESMSRAPYIAPAQRWGARMGDSAMVDMMTGALSDPFGRMHMGVTAENVAARYSISRADQDALAVESHRRAAAAIDAGRFRDQIVPVTLKTRKGETVFDTDEHVRRDITIEGMAALRPVFQKENGTVTAGNASGLNDGAGAVVLMSAAAAAQRGIAPMARLVAYAHAGVDPEIMGIGPVPATQAALKRAGLTVDQLDVIEANEAFAAQACAVTRQLELDPAKVNPNGSGISLGHPIGATGAIITVKALYELQRVGGRYALVTMCIGGGQGIAAIFERV

SEQ ID NO: 25218 - protein, 400 aa, Bordetella parapertussis 12822
MSIVADKIKRIKLSPSVATRAIVAQLREEGRRVIDLTVGEPDFSTPAHICEAAIAAMQRGETKYPPAQGTMALRKAVRARLREETGVDYPEGHIIVGTGAKQVLYNGLAATLNEGDEVIIPAPYWVSYPDMVLVNGGVPVAVTATPATQYKLTPQALEAAITPRTKWLMMNAPSNPTGAIYTADEWRGLAEVLRRHPHVWLMTDDIYARLNFTATPTVHPLQVAPELAERTLVVNGVSKAYAMTGWRIGYGAGPEALIKAMAILQSQSTSGACSISQAAAREALAGPQDCVAEFARTFKARRDAAVAALQGAPGLSVVMPEGAFYVFPDCAGVLGKTTPDGRVLETDTDFVHYLLREAGVAVIDGTPYGVPGTFRLSFAAALEDIQQGCAAIRAACERLA

SEQ ID NO: 25219 - protein, 865 aa, Bordetella parapertussis 12822
MRFDKLTTKFQQALADAQSLAARNDHPYIEPVHVLAALLGDPDSGAASLLARAGVAVNRVQPAIDSALKGLPQVQGEDNVQVGRELQSVLVRTDKEAARRGDTYIASELFLLALADDKGDAGRILREAGLQKKALEAAIDAVRGGENVSGAEGESNREALSKYTLDLTERARQGKLDPVIGRDDEIRRTIQILQRRTKNNPVLIGEPGVGKTAIVEGLAQRIVNDEVPETLRGKRVLSLDLAALLAGAKFRGEFEERLKAVLKELAQDDGQNIVFIDELHTMVGAGKAEGAMDAGNMLKPALARGELHCIGATTLDEYRKYIEKDAALERRFQKVLVGEPDVESTIAILRGLQERYELHHGVEITDPAIVAAAELSHRYITDRFLPDKAIDLIDEAGARIRMEIDSKPEVMDRLDRRIIQLKIEREAVKKETDDASMRRLAVIEEELEKLQREYNDYEEIWKAEKAAVQGTQAIKEEIDRVRAEMAELQRKGQFDKLAELQYGKLPELEARLKAADSAEREAGESDSGKPRLLRTQVGAEEIAEVVSRATGIPVAKMMQGERDKLLRMEDFLHKRVVGQDEAVRLVSDAIRRSRAGLADPSRPYGSFLFLGPTGVGKTELTRALADFLFDSEEHMIRIDMSEFMEKHSVARLIGAPPGYVGYEEGGYLTEAVRRKPYSVILLDEVEKAHPDVFNVLLQVLDDGRLTDGQGRTVDFRNTVIVMTSNLGSQHIQSMAGKPYEVIKEVVWDELKHTFRPEFLNRIDEVVVFHGLEAQHIESIARIQLKRLGERLEKQEMRLDVSDAALAEIARSGFDPVFGARPLKRAVQQQIENPVAKLILEGVFGPRDVVPVDWQDGKFVFTRTLQ

SEQ ID NO: 25220 - protein, 192 aa, Bordetella parapertussis 12822
MSLAAQEQIFQAARTFNRYTEQSISDATLHELYELMKWGPTAMNSQPGRFIFLRSAAARQRLAPALSPGNLEKTLAAPVTVIVAQDTQFYEHLPTQFSAYDARPVFENNADAARATAMRNSSLQGAYLIVAARMLGLDAGPMSGFDAAKVDAEFFPDGRCKANFLVNLGYGDPAGNYPRGPRLAFDTAAQIL

SEQ ID NO: 25221 - protein, 122 aa, Bordetella parapertussis 12822
MQRIMLRAKLHRVTVTEADLHYEGSCGIDEDLLDAAGMREFERIELYNVTNGERFDTYIIKAARGSGAISLNGAAARRAQVGDLLIICTYGPMSEEQSATHKPQVVLVDDANRVKEIRKFPA

SEQ ID NO: 25222 - protein, 81 aa, Bordetella parapertussis 12822
MVPGLGPLISRKYSMETGVVKWFNAEKGYGFITPEAGGKDLFAHFSEIQANGFKSLEENQRVSFVTAMGPKGPQATKIQIL

SEQ ID NO: 25223 - protein, 68 aa, Bordetella parapertussis 12822
MATGIVKWFNAEKGYGFIMPDDGSKDLFAHYSEIRSEGYKSLQENQRVSFEVGQGPKGPSAKNIKVIA

SEQ ID NO: 25224 - protein, 403 aa, Bordetella parapertussis 12822
MSNRPIYLDYSATTPVDPRVVEKMIPWLYESFGNPASRSHAFGWEAEDAVEKAREEVAKLVNADPREIVWTSGATESDNLAIKGAANFYAERGKHIITVKTEHKAVLDTCRELERQGFEVTYLDVQDDGLLSLDAFKAALRPDTILVSVMMVNNEIGVIQDIAALGEICREKGIIFHVDAAQATGKVEIDLQKLKVDLMSFSAHKTYGPKGIGALYVRRKPRVRIEAQMHGGGHERGFRSGTLATHQIVGMGEAFRLAREEMGTENERVRMLRDRLLAGLTQIEEVYVNGSMEHRVPHNLNISFNYVEGESLIMAIKELAVSSGSACTSASLEPSYVLRALGRNDELAHSSIRFTLGRFTTEQEIDFTIELIKSRVGKLRDMSPLWEMAQEGIDLNSVQWAAH

SEQ ID NO: 25225 - protein, 628 aa, Bordetella parapertussis 12822
MNNSFSKVAVWMVIALVLFTVFKQFDGRAQTQDGVSYTQFMDDAKAGRIRKVDVQGDVLYVTPDAGRPYSLTSPGDLWMVSDLLKYGVQVSGKAREEPSLLMSIFVSWFPMLLLIGVWIFFMRQMQGGGRGGAFSFGKSRARMLDENTNQVTFADVAGCDEAKEDVQELVDFLRDPSKFQKLGGRIPRGVLMVGSPGTGKTLLAKAIAGEAKVPFFSISGSDFVEMFVGVGAARVRDMFENAKKHAPCIIFIDEIDAVGRQRGAGLGGGNDEREQTLNQMLVEMDGFESGQGVIVIAATNRPDVLDPALLRPGRFDRQVVVPLPDIRGREQILKVHMRKVPLSPNVDATILARGTPGFSGADLANLVNEAALFAARRNGRTVDMSDFEKAKDKIIMGAERRSIVMPEEERKNTAYHESGHAIVARMLPKTDPVHKVTIIPRGRALGVTMQLPETDRYSMDKERLLNTIAVLFGGRIAEEIFMNQMTTGASNDFERATAIARDIVTRYGMTDELGPMVYAENEGEVFLGRSVTKTTHVSEATMQKVDSEIRRIIDEQYGVARKILEDNRARVEVMTSALLEWETIDADQIDDIVNDRPPRPPKTPQGPSDTSDTLPTGLAAGGNTAAAV

SEQ ID NO: 25226 - protein, 299 aa, Bordetella parapertussis 12822
MMEAYLIAIFITVLIYMLLAGGLALQYGFTGLINFGHVGFYAIGAYTSALLSLQGGPLVACILAATLVSGLSAYPLGVIALRLRGDYLAIVTLGFSESVRMILQKEEWLTRGVHGIPGIPRLFGQYASGAMVDVLILATLLLTNILVFLGIRKIIGSPFGRTIKAIRDNEVAVMALGKNPAWFKTRSLMIGAALAGLAGAFTAHYLTFIAPEQFVPLITFYVWIAIIVGGVGSLKGVVAGTVILMVFLEGSRFVREFLFFDISEVQMASLRFFIIGVGLILCILYRPNGIFGSASAEGK

SEQ ID NO: 25227 - protein, 253 aa, Bordetella parapertussis 12822
MAQLSVQNIRAGFAGLLALDDVSIAVEKGERVGLIGTNGAGKSTLFSVIGGYVPAQGGRVHFDGQDISQFGVQRRVNLGLARTFQVPREFGQLSVLENMMAAAPDQRGEHLGTLFLSPGRVRRQEAEIRERAQDLLEFLNLAKVANVLAGKLSGGQKKLLELGRLLMMKPGFIMLDEPFAGVNPVLVDELSRRIVELNEQGITVLIIEHNLQALSELVPRMYIMDRGKVLCEGTPEHVLADERVREAYMGGTV

SEQ ID NO: 25228 - protein, 330 aa, Bordetella parapertussis 12822
MRTSTMKCLIVQPIHEEGLALLREAGVECIAPASAAMADVAAAIADCDAAITRNAGLDTRAIEAGRRLRVIGNHGTGTNMIDLAAAERLGIPVVNTPGANARSVAELALAMAMALLKRTVPLNQAVRQGNWNIRYEAGLRELSGMSLGIVGFGQIGRALAAMAIGGFGMRVHVYSPSVAPQDIAAAGCQRADSLPALAREADIVSLHRPARPGAGPLVDDALLQAMKPGALLINTARADLVDEAALARHLEAGRLGGAGLDVFSSEPPPADHPLLRLPQVVLAPHAGGSTDQALARTARAVAEQVIEVLRDARPAHLIAPHAWPRRRGAR

SEQ ID NO: 25229 - protein, 430 aa, Bordetella parapertussis 12822
MRACQPEYEMSLIVQKYGGTSMGSVERIKNVARRVAKWHAAGHKVVVVPSAMAGETNRLLSLAREISPQPDGRELDMIAATGEQASSGMLAIALQAEGVPARSYAGWQVPVRTDSSYTKARIKSIDDKRVLADLDAGRVVIVTGFQGVDDDGHITTLGRGGSDTSAVAVAAAIKADECLIFTDVDGVYTTDPRVVPEARRMAVVSFEEMLEMASLGSKVLQIRSVEFAGKYHVPTRVLSSLTDPLIPLEEEMRSGTLITFEEDEKMEAAVVSGIAFSRDEAKITLLAVPDKPGIAYSILGPVAAANIDVDMIVQNQSVAGTTDFSFTVNRNEYQRTLDLLKREVIPAVSARELVTDEKVAKVSIVGIGMRSHVGVASLMFQTLSQEGINIQMISTSEIKTSVIIDDKYMELAVRSLHKAFGLDQVPGDQV

SEQ ID NO: 25230 - protein, 399 aa, Bordetella parapertussis 12822
MSKQIQDAYIVAATRLPVGKRNGAYATTRPDDMLAAVLRAVLAQVPALLPERINDVITGCAMPEAEQGMNVSRIGLLLAGLPQSVAGVTVNRFCASGLQAVADAANRIRLGMADVMIGAGTESMSAMPQIMGNKVAMNPAVFAHEENLGMAFGMGLTGEKVAEQWKVSREDQDAFSLSSHQKACAAIAAGHFKAEITPYQVRTHLAGGRDGAVRVAERWIEQDEGPRPDSTAEALARLRPVFAARGSVTAGNSSQMSDGAAAVVLVSERVLREYGLQPLARFVDFAVAGVPPEIMGIGPRMAIPKVLARSGIAQQDLDWIELNEAFAAQSLAVMRDLELDPAKVNPLGGAIALGHPLGATGAIRTATIVHGLRRTGGKYGMVTMCIGTGMGAAGIFEAL

SEQ ID NO: 25231 - protein, 372 aa, Bordetella parapertussis 12822
MQIGVPKETRDGETRVAATPETVKKYIGGKHSVIVERGAGVAAHYPDSAYEEAGATLGTAETALGCELVLKVRAPADNELPHMKRGAVLAGMLDPFDADGLQRLAAAGLTAFALEAAPRITRAQSLDVLSSQANLAGYKAVLLAANYYGRLLPMMMTAAGTLKAARVVVLGAGVAGLQAIATARRLGAVVEASDVRPAAKEQIESLGAKFIDVPFETDEEREIAQGVGGYARPMPPAWMARQAELVAQRCKQADIVITTALIPGRPAPTLLTAETVQAMKPGSVVVDLAVERGGNCPLTQKGLVADHHGVTLVGLTNLPGMLPTDASALYARNLLDFLKLIVDAEGALAIRRDDEIVTACLMCEGGQVTRRS

SEQ ID NO: 25232 - protein, 445 aa, Bordetella parapertussis 12822
MTTILPNLPTGQKVGIAFSGGLDTSAALLWMRQKGAVPYAYTANLGQPDEPDYDEIPRRAMQYGAEAARLVDCRAQLVAEGIAALQAGAFHISTAGLTYFNTTPIGRAVTGTMLVAAMKEDGVNIWGDGSTFKGNDIERFYRYGLLTNPDLKIYKPWLDQTFIDELGGRAEMSEYMRQAGFDYKMSAEKAYSTDSNMLGATHEAKDLELLNSGIRIVQPIMGVAFWQDSVQIKAEEVTVRFEEGQPVALNGVEYADPVELLLEANRIGGRHGLGMSDQIENRIIEAKSRGIYEAPGLALLFIAYERLVTGIHNEDTIEQYRENGRKLGRLLYQGRWFDPQAIMLRETAQRWVARAITGEVTLELRRGNDYSLLNTESANLTYAPERLSMEKVENAPFTPADRIGQLTMRNLDIVDTREKLFTYVKTGLLAPSAGSALPQIKDGKK

SEQ ID NO: 25233 - protein, 317 aa, Bordetella parapertussis 12822
MTTKHRIIQVGSLAGSPTANRRLADEYDVLELWQQADRAAALARHGKGVTALVTSANFGADAALIDALPDLKAICSWGVGYETIDVDAARKRGVLVSNTPDVLTDCVADLAWGLLISGARRMAQGDRFVRAGQWGQVHGSIPLGTRVSGKNLGIIGLGRIGEAIARRGDGFDMQVRYHNRRRRDDVSYGYESSLADLARWADFLVVATVGDPSTRHLVNQEVLEALGPKGLIINIARGPVIDEAALVAALQAGKLGGAALDVFEHEPSVPDALKASDETVLLPHIGSATFETRMAMENLMLDNLASFFKTGGVITPV

SEQ ID NO: 25234 - protein, 401 aa, Bordetella parapertussis 12822
MTVQAFICDAIRTPFGRYGGALSSVRADDLAAVPIKALMARNPGVRWEELDDVLYGCANQAGEDNRNVARMAALLAGLPIEVPGATINRLCGSGLDAVGSAARAIAAGQASLMLAGGVESMSRAPFVMGKADSAFSRNAAIYDTTIGWRFVNKLMKAQYGVDSMPETAENVADDFKISRADQDKFALASQQKALRAQQSGFFDAEITPVSIAQKKGDPVVVSKDEHPRDTSLEALAKLRGVVREGGSVTAGNASGVNDGAAALLLADEKAAASHGLTPRARVVGMATAGVAPRIMGMGPAPATRKVLAQTGLSLAQMDVIELNEAFAAQGLAVMRDLGIADDDARVNINGGAIALGHPLGASGARLVTTAINQLQRGGGRYALCTMCIGVGQGIALIIERV

SEQ ID NO: 25235 - protein, 327 aa, Bordetella parapertussis 12822
MPSPSALHDLCDTPPTFMGVPHRHAIDGARAAILGIPFDCGTHAFRIGARQGPQSIREQSRLMRTFNPELADYNPLQRLGVIDCGNVRVVPSDILDAFERIEQAVGAIVDGGAVPVTMGGDGSVSLPQLRAVGKRHPGLAVIHLDSHTDTNTFVKGKEYNAGTQFTHAALEGRVDTSLAFHIGTRGTTFTQHVFRHARHFGYQIIPLNELLARGMAEVLQDLRARLGERPVYLCLDMDVLDPSCAPGVCAPSWGGLSAREAIAFLRGLAGLNIVAIDVNTVSPPHDVNGTTASLAAALMVEGLVLLCKRLGLDHPDPAPDFAAMYAR

SEQ ID NO: 25236 - protein, 412 aa, Bordetella parapertussis 12822
MTQQSPLKNATIAAVMTAVIVTPIFGLQLVRQGARTLMEPRWDLVALACALVFAFQLLRPWISKPFKALKTGLPTLPSAPARGHKWLVVLLIAVAVIWPFFSGRSSVDIATLVLIYVMLGLGLNIVVGFAGLLDLGFVGFYAVGAYTYALLYHWGGWSFWEALPFSGAVAALFGFVLGFPVLRLRGDYLAIVTLGFGEIIRLLLINLNMLTGGPDGISGLPKPSVLGMEMARRASTEGGQTFHEIMGWTFQNQHMVIYLYLMALALALATLFVSTRLIRMPVGRAWEALREDEIACRSLGLNPTRIKLSAFTLGAMFAGFGGAFFAARQGMVNPESFTFIESALILAIVVLGGMGSQIGVILAAILLTVLPELAREFAEYRMLMFGLVMVLMMMWRPQGLLPMKRPHVELRK

SEQ ID NO: 25237 - protein, 399 aa, Bordetella parapertussis 12822
MRFADRMARIAPSPSSMAGQRMRELRAAGRNVIGLTAGEPDFATPDNIQQAALRAMRNGQTKYTDVGGVPELKAAVAEKFRRENSLAYRQDQIIVSSGAKQVIFNALLCLVQRGDEVVIPAPYWVSYPDMVRFAGGTPVAVACAQQHRFKLQPDELERAITPRTRCLILNSPNNPSGAAYDETELKALAQVLLRHPDICVITDDIYEHLLYDGRRFATIAAVEPALADRVLTVNGVSKSYAMTGWRIGYAGGPAALIANMVKLQSQSTSCPSAVSQAAAIEALTGPQDIIASSRKLFQARRDLLVRRINAIPGLHCDTPDGAFYVFASCAGLAGKRTPQGRTIDNDTDLALHLLDAEGVVVIQGDAYGMPGFFRLSIAASETLIEEAQRRIAAACAALH

SEQ ID NO: 25238 - protein, 762 aa, Bordetella parapertussis 12822
MKKPQNLAGAGRREVPAEWRDAIHSHLDAGETVLAWLETDLDARLRFETGMVLATDRRILACAPGRREWSSWPYSPDLRLALHDHAGAASLELDAGARRLASWRFTLGRNPAALRLLEQFESLQALRLAGAAPTAGESPRPCPTCQAPIPADREDCPECSQEPAAPPATWALLRLWRFARPYRGALLAGFLLTLLGTAATLVPPYLTMPLMDDVLIPFQNGAPIDYAKVRLYLAGLLASAVLAWGLGWARTYILAWVSERIGADLRTTTYEHLQQLSLEYFGGKRTGDLMARIGSETDRICVFLSLHLLDFATDVLMIAMTAAILVSINPWLALATLVPLPFIMWMIHVVRDRLRHGFEKVDRIWSEITNVLADTIPGIRVVKAFAQERREVQRFREANNRNLEVNDRVNTVWSLFSPTVTLLTEIGLLIVWIFGIWQVLQKHITVGVLAAFLAYIGRFYTRLDSMSRIVSVTQKAAAGAKRIFDILDYVSSVPEPHKPVHLPRVNGHIELRDVGFRYGNRSVIRGLDLSIAPGEMIGLVGHSGSGKSTLINLICRFYDVSEGAVLVDGVDIRSLRIADYRRNIGLVLQEPFLFFGTIADNISYGKPDATRAEIIAAARAAHAHEFILRLPHGYDSLVGERGQALSGGERQRISIARALLIDPRILIMDEATSSVDTTTEKEIQKALDNLVRGRTTIAIAHRLSTLRRADRLVVLDRGQIVEEGAHEALMAREGAYYRLYQAQQTRQAEGGDDGSDAIAAIA

SEQ ID NO: 25239 - protein, 768 aa, Bordetella parapertussis 12822
MRRKGCAPMDENLTKLALDYHAYPTPGKISVTPTKTLANQDDLSLAYSPGVAAACMAIFDQGNDAASKYTSRSNLVGVITNGTAVLGLGNIGPLAAKPVMEGKGCLFKKFAGIDVFDIELAENDPDKLVDIIAALEPTLGGVNLEDIKAPECFYIEKKLRERMNIPVFHDDQHGTAIISSAAILNGLKVVGKDIGQVKLACSGAGAAAIACLDLLVHLGIKREHIYVVDSRGVIWEGRDENMEPNKRRYAQKTEARTLADVVNGADVFLGCSTAGVLTPEMVKTMAAQPLILALANPEPEIRPELAKAARPDCIVATGRSDYPNQVNNVLCFPFIFRGALDAGATRITEEMKLACVKAIAELAQAEQNDEVARAYAGQELSFGPDYIIPKPFDPRLIVQIAPAVAQAAADSGVATRPIEDIEAYRQKLMGFVYHSGQLMRPLFQQAKQAPKRVVYADGEDERVLRAVQTVIDEKLAEPILVGRPSVIEMRIKKFGLRMVPGQNVEIVDPEDDSRFNDTWNGYYQLRGREGVTPAIAKAMIRKHNTLIGAMLLRRGDADALLCGVTSKYDNQLKYVEEVIGRKPGQTYGALNVLMLPNQTLFVTDTHVNENPSADEIANITIQAAEEMLRFGVMPKIALLSHSNFGSRPTDSSRKMAHARKLVAERAPHLEVDGEMHADAALSESIRLQAYPDSTLKGRANLLVMPNLDTGNITYNMLKMTGSNGIAMGPILLGSARPVHILTTSATVRRIVNMTALAVVDAQQEAAEG

SEQ ID NO: 25240 - protein, 652 aa, Bordetella parapertussis 12822
MQNELKPTINKPVFLTSALFILLLVVFTIAAPATAQDFFNVIQAWILGNASWFYILTVAIILLAVIFVAVSRYGNIKLGPDHSEPDYRDITWFAMLFSTGMGIGLMFFGVAEPVMHFIDPPVGEGGTALAAREAMKITFFHWGLHAWAIYASVALVLAFFCFRHGLPLTLRSALYPLIGERIYGPIGHAVDIFAIIGTVFGVATSLGLGVAQINSGLNHLFGVPVGIPTQIILIVISCGLATISVASGLDRGIRILSEANLLLAVVLLLFVLVLGPTVFLLQTFVQNTGAYLSDIVNKTFNLYAYEPTDWIGGWTLFYWGWWIAWSPFVGLFIARISRGRTIRQFVGGVLLVPAGFTLFWMTVFGDAAIHAVLVEGVGGLAETVRADSSLALFAFLEHLPWGSVTSVVAIVMVVVFFVTSADSGALVVDQLASGGVESTPVWQRIFWSTLMGVVAIALLLADGLQALQTATIASALPFSIILLLALWGLFKALRLDATKRSLLHRTITRTQPVRGQNWEHRLRNIVMMPRRAHVLRFISDVVRPAMDDVAEALRKEGYEAQVVDGEESEVRLEVSHGVYLDFSYAVYPRSEVRPSLTPQEANDEEERRYFRAEVHLREGGQDYDIMGWTRDEVIGDILDQYERHRHYLHVVH

SEQ ID NO: 25241 - protein, 743 aa, Bordetella parapertussis 12822
MSITPPDDEGAEPGPSSQAPHAQAAALRRPIERSRFGGSQRRPERQDGDDAPVSRSDLSKGPEEVLERRTASINWRVLLVSSAVIVAFSVWAILVPGDARMRMKTAVDWIAANLGWYYVLTMTLVIGFVLWVAFSKEGDVRLGPDHSRPQYRLSTWVAMLFAAGVGIDMLFFSVTGPVVQYLHPPSGEGGTAAAMQDAVVWTMFHYGVAGWSMYALLGMAMGYFAYRWGMPLSIRAALYPLLGKRVRGPLGDGISIIALVGTVFGVATSMGIGVVLLNVGFSLIFGLEQGLSLQIALVVGAVILTIGATTSGVDRGIRWISELNLWSAVAMMVYILLTGQTAFLLNALSENIGRFLVTFPARTLQTFAYEPGGPEWMGGWTLFFWAFWLAWGPFVGVFLARISRGRTLREFVIAAITAPVLCDFIIVSLFGNSALYHVLQGDTAFAALAVESPERGWYALLAMFPGAMFLIGLATLSGLLFYLTSANSGAMVMSNFSASIPDPSHDGPKWLRIFWAVLTAVLTVAMLLAGGVTTMEYATLIFALPVTIIAYTVMASFYKVLRMERAEREGQVLRRPSMAPMGGHLPERSWKQRLEQLHAFASLRQATQFLDRTVRPALGDVAAEFRNQGYEVASESLASERGIEEPLLRVSMDGFRAFQYHVAVVEAPVPMFSGRMSRETDVYYRLEVFTQTGSGGYDLMGLTRQQVIDDVLERFEAHLAFLTFSTNTDTASVLTPPAPARNP

SEQ ID NO: 25242 - protein, 688 aa, Bordetella parapertussis 12822
MPFTGNTPQEFEQRLRRIYTLYTLGFILLVLLLALAELMGMARSWIGYVFLLVTVSLYACIGIVCRTSDQVEYYVAGRRVPAFYNGMATAADWMSVASFIGVAGTLYLTGYGGLAYIMGWTGGYVLVALLLAPYLRKFGQYTIPDYLGARYGGKLPRLAGVFCAILCSFTYLVAQIYGVGIITTRLTGISFELGIFVALGGMLVCSFLGGMRAVTWTQVGQYIILVIAYLVPVVWLSVKHTGMPVPQLSAGTVLQEITEKEVYLAHDPGERAVRQLWRSRADEMDERLRALPDSLAHEKDRLRGRLAQLNASDAPMVEIRSLERELASYPVTVEEARTLWSQARAAFEARATPPVPHAEPFPAEDPRERENMRINFLALVLCLMLGTAGMPHILMRSYTTPSVGEARRSVCWSLLFILLLYFMAPALALLVKYEVYTQVVGTSFLSLPSWVHAWSAVDIHLLDVFDVNRDGIVQLGEISMGADVVVLAMPEIGGLPYVVSGLVAAGGLAAALSTADGLLLTLSNSLSHDTWYRVVSPRMSAGRRVMVSKILLLLVAFGAAWVAARKPADILFMVSAAFSFAASSFFPALVMGVFWRRANKWGATLGMFAGLAATFAYMAHTHPWLREWVFGVTRAEPVDLWWGIQPVAAGVFGAPMAFLTIIVVSLLTPRPDSATEALVDYLREPGGR

SEQ ID NO: 25243 - protein, 641 aa, Bordetella parapertussis 12822
MSKIIGIDLGTTNSCVAVLDGGQVKIIENAEGARTTPSIVAYMDDGETLVGAPAKRQAVTNPKNTLYAVKRLIGRKFDEKAVQKDIDLMPYSIVKADNGDAWVEVHGKKLAPPQVSAEVLRKMKKTAEDYLGEEVTEAVITVPAYFNDSQRQATKDAGRIAGLEVKRIINEPTAAALAFGLDKTEKGDRKIVVYDLGGGTFDVSIIEIADVDGEMQFEVLSTNGDTFLGGEDFDQRIIDYIISEFKKEQGVDLSKDVLALQRLKEAAEKAKIELSSSQQTEINLPYITADASGPKHLNLKITRAKLEALVEELIERTIEPCRVAIKDAGVKVSDIDDVILVGGMTRMPKVQDKVKEFFGREPRKDVNPDEAVAAGAAIQGSVLSGERKDVLLLDVTPLSLGIETLGGVMTKMIQKNTTIPTRYSQTFSTADDNQPAVTIKVFQGEREIAAGNKGLGEFNLEGIPPAPRGLPQIEVTFDIDANGILHVSAKDKGTGKENKITIKANSGLSEDEIQRMVKDAEANAEEDHRLAELAQARNQADALVHATRKSLTEYGEKLEAAEKESIEAAIKDLEDILKTGDKAEIDAKVEALSTASQKLGEKMYADMQAQQQAQQQQAADNAKPVDDNVVDADFKEVKRDQ

SEQ ID NO: 25244 - protein, 587 aa, Bordetella parapertussis 12822
MTHAPTPPAASNFLRPIIEDDLQANRFQGKLWAGKPGPAALQAQGQPDPARIRTRFPPEPNGYLHIGHAKSICVNFGLARDYGGVCHLRFDDTNPEKEEQEYVDAIIEAVHWLGFDWQADGNDNLYFASDYFEFMYEFAEALVQAGHAYVDEQSAEEIRASRGTLTEPGTDSPWRDRPADESLLRLREMRDGKHPDGSLVLRARIDMASPNINLRDPVMYRVRHATHHRTGNAWCIYPMYSWAHPVEDALEGITHSICTLEFEDQRPFYDWILARLAELGKLARPLPHQYEFARLNLTYVVTSKRKLLQLVREGYVDGWDDPRMPTLFGLRRRGYTPSSIRLFCDRTAVSKSDSRIDYSLLEQAVRDDLDPVAPRSVAVLDPLKLVITNHPEGRSETCSAPRNPHDPQAGVREFPFTRELWIEQDDFREEPPKKYFRLFPGNTVRLKYGYVVRCTGFTKDESGKVVEVQAEYLPDTKSGTPGADSVKVKGNITWVSAAHAVPAQVHLYDRLFADAHPDGGDKDFLACLNPNSKQTVQAWLEPGIEAVPGATWQFERLGYFTVDSKDSRPEAPVLNRIVTLRDSWQAA

SEQ ID NO: 25245 - protein, 304 aa, Bordetella parapertussis 12822
MTTEKHLGFVGIGRMGTPIAERLLEAGYTLTVYDTQAPALQALAAKGAHIADSPKAVADRAETVLVSLPTPDIVLAVALGEDGLARGNAVRTVIDLSTSGSQAARTLADGLAAQNIASIDCPVSGGVTGAKRGTLALMVSGPRERYDALHDMFGVIGKPVYVGERAGMAQTMKVINNLISVTALSITSELMVMGVKAGLDPDIMLQVINSGSGRTNASEDKIPRFVLTRSFDFGFAIGLSAKDVRLCLEESEQLGVPLRVGDAARRLLNDARDKFGNDADLTEIIRYVEDNAGVQVRGKAADAA

SEQ ID NO: 25246 - protein, 179 aa, Bordetella parapertussis 12822
MKLIILDRDGVVNQDSDAFVKSPDEWIALPGSLQAIARLTQADWTVVLATNQSGLARGLFDTATLNAIHDKMHRALAQMGGVVDAIFMCPHGPDDGCACRKPLPGMYRDIARRYDVDLAGVPAVGDSLRDLQAAAQAGCAPWLVQTGNGRKTLAQGGLPESTRVCEDLAAVAEQLLQEA

SEQ ID NO: 25247 - protein, 302 aa, Bordetella parapertussis 12822
MATIGSKTYDTTTPRNVAFLGLGVMGLPMAGHLARAGHQVTVYNRTAAKAQAWAAEFGGKAAAATPREAAAGAQIVFCCVGNDDDLRSVVLGADGAFAGMQAGAVFVDHTTASADVARELHAAARELNLQFIDAPVSGGQAGAVNGALTIMCGGDSATFEDIKPVAHAFGRAVTLVGPPGAGQLAKMVNQVCIAGVVQGLSEAIAFGQTAGLDMKLVLDVISKGAAQSWQMENRGATMVDDQFDFGFAVDWMRKDLGLVLAEARNNGARLPLTALVDQFYGDVQKMGGNRWDTSSLIKRLRD

SEQ ID NO: 25248 - protein, 397 aa, Bordetella parapertussis 12822
MSVHPDPVVIVAARRTPIGAFQGALAHYSAPQLGAHALAAAVRQAGLQPDAAQEALMGCCLFAGLGQAPARQAVLGAGLPTDVQATTLSKMCGSGMKAAMLAHDMLRAGSADVVLAGGMESMSNAPHLIPKARQGYRLGDGQLLDHMYRDGLQDAYEGRLMGHYADLAAREYGFSREQQDAYAHESVLRAQRSVAEGEFAEEIAPIAGLARRGAPAAMVAVDETPGLCDVSRLASLKPVFNADGTVTAGNASSISDGAAALVLTRQAHAERLGLAPQARIVGHATAALPPGQFPAAPVRAIARLFERVGWDRDSVDLFEINEAFAVVTMIALRELGLPAERVNVNGGACALGHPVGATGARLIVTLMHALRRRGLRRGVACLCLGGGEATAIAIERA

SEQ ID NO: 25249 - protein, 401 aa, Bordetella parapertussis 12822
MISLTPVQSLLACCLVLVAGRILTTRIGVLSRYSIPDPIVGGLLFAVLATALGTWGGIQISLETNIKPTLLLIFFGCIGLTADLKLLARGGPRLIAFLLALIPFLVLQNAVGLGLAWLLDMHPLMGLIGGTITLVGGHGTGAAYAARFADINNIQDVMALAMTAATIGLVLGGIIGGPVAEWLIRRHKLDPRMAGKDANQVLPEVETTAEAPTATSFITSLTAVFVTVVVGSYLAGLVEDAPISLPNFLWCLATGAIIRNFGGYVGIRLDDRVSEIIGSISLSLFLGLTMMTLDLSSVVRLAGPLALMLVAQALVCALYAGWAVFRMLKRDYEAAVMAAAFCGFAMGATATAIANMQALTRRHGPAPESFIVVPVTGAFLVDILNVIVLTSLIALPFVGGM

SEQ ID NO: 25250 - protein, 353 aa, Bordetella parapertussis 12822
MTASTARPRSRVAAPIRHAMQTQTGLPAALPPAGATFLAGFPVSMFASVLGLSGLGMAWRKAHQVWGLPLQVALAIQVAVAAVYGVLLALFLLRLLRHPDEIAREWNHPVQLAFFSAISLGVVLIGTAWADDAPRAAAALWWLGATVHLGFTLVIVRSWIFHTHYQLDHVNPSWFVPVVGNIVIPIAGVRFAPAECAWFFFSLGIVFWIVLKAIILYRLMFGAPLARALTPTLFIMIAPPAVAFLAYMALTGSLDGFARVLYYISLFWTLLLSTAAPRFARLPFSLAAWSYSFPLAAITLATFSFAEHSGHALAFHTLAGFLVAVLSTVLVLLTGATVRGLLNGALADARGGA

SEQ ID NO: 25251 - protein, 318 aa, Bordetella parapertussis 12822
MLNLCVRSITYEAEGIRSFELVHPLGKDLPPFEAGAHIDVSIPGGFTRQYSLCDPSWQRKHYRIAVLEDRGGRGGSVALHTALRAGEMIEVSEPRNLFPLDSGAGHKVLLAGGIGITPVLAMAEALQRSGHSFELHYCTRSPERTAFRERLQTLAAQDKAFFHHDMGDPARGLDIAALLARPEPGSQLYFCGPPGFMKAVQAASAHWPQGSVHYEYFGVNPALTEKLAGTGQVAGEVRLAKSDRILAVRPGQTLLQAIREAGVACESSCESGVCGTCKVRYFSGQPEHNDYVLSDEERTEFVLVCCAGAGPQALLLDL

SEQ ID NO: 25252 - protein, 406 aa, Bordetella parapertussis 12822
MLYRQPNMAQIVLFENIHPSARAVFSAAGYTDIVAHAAALPSGELREALRGAEVVGIRSRTHLDADLLAANPDLRVVGCFCIGTNQVDLDAAMMRGVPVFNAPFSNTRSVAELVLGEAILLLRRIPEKNARVHLGHWDKSAAGAYEARGKTLGIVGYGNIGSQISTLAEAIGMRVVFFDVEAKLPLGNARAAGSLAELLEQADVVTLHVPGGKSTQNIVNADTLARMKRGAILINASRGTVVDIQALHDALASGHLAGAALDVFPTEPKSADEPLASPLIGMPNVLLTPHIGGSTQESQENIGREVAEKLVRFLQAGTTKSAVNFPELSYQAPVGGSRIIHVHRNAPGALGALDNLMAQHGLNIVSQSLQTKGQIGYAVTDVDGEVSDTVLADLRSHPVTVRCEKL

SEQ ID NO: 25253 - protein, 406 aa, Bordetella parapertussis 12822
MRVIIAGCGIGGAALAVALEKFKIDHVVLEQAPRLEEVGAGVQLSPNGVAVLQHLGVHEALSKVAFEPRDLLYRDWQSGQVLMRNPLMPTIKEHFGAPYYHAHRADLLGVLTERLDPAKLRLGSRIVDIEQDARQVTATLADGTRIQGDILVGADSIHSLVRSRFFQADQPQASGCIAWRGIVDADAARHLDISPSAHLWLGPERSAVIYYVSGGRKINWICIGSRPGDRKESWSATTTVDEVLREYAGWNEQVTGLIRLTDKPFVTALYDRAPLDSWINGRIALLGDSAHAMLPYHAQGAVQSMEDAWVLARTLQQSGGDIPPALERYQSLRKDRTARVQAQSQLAEKRFHMSDPEQVARRNQKFLHYDAQYRGTFLPQQEWLFGYDADKAPLGTDDAWRALRAW

SEQ ID NO: 25254 - protein, 299 aa, Bordetella parapertussis 12822
MKISTVFFAALVGVAASAPAHAEGRLDKIKSSGTITIGHRDASIPFSYLDDKQKPIGYSMEICEKAVEAIKAKLGMAQIKVNLVPVTSSTRIPLVANGTVDLVCGSATNTVERQQQVAFAPTTFVTATRFAAKKSSNLKKLDDMKGKTVVSTAGTSNIRWLTQANEKDGLDMRIIPTKDHPAAMLTVANGRAAAFFMDDVLLAGLVATERKPDEWMISEDTYTVEPYALILPKDDPAFKKVVDDTVTGMMRDGSLAKLYKKWFESPIPPRNVNLHLPMSAALQRVIANPTDSADPATYR

SEQ ID NO: 25255 - protein, 322 aa, Bordetella parapertussis 12822
MHIAILDDYHGVAERYADWTTLGAQARVQVFRDALPSGAARAVALQPFDVIVAMRERTPFPAELIQALPALRLLVTTGMRNNAIDMQACAAGGILVCGAPGSAEAGAATAELAWAHILALFKRLPQEDAAMRRGLWQTGMPQPLAGRRLGVLGLGKLGSAVAQVGRAFGMEVVAWSPNLTDERAAQAGVTRVDKHTLFSTADVVSLHLILGESTRHIVDAAALSAMKPSAYLVNTSRAGLVDQDALLDALRKGRLAGAGLDVYESEPLPPTDVWRTLDNVLLTPHLGYVNAENFQAFYANALEAVRAWAAGAPVHVLGGARG

SEQ ID NO: 25256 - protein, 393 aa, Bordetella parapertussis 12822
MSDPIVIVSVARTPMGGMLGSLSGLAAHELGSAAIKAAIERAGIKPEQVDEVIMGNVLQAGQGQAPARQAALGAGLPLGVGCTTIHKVCGSGLKAAMFGHDLLTAGSVDVVVAGGQESMSNAPYLLLKGRQGYRYGHNTVYDHMALDGLEDAYDRGKAMGVFAEDCATKYSFTREQQDAFSLESLRRARAASEDGSFKWEITPVTVAGRKGDTVIDTDEAPTKAMPEKIPTLKPAFKKDGTVTAANSSSISDGAAAMVLMRASTAEKLGVKPLARIVAHAQHAQEPNWFTTAPVGALKNLFKKTGWQASDVDLYEINEAFAVVTMAAMKDFDLPHDKVNVHGGATALGHPIGASGARLMATLVGALRKTGGKRGVATLCIGGGEAVAMAIEML

SEQ ID NO: 25257 - protein, 169 aa, Bordetella parapertussis 12822
MHPMTEIIKPWHSVRRSRLHGNGVFATRKIPAGTRIIEYGGKRISAAEADRRHPTNPDDPFHTFFFSLSSGRVIDGGDEGNDARWINHSCDPNCEAQEDRHGKRVYIVALRDIARGEELFYDYGLVLDGRITRKLKEGYRCLCGTTPCRGTMLALPEKKKTKARSAEKA

SEQ ID NO: 25258 - protein, 397 aa, Bordetella parapertussis 12822
MLVHIPTIAMIRSKLPDVGTTIFTVMSRLAIEHKAINLGQGFPDFDPDPELCALVGKAMAAGHNQYPYMPGVAPLREAIAAKVKTLYGHAYDPETEITVTSGATEALMATVLAAVGPGDEVVVIEPCYDSYLPAIRLAGGTAVPVPLRAPTRDDPYYRIDWQRVRDAIGARTRLLMLNFPHNPTGAVLDESDLDALESIVRETGVLLLSDEVYEHIVFDGKPHASLSRRPLLAEHAFVIASFGKTYHTTGWKVGYCCAPRQLSAELRKVHQFMVFTVSSPMQFALAEYMANPKPYLDLPAFYQAKRDRLAAGLANTRFRPLPSPGTFFMLADYSEITKHAEADFARHLTIDHGVTVIPVSAFYQNPAAPESNHHLVRFCFAKQDATLDAAIERLAHV

SEQ ID NO: 25259 - protein, 68 aa, Bordetella parapertussis 12822
MAQKGKVKWFNADKGYGFITPDSGGTDVFAHFSAIQGRGYRSLNEGQEVEFEVKDGPKGPQAAEIRPL

SEQ ID NO: 25260 - protein, 631 aa, Bordetella bronchiseptica RB50
MIHLDGAAVDPAVLQGMTDAIAHRGPDGEGHWIDGNVGLGHRRLAIIDLSPAGHQPMISADSRYVLSYNGEIYNFRELRAELQGEGCQFRSQTDSEVLLHALIVWGVERTLSRLNGMFAFAWWDTRERKLLLARDRYGVKPLYFSMQGTTLAFGSEQKAILASAAFRRNLNKAALLEYFTFQNIFTDQTLLEDVHLLPAGHYAYLDCAKERPQLRLTQYWDFNFHEPAVPGTDTEYREELSRLFRQAVQRQLVSDVELGSYLSGGMDSGSITAVAAASHPYIKTFTCGFDLNSASGIELAFDERSKAEYMSYFFKTEHYEMVLKSGDMERVLPALAWHLEEPRVGQSYPNYYAAKLASKFVRVVLSGAGGDELFGGYPWRYYRAVVNNDFEHYVDKYYLFWQRLIPNSTLKQVFRPVWSDVSHVWTRNIFRDVFNSHADQLYSPEDYINHSLYFEAKTFMHGLLVVEDKLSMAHGLESRVPFLDNDLVDFATRCPVRLKLNNLADVIKLNENEPGHKTNKYFEKTRDGKQILRDVMRDYIPSDIAQAEKQGFSAPDASWFKGESMDFVKRTLFSKHARIYEIMDADTVRSLVAEHLSGERNRRLLIWSLLNVESWLAQYLDHGGVAGKGLA

SEQ ID NO: 25261 - protein, 628 aa, Bordetella bronchiseptica RB50
MCGVLGAWWRHHDEHEDARFAAGLRKLAHRGPDDRGSEHFAAPHGRLSLGHTRLAVIDLSAAGHQPMHADADRLAVVFNGEIYNYRELRSELRQIGAIFRGDSDTEVLLAAWQHWGVAALRRFKGMFAFALYDRRQQTLTLARDAFGIKPMYYHAAPERLLFGSELPAVQALLPHPPRLNWQRAYDYLAYGQYDQPPDTFIAGIRQLPAGHLLTLDLRTGRAGEPMAWDDPASQECRPIGFQEAAEELRARFLDNVRLHLRSDVPIGAALSGGIDSSAIVCAMRWLEPDLPIQTFSFISDDTHRSEERWVDLVNQHCGATGHKIHIAPHELLDDLDDLIRVQGEPVGSTSIYAQYRVFKLAREHGVVVTLDGQGADELLGGYGGYPTERLASLLETGRLGAAARLLRQQGRGAPARLLQAAALAAGGRHLANLRHATGRQHAPAWLDAQVLRDQGVTMREPAHAWAAATPLRGRRLVNELAHALYHRGLGALLRHGDRNSMRFSVESRVPFLTQDLAEFALSLPERYLVSDAGQTKHIFRKAMRGIVPDSILDRDDKIGFATPEQQWMQATAPQMRQWLVDAADIPFLRNAEVTAQFDAMIAGATPFSWQAWRWVNFQRWMQHATVLP

SEQ ID NO: 25262 - protein, 580 aa, Bordetella bronchiseptica RB50
MYVYDPVDQQLVEERVEQFSDQTRRFLDGQLTEDEFRTLRLQNGLYIQRHAPMLRIAIPYGMLAARQLRKLAHIARTWDRGYGHFSTRQNMQFNWPRLEDVPAILAELASVQMHSIQTSGNCIRNTTSDHFAGVAPDELVNPLVWCEIIRQWSTLHPEFAFLPRKFKIAVSGAVEDRAAVGVHDIGLQAVERDGQLGFRFWVGGGLGRTPMVGHLINPFVPWQHLLTYLQAALRVYNLHGRRDNKFKARIKILVKDLTPEVYAHEVEQEWQSLKDGPDTITEDQLNTIAGRFVWPDYDSAAASEPDPTDARAQADPRFARWLRTNVRAHKVAGYAAVTVSLKATGVPPGDITADQMDAVADLSERYGFGELRVSHEQNLVLADVRRARLHDLWQELQQLNLATPNIGLLTNIIACPGGDFCALANAVSIPVAESIQRRFDDLDYLFEIGELDLNISGCINSCGHHHVGHIGILGVDKAGEEWYQVTLGGRQNGAAKPLPDLESPRGGGAAIGRIIGPSFARTQIPDVIDRLIRTYLELRDSDAERFIDVVDRVGIDPFKRDVYADPAVAKPASQQEPAHA

SEQ ID NO: 25263 - protein, 1123 aa, Bordetella bronchiseptica RB50
MEQVTGYCTLCRSRCGSVNHVENGRLVAVTPLAGHPTGGALCAKGRAAPEMMAESHRLLRPLRRTNPRGAADPGWREIEWSEALDEVAARLAVARRRDGAESVAFAVTTPSGTPMVDSFEWVERFVRVFGSPNLIYAVEVCGWHKDYAHALTFGRGIGVPDLEHTDTMLLWGHNPARTWLAQAARIAAARQRGARVVVVDPNREGSSQQADLWLRVRPGADGALALGAIRHLLHTGRFDHGFVARWSNGPYLVDGASGALLRAADLWPDADPAARVVMLDGRPAASGRGADTARAELFGSWTLRLHDGRACEAVTVMHALRVAVERYTPDEVARLAWLDEAELAQFNAIFENAPRLSYHSWTGVGQHTNATQTDRAIATLYALTGACDRKGGNLWTVAPPYRAVNGYRELLSPVQRAKALGLDELPLGPPSLGWITARDFCRAVLQQDPYPVRTLVSFGTNLLVSQAETARNLEALQALDFHVHVDMSMNPTAMNADIVLPANMPWEREALKLGFEITQAAVEHVQLRPRMVEPAGESRADYEIVLELARRLGLRDAFFGADMDACWNHQLAPLGIDVQALRRQPEGIRFPQPFAHEKYKTLRDGQPVGFPTHDGRVQIHCAALHDIGQPALPSHVEPADTPARHAGAYPLVLSTAKSGWFVHSSHRYVASLRRKSPDPQVYLSTEAARDRGIASGDWVRVRTPYGEVALRAKINADLHANVAIAEFGWWQGCEGLGRADGAIVGPASSNINAIMTDRHRDPVSGSVPLRATVCDIVRDDARNRGSWSGAREFVLARKRGIAHDVAEFRLLACDAQALPDFLPGQHVIVSMPGGAVRRAYSLTGPNRAPAHLSIAVRRVRDGDGPAGLMSNALHALDEGARVLLSAPAGVFTPPLRTARPVILMASGIGITPFHGYLEALAQDAGPAPSVLLVHACRDGSSHPYGAELKRLAQRIGSVRTLTVYAEPASHDVPGRDYQQRGRLDFAWLSPETVAARPLVYLCGSPGFLALCTDALAARGIPRFDIFSETFTSEKRVPDTLAPQPIEIEAEQGGFTWDPAAGTLLDAAERAGLSLPSGCRVGQCESCAMHIVSGQVAHLIDFDGSADTCLTCQAVPITPLTLRR

SEQ ID NO: 25264 - protein, 401 aa, Bordetella bronchiseptica RB50
MRRAAIVSPLRTPVGAFGGALKAVPVEELGAAVARAIVQRTGLDPARIDDVVFAQSYASGETPCTGRWVALQAGFPIEVAGMQLDRRCGGGVQAVATAAMMVQTGAADVVMAGGVESMSNVEHYTTDMRWGKRAGSVTLHDRLDRGRERSQPESRFGRISGMIETAETLAREYGISREQADLFAARSHKRAAAAQAAGHFDAEIVPISVAQRKGEPLLVGQDEGVRGETSAESLGRLRTIMKEGVVTAGNACQQNDAAAACLIVAEDRLEELGLEPMGWLVGWAAAGCDPARMGIGPVPAVSKVLARTGLGFDQMDLIELNEAFACQALACVKGWGSSMDALEDRLNVNGSGISLGHPVGATGVRIMTTLLHEMQRRKARYGLETMCIGGGQGIAMIVERA

SEQ ID NO: 25265 - protein, 411 aa, Bordetella bronchiseptica RB50
MNTIYDSAAVAAGRRVAARMARVTTSKIYLAIAKVADMQAQGMQVASLTAGEPDFDTPAHVIEAAVQAMRGGDTHYTPVRGSLAMREAVRQKFQRENGLAFRDEEVMVGTGSKQVIANALAVTLETGDEVLLPVPYWAAYTGMVYAAGGVPTFVGTRAEDGYKLTPQALRAALGPRTRWVILNTPSNPSGLVYGSDELRALGEVLRERPDVLILTDEIYEHLNYTAEPPASLRKLCPDLAERIVVVNGVSKAYAMTGWRLGFAGGPADIIEAMANLQAQTTLAPCSISQAAAVAALNGPRESIDAMAAAYRRRRDLVMQIAGGQPGVRLQRPDGAFYAMLDLSEALAGGERFRGDPEPDQAFCEWLLETRHVAAVPGSVFGAPGSVRISFATDEQTIERGLTGLLDAAAHC

SEQ ID NO: 25266 - protein, 333 aa, Bordetella bronchiseptica RB50
MDTVPITLLFSDGAARRIDARCGASIVQAAGDAGLGLLTDCSNGQCGTCTATLVSGAIELGDYDRAVLPDGDRADGAILTCVSRITGPCVVELPYEVDEAQAQPLPPMAGTVVALEQIAQETMLLEVEVAEAVGFQPGQYVRIRPEGLDAWRSYSMACGSGERRLRFYVRLVEGGVFSTWLTQAARVGASVALSEPHGSFFLRSEARPRLFIAGGTGLAPFLSMLQAIAADPAQQEIPTTLLVGARSGAHLFALDQLAALRERWPALRVRLAAESEPRGECHTGYATDLLAGLGLDPATRVYLCGPPAMVEAGRGAAEAVGLARRDMLCERFN

SEQ ID NO: 25267 - protein, 869 aa, Bordetella bronchiseptica RB50
MSDIGRAELFGKLDSLSYRALEDATALCKLRGNPYVELAHWVHAIAHAQDSDLHHIARAFELDLGALQQDLVRALDQLPRGAGAVSDLSEHVDHVVERAWALASLRYGAARIRSGHLLLALLRDPSLRGVLAGMSGQFARVVPDLLLQGLPEMTRGSPEARADAAVADAPPDGGGAAGALARYAVDLTAQARAGRLDPVTGRDDEIRQLIDVLMRRRQNNPLLTGEAGVGKTAVVEGLALRLARGDVPAPLREVALYLLDIGLLQAGAGVKGEFEQRLRQVIDAVQGSERPIVLFIDEIHTLVGAGGAAGTGDAANLLKPALARGQLRTIGATTWAEYKQYIEKDPALTRRFQAIQVHEPDEAGARRMLRGLAGALQAHHGVLLLDEAVEAAVRLSHRYIPARQLPDKAVALLDTACARVAVSQQATPAALEDARRRIDALDLELEIAAREARLDAGPAERVAGLREQGQAARAEADALAARWEREAALAGQVFGLREQLDAADEQSAPALRAALREAADALARSQGEAPLIHPAVDAAAVAAVVADWTGIPVGRMVRDEAQAVLALADTLERRVVGQRHALELIARRIQTARAGLTDPGKPVGVFLLCGPSGVGKTETALALAEALYGGEQNLITINMSEFQESHTVSTLKGAPPGYVGYGEGGVLTEAVRRRPHSVVLLDEVEKAHADVHEIFFQVFDKGWMEDGEGRYIDFRNTVILLTANVGADLIASLCADPELAPEPDALAAALRAPLRDVFPAALLGRLAAVPYLPLSDSMLAHIVALQFERVGQRLRERHGMDLEVEPAAAELVVARCVEVESGARMVDAILSQRVLPQIGRELLGASLQQRTWRRVRVRAVDGEFACEYE

SEQ ID NO: 25268 - protein, 314 aa, Bordetella bronchiseptica RB50
MIAASFPHGVSLIGAPTDIGAGQRGASMGPEALRVAGLVRLLERRGLQVTDRGNLQGAPNPWRPPANGYRHLNEVIGWNQLVHDAVSAELRQERLPILLGGDHSLAIGSISAVARHCRASGRKLRVLWLDAHADFNTNRLTPTGNVHGMPVACLCGNGPAALTGMAGRTPAIEPGWVRQIGIRSVDEGERNLVYDAGLEVYDMRYLDEVGMRAVMEAALAGLDPQTHLHVSFDVDFLDPELAPGVGTTVPGGPTYREAQLCMEMIADTGLMRSLDIVELNPALDVRNKTAQVAVDLVESLFGKSTLMRRRPGSA

SEQ ID NO: 25269 - protein, 553 aa, Bordetella bronchiseptica RB50
MNPTLAARTGGRILVDALKVHGVDQAFCVPGESYLPVLDALRDDAQAIRLTVCRQEGGAAFMAEAYGKLTGKPGICFVTRGPGATNASIGVHTAFQDSTPMILFVGQVGADVAEREAFQEIDYRRMYGQMAKWVASIDDAQRIPEFVHRAHQVALSGRPGPVVLALPEDVLRATAHAADRVPHRIARACATSADMKRLHELLAAARRPLLIVGGGGWNEAASAAITRYAERAGLPVATAFRRQDRFDNRHPCYAGHIGLGIAPSLARHVRQADLLLVVGARLADATTDSYALITPEHPGQTLIHVHPDPQELGRVYPADLPIAADVQAFAAQLDACDNPPARCDAWLRELADDYRTDLAVAPSRRDTDLAQVMHWLNQHLPQNAIVTNGAGNYAGWVHRYFQYSPQRRQLAPTNGAMGYGVPAAIAAKLAAPARTVVCFAGDGCFMMNGQELATAIQHDAAVVFIVVNNGMFGTIRMHQEMHYPGRVSGTSLRNPDFVALASAYGAHAERVAHHDDFPAAFERACASGRAALIEIRTDPAAISARRDLPTLAA

SEQ ID NO: 25270 - protein, 762 aa, Bordetella bronchiseptica RB50
MKDTDRQAALDYHAYPHPGKISVTATKPLVTQRDLSLAYSPGVAAACEEIVEDPANVFRYTGRGNLVGVITNGTAVLGLGNIGALASKPVMEGKAVLFKKFAGLDVFDIEINETDPDKLVEIIAGLEATFGGINLEDIKAPECFTVERKLRERMKIPVFHDDQHGTAITVCAAVVNGLAVAGKRIEDVKLVTSGAGAAALACLDLLVDLGLPLEHIWVTDIEGVVYEGRKKLMDADKERFARKTKARTLAEVIEGADVFLGLSAGNVLKPEMVATMAANPLILALANPNPEILPEAAHAVRDDIIMATGRSDYPNQVNNVLCFPYIFRGALDVGATTITREMEKAAVLAIANLAREEQNEVVAAAYGTYDISFGRDYLIPKPFDPRLIVRIAPAVAKAAMEGGVATRPIADLDAYAEQLQQFVYHSGAFMKPLFSQAKQIVRDGGRARIVFTEGEDERVLRAVQVIVDEKVAKPILVGRPQVLLSRIEKFGLRLRLGQDVEVCNPEYDERFHQYWTTYWDMMCRNGITKEMARVEMRRRLTLIGAMMVHLGDADGMICGAVSGFHDHLRFIDQVIGRKPGATTYAAMNILLLDERTVALVDTHVNEDPSAEQIAEYTVAAAEEMQRLGLAPKVALLSRSNFGSGSSASGAKMRHALELVNRQAPGLEIDGEMHGDCALDESLRLRLLPDSPLKGSANLLVCPNVDSGNIAYNLLKTVAGKNVAVGPILLGANAPVHIVTSSATVRRIINMAALCVLDANRPQ

SEQ ID NO: 25271 - protein, 408 aa, Bordetella bronchiseptica RB50
MSSNEQTRRGFLADRVLGAKPSATKEMTRLANQLRQEGRDVIALSQGEPDFPTPEHVREAAKAAIDQGESRYTEVAGTLALREAVARKFERDNGLAYSPEQIQVGCGAKQILYNALQATINPGDEVVVPTPAWVSYPEMVLLAGGQPVIVRCGASSGFKLSPRQLEESITPRTKWLMLNSPSNPSGAVYSAEELAALAEVLARHPQVWVMADDIYEKIRYDDTPFATPAAIAPELAARTLTINGVSKAYAMTGWRVGFGAGPAALIKAMNLVQSQSTSHTSSISQAASIAALDGPMDFLPAFVAAFRRRRDSVVARLNAIEGLACDLPPGAFYAFPGCQALLGRRDPSGTLVSTDLDFALYLLREAGVAIVPGSAFGLSGHFRVSYAASDEQLAQAMARIAAACARLS

SEQ ID NO: 25272 - protein, 333 aa, Bordetella bronchiseptica RB50
MSQPTTYTVAFMDVLAPAVQRVILSVFRPPFEVRFAANYDDRHQLALCREADFLVPGWARLTAGMLEAATRVRAVHKWGIGVDRIDVDAARRLGIPLAITAGSNAGPVAELAVALILGVYRRLCYVNREMRAGQWPKAEMRESCFQIHRKTIGLVGFGNIGRKLARRLSGFEPDAILYCDQQAAPAEVERALGARRVELPELLAASDIVSLHLPCTASTRRLIDAAALQHMKKGAVLINTARGELVDEAALAEALQRGHLLGAGLDAFDPEPPDPANPLLALDQVVVTPHAGGGVFDNVAPVAAHVLGNLERFVAGQPLPAQDLIVSEDRRKP

SEQ ID NO: 25273 - protein, 552 aa, Bordetella bronchiseptica RB50
MKYTVGALLADCLAANGVDTVFGIVSVHNMAIMDAIAARPALRMVMTRGETGAAHMADGHARARQGLGVVITSTGPGATNAVPGLAEAQFAGSPVLHITGQTATPYLGSRRGTVHDMPSQHDMLRSVGKAVLRVTDADSALAVIQEAIRVCLQAPAGPVSLEIPVDLQGREVAMPDPASLKVSPAAAPPPEPTAIAELVRRIKAARRPMLWVGAGAKGAASQLAALVDLGFGVVSSWSGRGVVDDHHPRNLGALNGAGSPAVLDLYRSADLMLVVGSRLRGQETDNQAVPLPTPLLRVDIDAARDNLGYANELFVQGDCAEVLDRLLAGLADGLDIDPAFDADVRAARQAAIDDYLGRLGPYRDFPAMLRRVLPDDALWVRDITKSNSTWGHRLFPLRKAHQNIYPVSAGIGQGLQLGIGAALASPGRKTAVLTGDGGFYFNMTELWTAAQERLDMLVIVMNDQGYGAIRGIQDVVCDGRHRYDALGGPAFADIAQLAGAKFWKVEAARDFERIAAEAYASPGLCVVEVDMVAIGALPMYYPYIKAGTPRQD

SEQ ID NO: 25274 - protein, 795 aa, Bordetella bronchiseptica RB50
MRSRPARAGAGSIFPACAAASFTFAAPTYVIAIMDANFRKAALEYHEHGRPGKISVTPTKQLSNQRDLALAYSPGVAAACEEIVDDPVNVFRYTGRGNLVGVITNGTAVLGLGNIGALASKPVMEGKAVLFKKFAGLDVFDIEINETDPDKLVEIIAGLEATFGGINLEDIKAPECFTVERKLRERMKIPVFHDDQHGTAITVCAAFINGLEVVGKDIAQVKVVTSGAGAAALACLDLMVDLGLPLEHIWVTDIEGAVYQGRTALMDPDKARYAQPTEARTLAEVIEGADVFLGLSAGNVLKPEMVAAMAANPLILALANPNPEILPEAAHAVRDDIVMATGRSDYPNQVNNVLCFPYIFRGALDVGATTITREMEKAAVLAIASLAREEQNEVVAAAYGTYDISFGRDYLIPKPFDPRLIVRIAPAVAKAAMESGVATRPLADLDAYAEQLQQFVYHSGAFMKPLFSQAKQIVRDGGRARIVFTEGEDERVLRAIQVIVDEGLARPILVGRPAVLSARIEKFGLRLRLGQDVEVCNPDYDERFHQYWTTYWELMCRRGITKEMARVEMRRRLTLIGAMMVRLGDADGLICGTVGAYADHLRFIDEVIGRKPGAQTYAAMNILLLNERTVALVDTHVNDDPSAEQIAEYTVAAAEEMRRLNLAPKVALLSRSNFGTGSSASGAKMRRALELVRERAPELEIDGEMHGDCALDEALRLRILPSSTLKGEANLLVCPNVDSGNIAYNLLKTTAGGNVAVGPFLLGANAAVHILTSSSTVRRIVNMAAMAVVNADAVR

SEQ ID NO: 25275 - protein, 628 aa, Bordetella bronchiseptica RB50
MNNSFSKVAVWMVIALVLFTVFKQFDGRAQTQDGVSYTQFMDDAKAGRIRKVDVQGDVLYVTPDAGRPYSLTSPGDLWMVSDLLKYGVQVSGKAREEPSLLMSIFVSWFPMLLLIGVWIFFMRQMQGGGRGGAFSFGKSRARMLDENTNQVTFADVAGCDEAKEDVQELVDFLRDPSKFQKLGGRIPRGVLMVGSPGTGKTLLAKAIAGEAKVPFFSISGSDFVEMFVGVGAARVRDMFENAKKHAPCIIFIDEIDAVGRQRGAGLGGGNDEREQTLNQMLVEMDGFESGQGVIVIAATNRPDVLDPALLRPGRFDRQVVVPLPDIRGREQILKVHMRKVPLSPNVDATILARGTPGFSGADLANLVNEAALFAARRNGRTVDMSDFEKAKDKIIMGAERRSIVMPEEERKNTAYHESGHAIVARMLPKTDPVHKVTIIPRGRALGVTMQLPETDRYSMDKERLLNTIAVLFGGRIAEEIFMNQMTTGASNDFERATAIARDIVTRYGMTDELGPMVYAENEGEVFLGRSVTKTTHVSEATMQKVDSEIRRIIDEQYGVARKILEDNRARVEVMTSALLEWETIDADQIDDIVNDRPPRPPKTPQGPSDTSDTPPTGLAAGGNTAAAV

SEQ ID NO: 25276 - protein, 299 aa, Bordetella bronchiseptica RB50
MMEAYLIAIFITVLIYMLLAGGLALQYGFTGLINFGHVGFYAIGAYTSALLSLQGVPLVACILAATLVSGLSAYPLGVIALRLRGDYLAIVTLGFSESVRMILQKEEWLTRGVHGIPGIPRLFGQYASGAMVDVLILATLLLTNILVFLGIRKIIGSPFGRTIKAIRDNEVAVMALGKNPAWFKTRSLMIGAALAGLAGAFTAHYLTFIAPEQFVPLITFYVWIAIIVGGVGSLKGVVAGTVILMVFLEGSRFVREFLFFDISEVQMASLRFFIIGVGLILCILYRPNGIFGSASAEGK

SEQ ID NO: 25277 - protein, 330 aa, Bordetella bronchiseptica RB50
MRTSTMKCLIVQPIHEEGLALLREAGVECIAPASAAMADVAAAIADCDAAITRNAGLDTRAIEAGRRLRVIGNHGTGTNMIDLAAAERLGIPVVNTPGANARSVAELALAMAMALLKRTVPLDQAVRQGNWNIRYEAGLRELSGMSLGIVGFGQIGRALAAMAIGGFGMRVHVYSPSVAPQDIAAAGCQRADSLPALAREADIVSLHRPARPGAGPLVDDALLLAMKPGALLINTARADLVDEAALARHLEAGRLGGAGLDVFSSEPPPADHPLLRLPQVVLAPHAGGSTDQALARTARAVAEQVIEVLRDARPAHLIAPHAWPRRRGAR

SEQ ID NO: 25278 - protein, 399 aa, Bordetella bronchiseptica RB50
MSKQIQDAYIVAATRLPVGKRNGAYATTRPDDMLAAVLRAVLAQVPALLPERIDDVITGCAMPEAEQGMNVSRIGLLLAGLPQSVAGVTVNRFCASGLQAVADAANRIRLGMADVMIGAGTESMSAMPQIMGNKVAMNPAVFAHEENLGMAFGMGLTGEKVAEQWKVSREDQDAFSLSSHQKACAAIAAGHFKAEITPYQVRTHLAGGRDGAVRVAERWIEQDEGPRPDSTAEALARLRPVFAARGSVTAGNSSQMSDGAAAVVLVSERVLREYGLQPLARFVDFAVAGVPPEIMGIGPRMAIPKVLARSGIAQQDLDWIELNEAFAAQSLAVMRDLELDPAKVNPLGGAIALGHPLGATGAIRTATIVHGLRRTGGKYGMVTMCIGTGMGAAGIFEAL

SEQ ID NO: 25279 - protein, 317 aa, Bordetella bronchiseptica RB50
MTTKHRIIQVGSLAGSPTANRRLADEYDVLELWQQADRAAALARHGKGVTALVTSANFGADAALIDALPDLKAICSWGVGYETIDVDAARKRGVLVSNTPDVLTDCVADLAWGLLISGARRMAQGDRFVRAGQWGQVHGSIPLGTRVSGKNLGIIGLGRIGEAIARRGDGFDMQVRYHNRRRRDDVSYGYESSLADLARWADFLVVATVGGPSTRHLVNQEVLEALGPKGLIINIARGPVIDEAALVAALQAGKLGGAALDVFEHEPSVPDALKASDETVLLPHIGSATFETRMAMENLMLDNLASFFKTGGVITPV

SEQ ID NO: 25280 - protein, 401 aa, Bordetella bronchiseptica RB50
MTVQAFICDAIRTPFGRYGGALSSVRADDLAAVPIKALMARNPGVRWEELDDVLYGCANQAGEDNRNVARMAALLAGLPIEVPGATINRLCGSGLDAVGSAARAIAAGQASLMLAGGVESMSRAPFVMGKADSAFSRNAAIYDTTIGWRFVNKLMKAQYGVDSMPETAENVADDFKISRADQDKFALASQQKALRAQQSGFFDAEITPVSIAQKKGDPVVVSKDEHPRDTSLEALAKLKGVVREGGSVTAGNASGVNDGAAALLLADEKAAASHGLTPRARVVGMATAGVAPRIMGMGPAPATRKVLAQTGLSLAQMDVIELNEAFAAQGLAVMRDLGIADDDARVNINGGAIALGHPLGASGARLVTTAINQLQRGGGRYALCTMCIGVGQGIALIIERV

SEQ ID NO: 25281 - protein, 575 aa, Bordetella bronchiseptica RB50
MASSPADTPHRNWLRWLPGLAVLKTYQAAWLPRDLAAGLVLTAMLVPVGIAYAEASGVPGVYGLYATIVPLLAYALFGPSRILVLGPDSALAAPILAVVLSVSEGDPMRAVATASLMAIVSGLFCIILGLLRLGFITELLSKPIRYGYMNGIALVVLASQLPKLFAIPTDDGGPLRELWQLAQAVLDGRTNGYSLAVGSATLGLILLLKRFKRLPGILIAVVLATLAVSLFGLDGRGVQVLGEIPQGLPGFTIPWLSNADLARIVLGGCAVALISFADTSVLSRTYAARTHTRVDPNQEMVGLGVANLATGFFQGFPVSSSASRTPVAEAAGSRTQLAGVVGALAVAALLLAAPNLLRHLPSSAMAAVVIAAAIGLFEFKDLRRIFRIQQWEFWLSMLCFAAVVAFGAIPGICLAVVVAVLEFLWDGWRPHFAVLGRVPDLRGYHDLKRYPHAALIDGLVLFRWDAPLFFANAELFQQRLLEAVQASPTPVRRVVVTAEPVTSVDVTSADMLRELSHHLAESGIALHFAEMKDPVRDKLKRFELSEVFGADRFHPTVESAVDDYLKRPPQGTIDP

SEQ ID NO: 25282 - protein, 273 aa, Bordetella bronchiseptica RB50
MILGGAPGHEYDLHYIPAPLRRRHHSQAMSQAANPTALPAWDPPAILAQLRANTCFGHMAEPTLAAFAAIAQWRRLDHGELLAGRGTPAPGVVIILKGAIHTSSFSDDGHEFALSMLEFDGLWGVAAVLDGGGMLRDSRAYQQTDILLLPRAAFLDILDGDPGLYRYFVKLLCSRIRTAHAIIDELALRSLPQRLPRLLGALTAGRPGDDERGIAVAQTQDALATLLGVSRHAVNRELRQLANQGLVGLGYGEIWVRDLERLKRLWHERGAQP

SEQ ID NO: 25283 - protein, 247 aa, Bordetella bronchiseptica RB50
MTTRRQLLTAALTLSLAWGAGAAHAQETIRAVTDATFPPMEFVKDGKRTGFDIELVEALAQAMGKKIEWIDIDFKGLIPALQAGRADIAVSAIYITAERQKVVDFTDPYYAGGLVVLTKKDGPVKSLKDLEGRKVSVQVGTKSVNYLKEHFPKVQRVEVEKNQEMFNLVQIGRADAAVTGKPAAKLFAQSTQDLAVLSEQITTEEYGIAVPKSKSGLTRELNEALKKLKADGTYERIVNKWFEAQAK

SEQ ID NO: 25284 - protein, 394 aa, Bordetella bronchiseptica RB50
MSDDIVIVSTARTPIGKAYRGAFNNTHGATLGGHAVEHAVRRAGIEPAEVDDLIMGCGRPEGTAGENIARQAALRAGLPVEVPGVTVNRLCSSGLQAIAMGAQSILCGSADIVVAGGLDSISCVQNEHMNHHMEQDPWLARHLPEIFLPMIDTAEVVARRYGISRQRQDEYAARSQQRAAQARAAGRMRDEIAPMRVSHLAADPHGAPPVETEMLVAEDEGVRPGTTSEKLAALKSVREGGCITAGNASQLSDGASACVLMRAAAARARGLRPLGRFRGFAVAGCRPDEMGIGPVQAVPRLLARAGLAIGDIGLWELNEAFAVQVIYCRDRLGLPDERLNVNGGAIALGHPYGMSGARLVGHALLEGRARGVRYVVVTMCVGGGMGAAGLFEVL

SEQ ID NO: 25285 - protein, 318 aa, Bordetella bronchiseptica RB50
MRISSKHWTLIVLAALIAIAPLFFPSGYYFRVGSTIFVNALAVTGIVILTGYAGQISLGHAGFAGIGGYACALAPVHLGLPSALSVVLGAAVSGALAWLVGRPILRLKGYYLGVASLGFGILVAMVLNNERQLTKGPDGIAVPDPGLRSLLKGWGLDLSNGQFWYAMTGIALVIGAWLALNLYHSPTGRALRALHGSEIAAGTVGIDVAGAKLKAFVVSAVYASVSGSLLALQNRFITPDIAGFMHSIEMVTMAVLGGVGSVAGAIFGASLLTLLPQVLTVFADYEPLILGLTMMLVMIFLPEGLVPSIMRTIRGRKK

SEQ ID NO: 25286 - protein, 196 aa, Bordetella bronchiseptica RB50
MNAPLSLAAQEQIFQAARTFNRYTEQSISDATLHELYELMKWGPTAMNSQPGRFIFLRSAAARQRLAPALSPGNLEKTLAAPVTVIVAQDTQFYEHLPTQFSAYDARPVFENNADAARATAMRNSSLQGAYLIVAARMLGLDAGPMSGFDAAKVDAEFFPDGRCKANFLVNLGYGDPAGNYPRGPRLAFDTAAQIL

SEQ ID NO: 25287 - protein, 865 aa, Bordetella bronchiseptica RB50
MRFDKLTTKFQQALADAQSLAARNDHPYIEPVHVLAALLGDPDSGAASLLARAGVAVNRVQPAIDSALKGLPQVQGEDNVQVGRELQSVLVRTDKEAARRGDTYIASELFLLALADDKGDAGRILREAGLQKKALEAAIDAVRGGENVSGAEGESNREALSKYTLDLTERARQGKLDPVIGRDDEIRRTIQILQRRTKNNPVLIGEPGVGKTAIVEGLAQRIVNDEVPETLRGKRVLSLDLAALLAGAKFRGEFEERLKAVLKELAQDDGQNIVFIDELHTMVGAGKAEGAMDAGNMLKPALARGELHCIGATTLDEYRKYIEKDAALERRFQKVLVGEPDVESTIAILRGLQERYELHHGVEITDPAIVAAAELSHRYITDRFLPDKAIDLIDEAGARIRMEIDSKPEVMDRLDRRIIQLKIEREAVKKETDDASMRRLAVIEEELEKLQREYNDYEEIWKAEKAAVQGTQAIKEEIDRVRAEMAELQRKGQFDKLAELQYGKLPELEARLKAADSAEREAGESDSGKPRLLRTQVGAEEIAEVVSRATGIPVAKMMQGERDKLLRMEDFLHKRVVGQDEAVRLVSDAIRRSRAGLADPSRPYGSFLFLGPTGVGKTELTRALADFLFDSEEHMIRIDMSEFMEKHSVARLIGAPPGYVGYEEGGYLTEAVRRKPYSVILLDEVEKAHPDVFNVLLQVLDDGRLTDGQGRTVDFRNTVIVMTSNLGSQHIQSMAGKPYEVIKEVVWDELKHTFRPEFLNRIDEVVVFHGLEAQHIESIARIQLKRLGERLEKQEMRLDVSDAALAEIARSGFDPVFGARPLKRAIQQQIENPVAKLILEGVFGPRDVVPVDWQDGKFVFTRTLQ

SEQ ID NO: 25288 - protein, 631 aa, Bordetella bronchiseptica RB50
MRVRGHGFTLAPFDATAGASGRGAGYKVNKMGKTVRGGAAAILGGWVNDITPGTLRADAQAGLLGALLVLPQGVAFAMLAGLPPEYGLYSAIVPCIVAALFGSSRHVLSGPTNANSLALFAVLAPLALPGSPGYIQMALAVTILVGVMQLAVGLLRLGSLANFISPSALFGFTSGAALLIAVHALKDALGLEGVQAHSAGAVLAAVGSRLGEAHWGASAVALTTIIVTLLVRHWDRRKPHMLAGLAAGTLLAAALNAGVFAAAGQPISVLGALAQPWPPFHVPAVQWSVLPDLVGVAVPLTIVALAQSISIAKAVAMRSGQLIDANREFIGQGLSNVVGGLFSSYLSCGSLNRSVPNYEAGARTPMAAVFAALLLVLLVLVSSPVLALIPHAAIAGLLIVVAWSLLDLPRWRVLVRIAPREALIAAATLAATVTIRMEIAILLGTLLSLTAYLYRTARPAMRPMGFDAADPQRHFAVLEGQPGELPECPQLKLLRMEGSVYFGAATHVTDRLQALRAGASAGQRHLLVMSKSMNFIDHAGAQVWEEELRRRRAGGGDLYFHRPRPEVLRDWRRSGFIDRLGADHIFPDKATAIHTIYERLDPEICRGCTARIFTECGPPGTAHQPGAERDE

SEQ ID NO: 25289 - protein, 241 aa, Bordetella bronchiseptica RB50
MSDSAPSRPRRTPVRPLFDPMAQPWETANQGLARVDERLLTPPELRSSLRPADHWRLDPLCAAEPRAPGREGSLVAAAVLIPLVMRADGVRVMLTQRAAHLHDHAGQVSFPGGRIEVSDATPVAAALREAQEETGLPVQQVEVLGSMPQYFTATGFAITPVVSLVQPDFELAPDAFEVAEVFEVPLSFLMDPANHRLYRAALPDGYVRQYYAMPWQRYFIWGATAGMLRNLYQTVREALPG

SEQ ID NO: 25290 - protein, 399 aa, Bordetella bronchiseptica RB50
MRFADRMARIAPSPSSMAGQRMRELRAAGRDVIGLTAGEPDFATPDNIQQAALRAMRNGQTKYTDVGGVPELKAAVAEKFRRENSLAYRQDQIIVSSGAKQVIFNALLCLVQRGDEVVIPAPYWVSYPDMVRFAGGTPVAVACAQQHRFKLQPDELERAVTPRTRCLILNSPNNPSGAAYDETELKALAQVLLRHPDICVITDDIYEHLLYDGRRFATIAAVEPALADRVLTVNGVSKSYAMTGWRIGYAGGPAALIANMVKLQSQSTSCPSAVSQAAAIEALTGPQDIIASSRKLFQARRDLLVRRINAIPGLHCDTPDGAFYVFASCAGLAGKRTPQGRTIDNDTDLALHLLDAEGVVVIQGDAYGMPGFFRLSIAASETLIEEAQRRIAAACAALH

SEQ ID NO: 25291 - protein, 762 aa, Bordetella bronchiseptica RB50
MKKPQNLAGAGRREVPAEWRDAIHSHLDAGETVLAWLETDLDARLRFETGMVLATDRRILACAPGRREWSSWPYSPDLRLALHDHAGAASLELDAGARRLASWRFTLGRNPAAQRLLEQFESLQALRLAGAAPTAGESPRPCPTCQAPIPADREDCPECSQEPAAPPATWALLRLWRFARPYRGALLAGFLLTLLGTAATLVPPYLTMPLMDDVLIPFQNGAPIDYAKVRLYLAGLLASAVLAWGLGWARTYILAWVSERIGADLRTTTYEHLQQLSLEYFGGKRTGDLMARIGSETDRICVFLSLHLLDFATDVLMIAMTAAILVSINPWLALATLVPLPFIMWMIHVVRDRLRHGFEKVDRIWSEITNVLADTIPGIRVVKAFAQERREVQRFREANNRNLEVNDRVNTVWSLFSPTVTLLTEIGLLIVWIFGIWQVSQKHITVGVLAAFLAYIGRFYTRLDSMSRIVSVTQKAAAGAKRIFDILDHVSSVPEPHKPVHLPRVNGHIELRDVGFRYGNRSVIRGLDLSIAPGEMIGLVGHSGSGKSTLINLICRFYDVSEGAVLVDGVDIRSLRIADYRRNIGLVLQEPFLFFGTIADNISYGKPDATRAEIIAAARAAHAHEFILRLPHGYDSLVGERGQALSGGERQRISIARALLIDPRILIMDEATSSVDTTTEKEIQKALDNLVRGRTTIAIAHRLSTLRRADRLVVLDRGQIVEEGAHEALMAREGAYYRLYQAQQTRQAEGGDDGSDAIAAIA

SEQ ID NO: 25292 - protein, 768 aa, Bordetella bronchiseptica RB50
MRRKGCAPMDENLTKLALDYHAYPTPGKISVTPTKTLANQDDLSLAYSPGVAAACMAIFDQGNDAASKYTSRSNLVGVITNGTAVLGLGNIGPLAAKPVMEGKGCLFKKFAGIDVFDIELAENDPDKLVDIIAALEPTLGGVNLEDIKAPECFYIEKKLRERMNIPVFHDDQHGTAIISSAAILNGLKVVGKDIGQVKLACSGAGAAAIACLDLLVHLGIKREHIYVVDSRGVIWEGRDENMEPNKRRYAQKTEARTLADVVNGADVFLGCSTAGVLTPEMVKTMAAQPLILALANPEPEIRPELAKAARPDCIVATGRSDYPNQVNNVLCFPFIFRGALDAGATRITEEMKLACVKAIAELAQAEQNDEVARAYAGQELSFGPDYIIPKPFDPRLIVQIAPAVAQAAADSGVATRPIEDIEAYRQKLMGFVYHSGQLMRPLFQQAKQAPKRVVYADGEDERVLRAVQTVIDEKLAEPILVGRPSVIEMRIKKFGLRMVPGQNVEIVDPEDDSRFNDTWNGYYQLRGREGVTPAIAKAMIRKHNTLIGAMLLRRGDADALLCGVASKYDNQLKYVEEVIGRKPGQTYGALNVLMLPNQTLFVTDTHVNENPSADEIANITIQAAEEMLRFGVMPKIALLSHSNFGSRPTDSSRKMAHARKLVAERAPHLEVDGEMHADAALSESIRLQAYPDSTLKGRANLLVMPNLDTGNITYNMLKMTGSNGIAMGPILLGSARPVHILTTSATVRRIVNMTALAVVDAQQEAAEG

SEQ ID NO: 25293 - protein, 688 aa, Bordetella bronchiseptica RB50
MPFTGNTPQEFEQRLRRIYTLYTLGFILLVLLLALAELMGMARSWIGYVFLLVTVSLYACIGIVCRTSDQVEYYVAGRRVPAFYNGMATAADWMSVASFIGVAGTLYLTGYGGLAYIMGWTGGYVLVALLLAPYLRKFGQYTIPDYLGARYGGKLPRLAGVFCAILCSFTYLVAQIYGVGIITTRLTGISFELGIFVALGGMLVCSFLGGMRAVTWTQVGQYIILVIAYLVPVVWLSVKHTGMPVPQLSAGTVLQEITEKEVYLAHDPGERAVRQLWRSRADEMDERLRALPDSLAHEKDRLRGRLAQLNASDAPMVEIRSLERELASYPATVEEARTLWSQARAAFEARATPPVPHAEPFPAEDPREREHMRINFLALVLCLMLGTAGMPHILMRSYTTPSVGEARRSVCWSLLFILLLYFMAPALALLVKYEVYTQVVGTSFLSLPSWVHAWSAVDIHLLDVLDVNRDGIVQLGEISMGADVVVLAMPEIGGLPYVVSGLVAAGGLAAALSTADGLLLTLSNSLSHDTWYRVVSPRMSAGRRVMVSKILLLLVAFGAAWVAARKPADILFMVSAAFSFAASSFFPALVMGVFWRRANKWGATLGMFAGLAATFAYMAHTHPWLREWVFGVTRAEPVDLWWGIQPVAAGVFGAPMAFLTIIVVSLLTPRPDSATEALVDYLREPGGR

SEQ ID NO: 25294 - protein, 641 aa, Bordetella bronchiseptica RB50
MSKIIGIDLGTTNSCVAVLDGGQVKIIENAEGARTTPSIVAYMDDGETLVGAPAKRQAVTNPKNTLYAVKRLIGRKFDEKAVQKDIDLMPYSIVKADNGDAWVEVRGKKLAPPQVSAEVLRKMKKTAEDYLGEEVTEAVITVPAYFNDSQRQATKDAGRIAGLEVKRIINEPTAAALAFGLDKTEKGDRKIVVYDLGGGTFDVSIIEIADVDGEMQFEVLSTNGDTFLGGEDFDQRIIDYIISEFKKEQGVDLSKDVLALQRLKEAAEKAKIELSSSQQTEINLPYITADASGPKHLNLKITRAKLEALVEELIERTIEPCRVAIKDAGVKVSDIDDVILVGGMTRMPKVQDKVKEFFGREPRKDVNPDEAVAAGAAIQGSVLSGERKDVLLLDVTPLSLGIETLGGVMTKMIQKNTTIPTRYSQTFSTADDNQPAVTIKVFQGEREIAAGNKGLGEFNLEGIPPAPRGLPQIEVTFDIDANGILHVSAKDKGTGKENKITIKANSGLSEDEIQRMVKDAEANAEEDHRLAELAQARNQADALVHATRKSLTEYGEKLEAAEKESIEAAIKDLEDILKTGDKAEIDAKVEALSTASQKLGEKMYADMQAQQQAQQQQAADNAKPVDDNVVDADFKEVKRDQ

SEQ ID NO: 25295 - protein, 587 aa, Bordetella bronchiseptica RB50
MTHAPTPPAASNFLRPIIEDDLQANRFQGKLWAGKPGPAALQAQGQPDPARIRTRFPPEPNGYLHIGHAKSICVNFGLARDYGGVCHLRFDDTNPEKEEQEYVDAIIEAVHWLGFDWQADGNDNLYFASDYFEFMYEFAEALVQAGHAYVDEQSAEEIRASRGTLTEPGTDSPWRDRPADESLLRLREMRDGKHPDGSLVLRARIDMASPNINLRDPVMYRVRHATHHRTGNAWCIYPMYSWAHPVEDALEGITHSICTLEFEDQRPFYDWILARLAELGKLARPLPHQYEFARLNLTYVVTSKRKLLQLVREGYVDGWDDPRMPTLFGLRRRGYTPSSIRLFCDRTAVSKSDSRIDYSLLEQAVRDDLDPVAPRSVAVLDPLKLVITNYPEGRSETCSAPRNPHDPQAGVREFPFTRELWIEQDDFREEPPKKYFRLFPGNTVRLKYGYVVRCTGFTKDQSGKVVEVQAEYLPDTKSGTPGADSVKVKGNITWVSAAHAVPAQVHLYDRLFADAHPDGGDKDFLACLNPHSKQTVQAWLEPGIEAVPGATWQFERLGYFTVDSKDSRPEAPVLNRIVTLRDSWQAA

SEQ ID NO: 25296 - protein, 316 aa, Bordetella bronchiseptica RB50
MQKHKIAFLGLGAMGLPMACNLVKGGHAVTGYDLNPQALDALAQAGGQRAASAREAAAGAALVIAMLPTATHIQAALEGADGALQGMDPGALFINMSTILPQETDLIAQRLAERGMRMLDSPVGRSAMEAQRGTLLILASGSAQDKARARDALLCMGNQVIDCGEVGGGSRVKVVNNFMGISLNALTAEALTLAEASGLSVELALEVMRGTIAGLGHMNITYPNKVLRGDLSAGFQVDLAHKDLGLALELAARSRACVPMGSAAFQSYTAARAQGRGGQDYSAIYPVMRSLSGLPEALPYQVDTPVEADPFGAAAR

SEQ ID NO: 25297 - protein, 301 aa, Bordetella bronchiseptica RB50
MATIGSKTYDTTTPRNVAFLGLGVMGLPMAGHLARAGHQVTVYNRTAAKAQAWAAEFGGKAAATPREAAAGAQIVFCCVGNDDDLRSVVLGADGAFAGMQAGAVFVDHTTASADVARELYAAARELNLQFIDAPVSGGQAGAVNGALTIMCGGDSATFEDIKPVAHAFGRAVTLVGPPGAGQLAKMVNQVCIAGVVQGLSEAIAFGQTAGLDMKLVLDVISKGAAQSWQMENRGATMVDDQFDFGFAVDWMRKDLGLVLAEARNNGARLPLTALVDQFYGDVQKMGGNRWDTSSLIKRLRD

SEQ ID NO: 25298 - protein, 397 aa, Bordetella bronchiseptica RB50
MSVHPDPVVIVAARRTPIGAFQGALAHYSAPQLGAHALAAAVRQAGLQPDAAQEALMGCCLFAGLGQAPARQAVLGAGLPTDVQATTLSKMCGSGMKAAMLAHDMLRAGSADVVLAGGMESMSNAPHLIPKARQGYRLGDGQLLDHMYRDGLQDAYEGRLMGHYADLAAREYGFSREQQDAYAHESVLRAQRSVAEGEFAEEIAPIAGLARRGAPAAMVAVDETPGLCDVSRLASLKPVFNADGTVTAGNASSISDGAAALVLTRQAHAERLGLAPQAHIVGHATAALPPGQFPAAPVRAIARLFERVGWDRDSVDLFEINEAFAVVTMIALRELGLPAERVNVNGGACALGHPVGATGARLIVTLMHALRRRGLRRGVACLCLGGGEATAIAIERA

SEQ ID NO: 25299 - protein, 401 aa, Bordetella bronchiseptica RB50
MISLTPVQSLLACCLVLVAGRILTTRIGVLSRYSIPDPIVGGLLFAVLATALGTWGGIQISLETNIKPTLLLIFFGCIGLTADLKLLARGGPRLIAFLLALIPFLVLQNAVGLGLAWLLDMHPLMGLIGGTITLVGGHGTGAAYAARFADINNIQDVMALAMTAATIGLVLGGIIGGPVAEWLIRRHKLDPRMAGKDANQVLPEVETTAEAPTATSFITSLTAVFVTVVVGTYLAGLVEDAPISLPNFLWCLATGAIIRNFGGYVGIRLDDRVSEIIGSISLSLFLGLTMMTLDLSSVVRLAGPLALMLVAQALVCALYAGWAVFRMLKRDYEAAVMAAAFCGFAMGATATAIANMQALTRRHGPAPESFIVVPVTGAFLVDILNVIVLTSLIALPFVGGM

SEQ ID NO: 25300 - protein, 314 aa, Bordetella bronchiseptica RB50
MKLVVRAVTPLTAEIRHFELAASDGAALPAYTPGAHLSVHVVLPDGTPARREYSLLGDGSATASYEIAVQCREPAAGSAWMHRLAPGDRIEAEAPVNAFALAADAAEHVLIAGGIGITPILSMARHLRGAGAAFTLHYAGRARAAMAFAEEAAAMGAACRLYHDDGAPLHEALPNILAAPAPGRHLYVCGPRALIADTVDGAAAAGWPPASVHYELFQGALALRGDQPFDLVLRQSGITVSVPAGQTMLDALLQAGVEPLYDCRRGECGMCLTPVLEGKPDHRDHYLSPREREAGDAVCVCVSRACGASLTLDL

SEQ ID NO: 25301 - protein, 318 aa, Bordetella bronchiseptica RB50
MLNLCVRSITYEAEGIRSFELVHPLGKDLPPFEAGAHIDVSIPGGFTRQYSLCDPSWQRKHYRIAVLEDRGGRGGSVALHTALRAGDMIEVSEPRNLFPLDSGAGHKVLLAGGIGITPVLAMAEALQRSGHSFELHYCTRSPERTAFRERLQTLAAQDKAFFHHDMGDPARGLDIAALLARPEPGSQLYFCGPPGFMKAVQAASAHWPQGSVHYEYFGVNPALTEKLAGTGQAAGEVRLAKSDKILAVRPGQTLLQAIREAGVACESSCESGVCGTCKVRYFSGQPEHNDYVLSDEERTEFVLVCCAGAGPQALLLDL

SEQ ID NO: 25302 - protein, 406 aa, Bordetella bronchiseptica RB50
MRVIIAGCGIGGAALAVALEKFKIDHVVLEQAPRLEEVGAGVQLSPNGVAVLQHLGVHEALSKVAFEPRDLLYRDWQSGQVLMRNPLMPTIKEHFGAPYYHAHRADLLGVLTERLDPAKLRLGSRIVDIEQDARQVTATLADGTRIQGDILVGADGIHSLVRSRFFQADQPQASGCIAWRGIVDADAARHLDISPSAHLWLGPERSAVIYYVSGGRKINWICIGSRPGDRKESWSATTTVDEVLREYAGWNEQVTGLIRLTDKPFVTALYDRAPLDSWINGRIALLGDSAHAMLPYHAQGAVQSMEDAWVLARTLQQSGGDIPPALERYQSLRKDRTARVQAQSQLAEKRFHMSDPEQVARRNQKFLHYDAQYRGTFLPQQEWLFGYDADKAALGTDDAWRALRAW

SEQ ID NO: 25303 - protein, 409 aa, Bordetella bronchiseptica RB50
MSRADLDTRLSDRLAASRPSATGAVSELARRLAAEGRSVISLSEGELDFDTPAHIQQAAIDAIKGGQTRYTSVGGTPALKAAIARKFARDHQLDYAPAELIAATGAKQILFNALLATIDPGDEALVVAPFWVSYTEMARIAGGTPVVITPDAANQFKLTPELLAAHITPRTRWLILNGPCNPSGALYSREELAALAEVVRQHPRLLVMSDDIYEQLVYEGKFTSFVEAAPDMRERTLTINGVSKTYAMTGWRLGYAGGPAWLIKALELLQSQSTSNPSSISQAAAAAALDGPQDFLQDWRASLSSRRDMALSVLRDAAPAMTFTRPPAAFYLFADCSQAIGMRTPKGERIGDDADFARYLLEEAGVAAVPGSAFGLAPYLRLTFCVAEARLRQACERIVAACARLARPA

SEQ ID NO: 25304 - protein, 329 aa, Bordetella bronchiseptica RB50
MPTCVIAQPVHPVGPQLLRAAGITVIEPAGPGLDALRQVIAGADAVLVRDQLPAELIDMAPRLCVIANHGTGTDKIAVAHADALGIPVVYTPQANVRSVAEHALMLMLVTARQAVQADAATRKGHWGFKYEQPMYSLYGKTLGVIGLGRTGRLLCEMAAPALNMQALVWSPSLPAGEALPPGARRVDTLQELLREADVVSLHRPLRPDTRHTLDAATLACMKPGAIVINTSRGGLIDEAALADALREGRLAGAGLDVFETEPLPAGSRVAGLPNAVLTPHVAGSTQEALHATASQCAEQIIAVLAGRRPPHLVKPSVWERRRAPVTPEQ

SEQ ID NO: 25305 - protein, 323 aa, Bordetella bronchiseptica RB50
MNARLAVRIAGKHAGARDVCVLELESLDGEPLPAYAPGAHVDVHVGNGISRQYSLCRYGGPAARYQIAVLREPASRGGSQAVHDALDVGDVIEIGAPRNLFALADADGPSLLLAGGIGITPILCMAESLAARGGRFALHYCGRSRERMAFLDRLQAPGLAARAHIHTDDGPPAQRLDIAQVLARQEPGAHLYVCGPGGFIEAVIAQAREQGWDDARIHYERFSNPPGSDAAVAGDEGFEVQLSSSGEVFAVGKDESVVQALARHGVFVETSCEQGICGTCLLRVLEGEPDHRDMYLSDDEKRRNDQFLPCCSRARSKRLVLGL

SEQ ID NO: 25306 - protein, 573 aa, Bordetella bronchiseptica RB50
MVHATPPTPGPGDSRGFVEQLRGIVGAAHVLTDEHRTRRYRAGFRFGFGRAIAVVRPGSLLEQWRIVQACVAHGKIVIMQAANTGLTGGSTPDGNDYDREIVIISTMRMKKIQLILDGRQVICFPGSTLDQLEQTLAPLGREPHSLIGSSCLGASVFGGICNNSGGSLIQRGPAYTELAVYAQLGEDGRLRLVNHLGVALGDSPEEILGRLDEGKFGAADVQTAVGSGSDHEYAEHVRAVDADSPARYNADPRRLFEASGSAGKLILFAVRLDTFPAETQTRVFYIGTNDPGELTAIRRHMLTRLPALPIAGEYLHRDAFDIADVYGKDTFLAIRQLGTARLPRLFAIKARIDSFCERVPLLPKYLSDRVLQFASRLFPDHLPRRLREYRDAYAHHLMIKVPGKIGDQTRRFLQAYFDDATGASFECTPEEGKAAFLLRFAAAGAAVRYRAVHAGQVEDIVALDIALKRNDRDWLEQLPPDVEAPILMKLYYGHFFCHVFHQDYIVKKGEDCLALEHRMWKLLDERGAEYPAEHNVGHLYDAKPELKAFYRGLDPCNQFNPGIGRTSKLQGWR

SEQ ID NO: 25307 - protein, 393 aa, Bordetella bronchiseptica RB50
MSDPIVIVSVARTPMGGMLGSLSGLAAHELGSAAIKAAIERAGIKPEQVDEVIMGNVLQAGQGQAPARQAALGAGLPLGVGCTTIHKVCGSGLKAAMFGHDLLTAGSVDVVVAGGQESMSNAPYLLLKGRQGYRYGHNTVYDHMALDGLEDAYDRGKAMGVFAEDCATKYSFTREQQDAFSLESLRRARAANEDGSFKWEIAPVTVAGRKGDTVIDTDEAPTKAMPEKIPTLKPAFKKDGTVTAANSSSISDGAAAMVLMRASTAEKLGVKPLARIVAHAQHAQEPNWFTTAPVGALKNLFKKTGWQASDVDLYEINEAFAVVTMAAMKDFDLPHDKVNVHGGATALGHPIGASGARLMATLVGALRKTGGKRGVATLCIGGGEAVAMAIEML

SEQ ID NO: 25308 - protein, 166 aa, Bordetella bronchiseptica RB50
MTEIIKPWHSVRRSRLHGNGVFATRKIPAGTRIIEYGGKRISAAEADRRHPTNPDDPFHTFFFSLSSGRVIDGGDEGNDARWINHSCDPNCEAQEGRHGKRVYIVALRDIARGEELFYDYGLVLDGRITRKLKEGYRCLCGTTPCRGTMLALPEKKKTKARSAEKA

SEQ ID NO: 25309 - protein, 397 aa, Bordetella bronchiseptica RB50
MLVHIPTIAMIRSKLPDVGTTIFTVMSRLAIEHKAINLGQGFPDFDPDPELCALVGKAMAAGHNQYPYMPGVAPLREAIAAKVKTLYGHAYDPETEITVTSGATEALMATVLAAVGPGDEVVVIEPCYDSYLPAIRLAGGTAVPVPLRAPTRDDPYYRIDWQRVRDAIGARTRLLMLNFPHNPTGAVLDESDLDALESIVRETGVLLLSDEVYEHIVFDGKPHASLSRRPLLAEHAFVISSFGKTYHTTGWKVGYCCAPRQLSAELRKVHQFMVFTVSSPMQFALAEYMANPKPYLDLPAFYQAKRDRLAAGLANTRFRPLPSPGTFFMLADYSEITKHAEADFARHLTIDHGVTVIPVSAFYQNPAAPESNHHLVRFCFAKQDATLDAAIERLAHV

SEQ ID NO: 25310 - protein, 230 aa, Oryza sativa Japonica Group
MVRGRTELKRIENPTSRQVTFSKRRNGLLKKAFELSVLCDAEVALIVFSPRGRLYEFASAPSLQKTIDRYKAYTKDHVNNKTIQQDIQQVKDDTLGLAKKLEALDESRRKILGENLEGCSIEELRGLEMKLEKSLHNIRLKKTELLERQIAKLKEKERTLLKDNENLRGKHRNLEAAALVANHMTTTTAPAAWPRDVPMTSSTAGAMDVETDLYIGLPGTERSSNRSETG

SEQ ID NO: 25311 - protein, 588 aa, Pseudomonas aeruginosa
MPAILSSRQRIALRLAWRFMAPYRWRMLGALVALLFTAAITLSLGQGIRLLVDQGFLTASPELLNRYILLFFVLVLGLAVGTFVRFYLVSWIGERFVADIRKRVFDHLIELHPGFYETNRSSEIQSRLTADTTLLQTVIGSSLSMALRNALMLVGGVLLMFVTNAKLTSIVVLALPLVIAPILLFGRRVRSLSRESQDRVADVGSYVGETLGQIKTVQAYNHQAQDRQRFAGTVERAFDTARKRIAQRAWLITVVIVLVLGAVGIMLWVGGRDVIAGSISAGELAAFVFYSLIVGMAFGTLSEVIGELQRAAGAAERIAELLRARSEIRPPAQPRKLAARVSGRIELQAVRFAYPTRPEHWAIDDISLAVELGETLALVGPSGAGKSTLFDLLLRFFDPQQGRLLLDGQPIVELDPADLRRSFALVSQNPALFFGSVEENIRYGRPHASAAEVEAAARAAHAHEFILGLPQGYATHLGEGGIGLSGGQRQRLAIARALLVDAPVLLLDEATSALDAESEHLIQQALPGLMSGRTTLMIAHRLATVQSADRIAVIDQGRLVAIGSHARLIAENPLYARLAELQFAAGGR

SEQ ID NO: 25312 - protein, 463 aa, Euglena gracilis
VWQNERVEIIANDQGNRTTPSYVAFTDTERLIGDAAKNQVAMNPKNTVFDAKRLIGRKFTDATVQADMKHWPFTVVSKSDGRPIIQVEFRGETKTFLPEEISSMVLTKMKETAESYLGKTVTKAVVTVPAYFNDAQRQATKDAGAIAGLEVLRIINEPTAAAIAYGLDKVKDNRERNVLIFDLGGGTFDVSLLTIDGGIFEVKATAGDTHLGGEDFDNRLVNHFVEEFKRKNKKDVTTNARALRRLRTACERAKRALSSAAQTTVEIDSLIEGIDFYTSITRARFEELNADLFRACITPCEKVLQDSKLDKASVHEVVLVGGSTRIPKVQQLVSDFFGGKELNRSINPDEAVAYGAAVQASILTGQKSKQTDGLLLLDVTPLTLGIETAGGVMTPLIKRNTTIPAKKSQIFSTYADNQPGVHIQVFEGERSMTKDNHLLGTFDLHGIPPAPRGVPQIDVTFDI

SEQ ID NO: 25313 - protein, 63 aa, Malus x domestica
EQVKALERNFEVENKLEPERKVKLAEELGLQPRQVAVWFQNRRARWKTKQLERDYSILKTDYD

SEQ ID NO: 25314 - protein, 227 aa, Capsella rubella
RGKIEIKRIENTTNRQVTFCKRRNGLLKKAYELSVLCDAEVALIVFSSRGRLYEYSNNSVKGTIERYKKAISDNSNTGSVAEINAQYYQQESAKLRQQIISIQNSNRQLMGETIGSMSPKELRNLEGRLERSITRIRSKKNELLFSEIDYMQKREVDLHNDNQILRAKIAENERNNPSISLMPGGSNYEQLMPPPQTQPQPFDSRNYFQVAALQPNNHHYSSAGGRQ

SEQ ID NO: 25315 - protein, 224 aa, Camelina sativa
RGKIEIKRIENTTNRQVTFCKRRNGLLKKAYELSVLCDAEVALIVFSSRGRLYEYSNNSVKGTIERYKKAISDNSNTGSVAEINAQYYQQESAKLRQQIISIQNSNRQLMGETLGSMSPKELRNLEGRLERSITRIRSKKNELLFSEIDYVQKRESDLHNDNQLLRAKIAENERNHPSISLMPGGSNYEQLMPPPQTQPFDSRNYFQVAALQPNNHHYSSAGRQ

SEQ ID NO: 25316 - protein, 228 aa, Lepidium squamatum
RGKIEIKRIENTTNRQVTFCKRRNGLLKKAYELSVLCDAEVALVVFSSRGRLYEYSNNSVKGTIERYKKAISDNTNTGSVAEINAQYYQQESAKLRQQIVSIQNSNRQLMGETIGSMSPKELRNLEGRLERSITRIRSKKNELLFAEIDYMQKREVDLHNDNQLLRAKIAENERNNPSISLMPGGSNYEQIMPPPQTQPQPQQFDSRNYFQVAALQPNNHHYSSAGRQ

SEQ ID NO: 25317 - protein, 230 aa, Lepidium squamatum
RGKIEIKRIENTTNRQVTFCKRRNGLLKKAYELSVLCDAEVALVVFSSRGRLYEYSNNSVKGTIERYKKAISDNTNTGSVAEINAQYYQQESAKLRQQIVSIQNSNRQLMGETIGSMSPKELRNLEGRLERSITRIRSKKNELLFAEIDYMQKREVDLHNDNQLLRAKIAENERNNPSISLMPGGSNYEQIMPPPQTQPQPQSQSFDSRNYFQVAALQPNNHHYSSADRQ

SEQ ID NO: 25318 - protein, 226 aa, Lepidium phlebopetalum
RGKIEIKRIENTTNRQVTFCKRRNGLLKKAYELSVLCDAEVALIVFSSRGRLYEYSNNSVKGTIERYKKTKSDNSNTGSVAEINAQYYQQESVKLRQHIVSIQNSNRQLMGETIGSMSAKELKNLEGRLERSIARIRSKKNELLFAEIDYMQKREVDLHNDNQLLRAKIAENERNNPSISLMPGGSNYEQIMPPPQTQTQPFDSRNYFQVAALQPNNHHYSSAGRQ

SEQ ID NO: 25319 - protein, 228 aa, Eruca sativa
RGKIEIKRIENTTNRQVTFCKRRNGLLKKAYELSVLCDAEVALIVFSSRGRLYEYSNNSVKGTIERYKKAISDNSNTGSVAEINAQYYQQESAKLRQQIISIQNSNRQLMGETIGSMSPKELRNLEGRLDRSVNRIRSKKNELLFAEIDYMQKREVDLHNDNQLLRAKIAENERNNPGMISLMPGGSSNYEQIMPPPQTQPQTFDSRNYFQVAALQPNNHHYSSAGRE

SEQ ID NO: 25320 - protein, 226 aa, Guillenia flavescens
RGKIEIKRIENTTNRQVTFCKRRNGLLKKAYELSVLCDAEVALIVFSSRGRLYEYSNNSVKGTIERYKKAISDNSNTGSVAEINAQYYQQESAKLRQNIISIQNSNRQLMGETIGSMSAKELRNLEGRLDRSINRIRSKKNELLFAEIDYMQKREVDLHNDNQLLRAKIAENERNHPSMSLMPGGSNYEQIMPPPQTQSQPFDSRNYFQVAALQPNNHHYSSAGRQ

SEQ ID NO: 25321 - protein, 226 aa, Thlaspi arvense
RGKIEIKRIENTTNRQVTFCKRRNGLLKKAYELSVLCDAEVALIVFSSRGRLYEYSNNSVKGTIERYKKAISDNSNTGSVAEINAQYYQQESAKLRQQIISIQNSNRQLMGETIGSMSPKELRNLEGRLDRSITRIRSKKNELLFSEIDYMQKREVDLHNDNQLLRAKIAENERSNPSMNLMPGGSNYEQLMPPPQTQSQPFDSRNYFQVAALQPNNHHYSSAGRQ

SEQ ID NO: 25322 - protein, 226 aa, Thlaspi arvense
RGKIEIKRIGNTTNRQVTFCKRRNGLLKKAYELSVLCDAEVALIVFSSRGRLYEYSNNSVKGTIERYKKAISDNSNTGSVAEINAQYYQQESAKLRQQIISIQNSNRQLMGETIGSMSPKELRNLEGRLDRSITRIRSKKNELLFSEIDYMQKREVDLHNDNQLLRAKIAENERSNPSMNLMPGGPNYEQLMPPPQTQSQPFDSRNYFQVAALQPNNHHYSSAGRQ

SEQ ID NO: 25323 - protein, 225 aa, Eruca sativa
GRGKIEIKRIENTTNRQVTFCKRRNGLLKKAYELSVLCDAEVALVVFSSRGRLYEYSNNSVKGTIERYKKAISDNTNTGTVAEINAQYYQQESAKLRQQIISIQNSNRQLMGETIGSMSPKELRNLEGRLDRSINRIRSKKNELLFAEIDYMHKREVDLHSDNQLLRTKIAENERNNPSMNLTPGGYEQIMQPSQTQSQPFDSRNYFQVAALQPNNHHYSSAGRQ

SEQ ID NO: 25324 - protein, 229 aa, Guillenia flavescens
RGKIEIKRIDNTTNRQVTFRKRRNGLLKKAYELSVLCDAEVALIVFSSRGRLYEYSNNSVKGTIERYKKAISDNSNTGSVAEINAQYYQQESAKLRQQIVSIQNSNRQLMGETIGSMIPKDLKTLESKLDKSITRIRSKKNELLFAEIDYMQKRSLQEVDLHNDNQLLRAKIAENERNNPSMNLMPGGSNYEQIMPLPQTQSQPFDSRNYFQVAALQPNNHHYSSAGRH

SEQ ID NO: 25325 - protein, 226 aa, Guillenia flavescens
RGKIEIKRIENTTNRQVTFCKRRNGLLKKAYELSVLCDAEVALIVFSSRGRLYEYSNNSVKGTIERYKKAISDNSNTGSVAEINAQYYQQESAKLRQQIVSIQNSNRQLMGETIGSMIPKDLKTLESKLDKSITRIRSKKNELLFAEIDYMQKREVDLHNDNQLLRAKIAENERNNPSMNLMPGGSNYEQIMPLPQTQSQPFDSRNYFQVAALQPNNHHYSSAGRH

SEQ ID NO: 25326 - protein, 162 aa, Trema orientalis
MSSSEVDKVFTEEQEALVVKSWAVMKKNSAELGLKFFLKIFEIAPSANNLFSYLKDSPIPLEQNPKLKPHAMTVFVMTCESAVQFRKAGKVTVRESNLKRIGAIHFKNGVVHEHFEVTRFALLETIKEAVPEMWSPEMKNAWGEAYDQLVAAIKFEVKPSST

SEQ ID NO: 25327 - protein, 261 aa, Prochlorococcus marinus subsp. pastoris str. CCMP1986
MQSKTKELDPILEVNNLFASIENLPILKGVTISVNPGEIHAIMGRNGCGKSTLSKIIAGHPSYKITKGEIKFTGNDIQSLEPEERAQSGIFLGFQYPIEIPGVSNLEFLRVATNARRKFLNKEELDTFDFEDLVKEKLDLVKMDSAFLSRSINQGFSGGEKKRNEILQMALLEPKIAILDETDSGLDIDALRIVASGIKKISNEETGIILITHYQRLLDEIQPDYVHVMSDGQIIKTGESDLALELEKHGYEWTDNFIKEQ

SEQ ID NO: 25328 - protein, 382 aa, Prochlorococcus marinus subsp. pastoris str. CCMP1986
MMLSTPILLDYQSSTPCLEEVVNSMAPYWSEIFSNPSSKSNLAGINASAVLEVSREKIQEYLFLKKKKVIFTSGATESNNLALLGFARRHFKETEHYGHIITLKTEHKAVLEPLNQLRKEGFHITEISPEKDGLVSEEKFVSCIRDDTFLVSIMMANNEIGVIQPLKEISEICGSRDIVLHSDYAQCLGFLEFDSLDSVANMLTISSHKIYGPKGVGILLIDRDIELQPLVLGGGQEFGLRSGTLPLPLIVGFTKAIEIAVLNQKKNINKFLFYRDKLLKGLLGNNSGVEINGSMKERLPHNLNLTVLDVNGSKLHKSLKSKIICSSGSACSNGVPSHVLLALGRSFKEAEASLRLSIGLMTTKEDIEKSIEIITDSIKLLR

SEQ ID NO: 25329 - protein, 327 aa, Prochlorococcus marinus subsp. pastoris str. CCMP1986
MQFIDQANIILKAGKGGNGIVSFRREKFVPAGGPSGGNGGKGGSIIIIADNNLQTLLDFKFNREIFAKDGFKGGPNKRSGASGENTILKVPCGTEIRDFNTGIILGDLTEDKQSLTIAHGGRGGHGNAYYLSNQNRAPESFTEGKEGEIWEVQLELKLLAEVGIIGLPNAGKSTLISVLSSARPKIANYPFTTLIPNLGVVRKADGNGCLFADIPGLISGAAEGVGLGHDFLRHIQRTKILIHLIDSIAENPIRDFEIIEKELKRYGSGLLNKERIVVLNKMELVDENYLQTITKKLENLSKKKVLVISSSLRKGLSPLLSEVWKRI

SEQ ID NO: 25330 - protein, 618 aa, Prochlorococcus marinus subsp. pastoris str. CCMP1986
MNKRWRNVGLYVLAVITVIFIGTSVFDKPKTENATKTLRYSDFIEAVQDKEVSRVLLSPDSGTAQVVENDGSRSEVNLAPDKDLLKILTENDVDIAVTPTKLANPWQQAISSLIFPVLLIGGLFFLFRRSQNGSGGGGGNPAMSFGKSKARLQMEPSTQVTFSDVAGVEGAKLELTEVVDFLKSPDRFTAVGAKIPKGVLLVGPPGTGKTLLAKAVAGEAGVPFFSISGSEFVEMFVGVGASRVRDLFEQAKKNAPCIVFIDEIDAVGRQRGAGMGGGNDEREQTLNQLLTEMDGFEGNSGIIIVAATNRPDVLDSALMRPGRFDRQVTVDRPDYAGRLQILNVHAKDKTLSKDVDLDKVARRTPGFTGADLANLLNEAAILAARKDLDTVSNDEVGDAIERVMAGPEKKDRVISDRKKELVAYHEAGHALVGACMPDYDAVAKVSIIPRGQAGGLTFFTPSEERMESGLYSRSYLQNQMAVALGGRVAEEIVYGEEEVTTGASNDLQQVANVARQMITKFGMSDKIGPVALGQSQGGMFLGRDMSATRDFSEDTAATIDVEVSELVDTAYKRATKVLSDNRSVLDEMASMLIERETIDTEDIQDLLNRSEVKVANYI

SEQ ID NO: 25331 - protein, 391 aa, Prochlorococcus marinus subsp. pastoris str. CCMP1986
MNSQQESKRDSKGLIPAYGGELKELIIKDEELKLKLLSQVSYQHECSDRNACDIELLMVGGFSPLEGFMDKEEYKSVIKSHRDTKGLLFGLPIVFDTNNAQIKEDETILLTYKKQKLAILKVSSKWEPDKAEEAEFCYGTNSLDHPAVKMIFNERGRYYIGGKVYGLELPNRDFPCKTPKEVRDLLPANFDVVAFQCRNPIHRAHYELFTNALQSENVSSNSVVLVHPTCGPTQQDDIPGKVRYLTYKKLEEEISNKKIKWAFLPYSMHMAGPREALQHMIIRRNYGCTHFIIGRDMAGCKSSSTGEDFYGPYDAQTFANECAEELLMKTVPSKNLVYTIEKGYITAEEAKEKKYQIMKLSGTEFRKKLRNGDSIPEWFAFKSVVDVLRKS

SEQ ID NO: 25332 - protein, 244 aa, Prochlorococcus marinus subsp. pastoris str. CCMP1986
MSPASRGFSRLTPQPSGQNTINTIGERFPINRTLMEVIKGLEGASTEMVERSKTIFFPGDPAERVYLIRRGAVRLSRVYESGEEITVALLRENSLFGVLSLLTGHRSDRFYHAIAFTRVEMITAPANSVLRAIEADASVGLLLLQGLSSRILQTETMIETLTHRDMSSRLVSFLMVLCRDFGVASEKGITIDLRLSHQAIAEAIGSTRVTITRLLGDLKDSGLLTIERKKITVFDPIALSKRFN

SEQ ID NO: 25333 - protein, 486 aa, Prochlorococcus marinus subsp. pastoris str. CCMP1986
MTTALQTPQRRSRSKLQDASLVNGPMLLLRSIRGFSSNRSMLWLATVPLALFGLGIFNLSAHAADLPELNAAFLANNLWLLIATILVIFMNAGFAMVEAGMCRSKNAVNILAKNLFVFALAVTSYWFIGYSLMYGGSVADGWLYFGGLFFDPTVTADMVTDAGLVPTVDFLFQSAFAGTAATIVSGLVAERVKFGEFVVFAIVLTAFIYPIAGSWKWNGGWLDSLGFVDFAGSSIVHSVGAWAGLVGAMLLGPRIGKYSDGKPQAMPGHNMAIATLGALILWIGWYGFNPGSQLAMDQWVPYVAVTTTLAAAAGAIGATIVSTLTSGKPDLTMIINGILAGLVSITAGCGDMTLAGAWFAGLVGGIIVVFSVAALDAAEIDDPVGAFSVHGVCGVWGTLVIGLWGTAVQGDGAGMGLFNGGGINLLLVQALGAAAYAIWTLVTCWIAWSIIGGLFGGIRVSEEEETQGLDISEHGMESYPDFASAK

SEQ ID NO: 25334 - protein, 561 aa, Prochlorococcus marinus subsp. pastoris str. CCMP1986
MLNPVNNSTKKYNFKCGPSSADNSDQFQDNSQNSLNNLLNPANNHGYLCACVECRPIGNDHENFMSDMPDDPVEIISDFSRMGLIKNQAYEVADAISTAEMRDLLFYKNASNGDPYKEKLLRELAKEAGGLDQAFRAAFGPQAGKFFANTRASSPMGRRAFLSSLAAGAALITVACSNQNKPTKQPIDDTPININNLEKQTLRVGFIPITCASPIIMAEPMGFYNKFGMDVKVVKMPSWGAVRDSAIAGELDAYHMLAPMPISMTLGLGTSPFSVKLASIENINGQAITVANRHKGKVKGPADMKGFIFGVPFPYSMHNLLLRYYLAKGGVDPDKDVQIRPVPPPDSIAQLVAGDIDAYLMPDPFNQRAVYEDAGFIHLLTKELWPGHPCCAFAAGEPWINEHPETFRALNKSIIDAAAYVSTPSNRKEVAKAISGRGFLNQPTEVVEAVLTGKFEDGLGKTQNVPDRIDFKPYPWQSFSHWIQSQLIRWDLGGAVAAIQAGDFNPNSASIFLTDEAQALEREMGGNPPTARFRKEVLAYDEFDPSNPIKYVKDQIKRDGF

SEQ ID NO: 25335 - protein, 587 aa, Prochlorococcus marinus subsp. pastoris str. CCMP1986
MTLTSTSLSKDDSEKNYPIWITGAEALMDSLKVHDVKVIFGYPGGAILPIYDAVHKAENDGWLKHYMVRHEQGGSHAADGYARSTGEVGVCFGTSGPGATNLVTGIATAQMDSVPLVVVTGQVPRPAIGTDAFQETDIFGITLPIVKHSWVVRDPSDIAKVVSEAFFIASSGRPGPVLIDIPKDVGQEFFNYERILPGKIIPKGFKRNGEINDADINQAIELIQESSRPLLYVGGGAISSGAHEEVETLANNYQIPVTTTLMGKGVFDERDDLSVGMLGMHGTAYANFAVTECDLLIAVGARFDDRVTGKLDTFAPSAKVIHIDIDPAEVNKNRRVDVAIVSDVAKALSKINEKYFNNKTSCNTKNWLEKINFWKNKHPLFVPPEEGEIYPQEVLLKVRDFAPEAFITTDVGQHQMWAAQYLRNAPRRWISSAGLGTMGFGLPAAMGVKAALPNEEVICIAGDASVLMNIQELGTLSQYGLNIKLVIINNRWQGMVRQWQESFYEERYSSSDMSCGEPDFVKLAESFGVKGFLISERKQLLNEFKSALDFDGPALINVRVRRGENCYPMVPPGKSNAQMVGYVNSES

SEQ ID NO: 25336 - protein, 860 aa, Prochlorococcus marinus subsp. pastoris str. CCMP1986
MKFVPSEFSNSAWDIFILSKEIAQNNFQQNIDSENILLALIKQDLLTSKILKKNCVNIRKIETKLTSLLDAKAKMKNKQKTLFIGETTEKVFLKANDLRVSFNDVVISTEHILYGLSYDEICSELVLNTKKIPEFLELLNKMKSESTINDNFESSNETLDKFGIDLTKSARDGILDPVIGRDEEIRRTIQILSRRTKNNPVLIGEPGVGKTAIVEGLAQRIVNGDVPSSLNNRQLISIDMGSLIAGAKYRGEFEERIKNVLKKVKSSEGKIILFIDEIHTVVGAGATGGSLDASNLLKPMLARGELRCIGATTINEHKQNIEKDPALERRFQKIKINAPSVDDTISILRGLREKYEVHHSVRISDNALVAAASLSERYINDRFLPDKAIDLIDEAASRLNMIITSKPEEIDEIDRKVLQLEMENLSLQRESDNFSLERLKRINNELHDLKIRQSELNHQWQKEKEEIDEISNLKEEIESTQLKIEQAKRSFDLNKAAELEFGTLISLQKKLKIKSENLVDSFKSGEKNLLRQEVNFDDIAEVVSKWTSIPVNNLNQSEKEKLLKLELTLKEKIIGQNNAICAVSDSIKRSRTGLNDPNRPIASFLFLGPTGVGKTELSKVIAKTIFDSNSSITRLDMSEYMEKHSVSKIIGAPPGYLGFESGGQLTEAVRKNPYSLILLDEIEKAHKDVLDVLLQVLDDGIITDGQGRTISFKNSIIVLTSNLGSQSINDLSIRNEDKNEIKNIVNVELKKFFKPEFLNRLDEIIIFQNLELNELKDIAKLQLKKLENRLIKKDLNFQITDEAIDHLVKNSFDNSYGARPLKRIIQKEIETKIANNILNNNYLNKKEVYISIKDGCIFVN

SEQ ID NO: 25337 - protein, 393 aa, Prochlorococcus marinus subsp. pastoris str. CCMP1986
MSEVNLSKRALSIEPSLTLQISAKANQLAKEGKDICNLSAGEPDFDAPNEILKATSEAIFDGYTKYGPASGDLELRKAIAEKLQTQNNLNVEYENVMVTNGAKQSIYNLFQVLLNDGDEVIIPAPYWLSYPQMVRLAGGKPVFLNSSAEDGFKINIQDLKSKISPKTKFIIINSPNNPTGRVMPKEELLQIAELVRENKNINILSDEIYELILKKEFKHLSLASLATDLKERIFIINGFAKGWAMTGWRVGYLVGQKDVIKASSALQSQSTSNVCSFVQRGALEALKINREFFLEINSHYDLRREVLYKGLKNIEGLFISPPNGAFYAFPRLPNNSMTSVEFCKRILNDYGLVVVPGKPFGDDQCIRISCASSKEKILDGLTRLEKGILNYYF

SEQ ID NO: 25338 - protein, 242 aa, Prochlorococcus marinus subsp. pastoris str. CCMP1986
MAAKEHKSLQGSKILLIEDDKSIRLTVTESLISEGFEVSNFKDGSSALDFILGEGIKDFDLILLDLMLPGLNGLELCRKIRNEELYTPILILSAKGNESDRVLGLEVGADDYLTKPFGISELIARCRALLRRSKRGKEKKQKIETIIEYKNIKMFTEECRVTNFNQEIILSPKEFKLLELFIKNPKRVWSRDLILEKIWAIDFIGDTKTVDVHVRWLREKLEENPSAPKIIKTVRGFGYRFG

SEQ ID NO: 25339 - protein, 390 aa, Prochlorococcus marinus subsp. pastoris str. CCMP1986
MDNKYIYLDNASTTPLSKNVLNKINSTYKNYWSNSSSTYKYGIRCATYLEKIRLKIAKILNANTEDIVFTSGSSESTSLVFSNLSDKYKCGRVVISNVEHQATIISANKLKRKGWEIYKWPVNRDGIINISNINEVIKNNTNLVSLIWGQSEVGTLQPVQLVGTKCKEFDILFHIDGTQILNNGIFNWKELNCDLLSLSAHKFGGPKGIGLLLTNSKSRLLLKNNDISLSQEYSIRQGTTPLPLIAGMYQSIKNIKGRIKFNSYNAEFENNKKVLLSKYFINKITNNPNIKITGSSTERLPNHISFLLFNKKLEPIKAYKVINYMSDNNVAISSGSACSSSSGKHSLTLENMGYDSNQLYSNIRVSLGSMNKKSDIDRLFKLIQICIKKF

SEQ ID NO: 25340 - protein, 370 aa, Prochlorococcus marinus subsp. pastoris str. CCMP1986
MVYSQAKVIAGGLAHIPIVISVFYLIMTFFNKRAIKFEEANKSKKTEAKVVESKSESKSLDAAKVASQKPLKKKHADVPVNIYRPKTPFEGTVTGNYSLLKEGAIGRVNHITFDLKESDPFLNYIEGQSIGIMPEGEDANGKPHKLRLYSIASTRHGDDFEGNTVSLCVRQLQYEKDGETINGVCSSYLCDIKPGAKVKITGPVGKEMLLPDEEDANIVMLATGTGIAPMRAYLRRMFEATEKEKNKWNFKGKAWLFMGAPKSANLLYEEDLQRYLETYPDNFKYTKAISREQQNTKGGRMYIQDRVLESANEIFNMIEDEKTHIYLCGLKGMEPGIDEAMTKAAEEKGLNWSELRPQLKKAGRWHVETY

SEQ ID NO: 25341 - protein, 331 aa, Prochlorococcus marinus subsp. pastoris str. CCMP1986
MTSFITAVDNEEPTFNLTNSRLRLVSGTSNPKLAEEIASYLGIENVPLVSKRFADGELYVQIQQSIRGCDVFLIQPTCAPVNDSLMELMIMVDACKRASARQITAVIPYFGYARADRKTSGRESITAKLTANLLEKSGVDRVLAMDLHSAQIQGYFDIPCDHIYGSPVLIDYLESLKLEEVVVVSPDVGGVARARAFAKLMSDAPLAIIDKRRSAHNIAESLTVIGEVKGKTAILIDDMIDTGGTICSGANLLKKEGAKRIFACASHAVFSPPSYERLSSKDLFEQVIVTNSIPVIDNYEFPQLKVLSVANMLGEAIWRIHEESSVSSMFR

SEQ ID NO: 25342 - protein, 465 aa, Prochlorococcus marinus subsp. pastoris str. CCMP1986
MSISSFLSKKFLKSLFFPAHNRGKALPKGLIRLLKKQPGFWDLPELPEIGSPLSNSGLIHDAQISISKKVNAKKCFFGVNGASGLIQSGIIAMANPGEYILMPRNVHISVIKACALQNIIPIFFDIEFSRVTGHYMPITKRWFTNVFNNIDFDNFKIAGVILVSPYYQGYATDLEPLIKICHLHNLPVLVDEAHGSYFLFCENFNLPKSALRSKADLVVHSLHKSLNGLTQTAIIWHNGYLVEENKLIKSINLLQTTSPNSLLLSSCEESIKDWLNKDNLNKYKKRILEAKSIYNELIKKKIPLIETQDPLKIILNTSKVGIDGFTADRFFYKNGLIAELPEMMTLTFCLGFSNQKDFTFLFQKLWKKLLIHTNKSYGLKAIKPPFRIVQSPEIPIGVAWKSKSISIPLVESLGKISGDIICPYPPGIPLIVPGERIDKERIDWIEAQSLYNEDLLNSYIRVLNN

SEQ ID NO: 25343 - protein, 364 aa, Prochlorococcus marinus subsp. pastoris str. CCMP1986
MQLISPEKIFRGNNAWEESLTQIKKISKRPLVLGRSLSTKEIRHQIYKDLQDHHFHIIKSNLQFDCCYEDLERIERIILKNNCDSIIAIGGGKVLDAGKFLADFLSIPAITIPLSASTCAGWTALSNIYSKDGQFIKDIELKSCPEILVLDHGFIKTAPKRTLASGIADALAKWYESSLTSSKVEDGLVQQAIQISRVLRDQLLINGESAYKSQSFHNVAWCNVVEGCSLTAGLIGGIGGEKCRTAAAHAIHNAITQIISSHKPLHGEIVGVGILLQLRLEETKNNNKLANQSIKQLMELMRKLDLPTTIADLGINVFENNNLQKIAEFTCRDKSEIHFLPFEINQQDIIKTITEFEKQKIKIA

SEQ ID NO: 25344 - protein, 592 aa, Prochlorococcus marinus subsp. pastoris str. CCMP1986
MASNKDNQLVEKNDDNLGVENISNNPSIQSEQKLEVTEDEISFKEEDLDNGFACFGFNKLILNSLESKGYKTPTPIQKAAIPELMLGRDLLGQAQTGTGKTAAFALPLIEKLENNKESNAKVLVMTPTRELATQVADSFKSYSAESTNLRTLAIYGGTDFRNQISSLKRKTDIVVGTPGRIMDHIRQGTFKINNISCLVLDEADEMLKMGFLEDIEWIIDKLPENKQMVLFSATMPNEIRNIAKKYLNEPAEILIKSVKQETQLITQKYINVQRHHKLDALKRILEITNEGVIIFVRTKLLTTSIAEALENSGHSVAVLNGDIPQNQRENTVDRLKKGFIDILVATDVAARGLDVERIKLVINYDFPFDKETYTHRIGRTGRAGRSGEAILFVNQREKHFLRNLENSTRNKIEEIEIPNNKIINEKRMGKLITNLNESSLDQENNEEKKALMIDILDTLREKHSMEDSNIAMAAINLAIGNKSFFINEDESWLYRQNNSDRNRSNRNGNNRMRNTNRRNNYQNDSFETYKFNFGKMDRVRVANIISSICTSTNINGRLIGKIQIFNEYSLVDLPRDLHGEVKNKLKNLRIRN

SEQ ID NO: 25345 - protein, 107 aa, Prochlorococcus marinus subsp. pastoris str. CCMP1986
MENPTKNKIQNLIDLNPVMVFMKGTKLMPQCGFSNNVVQILNSLGVTFNTFDVLSDFEIREGIKEYSEWPTIPQVYLKGEFLGGSDILIEMYNAGTLKEKIEIALAS

SEQ ID NO: 25346 - protein, 376 aa, Prochlorococcus marinus subsp. pastoris str. CCMP1986
MTKILIPIETASGERRVSATPSAVKKLKGLGCEVFVESSAGELSGFNDTLYKESGGEIVSKSNINIWENADVIFCVQTPSESNLSKLKKGAILLGLLNPYANEKLQKTITSKKISALSMELLPRISRAQSSDVLSSQANIAGYKAVLLAASELDRYFPMLMTAAGTVQPAKVVVLGGGVAGLQAVATAKRLGAIVFVSDIRPAVKEQVESLGARFIELPEIDEKPGESGGYAKAVTPEFLSKQKATLTKYLSEADVAVCTAQVLGKKAPVLIDSHMIEKMRPGAVVIDLAVSQGGNCEGTKSNETIIRNGVKLIGAGELPSSVPYDASTLYAKNLTSLITPFIKDGVINLDKEDELISGCLLSNEGVILQNKVFEN

SEQ ID NO: 25347 - protein, 303 aa, Prochlorococcus marinus subsp. pastoris str. CCMP1986
MTNYKSGFVTLLGRPNVGKSTLINKLIGEKITITSPVAQTTRNKLKGILTTKFGQIIFVDTPGVHKPHHLLGEILVKNAKSAINGVDMVVLVLDSSVEPGRGDEYIKDFLVANKTEFIVALNKWDLVNKEFKSLRLDQYRKVFGNSKNFQIVSASEGDGCSELIDIILNFLPIGPMLYEEETICDQPLDNLLADLVREQVLINTREEVPHSVAVNIEKIKEIKRDKGKNFTAILATIIVERTSQKGILIGKKGSMLKTIGQSARSNMKKLINGPVHLELFVKVVPNWRKKESKLMELGYEVDY

SEQ ID NO: 25348 - protein, 528 aa, Prochlorococcus marinus subsp. pastoris str. CCMP1986
MTKVLITDPIDQKGIDILSQVAQVDQKIGISNSELASIIHDYDALMIRSGTQVTGDIINSSKKLRIIGRAGVGVDNVDVKAATQKGVLVVNSPGGNTIAAAEHTIAMMLALSRNIPIANSSTFLGKWERKKFVGNELFKKKLGVVGLGKIGTHVAKVANALEMDVYGYDPFVSSERAQQLQVRLSELKTLFEESDYVTLHLPRTSETENLVNMKVLKSMKKNAKLINCARGGIIDEEALAEALNNSLIGGAAIDVFAKEPLDSNSPLLKVDKNLILTPHLGASTREAQENVAVDVAEQIRDVLLGLSARTAVNIPGLSPDIMDSLKPHLQLAETMGLLISQLSGGQIQKLEVRLQGEFVQHPSQPLIIASLKGLLSKALGDRINYVNASLEAESRGISVVESKDEARPEFASGSLQLTTFGDNGEHSVAGSIFADGELRIISIDQYPVNVSPSRFMLITRHRDMPGIIGKLGSLLGDHNVNIASMQVGRKIVRGEAVMVLSIDDPIPTNLLESILEVEGITSSDPVTL

SEQ ID NO: 25349 - protein, 1521 aa, Prochlorococcus marinus subsp. pastoris str. CCMP1986
MRGSIKRSNESYQDSYSPNGIIGEKDACGVGFIANIDGKESNWILKQSLKGLNCMEHRGGCGGDSDSGDGAGILCSIPWEFLDRELNLNTESYEKRGLGMIFMPNNELKVKESKLICDEEAKELNFKQSFWRNVPIKNETLGILAKANAPFINQWIVCLEKDDSRDIEMLLFQLRKRIEKRIRDNTKNAIGECEFYFASLSSKTVVYKGMVRSEVLSEFYEDLKKEDFKVSFSVYHRRFSTNTLPKWPLAQPMRFLGHNGEINTLLGNINWAKASEIHIDDYWGELSRDIKPIVDKNKSDSSNLDATLEINIRSGKPITDSLLKLVPEAFRDQPELESREDIKAFYEYSATLQEAWDGPALLVFADGNYVGATLDRNGLRPARYSITNDGFVIMGSETGVVDIEENRVIEKGRLGPGQMLAVDLSQNKILRNWEVKAEAAKRKNYKKLIQKRTIKLKNNEWSNTCNLKDFELLQQQTAFGFSSEDNDLILDSMASLSKEPTYCMGDDIPLAVLSSKPHILYDYFKQRFAQVTNPPIDPLREKLVMSLEMHLGERCSPFEFNGIKPFIHLKSPIINEKELISLKESEIKSKTISSLFDIEERIKGFEAKLDDICKVSEKAIKEGCSLIIISDKGVSSKQSFIPPLLAVGAIHHYLLKKEIRLKASLIIETGQCWSTHHLACLIGYGVSAVCPWLTLESGRHWLQHPKTQKLIATKKINPLSIDDVQENIKKALEDGLRKILSKIGISLLSSYHGAQIFEAVGLGSDLIKIAFDGTTSRIAGITLKELANESLLIHTKAFPEIDLKKLEFLGFVQFRNNGEYHSNNPEMSKVLHSALKQGPGYDHFETYKTLIRNRPVTSLRDLLSINSTRKSIPIDEVESVESICKRFCTGGMSLGALSREAHEVLAVAMNRIGGKSNSGEGGEDPARFNVLNDIDENTQSAILPSIKGLENGDTACSAIKQIASGRFGVTPEYLRSGKQLEIKMAQGAKPGEGGQLPGPKVDSYIAKLRNSKPGVALISPPPHHDIYSIEDLAQLIHDLHQVHPRAKVSVKLVSEIGIGTIAAGVSKANADVIQISGHDGGTGASPLSSIKHAGLPWELGVAEVHKSLMENNLRGRVLLRTDGGLKTGWDVVIAAILGAEEFGFGSVAMIAEGCIMARVCHTNKCPVGVATQKEELRKRFKGLPENVVNFFLYIAEEIRQIMSSIGVSNMEELIGNQEFLTARDIKLPKTANIDLSSLIKKGTQYKDRSWLKHSKTAHTNGYVLEDQFLSDNEFMNSIKNHGKVIKEIEIKNTDRSVCAKISGEIAGLYGNNGFNGELNLNFKGYAGQSFGAFLLKGMHIQLIGEANDYVCKGMNGGVLTIVPPQVDEKSSEQVILGNTCLYGATGGKLFALGKSGERFAVRNSGATAVTEGSGDHCCEYMTGGKIVILGSTGRNIGAGMTGGIAYILDENNDLENKVNKEIVSIHKITSLKQEEILLGILGEYLEKTKSLKASKIINNWSNFKGIFKIVVPPSEEETLGI

SEQ ID NO: 25350 - protein, 586 aa, Prochlorococcus marinus subsp. pastoris str. CCMP1986
MALLIKKFGGTSVEDITKIKAIAQSIIQSKEAGNDIVVVVSAMGHSTDHLNKLAESISKNPNSRELDMLLSTGEQVTMALLSMSLNEYGIPAISLTGSQVGIVTESIHGKARILDIKTERIQNYINQGYVVVVAGFQGSTLSHTGSMEITTLGRGGSDTSAVALSTALGAETCEIYTDVPGVLTTDPRIVPNAKLLDIISCEEMLELASVGASVLHPRAVEIARNYGIKLYVKSSQALSNGTLLHSKIKPLALKRGGLELTKTVNSLEVLEKQTVFSISKLPDRPGIAAQIFETLSKANINVDLIIQATHDGKSNDIAFTVNDFELTKTIDQCKLITKQLGGEYDFKKNMTKLSIQGAGIMGRPSVSADLFDTLFQANINVRLIATSEIKVSCVIDIENISKAIRFVSEKFKLSDKQIFINPVIESEDQPEVRGIALDKNQVQVSIRNLPDKPGVAASICLALAENNLIFDTIVQSERLTSLKTKDISFTMSKQDRERANTIFHSLTKKLAGSFIEDGPAIAKVSTVGAGMAFKVGTAGKIFRALANKNINIEMIATSEIRTSCIVLEQDCDQAVNAIHSYFQLDK

SEQ ID NO: 25351 - protein, 294 aa, Prochlorococcus marinus subsp. pastoris str. CCMP1986
MINKNLFDNESAIFMGAKRNPDDCSIGIFGVNYDGTCSYKSGTRFGPNAIRLVSTCLETFCPRLGKDLEDFNYVDFGSLEIDKNDSISVIKAVKSATDFIMSSKLTPIMLGGEHSITSGAIEALVNRYPDLILIQLDAHADLRTSYMGNEHSHACAMQRCLDILPEKKILQVGIRSGTKEEFKFMSQKKQLVKFLPGGNAQEFKKALLPYSNSPIYLTIDLDWFDPSLLPGTGTPEPGGFFWNDFEVILETLKEFRIVASDIVELSPEIDNSGVSSIVAAKVLRSLIMSVQNMQ

SEQ ID NO: 25352 - protein, 634 aa, Prochlorococcus marinus subsp. pastoris str. CCMP1986
MGKVVGIDLGTTNSCVAVMEGGKPTVIANAEGFRTTPSVVAYTKNQDQLVGQIAKRQAVMNPENTFYSAKRFVGRRVDEVNEESKEVSYGIEKAGSNVKLKCPVLDKQFSPEEVSAQVLRKLSEDAGKYLGENITQAVITVPAYFNDSQRQATKDAGKIAGLEVLRIINEPTAAALAYGLDKKSNERILVFDLGGGTFDVSVLEVGDGVFEVLSTSGDTHLGGDDFDRCIVDHLASIFKSNEGIDLRQDKQALQRLTEAAEKAKIELSNATQSEINLPFITATPEGPKHLDLNLTRANFEELASKLIDRCRVPVEQALKDAKLSTGEIDEIVMVGGSTRMPAVQELVKRVTGKDPNQTVNPDEVVAVGAAIQGGVLAGEVKDILLLDVTPLSLGVETLGGVMTKMITRNTTVPTKKSETYSTAVDGQTNVEIHVLQGEREMASDNKSLGTFRLDGIPSAPRGVPQIEVTFDIDANGILSVTAKDKGSGKEQSISITGASTLSDNEVDKMVKDAESNASVDKEKREKIDLKNQAETLVYQTEKQLGELGDKVDASAKAKVEEKSKALKEATSKEDYEAMKKLLEELQQELYAIGSSVYQQPGNQPPAPGTPDSNESNDKGGDDDVIDADFTETKD

SEQ ID NO: 25353 - protein, 404 aa, Prochlorococcus marinus subsp. pastoris str. CCMP1986
MQQVKKVVLAYSGGVDTSVCIPYLKNEYGISEVVTFVADLGQGDDLEIVRQKALNSGATKSVIGNLVDNFVEKYAFPAIRANALYGEKYPLSTALARPLIAENLVNLARELNADAVAHGCTGKGNDQVRFDLAIHALGPDLQIITPAREWKMSREEAILYGEKFGIPAPVSKKSPYSIDVNLLGRSIEAGLLEDPMQEPDEDVFDMTSSINNAPNAPKDVEIIFQNGFPIAIGNEFLSPVEIIQKANSLAGEHGFGRIDMIEDRVVGIKSREIYEAPGLLLLIKAHKELESITLNPDVLDFKNIVEKKWGQLVYQGFWFGPLKQALDGFIDSTQSSVNGKVKIRLHKGNAIVIGRSSQNNSLYREDLATYSKDDIFNHKQAEGFIYMWGMSNKIWAELNSKKNK

SEQ ID NO: 25354 - protein, 595 aa, Prochlorococcus marinus str. MIT 9313
MALLVQKFGGSSVGNVERIQAVAERIATSKDLGHDLVIVVSAMGQTTDELTALAKVISSNPPQREMDMLLATGEQVSISLLSMALHELGIPAISMTGAQVGIVTESAYGRARILDVRTERLQSLLSTGKVVVVAGFQGTSLSSVGTAEITTLGRGGSDTSAVAIAAALGADACEIYTDVPGVLTSDPRQVSDAQLMQEVSCDEMLELASLGASVLHPRAVEIARNFGVALVVRSSWSNEAGTKLTSKSKRPIGREGLELGRPVDGVELAEGQAVIALSHVPDQPGVAATLFENLSSDGVNVDLIIQSTHEGNSNDIAFTVAEADLAKAHSLCEGLLKSVGGQLSAEAGMSKLSISGAGIMGRPGIAASLFDTISRAGINLRLIATSEVKVSCVIDATLGSKALRAVSTAFELSDSQVRINPLGNGKGEPEVRGVALDQGQAQLSVRGVPNRPGTAAALCSAMAEAGISLDAIVQSERQHDDGSRDISFTLKRDEREQANKTLAPLLAQWPGANLEDGPAIARVSAVGAGMPATAGTAGRMFRALADAKINIAMIATSEIRTSCVVAEPDGVKALQSVHKGFGLGEEADHPVQSNS

SEQ ID NO: 25355 - protein, 316 aa, Prochlorococcus marinus str. MIT 9313
MSPDAMESLPEGYRSGFVALIGRPNVGKSTLVNQLVGEKVAITSPVAQTTRNRLRAIVTTSEAQMVLVDTPGIHKPHHLLGERLVQSARAAIGEVDLVLLLLEGCESPGCGDAFIVELLRQQDLPVLVALNKWDRVAEQQQDPAEEAYRQLLADSAWPLIRCSAISGEGCNGLVEALVGHLPLGPQLYPAEMVCDQPERVLLAELIREQVLMHTREEVPHSVAVSIDRVEEMPVANGRPGRQGRTAVLATVLVERKSQKGILIGKGGSMLKTIGQGARLQMQTLIDGPVYLELFVKVVPDWRSKPARLAELGYEGK

SEQ ID NO: 25356 - protein, 638 aa, Prochlorococcus marinus str. MIT 9313
MNQRWRLIALWLLPIGVALLLAWQILGNGKLTGEQPSNATLAPRNAAVTRMSYGRFLDYVEAGRVTAVDIYDGGRNAVVEAVDPELDNRVQRLRVDLPGLAPELINTLKSEGISFDIHPARTTPPALGLLGNLLFPLLLIGGLILLARRSSSMPGGPGQAMQFGKTKARFAMEAETGVKFDDVAGVTEAKQDLEEVVTFLKKPERFTSVGAQIPRGVLLVGPPGTGKTLLAKAIAGEAGVPFFSLSGSEFVEMFVGVGASRVRDLFKRAKENTPCLIFIDEIDAVGRQRGAGIGGGNDEREQTLNQLLTEMDGFEGNSGIIIIAATNRPDVLDSALMRPGRFDRQVSVDAPDIKGRLAILEVHARDKKLEEDLSLKNVARRTPGFTGADLANLLNEAAILTARRRKKAISLDEIDDAVDRIIAGMEGHPLTDGRSKRLIAYHEVGHALIGTLVKDHDPVQKVTLIPRGQAQGLTWFAPDEEQMLVTRAQLKARIMGALGGRAAEDVVFGDAEITTGAGGDIQQVASMARQMVTRFGMSDLGPVSLESGNQEVFIGRDLMTRSEISDAISRQIDEAVREMVKHCYSETVKIVKQHREAMDRLVEILIEKETIDGEEFVSVVAEFTSVPEKERSIPILQS

SEQ ID NO: 25357 - protein, 399 aa, Prochlorococcus marinus str. MIT 9313
MDSSSSCPSEIYLDACATTPPRPEVIQRILEVQESAWGNPSSLHGPGLIAAELLERSRQKIASCLMASSTELVLTSGATESIHLGLLGMARSMQSGRLVISAVEHPAVLAAAQALKREGWEVCYWPVDPLGRVTLEDLDLMLAAPTRLVSIIWGQSEVGTIQPIETIGLACRERGIVFHTDATQVLSQGLLHWADLPIDLLSASAHKFQGPKGIGLLLLRPELIDVLQPLQGGGGQEQGLRAGTESVALAAGMAMALEQLKLSRSECADVELADQVKVQRMRDSLRINLQNFPGLHFTGDPINRLPHHISMLVGSGDDQPISGRAVVRELSRLGVATSSGSACMAGQPKNSAVLQAMQIKPEWLQSGLRFSLGSWLDETQLDQIPDLLQQAMIAAASPE

SEQ ID NO: 25358 - protein, 392 aa, Prochlorococcus marinus str. MIT 9313
MPLPPHLSDRVVALQPSLTLAISARAKALQQEGRDICSLSAGEPDFNTPEFIIDATVKALRDGITRYGPAAGDPELREAIATKLSKENTVPTNAEQVLVTNGGKQAIFNLFQVILNPGDEVLIPAPYWLSYPEMARLAGAKVTTLPSTPENGFCLDLNNLEASIGPKTRLLLLNSPGNPTGRVMARKELETLADLLRDHPQILVMSDEIYEFILEEGQQHYSFSAIAPDLSNRTFIVNGFAKGWAMTGWRLGYLAGPADAVKAATALQSQSTSNVCSFAQRGALAALQGSRECVKKMVKSYNTRRELLTSGLLSLEGMSLVPPKGAFYAFPKLPPESLDSVSFCEQALENHGLAMVPGAAFGDDSCVRLTCAVSPETICDGLERLRKALKQS

SEQ ID NO: 25359 - protein, 592 aa, Prochlorococcus marinus str. MIT 9313
MFSSSEAGFRRLLPLLRPHLRRLIWGGVCMLIYVGCWPLLAWLAGQLIPAIGAGKLAQVVQVIAIALTVFLVQKLAQFGQDTMLAGPALRVSQDLRRDLFAQLQQVELGALEKLSSGDLTYRLTEDADRVGEVIYKTIQDTTPSALQLVAVFGYMVFLDWQLSLATLLLAPMVAILVSQFGARVMRAAERSQRQVSDLAGLLGEAIQGLPLVRAFAAEPWLQKRFDAEVDLHRQARYQTLRLLALQHPVVGFIEAAGILTVLAIGAARIQTGGMDGQSFSSYVAALLMLIDPISHLTTNFNEFQQGQASLRRLREIEREPQEPPDIDEAEPLGRLKGDLVLRHVSFAYVNEKQVLHDLSLEVKAGQTVALVGPSGAGKSTLFSLLLRFNTAQQGKILLDGHELIQVKAQELRHQVALVPQRTTVFSGSVEEAILFGRNVSKEKVKEAAILANAHDFIMSLPEGYSTQLEERGTNLSGGQLQRIAIARAVLGNPAVLLLDEATSALDAEAEAAIQLGLRRAMQGRTVLVIAHRLATVQEADQIVVLEQGRISDRGSHDELMARTGRYRELCERQFIRDLQSVSKKDKGIVRIP

SEQ ID NO: 25360 - protein, 349 aa, Prochlorococcus marinus str. MIT 9313
MMRRLTTGLVTLSLLATGCASIDQGGGSRLELISKRGQLNCGVSGKIPGFSFLLGNGRYEGLDVDICRAMAAAFIGDATKVQYRPLTAPERFTALKTGEIDLLSRNTTLNLSRDAAGGNGLTFAPVVFHDGQGLMVKRSSGIKGLQDLKASNICVGSGTTTEQNLNDAFQERKLSYTPIKYQDLNQVVAGYLQGRCLAMTSDRSQLAAARSGFPDPEQHIILDVVLSKEPLAPASVGGDQRLGDAIRWVVFALFAAEEFGITQENVDSKLEQAQTNPQMSSLRRFLGVDAGLGQKLGLVDDFVVKVIRATGNYGEIYNRHLGPNSSVPIPRGRNRSYRQGGLLIAPPFN

SEQ ID NO: 25361 - protein, 404 aa, Prochlorococcus marinus str. MIT 9313
MNSFSSSKHPQPGTQIDAVLDPVIPALNELVAKTPGTLSLAQGMVNWPPPIAVKLAMNNALLNQESSLNRYGPARGDPDLLELIKQKLMMQNGLDLAESMVMVTAGSNMAFHAIAQVLCDPGDEVILPLPYYFNHFMAIQLAGGVPVPVNAGLIPNPGLIEAAITKRTRAIVTISPNNPSGIVFPQTLLAAINRICAQHGLLHISDEAYEDFVFGDVPHWSPGSLPGAGNHTVSLYSFSKAYGMAGWRLGYMSVPIVWSKALEKVQDTVLICPPRFCQRAAIAALLDGSDWVRQNVSQLMSRYQLLLKRFAASNDRPWRFLHEPNGAFYCLLEVDCGCNGDTLMRQLVRDYRVATIGGCSFGFKNESCVLRISVGMLEGAELIDAFNRLEAGMLNAVQQGDRTT

SEQ ID NO: 25362 - protein, 386 aa, Prochlorococcus marinus str. MIT 9313
MNKNNLPEEVSHCAHSIAPEKVVRGERAWEESHQLIASICRSPLLLGRSIATAELRQGLLNNLRDLGLNTVSAELKHDCCEMDLKRINALALYNSCDGVIAAGGGKVLDAGKLLAHRLSIPCITVPLSAATCAGWTALANIYSPTGAFQRDQVLARCPHLMIFDHGLVRQAPPRTLASGIADAIAKWYEASVSNGSSNDGLIQQAVQMARVLRDQLLLDGPEALKDQNSLAWIRVAEACALTAGLIGGIGGSRCRTAAAHAVHNALTQLKDCHEVLHGEKVGYGILVQLRLEEIIGGHQLAGQARRQLIPFLKGLDLPVNLEDLGLSNLSLHELHEVCQFACQKGSDLYQLPFPVNSNALLEALLGASDNGPVPVESTVTKRIAAS

SEQ ID NO: 25363 - protein, 466 aa, Prochlorococcus marinus str. MIT 9313
MGFLPLLTRDRGRRLHLPAHGRGAGLPDDLRAMLRHRAGIWDLPELPELGGPLMQQGAVAESQRQAAIAIGAERGWYGVNGATGLLQAALLAIARPGQAVLMPRNVHRSLIQACVLGDLTPVLFDLPFMVDRGHVLPPDGPWLKDVLNELPIAGVEIAAAVLVHPTYQGYATDLKPMVVELHSRGWPVLVDEAHGAHFASRVDASLPDSAITAGADLIVHSLHKSAAGLTQTAVLWSQGDRVDPKAVERSLGWLQTTSPSALLLASCEASLSDLCKPAGLHKLGTRLKDARELAVQLRQLGLPLLENQDPLRLILHTAAEGISGLEADAWLMARGLVGELPEPGCLTFCLGLAPQRGLVRLMHRRWRGLLAAQGKGLPLPVFTPPPLPRITAPAMACGLAWRAQSRRVSIADAVGRVAAELICPYPPGIPLLVPGEKLDHRRVDWLLEQQNLWPDQIAGTVKVMAL

SEQ ID NO: 25364 - protein, 332 aa, Prochlorococcus marinus str. MIT 9313
MTSFLTAARTEQESISYDMQRLRLFSGTSNPALAREIAAYLGVPDGPRICKRFADGELYVQIQESIRGCDVFLIQPTCAPVNDNLMELLIMVDACQRASARQITAVVPYYGYARADRKTAGRESITAKLTANLLVKSGVNRVLAMDLHSAQIQGYFDIPCDHIYGSPVLVDYLAAQELNEVVVVSPDVGGVARARAFAKQMRDAPLAIIDKRRSGHNVAESLTVIGDVAGKTAILIDDMIDTGGTICSGARLLRQQGAKRVIACASHAVFSPPACERLSEEGLFEQVLVTNSIPIAAERHFPQLQVLSVANMLGEAIWRIHEESSVSSMFRG

SEQ ID NO: 25365 - protein, 635 aa, Prochlorococcus marinus str. MIT 9313
MGRCLPDLKDQSGRQRLLSMTHTKAHEDVSCSPEKSASEISSTSADDGLTTVAEATNQNNSGDGSVSVAAEACEETEATELVSEFDCFGFSEPLLKTLAEKGYKQPSPIQKAAIPELMLGRDLVGQAQTGTGKTAAFALPLIERLHDHGSRPQVLVLAPTRELAMQVADSFRAYAVGHPHLKVLAVYGGADFRSQINTLKRGVDVVVGTPGRLMDHMRQGTLDTSGLRCLVLDEADEMLRMGFIDDVEWILEQLPEERQMVLFSATMPSEIRRLSKRYLHEPAEITIKSRDQEARLIRQRCITLQNSHKLEALRRVLEAFTGEGVIIFARTKVITLTVAEALEAAGHDVAVLNGDVPQNQRERTVERLRKGSVNILVATDVAARGLDVDRISLVINYDIPFDSEAYVHRIGRTGRAGRSGEAILFVNPRERRFVGGFERAVGQPIEPMDIPNNAAINQSRLDRLRQRLTTAAKTERDNSEETALLQELIQRVVQELSLSPEQLALAALEFAVGPGPILVQADEGWLQQSTQRNRRNDRHESRGGSGRRPERSSRPPEDHMERFRVEVGHRDRVKPGNLVGAIANESGLEGRMIGRIQIFESHSLVDLPKGMPEDVFKDLKRLKVMNRELHIQRAS

SEQ ID NO: 25366 - protein, 107 aa, Prochlorococcus marinus str. MIT 9313
MDPTTKTRIEALIQSSPIMVFMKGTKLMPQCGFSNNCVQILNSLGMSFETFDVLSDMEIRQGIKDYSNWPTIPQVYVKGEFIGGSDILIEMYNAGELAEKLEIALNS

SEQ ID NO: 25367 - protein, 366 aa, Prochlorococcus marinus str. MIT 9313
MAFNQTEVVLGGIAHIPLVIGAFYIVKALFYRGQDGELAPFSFSYRQAAQRKSSSTTTSTEKPDTKSPPAQTAIPINLYKPKAPFEGTVLENYSLVKEGAVGRVNHITFDLAGSDPHLSYVEGQSIGIIPAGTDANGKPHKLRLYSIASTRHGDNLEGKTVSLCVRQLQYELDGKTIDGVCSTYLCDIKPGAKTKITGPVGKEMLLPDDEEANVIMLATGTGIAPMRAYLRRMFEPTERSKNGWKFRGKAWLFMGAPYTANLLYDEDFERYLREFPDNFIYTKAISREQQNPKGGRMYIQDRVMEYADQIFKMIENPKTHVYMCGLKGMEPGIDEAMTAAATAKGIDWSELRPQLKKAHRWHVETY

SEQ ID NO: 25368 - protein, 380 aa, Prochlorococcus marinus str. MIT 9313
MPRLLIQLESAMGETRVAASPDTVKKFLSLGSKVAIERGAGLAAGFVDAVYGNVGAELVTPGDEQFWGQTDLLLCVHAPSEISLQKLRPGATIVGLLAPYSNSALAAALKSAKLSAMALELLPRISRAQSADALSSQANIAGYKAVLLAAAALDRYFPMLMTAAGTVQPARVVVLGAGVAGLQAVATAKRLGAVVYVSDVRSAVKEQVESLGARFIDPPEIEQRPDESGGYAKQASEAFLAAQREQLSNQLAQADVVICTAQVPGRKAPRLISDLMLDRMRPGAVVVDLAVEQGGNCANTRPGETVDRNGVKLIGASDLPCSVPNHASALYSRNLVALLEPVLKDGQLSLNIEDELIAGCLISHNGEIRHNNVFNMGGSN

SEQ ID NO: 25369 - protein, 573 aa, Prochlorococcus marinus str. MIT 9313
MTGADALMDALRRNGVEIIFGYPGGAILPIYDAVYKAEQQGWLKHILVRHEQGGAHAADGYARATGRVGVCFGTSGPGATNLVTGIATAQMDSVPMVVITGQVPRPCIGTDAFQETDIFGITLPIVKHSWVVRDPGDLASVVAQAFFIAASGRPGPVLIDIPKDVGQEEFDYQPVEPGSVVPAGFHRFPAPELSSIEAALDLIDDAQRPLLYVGGGVISAGAHESLKGFAERHQIPVTTTLMGKGAFDERHPLALGMLGMHGTAYANFAVTECDLLIAVGARFDDRVTGKLDTFAPRARVIHFEIDPAEVAKNRRPDVAVLGDVGVSLVKLFDLSKQKSVELRTSAWLTRIESWKNLYPLMTPPEEGPIYPQEVLLAIRDLAPEAYITTDVGQHQMWAAQYLRNGPRQWISSAGLGTMGFGMPAAIGVQVALPDEQVVCIAGDSSILMNIQELGTLIEYNIPAKIVIVNNHWQGMVRQWQQSFYEDRYSATDMLPGMPDFVALAKAFRVGGVLITERKDLRSSLKQALATPGPMLIDVHVRRDENCYPMVPPGKSNAQMVGLSNHPELSGVSL

SEQ ID NO: 25370 - protein, 532 aa, Prochlorococcus marinus str. MIT 9313
MRRLMTKVLVSDPIDQAGIDILAQVAQVDQRVGLSEDDLKAMIGDYDALMIRSGTQVTADVIKAGARLRIIGRAGVGVDNVDVPTATQQGVLVVNSPEGNTIAAAEQALALMLSLSRHVPQAHASTMAGGWDRKKYVGNELYKKVLGVVGLGKIGSHVARVCNAMGMEVIAYDPFISADRAQQMQVRLSSLENLFEQADYITLHLPRTPDTENLVNAELLGKMKSTARLVNCARGGIIDESALADALTAGVIGGAALDVYAQEPLATDSPLRSVQERLILTPHLGASTTEAQENVAVDVAEQIRDVLLGLPARSAVNIPGLSAEIMERLKPHLQLAETLGLLVSQLSGGQLQELEVRLQGEFAQHPSQPLVIAALKGVLSSALGDRINYVNASLEAKGRGIRVLEVKDETSKDFAGGSLQLTTRGDQGGHSVTGAVFANGDLRITTIDEFPVNVSPSRHMLLTRHRDMPGIIGQLGSVLGEHNVNIASMQVGRRIVRGDAVMVLSIDDPIPPSLLVTIHAINGIKEAHPVTL

SEQ ID NO: 25371 - protein, 223 aa, Prochlorococcus marinus str. MIT 9313
MTLQLLLDSADPSKWEAWLPTGLFAGITTNPTLLRRAQQPCQLDHLKSLAAAAERLGCLELHLQAWGKHAIELAECGAALAQLTTPALTIHVKLPITQAGSQAASTLIAAEIPITFTACFEAPQVLIAAALGAQHIAPYLGRINDQGRDGYTELIAMQRALEGVGSSCKLLVASLRSRRDLSHLAAAGIDTFTISAELAEELFEVKATLDAAAAFEQDACSGA

SEQ ID NO: 25372 - protein, 379 aa, Prochlorococcus marinus str. MIT 9313
MDSSLLSAPIASIGVPTEIKADELRVALTPDGVKELVTKGLEVRVQAGAGAGAGIGDEAFADAGAKLVKREEAWAAHLVVKVKEPQEEEFGLLRQDMVLFTYLHLAAYPKVGEALLNAGTTGVGYETVQLENGSLPLLAPMSEIAGRLAAQVGAHLLERPHGGRGLLIGGCTGVQPARVVVLGAGTVGWNAARLAAAMDAEVMLLDRSPERLRSLEARRRGRLISVVNSRGLLERLIPTADLLIGAVLTPGGRAPTLVDEEMVKQMKPNSVIVDVAIDQGGCVATSQETTHTHPTVTIHGVQHYAVGNMPGAVPFTSTEALVSVTLPYILGIAGRGLEEAVTERPELLSGLNTIQGSVCHPGVAKALGLPPRHPMACLR

SEQ ID NO: 25373 - protein, 329 aa, Prochlorococcus marinus str. MIT 9313
MQFIDQARITVRAGRGGDGIMAFRREKYVPAGGPSGGDGGNGGNVVLEADGNLQTLLDFKYKRLFPAPDGRRGGPNRCTGASGKDLIIKVPCGTEVRHLYTGILLGDLTRSEDLLVVAFGGRGGLGNAHYLSNRNRAPEKFTEGRDGEEWFLQLELKLLAEVGIIGLPNAGKSTLISVLSAARPKIADYPFTTLVPNLGVVRRPSGDGTVFADIPGLIAGAAQGAGLGHDFLRHIERTRLLIHVLDGGAEDPVEDLLVVEKELVAYGHDLVERPRLLVLNKQELLDEQHQDQLVDALQAASGRSLILISAAMGLGLEGLLAQVWKELGV

SEQ ID NO: 25374 - protein, 262 aa, Prochlorococcus marinus str. MIT 9313
MISLDAPVLIEIRDLSACVDDQPILNGVNLTIRAGEIHALMGRNGSGKSTLSKVLAGHPAYKVTEGSVLYRGEDLLPLEPDERSRIGLFLGFQYPVEIPGVSNLEFLRVSTNARRLEQGMEELDTFAFEDFVRERLGLVQMDPAFLDRSVNEGFSGGEKKRNEILQMALLEPLVAILDETDSGLDIDALRIVAGGVNQLANVDNATLLITHYQRLLDLIQPDYVHVMAAGRIVRSGDKALALELEQRGYEWVDRELDALEMT

SEQ ID NO: 25375 - protein, 1527 aa, Prochlorococcus marinus str. MIT 9313
MSQDHRRSNWPYCDSSAPTAVVGEKDACGVGFLAQIDGVASNWILQQALRALNCMEHRGGCGGDADSGDGAGLLCAIPWSYLETVWSAVESANHPCGLGMLFMPRDAARRAEARCFCEQEAESLGLRSRGWREVPVDVAVLGPLARDTAPVIEQWLVQGSQPGDALEALLFRLRRRIGDRARQAWGEHANDLYVASLSSRTVVYKGMVRSEVLAAFYADLRDPRFEVSFAVYHRRFSTNTLPRWPLAQPMRLLGHNGEINTLLGNLNWARATEVNLDSVWGVDAADLKPVVNAAFSDSANLDATLELLVRSGRPIVDSLLTLVPEAFREQPELADKPEIQAFYEYSACTQEPWDGPALLVFSDGRSVGASLDRNGLRPARYCITSDGLVVMGSETGVVELEESRIIEKGRLGPGQMLAVDLEKGRLLRNWDVKQEVAGRYPYGEWLSQNRCKLGQKSWQQDSQLGDLELLQQQTAFGFTAEDLELIIDSMAAGAKEPTFCMGDDIPLAVLSDKPHLLYDYFKQRFAQVTNPPIDPLREKLVMSLEMHLGKRGSPLKPEAAAASLIHLETPILNEAELAACGQLEFPTTTLSTLLPVHYGPSGLGDSLKRLCVEAADAVRDGSQIVVLSDRGVVASTTYIPPLLAVGAVHHHLLKQGLRLNASLVVDTAQCWSTHHLACLIGYGASAVCPWLTWETTRHWWQHPRTQKLIETGKLPALTIDQAQANVRKAQEDGLRKILSKIGISLLASYHGAQIFEAIGIGADLIELAFKGTTSRVAGLSLNDLASETLIFHAKAFPELDRTKLEFMGFVQYRSGGEFHLNTPDMSKALHAAVRAGPGYDHFSTYKNLLENRPATALRDLLTFRLAPTPLPLDQVESVESICARFCTGGMSLGALSREAHEVLAVAMNRIGGKSNSGEGGEDPARFKILDDVDLESRSETLPSIKGLRNGDTACSAIKQVASGRFGVTPEYLRSGKQLEIKVAQGAKPGEGGQLPGQKVDPYIAKLRNSKAGVALISPPPHHDIYSIEDLAQLIHDLHQVHPAAKVSVKLVAEIGIGTIAAGVAKAKADVIQISGHDGGTGASPLSSIKHAGSPWELGLTEVHRSLLENGLRDRVLLRADGGLKTGWDVVIAALLGAEEYGFGSVAMIAEGCIMARVCHTNKCPVGVATQQEGLRKRFPGVPEHVVNFFLFVAEEVRQLMSVLGVARLEDLIGRTELLEPRSLNLVKTQTLDLSCLLDPIPGAVDRAWLIHDAKAHDNGPILEDQLLADAELMAAIDSHGHIARNLAIVNTDRSVCARISGEIAERHGNKGFRGQFDLSFEGAAGQSFAAFLLQGVNVRLEGEANDYVGKGMNGGRITLVPPSSADQSGSQVILGNTCLYGATGGELFALGRAGERFAVRNSGVQAVVEGAGDHCCEYMTGGVVVVLGSTGRNVGAGMTGGVTFLLDEQGMVSDRVNKEIVEICLLTTIEQEAILKTLLEAHLAQTGSTKAKAILANWISWKALFKVLVPPSEKVNVGLTLLEKVAA

SEQ ID NO: 25376 - protein, 390 aa, Prochlorococcus marinus str. MIT 9313
MIASPSASAQSPGVIAPYGGKLVDLMVATDQQEAVKASANYVLECSDRNACDLELLVGGGFSPERGFMHQGDYDAVVAGHRTLSGYLFGLPIVMDTDREDVAIGDRVLLSYKGQDLAVLQVEDKWEPDKVVEAKGCYGTTSLEHPAVRMIATERKRFYLGGTLQGLELPKRIFPCKSPAQVRAELPAGEDVVAFQCRNPIHRAHYELFTRALHASNVSENAVVLVHPTCGPTQEDDIPGGVRFQTYERLAAEVDNPRIRWAYLPYAMHMAGPREALQHMIIRRNYGCTHFIIGRDMAGCKSSLSGDDFYGPYDAQNFAQECAVELAMETVPSLNLVFTEEEGYVTAEHAEARGLHVKKLSGTQFRKMLRSGEEIPEWFAFRSVVEVLRAT

SEQ ID NO: 25377 - protein, 222 aa, Prochlorococcus marinus str. MIT 9313
MANSPAPPQKTLLEVIRELDGASNEMVERSKTIFFPGDPAEKVYLIRRGAVRLSRVYESGEEITVALLRENSLFGVLSLLTGHRSDRFYHSVAFTRVEMITAPATSVRQAIENDTSVGLLLLQGLSSRILQTETMIETLTHRDMSSRLVSFLLVLCRDFGVPGEQGITIDLRLSHQSIAEAIGSTRVTITRLLGDLRNSGLVQIDRKKITVLDPIALAKKFN

SEQ ID NO: 25378 - protein, 492 aa, Prochlorococcus marinus str. MIT 9313
MTTAPLPRSRRRTVRLQEASLLEGPMLLLRSIRGFSSNRSLTWLACVPLALFGLGLFNLSAHAAEMPELNAAFLANNLWLLVATILVIFMNAGFAMVEAGMCRQKNAVNILAKNLFVFALAVSSYWFIGYSLMYGDPVSAGWLYFNGLFFDPAVTPELISEAGLVPSVDFLFQAAFAGTAATIVSGLVAERVKFGEFVVFSLVLTGFIYPIAGSWEWNGGWLNTAFGEGVEFIDFAGSSIVHSVGAWAGLVGAMLLGPRIGKFVGGKAQAIPGHNMSIATLGALILWIGWYGFNPGSQLAMDQWVPYVAVTTTLAAAGGAIGATIISTLCSGKPDLTMIINGILAGLVSITAGCGNLTLVGAWVAGLIGGFIVVFSVSALDSLGIDDPVGAFSVHGICGIWGTLVIGLWGFDIQGDGSALGLFVGGGASQLWAQFVGCAAYAIWTVVTCWIAWSVIGALFGGIRVTEAEEIEGLDIGEHGMEAYPDFASAGN

SEQ ID NO: 25379 - protein, 347 aa, Prochlorococcus marinus str. MIT 9313
MAVVCRRITASSRTYSLSALTRCLQEEAAAIAVAAERLSSSQVEKALVLLERCSDQRAKLVITGVGKSGIVARKIAATFSSIGLMALYLNPLDAMHGDLGVVAQEDVCLLLSNSGETAELLEVLPHLKRRGTARIALVGKPDSSLARGSDVVLEASVDREVCPLNLAPTASTAVAMAIGDALAAIWMERRNISPADFAFNHPAGSLGKQLTLTASDLMVPVEKVQPLQPNTSLQEVICKLTQDGIGSGWVEDPSTAGLLLGLITDGDLRRALRDHSAENWASLSAAELMTADPITVDADLLAVEAIKQMECNRRKPISVLPVVGPDSSGNLLLGLLRLHDLIQAGLT

SEQ ID NO: 25380 - protein, 248 aa, Prochlorococcus marinus str. MIT 9313
MTATSPSKETILVVDDEASIRRILETRLSMIGYQVFTACDGNEALDIFHNCEPDLVVLDVMMPKLDGYGVCQELRKESDVPIVMLTALGDVADRITGLELGADDYVVKPFSPKELEARIRCVLRRVEKEHVAGIPNSGVIQVAELRVDTNKRQVFRGDERIRLTGMEFSLLELLVSRSGEPFSRGEILKEVWGYTPERHVDTRVVDVHISRLRSKLEDDPANPELILTARGTGYLFQRIIDSLAPEGL

SEQ ID NO: 25381 - protein, 392 aa, Prochlorococcus marinus str. MIT 9313
MLPSLSSGSLKQSPLCLDYQATTPCAAEVVKAMAAYWSEDWGNASSRQHRSGLKAAAAVSLAREQLACHLRVTPQRVIFTSGATEANNLALVGHARARAEQRGAPGHLITLVTEHHAVLDPLRQLQKEGFRLTELQPRADGLLRPEQLAEAFENDTLLVSVMVANNETGVIQPLAELSELCRKRDVVLHSDAAQAFGHVHLDADALGLDLVSISGHKLYGPKGIGALVVRPEVPIKPLQWGGGQEQGLRPGTLPVPLIVGLAKAVELAMEDITSRQDKLCTLRNQLWDGLRERLPDLILNGSLEHRLPHNLNITIPGVRGSNLHQQLRPLIACSSGSACSQGAPSHVLMALGRTSAEAEASIRLSLGRNTSSEEITQAVESISNVVTDLRAR

SEQ ID NO: 25382 - protein, 280 aa, Prochlorococcus marinus str. MIT 9313
MAANLLAAGYELKVHSRSRAAEQNLALQGSRSCSSPAEAAADSQALLICVSDDEAVEEVLFGSQGAASMLSSGAVVVDFSTITPATSISMAERLADQGVTYLDAPVTGGTEGARAGTLTVLVGGNKQALARVQPLLEVIGERIHHFGSVGRGQQVKALNQVLVAGSYAALAEAIALGQQLGLPMQEVITALQHGAAGSWALKHRSTAMLEDHYPLGFKLALHHKDLGIALETAERAGLQLPITSQVKSMEANLIEHGHSEEDVSVLRRWFDQQQAESQPF

SEQ ID NO: 25383 - protein, 304 aa, Prochlorococcus marinus str. MIT 9313
MPQNTTTTATRFDSEGAIFMAARRDPTGCNVGLFGVPYDGTSSFRPGSRFGPTAIRDVSNGLETYCPQLDLDLEDLAFTDLGALEIPCGDPKPVVEAVKKATQNVLKMGLRPLMLGGEHSISSGAVAAITELHSDLVLLQLDAHADLRQEYLGARHSHACAMRRCLEVLPSAQLLQFAIRSGTRAEFQELHDQQRLVNHNPGQAATELAKALAPHQGKPLYLTVDLDWFDPSVLPGTGTPEPGGFLWRDFAVVVDVLRHHQLVGADVVELAPQLDPSGMSSVLGAKVTRSLLMLLSLSTRSEQK

SEQ ID NO: 25384 - protein, 375 aa, Prochlorococcus marinus str. MIT 9313
MLQAFQQRRWPLVIVWVLIIAAIVAAPAVVSVFGLNLLGRFLSLSIVALGIDLIWGFTGLLSLGQGIFFALGGYAAAMYLQLNSSSEQPNGIPEFFGLYGVDQLPGFWQPFHSPWFTLIAIWLIPALLAALLGNLVFRNRIKGVYFSILTQAALLVFFNFFNGQQKLINGTNGLKTDVTELFGQQVGSAFMQRGFFWLTAVMVILAWLAVRWVVRGRFGEVLIAIRDDEPRLRFAGYNPTLFKTIVFAMAGGLAGIGGALYTVQSGIVSPQYMTVPFSIDMVIWVAVGGRGTLIGAILGALVINLARSQISTVWPEGWLFILGGLFILVVTALPEGVVGWWQAGGPRNLLTRLGVARRIGTYPRLEMDGKEEVKS

SEQ ID NO: 25385 - protein, 542 aa, Prochlorococcus marinus str. MIT 9313
MVISSPAKQFLQGKKLNKIEQNKAFKDGLDVGDELENFAQLGWEQVDKTDLELRLKWYGMFWRPKTPGKFMLRLRIPNGVLNSHQIKVVASIVGRYGEDGSCDITTRQNLQLRGVLLSDLPEILKRLEEAGLNTIQSGFDNPRNVTGNPLAGIDPLEIVDTRPYTTELQNFLTNQGKGNHEFSNLPRKWNTAVAGARDNFLLHNDIIFHPVEHDGVMGFGVWLGGILSSQMNDYALPLNAWVKPNEICRLTGTILTLWRDNGERNNRPKGRFRMYLDSVGIEAFRTMVVEKFGPLTPDPGSVFEDKPRSFYGIHPQKQTGLHYAGMHVPVGRLNAEDLQDLASASLNYGSGEIRLTEDQNIILVGLSTTNLDKFQADPLLQRFPLEPGSIAAGTVSCTGNTYCSFALTNTKDQAMAMAHELDAELILPEEIKVHWTGCPNSCGQAYMGAIGLTGTKARAPNGGQGMVEAYDLSLEGRQGPDAQIGTLHRKGIPGSELKDVLRELLIERFGAQPRSQPKQNSDPFSNFMNWFSNLGENSSPSP

SEQ ID NO: 25386 - protein, 296 aa, Prochlorococcus marinus str. MIT 9313
MDYVLPNELVDGMITAGGKKSSVSIKNLLVRGFYSGAILGLATCLAITVGVQSGMPFLGSVLFPFGFASIVLFGMELVTGNFALLPMATWAGKSTWQATFRNWIWVWIGNFIGCALVALLLATSLTSAGTVEPLAAADGGKGWAVIAAKIMALNKANVVAKYQDLGSTGFFLAFLRGMIANWLVCLGVTMALVSKSVPGKILACWLPITAFQTMGMEHIVVNMFLHTAGPMLGSGVSFGQVIVWNFIPVTLGNIIGGMVFIGMLFYSTHRTQMSNVLPTVHDEKLERELAAELGAR

SEQ ID NO: 25387 - protein, 634 aa, Prochlorococcus marinus str. MIT 9313
MGKVVGIDLGTTNSCVAVMEGGKPVVIANAEGFRTTPSVVAYTKNQDQLVGQIAKRQAVMNTDNTFYSAKRFVGRRVDEVNEESKEVSYEVEKSGSNVRLKCPVLDKQFSPEEVSAQVLRKLAEDAGKYLGENVTQAVITVPAYFNDSQRQATKDAGKIAGLEVLRIINEPTAAALAYGLDKKSNERILVFDLGGGTFDVSVLEVGDGVFEVLSTSGDTHLGGDDFDKVIVDHLAATFKANEGIDLRQDKQALQRLTEAAEKAKIELSSATQSEINLPFITATSEGPKHLDLTLTRAKFEELASKLIDRCRVPVEQALKDAKLSSGELDEIVMVGGSSRMPAVQELVKRVTGKDPNQTVNPDEVVAVGAAIQGGVLAGEVKDILLLDVTPLSLGVETLGGVMTKMITRNTTVPTKKSETYSTAVDGQTNVEIHVLQGEREMASDNKSLGTFRLDGIPPAPRGVPQIEVTFDIDANGILSVNAKDKGSGKEQSISITGASTLSENEVEKMVKDAETNASADKEKRERIDIKNQAETLVYQAEKQLGELADKVDADSKAKVEDKRVKLKAAIEKDDFDAMKSLLEELQQELYTVGASVYQQAGAAAAESGADAGAAGAGDSSSGDDVIDAEFTESK

SEQ ID NO: 25388 - protein, 401 aa, Prochlorococcus marinus str. MIT 9313
MGRAKKVVLAYSGGVDTSVCIPYLKHEWGVEEVITFAADLGQGDELDPIRLKALDAGASQSLVGDLIEPFVEQFALPAIRANALYEGRYPLSTALARPLIARQLVEVAREVGADAVAHGCTGKGNDQVRFDLAIAALAPDLKVLTPAREWSMSREEAIAYGERCGIPAPVSKKSPYSIDLNLLGRSIEAGPLEDLMVAPPEEVFAMTSSIDAAPSQAQDIEISFEAGNPVAIDGVRLDSVGLIKEANRLAGRHGFGRLDIIENRVVGIKSREIYETPGLLLLIRAHQELESLTLAADVLRMKRQLEMQWAELVYQGLWFSPLKDALDGFMDRTQTYVNGLVRIRLQKGNAMVIGRSSDTNSLYISEMATYGSEDNFDHRAAEGFIYIWGLPSRLWAAARRG

SEQ ID NO: 25389 - protein, 600 aa, Synechococcus sp. WH 8102
MALLVQKFGGTSVGSVERIQAVAERISRSREEGHDVVVVVSAMGHTTDELTGLAAAITDTPQQREMDMLLASGEQVSIALLAMALNQQGVAAVSMTGPQVGIVTESTHGRARILEIRTDRIRGHLADGRVVVVAGFQGTSSGIGGVAEITTLGRGGSDTSAVALAAALNADACEIYTDVPGVLSTDPRKVADAQLMDEISCDEMLELASLGASVLHPRAVEIARNYGVLMVVRSSWSEAPGTRLTSRRGRPLNQTGLELGSPVDGVEQMDHQAVIALSHIPDQPGIAARLFETLSGAGINVDLIIQSTHEGSSNDITFTVAEADLEAARSVSQTVLDSLGGELAAEGGMTKLSISGAGIMGRPGIAAGLFHCLSQQGINLRLIATSEVKVSCVIDADSGRKALQAVQEAFDVADAQVELNPDLSISDVPEVRGVALDRDQAQLSVRHVPDRPGTAAALCSALAERGISLDAIVQSERQHTDGSRDISFILRKEDRSRADVALAPLLAQWPGAALEEGESIARVSAVGAGMPATPGTAGRMFRALADAGINIALIATSEIRTSCVVAEQDGVAALQAVHAGFGLGGQEQHTAQGSASPLDS

SEQ ID NO: 25390 - protein, 339 aa, Synechococcus sp. WH 8102
MDSTGATPWHRSRSVAADESLETVLNSWLAPALEPHRQQVSLIGHRVVHGGERFTAPTRITPEVEATLAELIPLAPLHNPPALKGLAWARHWAPELPQWACFDTAFHSSLPAAAHTYAIPSEFRNKGFRRFSFHGINHQHVSETVAAQCRKQGKNPSQLRLISAHLGAGASLAAVKGGRCIDTTMGFTPLEGLVMATRSGNVDPGLLLELMREGYSEDQIATILQKESGLKGLSGLSGDMRTIREAAANGHNGAIRALDVFRHRLLQLLGAMAASLGGVDVLALTGGIGEHDKQLKLELEKALSWWGDFLTVVIPEDEEGMIARLCQRHSETPASAAVG

SEQ ID NO: 25391 - protein, 339 aa, Synechococcus sp. WH 8102
MTMVRSSRIPALSALTRCLQEEASAIAAAAERLSSDQVEAALLLLERCADRKAKLVITGVGKSGIVARKIAATFSSIGLMALFLNPLDALHGDLGVVAPEDVCLLLSNSGETEELLEVLPHLKRRGTGRIAIVGRADSSLARGSDVVLEAGVDREVCPLNLAPTASTAVAMAIGDALAAVWMERRGISPADFALNHPAGSLGKQLTLTAADLMVPVSKLHPLHPHTPLPEVIGGLTRDGIGSGWVEHPEQPGSLVGLLTDGDLRRALQDHSADSWSSLTAADLMTRDPITVNGDVLVVKALEQMEHNRRKPISVLPVVGEQKRLLGLLRLHDLVQAGLA

SEQ ID NO: 25392 - protein, 515 aa, Synechococcus sp. WH 8102
MTIQSSSQRSWWRQPPLWVGATPLLIFLVVSAIDLALAKQFTDNGKAVVSTALGGLWQWMVLLVFLIAVVIAISPVGKLRLGGAEAKPSLKLFDWCAVLICTLLAGGGVFWSAAEPLYHFQTPSPVFDGIQGGTAEAVDPALAVSFLHWGFLAWALVATTTTITFSILERRGEPLRPRTLLVNVVPRGWVDGPIGHLADGLSVVAAIAGTVGPLGFLSLQLSNAAGQLPWLSDSAGLQSLVVVLLTAVFASSTVSGIQKGIKWLSELNVWLTLTMAAGLLLLGPGLWLIQHFFSGFLTYLIHLPRMALTPNVAPGNWINGWTVFYWGWFLGYAPLMGLFTAGVSRGRSIRELVLAVAILCPIVTNIWFTLLGGTGLQLELAGAGISEALARNGAAAALLAILSQLPLAGLLIPIGLVLVVLFMCTSADSMSYAAAMVVSGRNEPPAPLRLFWALMIGSLTLVLLRIGSGLGDSTSIDALQAFIVITAVPVTPLVLATLWSAPRLAWKEAQREGLN

SEQ ID NO: 25393 - protein, 490 aa, Synechococcus sp. WH 8102
MTTAFHSPTSRRRKTLQEANLLEGPLMLIKSIRGFSSNRAMTWLACAPLALMGLGIFTLSAKAEELPDLNAAFLANNLWLLVATILVIFMNAGFAMVEAGMCRQKNAVNILAKNLFVFALAVTAYWFVGYSFMYGDAAIDGWLYFGGLFFDPTVTAETISDAGLVPTVDFLFQAAFAGTAATIVSGLVAERIKFGEFVVFALILTAFIYPVAGSWEWNGGWLNSVGNAEFIDFAGSSIVHSVGAWAGLVGAALLGPRIGKYVGGNVQAIPGHNMSIATLGALILWIGWYGFNPGSQLAMDQWVPYVAVTTTLGAAGGAIGATVISTITSKKPDLTMIINGILAGLVSVTAGCGNLTLTGSWVAGLVGGIIVVFSVSALDSAGIDDPVGAFSVHGVCGVWGTLVIGLWGFDVQGDGSPLGLLVGGGIEQLGIQALGTAAYAIWTVVTCFIAWQIIGALFGGIRVTEQEETEGLDIGEHGMEAYAGFSTTNN

SEQ ID NO: 25394 - protein, 390 aa, Synechococcus sp. WH 8102
MTASAPASAQRSGVIAPYGGSLVDLMVPQEEREAVKATTTKSLECSDRNACDVELLVVGGFSPLRGFMHQEDYDAVVSGHRLVAGQLFGLPIVMDTDREDVVVGDTVLLTYKGQNLAVLQVEAKWEPNKVVEAKGCYGTTSIEHPAVRMITMERKRFYLGGSLNGLELPQRVFPCKTPAEVRAGLPDGEDVVAFQCRNPIHRAHYELFTRALHAQNVSENAVVLVHPTCGPTQQDDIPGAVRFQTYERLAAEVNNDRIRWAYLPYAMHMAGPREALQHMIIRRNYGCTHFIIGRDMAGCKSSLTGDDFYGPYDAQNFAKECAPELTMETVPSLNLVYTEEEGYVTAEHAEARGLHVKKLSGTQFRKMLRGGEEIPEWFAFKSVVEVLRAA

SEQ ID NO: 25395 - protein, 303 aa, Synechococcus sp. WH 8102
MCSTSCRWSSPPRRTSCWPSSSRDPWADLWLHILFSLSSSPVIRPDAELLLDINNLHASVEDQPILKGVNLQVRAGEIHAVMGRNGSGKSTLSKVLAGHPAYRVTAGTVRYRGSDLFELEPEERARLGVFLGFQYPVEIPGVSNLEFLRVAANARRSKQGLEELDTFDFEDHVQQKLQVVQMDPAFLERSVNEGFSGGEKKRNEILQMALLDPVVAILDETDSGLDIDALRIVAGGVNQLATPDNATLLITHYQRLLDEITPDYVHVMAAGRILRTGSRDLALELEKTGYDWVDKELAAQGVA

SEQ ID NO: 25396 - protein, 379 aa, Synechococcus sp. WH 8102
MAASVLTAPMASIGVPREIKADEQRVALTPDAVRELISQGLEVRVEAGAGAGAGIGDEAFAAAGAQLVSREDAWGAHLVVKVKEPQSEEFGFLRDDMVLFTYLHLAAYPQVGEALLEAGTAAIAYETVQLENGSLPLLAPMSEIAGRLAAQVGAHLLEKPHGGRGVLMGGCTGVQPARVVVLGAGTVGWNAARTAAAMDAEVLLLDRSPQRLRSLEADRRGRLMSVVSSRGLLERLVPTADLVIGAVLTPGGRAPTLVDEAMVQQMRPGSVIVDVAIDQGGCIATSRETTHTDPTVTIHGVQHYAVGNMPGAVPFTSTEALVSVTLPYILGIAGRGLEEAVTERPELLSGLNTVQGSVCHPGVAKALGVAPRHPMACLR

SEQ ID NO: 25397 - protein, 528 aa, Synechococcus sp. WH 8102
MSKVLVSDPIDQAGVDILSQVAQVDQRPGLSPEELVSVIGDYDGLMIRSGTQVTAEVIAAASKLKIIGRAGVGVDNVDVPAATQRGVLVVNSPEGNTIAAAEHALAMMLSLSRHVPQAHAGMRVGKWDRKKYVGNELYKKTLGVVGLGKIGSHVARVARAMGMEVIAYDPFIAADRAQQMQVRLTELDELFRTADYVTLHIPRTKDTENLVNAELLRTMKPTARIVNCARGGVVDEAAIAEAINGGVIAGAGLDVYASEPLAEDSPLRAVERGLVLTPHLGASTEEAQENVAIDVAEQIRDVLLGLPARSAVNIPGLSAEIMERLKPHLQLAETVGGLVSQLSGGQVQELELRLQGDFASHPSQPLVIASLKGLLGAVLGDSINFVNASLEAKARGIRVLEVKDEASRDYAGGSLQLISRGDQGSRSVTGAVFADGELRITSIDEFPVNVTPSSHMLFTRHRDMPGIIGQLGSMLGEHNVNIAAMQVGRKIVRGDAVMVLSIDDPIPAALLQTITAIEGIQEAHPVSL

SEQ ID NO: 25398 - protein, 379 aa, Synechococcus sp. WH 8102
MPRLLIPVESTPGETRVAATPDTVKKFLSFGCDVSVERGAGTTSGYLDQAYADQGAQLIDPGDAAGWSQADIFLCVQPPSAASLARLRQGALVVGLLSPYANEELTASLKRGALSAMALELLPRISRAQSADALSSQANIAGYKSVLLASAALDRYFPMLMTAAGTVQPAKVVILGAGVAGLQAVATARRLGAVVYVSDIRPAVKEQVESLGARFIEPPKLEDKPAESGGYAKQASDAFLAAQRQQLSDQLAEADVAICTAQVPGRRAPRLISEDMLDRMRPGAVVVDLAVAQGGNCADTVPGQTVDRNGVKLIGGNDLPCTVPNHASALYARNLVALLEPTLKDGDLKLDLEDELIAGCLVAQDGNILRGDVLTPGAS

SEQ ID NO: 25399 - protein, 389 aa, Synechococcus sp. WH 8102
MRVSVATAGGTSSSLFTVVASGIQAGSGPSVIRTYRVAMSGLNDLYKRLAASGARILSVSPAGEESPAAPVAASSAPAPQAVTSAPAPKKKSHANVPVNTYKPKTPFLGTVTENYSLVADGGIGRVQHITFDLSGGDPQLEYIEGQSIGIVPEGEDANGKPHKLRLYSIASTRHGDNYQDNTVSLCVRQLEYKNEAGEQIYGVCSTYLCDIEPGSKVKITGPVGKEMLLPDDEDANIIMLATGTGIAPMRTYIRRMFEPREREANGWNFRGKAWLFMGAPKTGNLLYDEDLLHYEKEFPDNFRYTKAISREQQNAKGGRMYIQDRVLEHAEEIFAMIENPKTHVYMCGLRGMEPGIDEAMTAAAAAKGLDWSELRPQLKKADRWHVETY

SEQ ID NO: 25400 - protein, 353 aa, Synechococcus sp. WH 8102
MIRSSRRILIGAITVVAGLLGGCASLDEAGRSRLDLVKQRDELLCGVSGKIPGFSFLTPKGTYTGLDVDICRAMAAAFLGDADKVQYRPLTAPERFTALRSGEIDLLSRNTTHTLSRDAEGGNGLGFAPVVFHDGQGLIVPVNSGVTSLADLSGQAICVGSGTTTEQNLNDAFASKGIPYTPIKYQDLNQVVGGYLQGRCQAMTSDRSQLAAARSGFIEPEGHVILEDRLSKEPLAPAVVGGDQRLVDAMTWVVYALIEAEERGITQANLDRQLRAAEADPSQAAMRRFLGVDGGLGRKLGLPDDFVVQAIRATGNYGEIYDRHLGPESPVAIPRGANRLAEDGGLMIAPPFT

SEQ ID NO: 25401 - protein, 409 aa, Synechococcus sp. WH 8102
MTELSPLVSTTTGFLVLFVGKRLNRELKALRNFSIPEPVSRGLLVAVLLTLIHVLGGPELNFNLDSRDFLLVYFFTTVGMNARFSDLRRGGPALFILLGLTIGYMTLQNIIGVTMAGLLGLHPATGLLVGTVSLIGGHGTTIAWAPTFTENFQIDSALEIGITAATFGLVLASASGGPIAQFLLRRFKIPCPSTTPEDQTLKHPVNDVQDHVSGKRNIDMTSFLAALLAINICIISGMVLNGGIAAIGLKLPLFVPCLLVGILYSNLLPERRSERAVFHWPKQSTSLDLISELSLGIFLAMSLMSLQLWTLVGLALPLLAILLTQFIIALAINLLLVFRLMGRSYDAAVICAGFGGIALGSTPTAMANMTAVTQQYGASTRAFLIVPLVSAFFLDLVNAILIPGFIGQL

SEQ ID NO: 25402 - protein, 107 aa, Synechococcus sp. WH 8102
MDDSTRSRIEALISSSTIFVFMKGSKLMPQCGFSNNVVQILHSLGVSFETFDVLSDMEIRQGIKDFSSWPTIPQVYVNGEFIGGSDILIEMYNAGELKEKLEIALAS

SEQ ID NO: 25403 - protein, 598 aa, Synechococcus sp. WH 8102
MNDQQLGETPCAVDLSASSLPEQATSEQGSADVFTTTIDAQQPESGFDGFGFSEALLKTLADKGYSEPSPIQKAAFPELMLGRDLVGQAQTGTGKTAAFALPLLERLASGQKTPQALVLAPTRELAMQVADSFKAYSAGHPHLKVLAVYGGTDFRSQINTLRRGVDVVVGTPGRVMDHMRQGTLDTSGLRSLVLDEADEMLRMGFIDDVEWILEQLPQERQVVLFSATMPPEIRRLSKRYLKDPAEVTIRTKDQEGKRIRQRSITVPMPHKLEALQRVLDACGGEGVIIFARTKAITLTVAETLEAGGHQVAVLNGDVPQNQRERTVERLRSGSVDILVATDVAARGLDVDRIGLVINYDMPFDSEAYVHRIGRTGRAGRTGEAVLFVTPRERRFINNLERATGQPIEAMEVPGNSAINQGRLDRLHKRLSEAAHNERSYEEEAALLKELLQRIGTELELSPEQLAYAALSMAIGPDPLLRQKGDDEWIHNNQRRDRDRDRDRGGERRERRSDRPARAPEENMQRYRVEVGHRDRVKPGNLVGAIAGETGLQGRAIGRIQIFDNHSFVDLPKGMPEDVFNSLRRLRVMNRELQITQAS

SEQ ID NO: 25404 - protein, 366 aa, Synechococcus sp. WH 8102
MVVSISSHAIAPAVVLRGEGAWAEALSKISALCSRPLLLGRSQATVSLRSALVSDLVHSCLTPQPAELSYDCCEEDLQRLAAEAADCDAVLAAGGGKVLDAGKLLAHRLQLPCITVPLSAATCAGWTALSNLYSMHGAFEGDVALTRCPELLVFDHGLVRQAPARTLASGIADALAKWYEASVSSGDSSDGLVQQAVQMARVLRDQLMIDGPLALQDPHSAAWARTAEACALTAGVIGGLGGARCRTVAAHAVHNGLTQLQACQDVLHGEKVGFGILVQLRLEERLGGNRLAGQAHRQLLPLLRQLQLPVSLQDLGLSNASLSDLQQVCAFACREGSDLHNLPFAVTPGALLEALVGAAEPSPVAP

SEQ ID NO: 25405 - protein, 468 aa, Synechococcus sp. WH 8102
MALLPLLHRDVGRPLFLPAHGRGSALPPAMRRLLQRPAGLWDLPELPALGGPLENDGAVADSQRAAADAMGVNRCWYGVNGATGLLQAALLGISRPGEAVLMPRNAHRSLIQACLLGQLTPLLFDLPYQPDRGHPAPADGPWLESVLAALPAKHPPISAAVLVHPTYQGYGLDPAPLIRSLQHQGWPVLVDEAHGSHFAADVDPELPPSALQGGADLVVHSLQKSATGLAQTAVLWQQGERVDTDALQRSLGWLQTTSPSALLLASCEAALHHWRSSAGRRQLRQRLMQARTLRDQLRRDGLPLLTTDDPLRLVLHPGRAGISGLDADDWLLPRGLVAELPEPATLTFCLGLADQRGLRRSLRRAWQQLLNAHPARAPQPPLLPPPLPLVAQPEVPLAEAWRAPRRLCVLEQAEGTIAADLLCPYPPGIPLLVPGERLDGARLHWLLEQRQLWGDQIPARLAVLSEIA

SEQ ID NO: 25406 - protein, 331 aa, Synechococcus sp. WH 8102
MTSFLTAARAEQEKLTPDTRRLRLFSGTSNPGLAREIAAYLGVPDGPRVCKRFADGELYVQIQESIRGCDVFLIQPTCAPVNDHLMELLIMVDACRRASARQITAVVPYYGYARADRKTAGRESITAKLTANLLVKSGVDRVLAMDLHSAQIQGYFDIPCDHIYGSPVLVDYLSTQNLDDIVVVSPDVGGVARARAFAKQMNDAPLAIIDKRRTGHNLAESLTVIGDVSGRTAILIDDMIDTGGTICAGARLLRQQGAKRVIACATHAVFSPPASERLSADGLFEQVVVTNSIPIQQERTFPQLQVLSVANMLGEAIWRIHEESSVSSMFR

SEQ ID NO: 25407 - protein, 392 aa, Synechococcus sp. WH 8102
MPRPPELSARAVGLKPSLTLAIGAQAKALQQAGRDICSLSAGEPDFDTPDFIVEATRQALRDGITRYGPAAGDPELRAAVAEKLSSGNGIAITPEQVLITNGGKQAIYNLFQVLLNPDDEVLLPAPYWLSYPEMAALAGAKVKLIPTQAEEGFRLDLAAVEAAISPRSRLLLLNSPGNPTGRVMKRQELEDVAELVRRHPQLLVMSDEIYEFLLAEGEQHHSFAAIAPDLADRCFTVNGFAKGWAMTGWRLGYLAGHQDVIKAAAALQSQSTSNVCSFAQRGALAAIQGPRACVSAMAESYNRRRQLLTEGLQAIEGITLVEPRGAFYAFPQLPESAGGSMDFCSRALEQAGLAVVPGLAFGNDRCIRLSCAVSRETIRDGLSRLTQLLDET

SEQ ID NO: 25408 - protein, 615 aa, Synechococcus sp. WH 8102
MSVVRTPCVKSLRSRQFNVVVTSGSEGSEKTLSPQSLTSLFGEKPKSVSYSSLLEQIRNGDVSTLELVPARREVRVTYPDGTKSTVSIFVNDQQILRAAEASATPLTVRDIRGEQAMAGLLGNLGLVLLLVVGLSFLLRRSAQMANRALGFGRSQPRLKPQEDLQVRFEDVAGINDAKEELEEVVTFLKQPESFTGLGAKIPRGVLLVGPPGTGKTLLARAIAGEAEVPFFSMAASEFVELFVGVGASRVRDLFRQAKEKSPCIVFIDEIDAVGRQRGAGIGGGNDEREQTLNQLLTEMDGFADNSGVILLAATNRADVLDAALTRPGRFDRRIDVSLPDRRGREEILGVHARTRPLDPEIDLTAWARRTPGFSGAELANLINEAAILTAREQQPFISDRQLEGALERITMGLSAKPLQDSAKKRLIAYHEVGHALVAALLPAANKLDKVTILPRGAAGGYTRFMPDEEKLDSGLITRASCLADLVVSLGGRAAELVVFGPLEITQGASGDLQMVSQLAREMVTRFGFSSLGPVALEGPGTEVFLGRDWFSQRPGYAESTGQAIDTRVRDLAKQSLDQAVALLESRRDVMDRLVDALMEEETLHHDRFMELAGLG

SEQ ID NO: 25409 - protein, 390 aa, Synechococcus sp. WH 8102
MTPSELYLDAAATTPPLPSVIECINAVQREAWGNPSSLHGTGLVAAEQLARSRQTIAAQLSADEDELIFTSGATESVHLALQGVAAGCPPGRLVISAVEHPAVEGAAGQLAQLGWTVARWPVDGSGRIRLELLDQLLAPPTQLVSLIWGQSEVGTVQPIPLVASACRERGIPFHTDATQLIPQGLMDWSTSCIDLLSFSSHKLQGPRGIGVLLHRQGVLAQPLLTGGGQEGGYRAGTEAVALIAGLAVALQQLPRFNPHQSMAPPGSTPQIRSMRDRLQSKLEAIPSLTVINATEEPRLPHHLACLIADRAGHPLAGRRLVQQLSRLGVACSSGSACRSGHAQDSAVLTAMNVAPSWRQSLLRFSLGPWLNDDDLDAVPPLLIRAIDACT

SEQ ID NO: 25410 - protein, 495 aa, Synechococcus sp. WH 8102
MGQSSFVILYHRTPFDEAKDAQGNQVWVDQKSPNGIIPTLRNLFRSRNDGTWIAWRHVDHPEEMDVERLEMTNPSPFALCRIPLADEQISSFYHITSKECFWPILHTFPTHFNVNNANWGIFEEVNKRFADAACNEAAEGATVWVHDYNLWLAPGYIRQQRPDLKIAFFHHTPFPGNDVFAILPWREQILESLLCCDVVGFHIPRYTENFARAASTLVGAKRGPKISVDQKFISVGTALSEGTVTSHLDHNGRRIQLLSSPVGTSPDVIQELSWSASVESYGEMIVQDTKKGRKLILSASRVDYTKGNEELLLAFERLLERREDLHGEVVLMLACVAAASGMKIYEETQRSIEEMAGRINGRFSQVDWIPVRFSTRRIPYEEMVAWFCHADVCWITPLRDGLNLVAKEYAAARRHRGGVLVLSEFTGASVVLEGAVLTNPYSNRRMDEAIEAALAMPEHEQRQRMETMSAAVEAYTVQDWAEEQLAGFPEVATIG

SEQ ID NO: 25411 - protein, 637 aa, Synechococcus sp. WH 8102
MNQRWRLVALWLLPIGVVLLIGWQVISNGGLNSQNAGGTTVAPRNAAVARMSYGRFLDYVEAGRVTAVDIYDGGRNAVIEAVDPDLDNRVQRLRVDLPGLAPELVNTLKEEGISFDIHPPRTAPPALGLLGNLLFPLLLIGSLIFLARRNSGMPGGPGQAMQFGKSKARFMMEAETGVMFDDVAGVAEAKQELQEVVTFLKQPERFTSVGAQIPRGLLLVGPPGTGKTLLAKAIAGEAGVPFFSLSGSEFVEMFVGVGASRVRDLFKKAKENSPCLIFIDEIDAVGRQRGAGIGGGNDEREQTLNQLLTEMDGFEGNSGIIIIAATNRPDVLDSALMRPGRFDRQVTVDAPDIKGRLSILEVHCRNKKLEEELSLESIARRTPGFTGADLANLMNEAAILTARRRKEAIGLSEIDDAVDRIIAGMEGRPLTDGRSKRLIAYHEVGHALIGTLVKDHDPVQKVTLIPRGQAQGLTWFSPDEEQTLVTRSQLKARIMGALGGRAAEDVVFGHEEVTTGAGGDIQQVASMARQMVTRLGMSDLGPVALEGGGQEVFLGRDLMSRNDISESISQQIDAQVRQMVKRCYEETVDIVAANREAMDRLVELLIEKETMDGGEFAAVVAEFTQVPAKDRTVVTLD

SEQ ID NO: 25412 - protein, 426 aa, Synechococcus sp. WH 8102
MPGPRGFGRFCRLHGGTKARETATTPTPPPMSSPTDPNGAFQRSHPSEGTQALEKERKLPLTGWQQEVDQAKRLGLEAAESIVDRNISTFSRGELPHFAGINTFMKAPYLEDVNQVGNYDVAIVGVPHDCGTTYRPGTRFGPQGIRRISALYTPYNYEMGVDLREQITLCDVGDIFTIPANNEKSFDQISKGIAHVFASGAFPIILGGDHSIGFPTVRGVCRHLGDKKVGIIHFDRHVDTQEIDLDERMHTCPWFHATNMANAPAENLVQLGIGGWQVPREGVKVCHERGTNVLTVTDITEMGLEAAAQYAIERATDGTDCVYISFDIDCIDAGFVPGTGWPEPGGLLPREALKLLELIVRNVPVCGLEIVEVSPPYDISDMTSLMATRVICDAMAHLVVSGQLPRKDKPAWISDVCNMNVDQKWR

SEQ ID NO: 25413 - protein, 311 aa, Synechococcus sp. WH 8102
MLSTSSSENHRSGFIALIGRPNVGKSTLVNQLVGEKVAITSPVAQTTRNRLRAILTTEDAQMVLVDTPGIHKPHHLLGERLVQSARSAIGEVDLVVLLLEGCERPGRGDAFIVKLLRQQPLPVLVALNKWDKLPEDRQAEAEAAYGELLKETAWPIHRCSALSGEGCSALSSAMAAQLPLGPQLYPPEMVSDQPERVLMGELIREQVLLHTREEIPHSVAVTIDRVEELPAGGKGGGRTAVLATVMVERKSQKGILIGKGGAMLKTIGQGARLQMQTLIDGPVYLELFVKVVPDWRSKPARLAELGYGVES

SEQ ID NO: 25414 - protein, 617 aa, Synechococcus sp. WH 8102
MTLTSASTVVGGLDANAPQTISGAAALMDALRRHGVDTIFGYPGGAILPIYDALHIAESEGWVKHILVRHEQAGTHAADAYARATGKVGVCFGTSGPGATNLVTGIATAQMDSVPMVVITGQVPRPAIGTDAFQETDIFGITLPIVKHSWVVRDPADLGSIVAQAFLIAASGRPGPVLIDIPKDVGQEQFNYVPVEPGSVIPGGFHQPEPPLDAAVAAALDLIEQAQRPLLYVGGGAISACAHDSLRMLAERYQLPVTTTLMGKGAFDENDALSVGMLGMHGTAYANFAVTECDLLIAVGARFDDRVTGKLDTFAPRARVVHFEIDPAEIGKNRKADVAVLGDLGLSLARMVEISLQRTAEPRTAAWLERINTWKDRYPLTIPPAEGAIYPQEVLLAVRDLAPDAIVTTDVGQHQMWAAQHLRNGPRGWISSAGLGTMGFGMPAAMGAQVAMPDRQVVCIAGDASILMNIQELGTLAAYGLPVKVVIVNNHWQGMVRQWQESFYDERYSASDMLNGMPDFIALARSFGVDGVKITDRELLHRDLAAALQSPTPTMIDVHVRRGENCYPMVPPGKSNAQMVGLPSHPELAMGTTRTCSSCGAITAHEHRFCPQCGASL

SEQ ID NO: 25415 - protein, 380 aa, Synechococcus sp. WH 8102
MIGYISDNLLIPILDFFYGLVPSYGLAIVALTIVIRVALYPLSAGSIRSARRMRIAQPVIQKRQAEIKSRYANNLQKQQEELGKVMKEFGSPLAGCLPLLVQMPILFALFATLRGSPFADVPYTINLKVLPADQIAAVEPKPFNSASHSIFIAETDHVPVIASLPRGTKLGVGDSATVNLHTKDGRGFDDVLTAVDNPSRFAPTWSITKGDDVVNVSDDGTITALTAGDATVEAKIPGLAARSGFLFIKALGQVGFYADGDINWDIAILVGGFGLTLFLSQLLSGMGMPANPQQATANKITPVMITGMFLFFPLPAGVLLYMVIANIFQALQTFLLTREALPENLQKILDQQMTQQTVPVTATSAGGGDARLPFEPKGGK

SEQ ID NO: 25416 - protein, 330 aa, Synechococcus sp. WH 8102
MQFIDQARITVRGGRGGDGIAAFRREKYVPAGGPSGGDGGHGGPVVLEADSNLQTLLDFKYKRLFAADDGRRGGPNKCTGASGRDLVIKVPCGTEVRHLATGILLGDLTDPGERLTVAFGGRGGLGNAHYLSNRNRAPEKFTEGRDGEEWPLQLELKLLAEVGIIGLPNAGKSTLIAVLSAARPKIADYPFTTLVPNLGVVRRPSGDGTVFADIPGLIAGAAQGAGLGHDFLRHIERTRLLIHVVDAGADDPVGDLRVVEKELEAYGHGLVDRPRLLVLNKQELLLDEQLPELSNELEQVSGRAPLCISAAMGRNLDQLLERVWKELGIA

SEQ ID NO: 25417 - protein, 1533 aa, Synechococcus sp. WH 8102
MADLTRPTVWPYSDSAAPEAVAGEKDACGVGFLAQLSGETSHWVLQQALRGLGCMEHRGGCGGDGDSGDGAGVLCQIPWTYLKAVWPEAASARGLGMMFMPQDSEGRELARRFCKEEAEALGLTSAGWRVVPVDSSVLGPMARDTAPVIQQWSLAGGPDGDAFEALLLRLRRRIGARARQAWGFEGSRDLYVASLSSRTVVYKGMVRSEVLAQYYADLRDPRFEVSFAVYHRRFSTNTLPRWPLAQPMRLLGHNGEINTLLGNLNWAEASEASLADVWGEAADDLNPVVNPAFSDSANLDATLELMVRSGRSITDSLITLVPEAFRNQPDLEDRPEVTAMYEFNAGIQEPWDGPALLVFADGKRVGATLDRNGLRPARWCTTADGFVIMGSETGVVDLSGKTVVQKGRLGPGQMVAVDLENGQLLDNWTVKEDAAGRFPYGDWLQHHRRGVEAQPWTQDRQIGELDLLRLQTAMGFTAEDFDLVIEDMAGLGKEPTYCMGDDIPLAVLSDKPHLLYDYFKQRFAQVTNPPIDPLREKLVMSLEMHLGERRPALKPQPEAAAVIHLDTPVLNEAELAAISKQGLPVVTLSTQVAVEACAGGLSSALQGLCEAAEEAVRGGAQVLVLSDRVDGSGAAAQLTAISVAMPALLAVGAVHHHLLRQKLRLRCSLVIDTAQCWSTHHLACLIGYGASAVCPWLTWETTRHWLAHPKTQKRIEQGKLPALDADQVQANVRVSLENGLRKILSKIGISLLASYHGAQIFEAIGLGADVIDTAFSGTTSRVAGMTLAELANETLSLHAKAFPELNRSKLEFMGFVQYRTGGEYHLNSPDMAKALHAAVKTGPGYDHFSTYKTLLENRPVTALRDLLEFKLAPTPLPLDQVESAESLCKRFCTGGMSLGALSREAHEVLAVAMNRIGGKSNSGEGGEDPARFQVLHDVDAEGRSQAFPSIGGLRNGDTACSAIKQIASGRFGVTAEYLRSGKQLEIKVAQGAKPGEGGQLPGPKVDDYIAWLRNSKPGVALISPPPHHDIYSIEDLAQLIHDLHQVHPKAPVSVKLVAEIGIGTIAAGVAKANADVIQISGHDGGTGASPLSSIKHAGSPWELGLTEVHRSLLENGLRDRVLLRADGGLKTGWDVVIAALLGAEEYGFGSVAMISEGCIMARVCHTNNCPVGVATQKEALRKRFTGVPEHVVNFFWYVAEEVRQLLSLLGVAKLEDLIGRSDLLQPRAVQLAKTQGVDLSSLLAPIQSSEERSWLRHSAEAHGNGPILEDQLLADAELMAAVESHGSLNRTIAIINTDRSVGARLAGEIAQRHGNRGFKGQLNLTFQGAAGQSFGAFLVQGMNVRLEGEANDYVGKGMNSGRISLVPADGCANPGDQVILGNTCLYGATGGELFAHGRAGERFGVRNSGARTVVEGAGDHCCEYMTGGVVVVLGSTGRNVGAGMTGGVTFLLDEGDRVTARVNTEIVAVCSLTTSQQEETLKELLEAHVAATGSSKASALLADWAAAKGRFKVLIPPSERAAMGLVDQQAVAA

SEQ ID NO: 25418 - protein, 248 aa, Synechococcus sp. WH 8102
MTATTPSKETILVVDDEASIRRILETRLSMIGYNVVTACDGTEALELFENTAPDLVVLDVMMPKLDGYGVCQELRKESDVPIVMLTALGDVADRITGLELGADDYVVKPFSPKELEARIRCVLRRVEKESVAGIPNSGVIQVSDLRIDTNKRQVFRADERIRLTGMEFSLLELLVSRSGEPFNRGEILKEVWGYTPERHVDTRVVDVHISRLRSKLEDDPANPELILTARGTGYLFQRIIDSVASEGP

SEQ ID NO: 25419 - protein, 377 aa, Synechococcus sp. WH 8102
MPRRPLDFDYQATTPCAAEVVEAMAPYWSEDWGNPSSRQHRLGLTASAAVNLARRHIADALAVTPQQLVFTSGATEANNLALLGHARARGSGHLISVATEHHAVLDPLQQLQREGFSVTLLTPGPEGLITPEQLRQAITPETQLVSVMAANNEIGVLQPLTALAAVCRDHGVTLHSDAAQAFGHIPLEPDAMGVDLMSLSAHKLYGPKGVGALVIRDGIALQPLQWGGGQEAGLRAGTLPTALIVGFAAAVRLAMQDREQRQQELSALRDQLWADVQHKIPGVRLNGALAPRLAHNLNITLPGVSGSRLQRALKPQLNCSSGSACSNGAPSHVLQALGRTRAEAEASLRLSLGRDTTSDDIHQAVIAIGDAVAAVQS

SEQ ID NO: 25420 - protein, 293 aa, Synechococcus sp. WH 8102
MTRCDLNLGFIGLGAIGRPMAANLCRSGFLLNVHTRSRSAETAPELQEARSCASPAEAAEAVDVLLICVSDDQAVETVLFGSDGAASTLRPGSVVVDCSTIAPATAMACAKRLAQQGIHYLDAPVTGGTEGAKAGTLKLLVGGESTAVACVRPVLEVIGSTIHHFGPVGRGQQVKAVNQVLVAGSYAAVAEAMALGKRLDLPMDQVVEALKSGAAGSWALDHRSAGMLMGHYPLGFRLALHHKDLGIALEAAESVQLELPISRTVRQLEHDLMQQGHGDEDVSALHRQFETKS

SEQ ID NO: 25421 - protein, 286 aa, Synechococcus sp. WH 8102
MTPFDSEGGIFMGSRRDPAGCRVGLFGVPYDGTTSFRPGTRFGPAAIREVSQGLETYCPQLDLDLEDLAYADLGAVDIPFGAPEPVVNAVQQATTAVLDLGLKPLMLGGEHSISSGAVAAVANQHPDLVLVQLDAHADLREEWLGTRHSHACAMRRCLEVLPSGDLLQLAIRSGTRSEFHELHSSGRRMDDVQALRDAMAPWTGRPIYLTVDLDWFDPAVLPGTGTPEPGGFLWGDFAAVVDVLSGHRLVAGDVVELAPQLDSSGVSSVLAAKVTRSLILLLGADQ

SEQ ID NO: 25422 - protein, 285 aa, Synechococcus sp. WH 8102
MPSVALLGSGLLGRAIGRRLLDQGVELKVWNRTPERCQTLIQEGAHATPELSSLAEGCSTVITVLRDGPVTQAVVRELGDLRGGCLMPMGTMGITEIRDLADQVQHQNGHCLEAPVLGSKPQALKGELLVMAGGESGLFDQQRPLLEHLSQEPMLVGPIGSGAATKLALNQLIASLTHAFSLSLRLVQQAGVPVETFMAILRPSALYAPTFDKKLQRMLDGHYDDPNFSTALLRKDLHLFLEEATAAGLQIQGLQGLDTLLEQSSGSPLDDLDYCALHELTQESF

SEQ ID NO: 25423 - protein, 674 aa, Synechococcus sp. WH 8102
MCGIGGVFLADRHQTLDRQLLVNMAAIQSHRGPDGFGVECLDAAGVGFCHARLSIIDLNESRARQPFLSNDRQVLMAHNGEFYDFQRIRADLTAQGVRFSSKSDSEILLRLYQRQGLESTLPLLRGEFAFALFDAADDCLYLVRDRFGIKPQYWTMTPEGLVFGSELKVLFAHQAVERRFTSEGLFHQLMQTMVPGTTAFAGVHQVQPGHVLKVQRRSDRLEVSESTYWDVDFPRLDQRDSTLTEADHIANVRAALLEAVEMRMVADVPVGCYLSGGIDSCSILGLASAVSQGPVKAFTIGFDDARYDETPIAAEMAEATGAEQDVMRLSGRELYGHMEQTLWHTERTIYNTLAVAKYLMSRHVNSVDYKVVMTGEGSDELFGGYPAFRRDMFLHGLEDLPQSDRQDWESLLQTNNSLVQGAMLAADQVDDPDLDAVVGFTPSCLQPWLACAPLVPDLLADEHRQALVEYSPGKAIAEQLNPQQLDGRHALDKAQYVWIKTMLEGQILTWGGDRVDMANSMEARPAFLDHHLAAAAVQVPPELRIKGKTEKYVLREAMAGLLPEVLYKREKFAFMAPPAHTEPEKWAQMKQLADDYLSDEAIDAAGLLSKEGVRALFARHDDPATTDAERVQMDAVINHLLGVQMLHRMFVAADVPAQAREQADRLGWRVLMPV

SEQ ID NO: 25424 - protein, 513 aa, Synechococcus sp. WH 8102
MTIKNQVNPYFAEKKLNKIEKSKLEKDGLLVGSEIEKFAKIGWENMDETDLKLRLKWYGMFWRPKTPGKFMLRLRIPNGVLTSNQIRVVASIVERYGENGSCDITTRQNLQLRGILLCDLPEILRRLREAGLSSIQSGFDNPRNVTGNPLAGIDPNEIVDTRPYTTKLQNFLTNNCEGNSEYSNLPRKWNTAVAGSKDNFLLHNDIVFHPVENNGVMGFSIWIGGILSPQMNAYAFPMNVWVLPDEICNILDTVIRLWRDNGEREKRTKGRFRMYLDEIGHEEFRSQVEKLYGTLTPDPGSIFENSPRSHFGINQQKQAGLYFAGIHVPVGRLTAEDLQDIATASLKYGNGEIRLTEDQNIIITGLTSEKVEELKTDTLLQRFPLAPSNISAGTVSCTGNTYCSFALTNTKDQALKAAKELDEELNLPEEIKVHWTGCPNTCGQAYMGAIGLTGTKAKNAEGVMGEGYTMTIGGSQGRNPTIGQIYRKAIPAAEIKTALKEVLISKFGATEKK

SEQ ID NO: 25425 - protein, 559 aa, Synechococcus sp. WH 8102
MANLFTSHASTTTQTAAEILKSQLQCNSTTEATSSSPSFQPQTGHGLFCFCVECRPFSPDHQDFTEDMPSDPEDLMDDFYKMGLIKADAVEVAEAVSSAELREILFYKNASQGDPAKEKLLRALAEEAGGLDQAMAAAFGPQAGEFFASIHSSSPFGRRSFLKGLAAGAAMITIANSAGLDTQDAHAAGHAGGKLEKTNLKIGFIPITCATPIIMSEPMGFYKSNGLKCKVVKMPSWGAVRDSAIAGELDAYHMLAPMPISMTLGLGTSPFSVKLASIENINGQAITVANRHKDKVKSAADMKGFVFGVPFPYSMHNLLLRYYLAKGGVDPDKDVQIRPVPPPDSVAQMVAGDIDAYLMPDPFNQRAVFEGVGFIHLLTKDLWVGHPCCAFAAGEPWINKHPNTFKAINKSIIEAANYATNPTNRSEIAKYISGRAFLNQPTKVVEAVLTGKFDDGLGNKKNVPDRIDFKPYPWQSFSHWIQSQLVRWDLGGAADAIKAGDFNANSAAIFLTNEAQSLERELGFNPPSRSFKTEKLAYDSFDPTDPLGYVSKQIDRDGV

SEQ ID NO: 25426 - protein, 637 aa, Synechococcus sp. WH 8102
MGKVVGIDLGTTNSCVSVMEGGKPTVIANAEGFRTTPSVVAYTKNQDQLVGQIAKRQAVMNPDNTFYSVKRFIGRRVDEVNEESKEVSYGVEKAGSNVKVKCPVLDKQFAPEEVSAQVLRKLAEDAGKYLGETVTQAVITVPAYFNDSQRQATKDAGKIAGLEVLRIINEPTAAALAYGLDKKSNERILVFDLGGGTFDVSVLEVGDGVFEVLSTSGDTHLGGDDFDKVIVDHLAETFKSNEGIDLRQDKQALQRLTEAAEKAKIELSSATQSEINLPFITATPEGPKHLDLTLTRAKFEELAANLIDRCRIPVEQALKDAKLSSSELDEIVMVGGSTRIPAVLELVKRTTSKDPNQTVNPDEVVAVGAAIQGGVLAGEVKDILLLDVTPLSLGVETLGGVMTKMITRNTTVPTKKTETYSTAVDGQTNVEIHVLQGEREMASDNKSLGTFRLDGIPPAPRGVPQIEVTFDIDANGILSVTAKDKGSGKEQSISITGASTLSDSEVDKMVKDAEANASADKEKREKIDLKNQAETLVYQAEKQMGELGDKVEADAKAKVDEKRTKLQEAINAEDYDAMKTLLEELQQELYTVGASVYQQEGAAAGGAAPGGDAGASAASGGGDASDDVIDAEFTETK

SEQ ID NO: 25427 - protein, 403 aa, Synechococcus sp. WH 8102
MGRANKVVLAYSGGVDTSVCIPYLKQEWGVEEVITFAADLGQGDELEPIRQKALDAGASQSLVGDLIQPFIEEFAFPAIRANALYEGRYPLSTALARPLIARRLVEVAREVGADAVAHGCTGKGNDQVRFDVAIAALAPDLKVLTPAREWGMSREETIAYGERCGIPAPVSKKSPYSIDLNLLGRSIEAGPLEDPMVAPPEEVFAMTSPMSDTPDAAEEIEIAFEAGNPVAINGQVLDPVAMIREANRLAGSHGIGRLDMIENRVVGIKSREIYETPGLLLLIQAHQELESLTLAADVLRSKRQLEMQWADLVYQGLWFGPLKDALDGFMDRTQQHVNGVVRLRLYKGNATVIGRGSTQSSLYVPAMASYGSEDAFDHRAAEGFIYVWGLPTRLWAASQRTSG

SEQ ID NO: 25428 - protein, 274 aa, Solanum lycopersicum
MNSTSMSSLGVRKGSWTDEEDFLLRKCIDKYGEGKWHLVPIRAGLNRCRKSCRLRWLNYLRPHIKRGDFEQDEVDLILRLHKLLGNRWSLIAGRLPGRTANDVKNYWNTNLLRKLNTTKIVPREKINNKCGEISTKIEIIKPQRRKYFSSTMKNVTNNNVILDEEEHCKEIISEKQTPDASMDNVDPWWINLLENCNDDIEEDEEVVINYEKTLTSLLHEEISPPLNIGEGNSMQQGQISHENWGEFSLNLPPMQQGVQNDDFSAEIDLWNLLD

SEQ ID NO: 25429 - protein, 161 aa, Trema orientalis
MSSSEVDKVFTEEQEALVVKSWAVMKKNSAELGLKFFLKIFEIAPSANNLFSYLKDSPIPLEQNPKLKPHAMTVFVMTCESAVQFRKAGKVTVRESNLKRIGAIHFKNGVVHEHFETRFALLETIKEAVPEMWSPEMKNAWGEAYDQLVAAIKFEVKPSST

SEQ ID NO: 25430 - protein, 335 aa, Hordeum vulgare subsp. spontaneum
PGGNDDHQKTAGTYGQQGHVGTGTHGTPATGGAYGQHEHTGATGTGTYGTGEKKGIMENIKEKLPGGHGDHQKTGDTYGHQEDTKMTGMGRHSAPATGGSYGEHVHTGETGTGTHGTGEKKGVMENIKEKLPGGHDDHQKTAGTYGQQGHVGTGTHGTPATGGAYGQHEHTGATGTETYSTGEKKGVMENIKDKLPGGHGDHQQTGGIYGQQAHVGTGTHDTPATGGTYGQHGHTGVTGTGTHGTGEKKGVMENIKEKLPGGHSDHPQTTDTYGQHRHTGVAGTETHGTTATGGTYGQQAQTGTTGTGTGTHGTDGTGEKKSLMDKIKDKLPGQH

SEQ ID NO: 25431 - protein, 333 aa, Hordeum vulgare subsp. spontaneum
PGGHDDHQKTAGTYGQQGHVGTGTHDTPAIGGAYGQHEHTGATGTGTYGTGEKKGIMENIKDKLPGGHGDHQKTGDTYGHQEDTKMTGMGRHSAPATGGSYGQHAHTGETGTGTHGTGEKKGVMENIKEKLSGGHDDHQKTAGTYGQQGHVGTGTHGTPATGGAYGQHEHTGATGTETYSTGEKKGVMENIKEKLPGGHGDHQQTGGTYGQQAHVGTGTHDTPATGGTYGQHGHTGVTGTGTHGTGEKKGVMENIKEKLPGGHSDHQHTTETYGQHRHTGVAGTETHGTTATGGTYGQQAQTGTTGAGTHGTDGTGEKKSLMDKIKDKLPGQH

SEQ ID NO: 25432 - protein, 335 aa, Hordeum vulgare subsp. spontaneum
PGGNDDHQKTAGTYGQQGHVGTGTHGTPATGGAYGQHEHTGATGTGTYGTGEKKGIMENIKEKLPGGHGDHQKTGDTYGHQEDTKMTGMGRHSAPATGGSYGEHAHTGETGTGTHGTGEKKGVMENIKEKLSGGHDDHQKTAGTYGQQGHVGTGTHGTPATGGAYGQHEHTGATGTETYSTGEKKGVMENIKDKLPGGHGDHQQTGGIYGQQAHVGTGTHDTPATGGTYGQHGHTGVTGTGTHGTGEKKGVMENIKEKLPGGHSDHPQTTDTYGQHRHTGVAGTETHGTTATGGTYGQQAQTGTTGTGTGTHGTDGTGEKKSLMDKIKDKLPGQH

SEQ ID NO: 25433 - protein, 333 aa, Hordeum vulgare subsp. spontaneum
PGGHDDHQKTAGTYGQQGHVGTGTHGTPATGGAYGQHEHTGATGTGTYGTGEKKGIMENIKEKLPGGHGDHHKTGDTYGHQEDTKMTGMGRHSAPATGGSYGQHAHTGETGTGTHGTGEKKGVMENIKEKLSGGHDDHQKTAGTYGQQGHVGTGTHGTPATGGAYGQHERTGATGTETYSTGEKKGVMENIKEKLPGGHGDHQQTGGIYGQQAHVGTGTHDTPATGGTYGQHGHTGVTGTGTHGTGEKKGVMENIKEKLPGGHSDHQHTTETYGQHRHTGVAGTETHGTTATGGTYGQQAQTGTTGAGTHGTDGTGEKKSLMDKIKDKLPGQH

SEQ ID NO: 25434 - protein, 132 aa, Hordeum vulgare subsp. spontaneum
QTGGIYGQQAHVGTGTHDTPATGGTYGQHGHTGVTGTGTHGTGEKKGVMENIKEKLPGGHSDHPQTTDTYGQHRHTGVAGTETHGTTATGGTYGQQAQTGTTGTGTGTHGTDGTGEKKSLMDKIKDKLPGQH

SEQ ID NO: 25435 - protein, 335 aa, Hordeum vulgare subsp. spontaneum
PGGHDDHQKTAGTYGQQGHVGTGTHDTPAIGGAYGQHEHTGATGTGTYGTGEKKGIMENIKDKLPGGHGDHQKTGDTYGHQEDTKMTGMGRHSAPATGGSYGQHAHTGETGTGTHGTGEKKGVMENIKEKLSGGHDDHQKTAGTYGQQGHVGTGTHGTPATGGAYGQHEHTGATGTETYSTGEKKGVMENIKEKLPGGHGDHQQTGGTYGQQAHVGTGTHDTPATGGTYGQHGHTGVTGTGTHGTGEKKGVMENIKEKLPGGHSDHQHTTDTYGQHRHTGVAGTETHGTTATGGTYGQQAQTGTTGAGTGTHGTDGTGEKKSLMDKIKDKLPGQH

SEQ ID NO: 25436 - protein, 333 aa, Hordeum vulgare subsp. spontaneum
PGGHDDHQKTAGTYGQQGHVGTGTHGTPATGGAYGQHEHTGATGTGTYGTGEKKGIMENIKEKLPGGHGDHQKTGDTYGHQEDTKMTGMGRHSAPATGGSYGEHAHTGETGTGTHGTGEKKGVMENIKEKLSGGHDDHQKTAGTYGQQGHVGTGTHGTPATGGAYGQHEHTGATGTETYSTGEKKGVMENIKEKLPGGHGDHQQTGGIYGQQAHVGTGTHDTPATGGTYGQHGHTGVTGTGTHGTGEKKGVMENIKEKLPGGHSDHQHTTETYGQHRHTGVAGTETHGTTATGGTYGQQAQTGTTGAGTHGTDGTGEKKSLMDKIKDKLPGQH

SEQ ID NO: 25437 - protein, 337 aa, Hordeum vulgare subsp. spontaneum
PGGHDDHQKTAGTYGQQGHVGTGTHGTPATGGAYGQHEHTGATGTGTYGTGEKKGIMENIKEKLPGGHGDHQKTGDTYGHQEDTKMTGMGRHSAPATGGSYGEHAHTGETGTGTHGTGEKKGVMENIKEKLSGGHDDHQKTAGTYGQQGHVGTGTHGTPATGGAYGQHEHTGATGTETYSTGEKKGVMENIKDKLPGGHGDHQQTGGIYGQQAHVGTGTHDTPATGGTYGQHGHTGVTGTGTHGTGEKKGVMENIKEKLPGGHSDHPQTTDTYGQHRHTGVAGTETHGTTATGGTYGQQAQTGTTGTGTGTGTHGTDGTGEKKSLMDKIKDKLPGQH

SEQ ID NO: 25438 - protein, 335 aa, Hordeum vulgare subsp. spontaneum
PGGHDDHQKTAGTYGQQGHVGTGTHGTPATGGAYGQHEHTGATGTGTYGTGEKKGIMENIKEKLPGGHGDHRKTGDTYGHQEDTKMTGMGRHSAPATGGSYGQHAHTGETGTGTHGTGEKKGVMENIKEKLSGGHDDHQKTAGTYGQQGHVGTGTHGTPATGGAYGQHERTGATGTETYSTGEKKGVMENIKEKLPGGHGDHQQTGGIYGQQAHVGTGTHDTPATGGTYGQHGHTGVTGTGTHGTGEKKGVMENIKEKLPGGHSDHQHTTETYGQHRHTGVAGTETHGTTATGGTYGQQAQTGTTGTGAGTHGTDGTGEKKSLMDKIKDKLPGQH

SEQ ID NO: 25439 - protein, 335 aa, Hordeum vulgare subsp. spontaneum
PGGHDDHQKTAGTYGQQGHVGTGTHGTPATGGAYGQHEHTGATGTGTYGTGEKKGIMENIKEKLPGGHGDHQKTGDTYGHQEDTKMTGMGRHSAPATGGSYGEHAHTGETGTGTHGTGEKKGVTENIKDKLSGGHDDHQKTAGTYGQQGHVGTGTHGTPATGGAYGQHEHTGATGTETYSTGEKKGVMENIKDKLPGGHGDHQQTGGIYGQQAHVGTGTHDTPATGGTYGQHGHTGVTGTGTHGTGEKKGVMENIKEKLPGGHSDHPQTTDTYGQHRHTGVAGTETHGTTATGGTYGQQAQTGTTGTGTGTHGTDGTGEKKSLMDKIKDKLPGQH

SEQ ID NO: 25440 - protein, 333 aa, Hordeum vulgare subsp. spontaneum
PGGHDDHQKTAGTYGQQGHVGTGTHGTPATGGAYGQHEHTGATGTGTYGTGEKKGIMENIKEKLPGGHGDHQKTGDTYGHQEDTKMTGMGRHSAPATGGSYGQHAHTGETGTGTHGTGEKKGVMENIKEKLSGGHDDHQKTAGTYGQQGHVGTGTHGTPATGGAYGQHEHTGATGTETYSTGEKKGVMENIKEKLPGGHGDHQQTGGTYGQQAHVGTGTHDTPATGGTYGQHGHTGVTGTGTHGTGEKKGVMENIKEKLPGGHSDHQHTTETYGQHRHTGVAGTETHGTTATGGTYGQQAQTGTTGAGTHGTDGTGEKKSLMDKIKDKLPGQH

SEQ ID NO: 25441 - protein, 333 aa, Hordeum vulgare subsp. spontaneum
PGGHDDHQKTAGTYGQQGHVGTGTHDTPATGGAYGQHEHTGATGTGTYGTGEKKGIMENIKDKLPGGHGDHQKTGDTYGRQEDTKMTGMGRHSAPATGGSYGQHAHTGETGTGTHGTGEKKGVMENIKEKLSGGHDDQQKTAGTYGQQGHVGTGTHGTPATGGAYGQHEHTGATGTETYSTGEKKGVMENIKDKLPGGHGDHQQTGGIYGQQAHVGTGTHDTPATGGTYGQHGHTGVTGTGTHGTGEKKGVMENIKEKLPGGHSDHQHTTETYGQHRHTGVAGTETHGTTATGGTYGQQAQTGTTGAGTHGTDGTGEKKSLMDKIKDKLPGQH

SEQ ID NO: 25442 - protein, 333 aa, Hordeum vulgare subsp. spontaneum
PGGHDDHQKTAGTYGQQGHVGTGTHGTPATGGAYGQHEHTGATGTGTYGTGEKKGIMENIKEKLPGGHGDHQKTGDTYGHQEDTKMTGMGRHSAPATGGSYGEHAHTGQTGTGTHGTGEKKGVMENIKEKLSGGHDDHQKTAGTYGQQGHVGTGTHGTPATGGAYGQHEHTGATGTETYSTGEKKGVMENIKDKLPGGHGDHQQTGGIYGQQAHVGTGTHDTPATGGTYGQHGHTGVTGTGTHGTGEKKGAMENIKEKLPGGHSDHPQTTDTYGQHRHTGVAGTETHGTTATGGTYGQQAQTGTTGAGTHGTDGTGEKKSLMDKIKDKLPGQH

SEQ ID NO: 25443 - protein, 333 aa, Hordeum vulgare subsp. spontaneum
PGGHDDHQKTVGTYGQQGHVGTGTHGTPATGGAYGQHEHTGATGTGTYGTGEKKGIMENIKEKLPGGHGDHQKTGDTYGHQEDTKMTGMGRHSAPATGGSYGEHAHTGETGTGTHGTGEKKGVMENIKEKLSGGHDDHQKTAGTYGQQGHVGTGTHGTPATGGAYGQHEHTGATGTETYSTGEKKGVMENIKDKLPGGHGDHQQTGGIYGQQAHVGTGTHDTPATGGTYGQHGHTGVTGTGTHGTGEKKGVMENIKEKLPGGHSDHQHTTETYGQHRHTGVAGTETHGTTATGGTYGQQAQTGTTGAGTHGTDGTGEKKSLMDKIKDKLPGQH

SEQ ID NO: 25444 - protein, 333 aa, Hordeum vulgare subsp. spontaneum
PGGHDDHQKTAGTYGQQGHVGTGTHGTPATGGAYGQHEHTGATGTGTYGTGEKKGIMENIKEKLPGGHGDHHKTGDTYGHQEDTKMTGMGRHSAPATGGSYGQHAHTGETGTGTHGTGEKKGVMENIKEKLSGGHDDHQKTAGTYGQQGHVGTGTHGTPATGGAYGQHEHTGATGTETYSTGEKKGVMENIKEKLPGGHGDHQQTGGIYGQQAHVGTGTHDTPATGGTYGQHGHTGVTGTGTHGTGEKKGVMENIKEKLPGGHSDHQHTTETYGQHRHTGVAGTETHGTTATGGTYGQQAQTGTTGAGTHGTDGTGEKKSLMDKIKDKLPGQH

SEQ ID NO: 25445 - protein, 292 aa, Oryza sativa Indica Group
MQKLTNATKQWQLHSQIVRFYLFLSIPLFVSSAETGSANSEMCTRGFDVNTRPADGGAEAGRPSSPSSMQEASTRQQVADQEAADDEDNGGGGARKKLRLSKEQSSFLEDSFKEHSTLTPKQKSDLANRLNLRPRQVEVWFQNRRARTKLKQTEVDCEHLKRCCERLTRENRRLQREVAELRGALRTTTSSYPPLYGLHHLPAAAGTVFRVCPSCEHSKVVAAAASESFSPRVFAGGGAPAAITAAAAVPSPGAGSPPSSSAALFGARRPHFGPFAAAVIPPVLRRQPSATS

SEQ ID NO: 25446 - protein, 403 aa, Pseudomonas sp. Y2
MTDALIIDAVRTPIGRYAGALSGVRADDLGAVPLRALMQRHPQVDWSQVDDVVYGCANQAGEDNRNVARMSALLAGLPTSVPGVTLNRLCASGLEAVGTAARAIRCGEAGLVLAGGVESMSRAPLVMGKAEQAFSRQADIFDTTIGWRFVNPLMQQQYGIDSMPETAENVAEQFNISRADQDAFALRSQQRAGAAQASGRLAEEIVPVCIPQRKGPDKVIEQDEHPRADTTLEQLQRLGTPFRAGGSVTAGNASGVNDGACALLLASTEAARRYGLKARGRVVAMASAGVEPRIMGIGPVPATRKVLEIANLALADMDVIELNEAFAAQGLAVLRELGVADDDPRVNPNGGAIALGHPLGMSGARLVTTALRELEHRNGRYALCTLCIGVGQGLAMIIERLDD

SEQ ID NO: 25447 - protein, 358 aa, Pseudomonas sp. Y2
MSQFHSLTVKQVRSETRDAVSILFDVPGDLRETFRFTQGQYLVLRTHLDDEEVRRSYSICTGINDGELRVAVKKVAGGRFSAFANETLAAGDVLDVMPPSGSFHVALDPARHGHYLAVAAGSGITPILSIVKSTLEAEPNSRVTLLYGNRASGGALFREQLEDLKNRYLQRLNLIFVFSREQQDIDLYNGRIDAAKCEQLFSRWLDVPNLDAAFICGPQEMTETVRDALKAKGLASERIHFELFATAGNEQRRQAREAARQVDSAVSQVTVISDGRALSFDLPRNSVSVLEAGNAIGAELPWSCKAGVCSTCKCKVIEGEVEMDSNHALEDYEVAAGYVLSCQSYPVSERVVLDFDQL

SEQ ID NO: 25448 - protein, 418 aa, Arabidopsis thaliana
MSSSGQTQFRYTQTPSKVVHLRNLPWECVEEELIDLCKRFGKIVNTKSNVGANRNQAFVEFADLNQAISMVSYYASSSEPAQIRGKTVYIQYSNRHEIVNNQSPGDVPGNVLLVTFEGVESHEVSIDVIHLVFSAFGFVHKIATFEKAAGFQALVQFTDVETASAARSALDGRSIPRYLLSAHVGSCSLRMSYSAHTDLNIKFQSHRSRDYTNPYLPVNQTAMDGSMQPALGADGKKVESQSNVLLGLIENMQYAVTVDVLHTVFSAYGTVQKIAIFEKNGSTQALIQYSDIPTAAMAKEALEGHCIYDGGYCKLRLSYSRHTDLNVKAFSDKSRDYTLPDLSLLVAQKGPAVSGSAPPAGWQNPQAQSQYSGYGGSHICTHHLIPTGFTLRSTSLLWMRYCLLKISDFAATGEYFHV

SEQ ID NO: 25449 - protein, 246 aa, Arabidopsis lyrata subsp. lyrata
MLKSVSPIAFYDIGEHQQYSTFGYIVSKPGNAGAYEIDPPIPNIDDAIYGSDEFRMYAYKIKRCPRTRSHDWTECPYAHRGEKATRRDPRRYTYCAVACPAFRNGACHRGDSCEFAHGVFEYWLHPARYRTRACNAGNLCQRKVCFFAHAPEQLRQSEGKHRCRYAYRPVRARGGGNGDGVAMRMDGEDYDTSRSPVRSGKDDLDSNEEKVLLKCWSRMSIVDDHYEPSDLDLDLSHFDWISELVD

SEQ ID NO: 25450 - protein, 246 aa, Boechera stricta
MLKSASPLAFYDIGDQQYSTLGYIVSKPGIAEAYDLDHPIPTINNAIYGSDEFRMYAYKIKRCPRTRSHDWTECPYAHRGEKATRRDPRRYTYCAVACPAFRNGACHRGDSCEFAHGVFEYWLHPARYRTRACNAGNMCQRKVCFFAHAPEQLRQSEGKHRCRYAYRPVRARGGNGDGVAMRLDGEDYDTSRSPEKSGKGDLDSNEEKVLLKCWTSMTIVDDHYQPSDLDLDLDLSHIDWISELVD

SEQ ID NO: 25451 - protein, 208 aa, Boechera stricta
MATIEESSDLEAIQKHLFEDLMVSDGFMGDFDFDASFVSELWCIEPQVPKQEPDSPVFDPDSFVNEFLQVEAKSSPELNSSSSTYETDLSVKKAERFEEEEEEEEEEARHYRGVRRRPWGKFAAEIRDPAKKGSRIWLGTFESDVDAARAYDCAAFKLRGRKAVLNFPLEAGKYEAPANSGRKRKRSDVKEELQRTQSNSSSSSCDAF

SEQ ID NO: 25452 - protein, 461 aa, Eubacterium acidaminophilum
MKSDSSFRILIVDDEDEYRDILKRILEINAYDADTAVSGQDALVKIKKDEYDLVLSDLIMPGMDGVELLGEIKKIKKDIEVILVTGYGSIENAVEAMRKGAFSYFVKGNAPEELLGEIEKVRESAALQNKMKQHISDSLGGEFLLGTRSEKFKKALQTAEKAAKSNITILLLGESGVGKEVFAKYIHSCSERKDKPFIAVNCCAFSESLLESELFGHEKGAFTGASDSRKGRFEAADKGTLFLDEIGDVSLDIQVKLLRVLETRRIEKIGSNVPAPVDFRLICATNKDLQQEMVEGRIREDFFYRISSIVITIPPLRERREDLPDLIEFFLGKAQLEMGKEITSVQKEVMSFLLSYDYPGNIRELRNILNRLVVLSENGVLRASDLPNVENQADVLCEYDVRPLRDIRRDFESEYIERVLEVCGNNVSKAAKLLDISRRQLTKKIAEFGLREASQPSEMVD

SEQ ID NO: 25453 - protein, 281 aa, Populus tremula x Populus alba
GTRGTTAPGLPYVEEFIAPAGNWLLGGDLEVLKPIKYNDGLDHYRLSPKQLRKEFDRRQADAVFAFQLRNPVHNGHALLMNDTRRRLLEMGYKNPILLLHPLGGFTKADDVPLDVRMEQHSKVLEDGVLDPETTIVAVFPSPMHYAGPTEVQWHAKARVNAGANFYIVGRDPAGMGHPTEKRDLYDPDHGKKVLSMAPGLEKLNILPFRVAAYDTVAKKMAFFDPSRSKDFLFISGTKMRTYARTGENPPDGFMCPGGWEVLVKHYERLQAEEATPAAVSA

SEQ ID NO: 25454 - protein, 199 aa, Theobroma cacao
QVKGSENPRSHYKCTYPNCPTKKKVERSLDGQITEIVYKGSHNHPKPQSTRRSSSHAACTNSEISDQSGGTLGNEQTDSFLVQEDTSGSIGEDEFDQASSLSNPGGDDNENEPDAKRWKGENENEGIIGSGSRTVREPRIVVQTTSDIDILDDGYRWRKYGQKVVKGNPNPRSYYKCTTIGCPVRKHVERASHDLRAVI

SEQ ID NO: 25455 - protein, 200 aa, Theobroma cacao
QVKGSEFPRSYYKCTHPNCEVKKLFERSHDGQITEIIYKGTHDHPKPQPSRRYSSGNIMPGQEERSDKVSSFTGRDGKGSSIYGQMAYSIEPNSTADLSPVTANDDNIDEVDDDDPFSKRRKMDGGVDITPVVKPIREPRVVVQTLSEVDILDDGYRWRKYGQKVVRGNPNPRSYYKCTNAGCPVRKHVERASHDPKAVI

SEQ ID NO: 25456 - protein, 313 aa, Avena sativa
MGSASCISLRVMLVALAATAASAQLSSTFYDTSCPKALATIKSGVAAAVSSDRRMGASLLRLHFHDCFGCDASVLLSGNEQNAAPNAGSLRGFSVIDNIKTQVEAVCKQTVSCDDILAVAARDSVVALGGPSWTVPLGRRDSTSATGNTGDLPAPTSSLAQLQAAFSKKNLDTTDMVALSGAHTIGQAQCKNFRSRIYGGDTNINAAFATSLQANCPQATGGSGDSSLAPLDTKTPNAFDNSYYNNLLSQKGLLHSDQVLFNNGTTDNTVRNFASSASAFTGAFTTAMIKMGNISPLTGTQGQIRLSCSKVNS

SEQ ID NO: 25457 - protein, 314 aa, Avena sativa
MGSASCISLRVMLVALAATAASAQLSSTFYDTSCPKALATIKSGVAAAVSSDRRMGASLLRLHFHDCFGCDASVLLSGNEQNAAPNAGSLRGFSVIDNIKTQVEAVCKQTVSCADILAVAARDSVVALGGPFLEQVPLGRRDSTSATGNTGDLPAPTSSLAQLQAAFSKKNLDTTGMVALSGAHTIGQAQCKNFRSRIYGGDTNINAAFATSLQANCPQATGGSGDSSLAPLDTKTPNAFDNSYYNNLLSQKGLLHSDQVLFNNGTTDNTVRNFASSASAFTGAFTTAMIKMGNISPLTGTQGQIRLSCSKVNS

SEQ ID NO: 25458 - protein, 570 aa, uncultured marine gamma proteobacterium EBAC31A08
MLMQALHDEGVELIFGYPGGAALHIYDAIFRQDKIDHILVRHEQGATHAADGYSRATGKPGVVLVTSGPGATNAITGIATAFMDSIPMVVISGQVASHLIGTDAFQETDMIGVSRPIVKHSYTVFNAEEIPKIIKEAFYVATSGRPGPVVIDIPKDMTAPDNLFDYSYPEEAKIRSYNPPIEPEKNQIDRAVEAILISKKPVIYAGGGAIASNAEKELLELNEIIDAPVTNTLMGLGIYPASHHRFLGMLGMHGTYQANMAMHNADLIIAIGARFDDRITNKPSKFAPNAKVVHLDVDHSSVSKIIEANVAVFGQVKNSLKLIKETLEKKLDSYDSFALQPWHDQIKEWKSLHGLNYELYKDESDDHPILPQAVVQHVHEITNGEAYVTSDVGQHQMFAAQYYHFDKPRRWINSGGLGTMGFGLPAAMGVKLAFPKDEVVCITGEGSIQMCIQELSTCLQYNLPIKIININNEALGMVKQWQDMNYGGRHSESTYQNSLPDFIKLAESYGHIGIKITKNSDLSEGLKKAFEMKDKLVFVDIYVDPSEHVYPMQVANGSLENMWLSKDEQT

SEQ ID NO: 25459 - protein, 340 aa, Pinus taeda
MGRQPCCDKVGLKKGPWTAEEDRKLVNFITLHGHGCWREVPKLAGLLRCGKSCRLRWTNYLRPDLKRGLLSESEEKLIIDLHAAIGNRWSRIAAQLPGRTDNEIKNYWNTRIKKKLRQMGIDPVTHKPLTQMQMQSTPAQTLLLQENDTEQKQQEQHNEPDPDQNQSSNGTVETLVSRAREPHDDIEPLQNFNMEDSNFNMEDSMQLFNVCSPTSGISLSGRTEEVDSDDSDQVSKSFGNGSSTHSQYIGRESSGVKAECGLSGWDQMAGVLGDPLSEWNVDLESWAAGLDATAASASAWIQQLPDCQWNDFQGDFEICSSKSCPETLQRLGPFLDDDEL

SEQ ID NO: 25460 - protein, 381 aa, Acinetobacter lwoffii K24
MSAPYYQSHLFYNRFLIDLPDCWWFLILDAQPGAANCMWRPLCPSLSFLLSWPPRSWKEPPSAYASTACVMKRTACARSAYRVWTDNRSSATNPARISTSPAPPGVTRQYSLCGDPDHRETHLFAVKREEASRGGSRSLHEDVTVGCELTIGAPRNLFQLAPGATEHILIAAGIGVTPLLSMAYRLLKQEQRFVLHYFARSAEHAAFLPLLSRAPFNDFVRFHFGVERDQLDAALAGCVANARDGSHLYTCGPAPFMERVVAIGEQRVAADAIHLERFAAEPAAAAGDESNTLDSFDVRIASSGATVHVDKHTTIVAALASIGIEVDTSCGEGVCGTCMVDVVSGTPEHRDHCLSKAERASGKVICCCVSRAASPLLVLDL

SEQ ID NO: 25461 - protein, 515 aa, Pimpinella brachycarpa
MTSSLGDLLAQPNNDDFGSNWGFENQKTKSFANPSQPFSPPPVSPSSYFSFLDSPIQINNYNIVSSSGNGTMNAQSFNEENQNFSDFSFPTQSRPASSTSSSSFVPANTNSVEESLKRKQGGWNFEEAAKNNEFQRFSPEMTMNQANMLSPEMTMNQANMQSNAAVLQSNSINYAQSSQSSQTNRDQSKLDDGYNWRKYGQKQVKGSENPRSYYKCTYLNCPTKKKVETTFDGHITEIVYKGNHNHPKPQSTKRSSSQSYQNSIPTMPETSLLENGHLEPVTTPENSSLSFGEDDLFEQGSMNKQGDDDENEPDAKRWKGEYENNETMSSLGSRTVREPRIVVQTTSDIDILDDGYRWRKYGQKVVKGNPNPRSYYKCTQVGCPVRKHVERASHDLRAVITTYEGKHNHDVPAPRGSGSYAVNRPSDNTATTSAPTAIRPTTNYLNPLQNTRAQPANGQAPFTLEMLQRPRSYEFSGFGNSTNTYTINQNQQASGQFSTAKDEPDVDSFFDSFLA

SEQ ID NO: 25462 - protein, 444 aa, Solanum lycopersicum
MAQSNSKPPMSSQNFGVGAVSHVRSLSQSSIFSNSCLPPLSPFPPSEPGMVSGHSSLKDISMEEADVNSQGVGVVSSFTRDGLPPRKGHRRSNSDVPLGFSAMIQSSPQLMPISGQKVLGRAVSLGDSNGKIDERKPKGEVTDELLFSYMNLENIETLNGSGTKDRDKDSIVSGTKVTGSESSNNEAESVMKGNNVSIQPTNLREGTKRSADANIAPAARHFRSLSMDSAIGNFHYGDESPNLPTSLMMRSGQLSPSNSGNESSSKHNLDFGNSEFSEAEMKKIMADERLAEIAVLDPKRAKRILANRLSAARSKERKTRYISELEHKVQKLQTETTTLSTQVTILQKNFVEISSLNSELKFRIQAMEQQAQLRDALHEALTAEVQRLKLAAGEHREEGRLPNNMTQQTPVKHNIFQMQRQQPSQMQQLSVGKASAASATPASA

SEQ ID NO: 25463 - protein, 295 aa, Pseudomonas putida
MRIAFIGLGNMGAPMARNLIKAGHQLNLFDLNKTVLAELAELGGQISPSPKDAAANSELVITMLPAAAHVRSVYLNDDGVLAGIRPGTPTVDCSTIDPQTARDVSKAAAAKGVDMGDAPVSGGTGGAAAGTLTFMVGASAELFASLKPVLEQMGRNIVHCGEVGTGQIAKICNNLLLGISMIGVSEAMALGNALGIDTKVLAGIINSSTGRCWSSDTYNPWPGIIETAPASRGYTGGFGAELMLKDLGLATEAARQAHQPVILGAVAQQLYQAMSLRGEGGKDFSAIVEGYRKKD

SEQ ID NO: 25464 - protein, 573 aa, Hordeum vulgare
MSPARLPISRESCLTIPAGFSPSALLDSPVLLTNFKVEPSPTTGSLGMAAILHKSAHPDMLPSPRDKSVRNAHEDRGSRDFEFKPHLNSSSQSLAPAMSDLKKHEHSMQNQSMNPSSSSSNMVNENRPPCSRESSLTVNVSAQNQPVGMVGLTDSMPAEVGTSEPQQMNSSDNAMQEPQSENVADKSADDGYNWRKYGQKHVKGSENPRSYYKCTHPNCEVKKLLERAVDGLITEVVYKGRHNHPKPQPNRRLAGGAVPSNQGEERYDGASAADDKSSNALSNLANPVHSPGMVEPVPASVSDDDIDAGGGRPYPGDDATEEEDLESKRRKMESAGIDAALMGKPNREPRVVVQTVSEVDILDDGYRWRKYGQKVVKGNPNPRSYYKCTSTGCPVRKHVERASHDPKSVITTYEGKHNHEVPAARNATHEMSAPPMKNVVHQINSNMPSSIGGMMRACEARNYTNQYSQAAETDTVSLDLGVGISPNHSDATNQMQSSGPDQMQYQMQTMGSMYGNMRHPSSMAAPAVQGNSAARMYGSREEKGNEGFTFRATPMDHSANLCYSSAGNLVMGP

SEQ ID NO: 25465 - protein, 455 aa, Myxococcus xanthus
MPGRVLVVEDEREMRAMLEKGLTRRGFTPVALPSADEALVRLAAEDFDVVLTDLRMPGMDGLALCERIALNRPDIPVVVVTAFGSLETAVAAIRAGAYDFVTKPIDVDALVLVLERAVQHRALREEVRRLRQELGRREDSGTVVGESPAMKQAYALIDRVADLDSTVLITGESGTGKEVAARAVHTRGRRKDGPFVAINCAAMPETLLQSELFGHAKGAFTDAKAARTGLFVQANGGTLFLDEVGELPLTLQHKLLRALQERTVRPVGGDTELPFDARIVAATNRDLELAVEEDRFREDLYYRLNVIGVELPPLRARGNDVLALSQRFIEQFASRTGKRVLGLSPAAAQRLLAYGWPGNVRELQNCLERAVALTSFEEITVDDLPERVRNYSQPRVVPETQDASELVTLEQLERRYIHRVLEAVGGSRTLAARILGVDRKTLYRKLERDDDTRKG

SEQ ID NO: 25466 - protein, 434 aa, Chromobacterium violaceum ATCC 12472
MKQPHRQRKTVPSGGRPETETAAAMQPVHKSQKLANVCYDIRGPVLEHAKRMEDEGHRIIKLNIGNPAPFGFFAPDEIIEDVIVNLPAASGYSDSKGLFAARKAIMHYAQQKHLPNVAMDDIIVGNGVSELIVMAMQALLDNGDEVLVPAPDYPLWTAAVSLAGGKAVHYLCDEEQGWFPSIDDIRAKITPTTRAIVIINPNNPTGAVYPPALLQQIVDVARQHQLIIYADEIYDKVLYDAVRHTSIASLAPDLFVVTLNGLSKNYRACGYRAGWMILSGEKKHAKDYIEGLNMLASMRLCANVPSQYAIQTALGGYQSIDDLVAPGGRLARQRDLAHKLLTEIPGVSCVKPQGALYLFPRLDPKVYPIADDQQFILELLQQEKVLLVQGSGFNWIAPDHFRVVFLPNSDDLIEAIGRIARFLESYRKRHGAAE

SEQ ID NO: 25467 - protein, 266 aa, Arabidopsis thaliana
MTADSQSDYAFLESIRRHLLGESEPILSESTASSVTQSCVTGQSIKPVYGRNPSFSKLYPCFTESWGDLPLKENDSEDMLVYGILNDAFHGGWEPSSSSSDEDRSSFPSVKIETPESFAAVDSVPVKKEKTSPVSAAVTAAKGKHYRGVRQRPWGKFAAEIRDPAKNGARVWLGTFETAEDAALAYDRAAFRMRGSRALLNFPLRVNSGEPDPVRIKSKRSSFSSSNENGAPKKRRTVAAGGGMDKGLTVKCEVVEVARGDRLLVL

SEQ ID NO: 25468 - protein, 882 aa, Emericella nidulans
MSLQQDPSKPDGRPGEVRFDSFTDASASNGSSNFNNASKTASALSEADKGTQSGSDLLHRLSLKEILTMRAPDFQKQYQGLNLSGRIISAAFCIPHKLYFRAGRDWELKPRPGSSALFDSFAYLASEKSGWSHTLVGWTGEVEPLNEGSNPLQALNSNANTNLPAALDNTSRSLSKGSAPVVPDISLLQSNSSVAETSTVGPDDRKRLEDQLSSSRHGKVVPVCLSDESDVPEDTIILGDQSRWRRYAEKELYALLHYKQNGPTDGRFERDSWTDYVRMNQLFAERILQEYKEGDIVWIHDYHLFLLPSILRQHVPNIYIGFYLHSPFPSSEYMRCLAKRKEILTGVLGANMIGFQTFSYSRHFSSCCTRVLGFESDSAGVDAYGAHVAVDVFPIGIDAEAIQKIAFENADTEKAVEGLRQLYAGKKIIVGRDRLDSARGVAQKLQAFETFLERFPEWRDKVVLIQVTSPTSVEEEKEEQKIASRISNLVSTINGRFGSLSFSPVKYYPQYLSPHEYFALLRVADVGLITTVRDGMNTTSLEYILCQQENHSPLILSEFSGTAGALSSAIHINPWDTIGVSEAINKALTESVADKKEQHLKLYKHVTTNTVSAWSNQFISRLLANLSSFDQSMATPALDRTKLLKQYRKSRKRLFMFDYDGTLTPIVKDPQSAIPSDRVLRTLKTLAADPRNAVWIISGRDQAFLDEWMGHIPELGLSAEHGCFIRMPRSDNWQNLAETTDMGWQKEVMEIYQHFTERTQGSFIERKKVALTWHYRRADPEYGAFQARECRKQLEEHVSKTWDVEVMAGKANLEVRPRFVNKGFIATRLVQAYEDGKVPEFILCSGDDFTDEGMLFPFLATPKLRHELLLTYLRYVPCLEEI

SEQ ID NO: 25469 - protein, 265 aa, Oryza sativa Japonica Group
MVPRDRVNAAAAGGGGEGRLVQSGIVNKKCDKKAPKRIHKSEREKLKRDKQNDLFNELGNLLEPDRQNNGKACVLGETTRILKDLLSQVESLRKENSSLKNESHYVALERNELHDDYSMLRTEILELQNELRTRMEGNPVWSHVNTRPALRVPYPTTGVFPVQHLPHLPVTTTAAFPQKLPVIIEQHYAATPRELQLFPESATSEDSEPSQEHGISDHVTRPQPRYPTPTATLPVNLFPVFPGRQDQQCSSGTSGTNEEDRIGRS

SEQ ID NO: 25470 - protein, 336 aa, Frateuria sp. ANA-18
MAKQIHSLTITDVVAQGSDAILLSLGVEAGQQQSFCFRPGQYLTLAVSVQEDELWRCYSITSEPVQGQPISVLVRRVAEGRVSNWLCDHAQPGQQIKVLPPAGRFILARPGQPVLLYAGGSGIAPVFALAREALAQGASRVLLFYANRDRATAMLLKELEAMRLRATGRLEIVYWYDSEQGLPSQDVLAAQTRGLEQADAYLCGPEPFMRAVNTSLQAARFESQRMHQEDFGGVVENEAGEEDEPVGDPAQLTVQIKGKTYTVQVKAGEALLTAMLRAGLPAPHACRVGECASCMCRLQEGEVQRLESSVLDDDDVADGWLLACRRAASSTLKVRF

SEQ ID NO: 25471 - protein, 430 aa, Penicillium chrysogenum
MSSGGDVNQAEKSVFGMPGFVVDFLMGGVSAAVSKTAAAPIERIKLLIQNQDEMHKQGRLDRKYNGIVDCFRRTAAAEGVVSLWRGNTANVIRYFPTQALNFAFRDTYKSMFAYKKDRDGYAKWMMSNLASGGAAGATSLLFVYSLDYARTRLANDAKSSKGTGERQFNGLVDVYRKTHNGIVDCFRRTAAAEGVVSLWRGNTANVIRYFPTQALNFAFRDTYKSMFAYKKDRDGYAKWMMSNLASGGAAGATSLLFVYSLDYARTRLANDAKSSKGTGERQFNGLVDVYRKTLATDGIAGLYRGFGPSVLGIVVYRGLYFGMYDSIKPVLLVGPLEGSFLASFLLGWTVTTGAGVASYPLDTVRRRMMMTSGEAVKYNSSMDAARQIVAKEGVKSLFKGAGANILRGVAGAGVLSIYDKAQMLLLGKKF

SEQ ID NO: 25472 - protein, 318 aa, Oryza sativa Japonica Group
MASCLSVLLLLCLALAGSVSGQQLSATFYSRSCPRALAIIRAGVRAAVAQEPRMGASLLRLHFHDCFVQGCDASVLLNDTANFTGEQGANPNVGSIRGFNVVDNIKAQVEAACKQTVSCADILAVAARDSVVALGGPSWRVLLGRRDSTTASLALANSDLPPPSFDVANLTASFAAKGLSQADMVALSGAHTVGQAQCQNFRDRLYNETNIDAAFAAALKASCPRPTGSGDGNLAPLDTTTPTAFDNAYYTNLLSNKGLLHSDQVLFNGGAVDGQVRSYASGPSRFRRDFAAAMVKMGNIAPLTGTQGQIRLVCSKVN

SEQ ID NO: 25473 - protein, 576 aa, Oryza sativa Japonica Group
MAARFGPLLLVLPLSSALLVLSAATAPRGRPSQVDVGRQLREELWERNQGHEMLRSWRDGDPCSPSPWEGFSCRWKDGNLFVVKLNFSSKKLQGPIPAAIGNLTELDEIDLQDNNFTGSIPESFFDLTHLLKLSVKCNPFLNNQLPHGLSISVEFSYGGCAYHSPPGASNQRIAVIGGVAGGSLACTFALGFFFVCFNKREKNPQKKDCSSTRNPVFEECSTHKATNSAVQQLSLKSIQNATCNFKTLIGEGGFGSVYRGTLAHGEEVAVKVRSTSSTQGTREFNNELRLLSAVRHDNLVPLIGYCCEKDQEILVYPFMSNGSLQDRLYGEASKRKVLDWPTRLSVCIGAARGLAHLHGFAGRCIIHRDVKSSNILLDHSMCGKVADFGFSKYAPQEGDSNASMEVRGTAGYLDPEYYSTQSLSTKSDVFSFGVVLLEIVTGREPLDVQRPRDEWSLVEWAKPYIREYRIEEIVDPGIKGQYCSEAMWRVLEVASACTEPFSTFRPSMEDVVRELEDALIIENNASEYMRSIESTGTLGSNRYLSIDRKMFASGSARFASFDATKGHLQTMPSLPG

SEQ ID NO: 25474 - protein, 460 aa, Oryza sativa Japonica Group
MAAAGRTLGCIYAGTLVTASAHIITAVIGSGVLSLAWAIAQLGWVIGPAVLVAFSVITWFCSSLLADCYRSPDPVHGKRNYTYGQAVRANLGVAKYRLCSVAQYVNLVGVTIGYTITTAISMGAIKRSNWFHRNGHDAACLASDTTNMIIFAGIQILLSQLPNFHKIWWLSIVAAVMSLAYSTIGLGLSIAKIAGGAHPEATLTGVTVGVDVSASEKIWRTFQSLGDIAFAYSYSNVLIEIQDTLRSSPAENEVMKKASFIGVSTTTTFYMLCGVLGYAAFGNRAPGNFLTGFGFYEPFWLVDVGNVCIVVHLVGAYQVFCQPIYQFAEAWARSRWPDSAFVNGERVLRLPLGAGDFPVSALRLVWRTAYVVLTAVAAMAFPFFNDFLGLIGAVSFWPLTVYFPVQMYMSQAKVRRFSPTWTWMNVLSLACLVVSLLAAAGSIQGLIKSVAHYKPFSVSS

SEQ ID NO: 25475 - protein, 922 aa, Petunia x hybrida
MSSESNGSDSQLQPLNNHLPDVQPEGTTVEPDEVLSVIDSLKEKVAFERAHYIKKRVEGNTQKLEDLTKDLYNLATERKSLEVFGADRTVDLLAKRQKDAIDMQNGIDTSHGDDDSNSSEDDGYATSAILLGSSIAVKNAVRPIKLPEVKRIPPYTTWIFLDRNQRMTEDQSVVGRRRIYYDQNGGETLICSDSDEEVLDEEEEKKVFAEPEDYVLRMTIEEVGLSNTVLDLLGKCLSRKPSDVKARYEDLVKEDNAGTSKNQYMESSLDLYLAKDLDAALDSFDNLFCRRCLVFDCRLHGCSQDLIFPAEKQLPWHCSNADMEPCGPNCYSLAKKFESNATVISPQCASHEEKNVLPSDVASNTQLPGRKHVSRRSKSSQGEGAPSNAKAVSESSDSEIRPINDVTSNKCSSSPTKSKSDSKDGSNKRNSKRIAEHVLVASKNKQKKMTALETDSVASGSLGSKGLNLHSISRKENGDVSSPSQKAQCHSAKRSRRKNSPVTDSENSLQGKALDCQLIEATSEKPAINCDGMSRKNEYVGENNCKQEIDGIKSWRPIEKALFEKGLEMFGRSSCLIARNLMNGLKTCWEVFQYMNNSGNKLFSGAGDGMNGIFEGGSNGDGQENMGNEPRRRSKFLRRRGRVRRLKYTWKSAGYHAIRKRISERKDQPCRQFNPCGCQGPCGKECPCIVNATCCEKYCGCPKSCKNRFRGCHCAKSQCRSRQCPCFAAGRECDPDVCRNCWISCGDGTLGIPPQRGDSHECKNMKLLLKQQQKVLLGRSDVSGWGAFLKNSVGKHEYLGEYTGELISHREADKRGKIYDRENSSFLFNLNDQFVLDAHRKGDKLKFANHSPVPNCYAKVMMVAGDHRVGIFANERICAGEELFYDYRYEPDSAPAWARKPEASGPRKDDAAPSSGRARKHT

SEQ ID NO: 25476 - protein, 573 aa, Oryza sativa Japonica Group
MAAAAALRCNPRPSAAVALRGAAAAPQVGNEAAFELLVGATEPCLRGRRRGAGIRCQRSAAASAVVVEKKSRAVEPAREGANAGHTESELTVVMKFGGSSVASAERMREVADLILSFPEERPVIVLSAMGKTTNKLLMAGEKAVGCGATNVSELDELTFIKELHFGTIDQLGLDRSIVSGLSDELEQLLKGIAMMKELTLRTRDYLVSFGECMSTRIFAALLNKLGVKARQYDAFEIGFITTDDFTNADILEATYPAIAKRLHGDWVTGPAIPIVTGFLGKGWKTGAITTLGRGGSDLTATTIGKALGLREIQVWKDVDGVLTCDPNIHPNAKPVPYLTFDEAAELAYFGAQVLHPQSMRPAREGDIPVRVKNSYNRRAPGTLITKARDMSKTVLTSIVLKSNITMLDIVSTRMLGQYGFLAKVFSIFEDLGISVDCVATSEVSISLTLDPSKLWSRELIKQELDHVIEELEKIAVVHLLQHRSIISLIGNVQRSSLILEKAFNVLRTNGVNVQMISQGASKVNISLVVHDSEAKQCVQALHSAFFESGFLPEVNDILQDDSVAHSNGTVYRH

SEQ ID NO: 25477 - protein, 459 aa, Oryza sativa Japonica Group
MRCFDTAKIYAKAGDGGNGVVAFRREKYVPLGGPSGGDGGRGGNVFVEVDGDMNSLLPFRKSVHFRAGRGAHGQGRQQAGAKGDDVVVKVPPGTVVRSAAGDVELLELMRPGQRALLLPGGRGGRGNAAFKSGTNKAPRIAEKGEKGPEMWIDLELKLVADVGIVGAPNAGKSTLLTAISAAKPTIANYPFTTLLPNLGVVSLDFDATMVVADLPGLLEGAHRGYGLGHEFLRHSERCSVLVHVVDGSGEQPEYEFEAVRLELELFSPSLVDKPYIVVYNKMDLPEASERWNKFQEKLQAEGIEPYCISAMNRQGTEDVVLAAYKVLQKDRQRMKDDEEWNGPENLNHVADAIKRERRAPMNEFEIFHDKGTNTWNVVGAGIERFVQMTNWQYSESLKRFQHALEACGVNKTLIKRGVKEGDTVVVGEMEMVWTDEPSKTRSSKTMNSKDDSVRWPEFG

SEQ ID NO: 25478 - protein, 609 aa, Oryza sativa Japonica Group
MGAITSAELNFLIFRYLQESGFIHAAFTLGYEAGIHKGGIDGNLVPPGALITIVQKGLQYIELEANTDENDEDLAKDFALLEPLEIITKNVEELQQIVKKRKREKTQSDRDKDKGKEKERMEEHERRPGGERERERHDQEKELEKEKDRAERDRDQDKEKEKLHTERIDKVKAEEDSLAGGVVWSFEWRRGWIPWEARRASKSAWSQSSTGTRKWMQYRPAGETSLTLPCQGVLNLIATGPTPMDVFACAWSPAGSLLASGWGGFHAGFSWKPNVSKRVQFPCMSGWSGDSTARIWTIPDGPCGSITQSSPPGVHVLKHFKGRTNEKSKDVTTLDWNGEGTLLATGSYDGQARIWNSDGELKQTLFKHKGPIFSLKWNKKGDFLLSGSVDKTAIVWDTKTWECKQQFEFHSAPTLDVDWRNNNSFATCSTDNMIYVCKIGDQRPVKSFSGHQHSSPAFSKKNSEVNAIKWDPTGSLLASCSDDWTAKEIYTIRWSPTGPGTNNPNQQLLLASASFDSTIKLWEVEQGRLLYSLAGHRQPVYSVAFSPGGEYLASGSLDQCLHIWSVKEGRILKTYRGSGGIFEVCWNKEGSKIAACFSNNTVCLMDFRM

SEQ ID NO: 25479 - protein, 759 aa, Arabidopsis thaliana
MRGLLRASSLLLCGVILIQLLAAQIHAQSKKPKSPWPTLTGDPPLVIARGGFSGLFPDSSYDAYNFAILTSVPDAVLWCDVQLTKDALGICFPDLTMRNSSSIEAVYPTRQKSYPVNGVPTSGWFTIDFSLKDLKDVNLIRGILSRSKKFDGNSNPIMTVQSVSTQMKPSFFWLNVQHDAFYAQHNLSMSSFLVAASKTVLIDFISSPEVNFFKKIAGRFGRNGPSLVFRFLGQDEFEPTTNRTYGSILSNLTFVKTFASGILVPKSYILPLDDQQYLLPHTSLVQDAHKAGLEVFVSGFANDIDIAHDYSFDPVSEYLSFVDNGNFSVDGVLSDFPITASASLDCFSHVGRNATKQVDFLVITKDGASGDYPGCTDLAYKKAIKDGADVIDCSVQLSSDGTPFCLSSIDLGNSTTVSLTAFRNRSTTVPELGSLGAIYTFSLTWAEIQTLTPAISNPYRVTSLFRNPKQKNAGKLFSLSDFLSLAKNSTSLSGVLISVENAAYLREEQGLDVVKAVLDTLTQTGYSNSTATKVMIQSTNSSVLVDFKKQSQYETVYKVEENIRDILDSAIEDIKKFADAVVIQKLSVFPVAQSFITTQTNVVEKLQKSQLPVYVELFQNEFLSQPYDFFADATVEINSYITGAGINGTITEFPFTAARYKRNLCLGRKETIPYMAPAQPGALLTLVSPTAFPPAEAPNPVFTDADVTEPPLPPVTAKAPTSSPGTPSTNAQAPSGQTRITLSLLLSVFAMVLASLLLL

SEQ ID NO: 25480 - protein, 120 aa, Porphyromonas gingivalis W83
MCPPYGANKFSRKKVMYVIVDIQGQQMKVEQGRRLFVHHIKDVESGASVEFDKVLLVDNNGAITVGSPLVEGAKVVCEVLTPLVKGDKVLIFHKKRRKGYRKLNGHRQQFTEILVKEVVA

SEQ ID NO: 25481 - protein, 493 aa, Marinococcus halophilus
MKKMTTVLKVSIVLILLFLAFGVFFTSQLEAAMTAAQAFVFAHFGWYFQILVTLLLIFAVYLGFSKYGNVRLGKPDEKPEFNRLTWFTMLFSAGIGIGLLFYGVSEPIGHFSSPPNGEGGAESDAIRGVSSTWLHWGLHAWAIYALVALALALQQFRYQAPGLMSTTLRPVLGKYAYGPVANVVDTIAVFATLFGVAASLGLGSQQINAGLQFIFGVPYNLGVQFIIMTIVTIIFVTSASTGIQRGIKYLSNINLSLTGILLLFMLIAGPTLFLINMFASGLSDYVQNFLGWGLRMDPIDEQEASWTQNWTVFYWAWWISWTPFVGMFVARISRGRTIREFMAGVLLVPSIVSFFWFSTLGGSAIFLELFEGREVSSQSLETALFYVLETYPLGGVMSVFAIIVVTIFFVTTADSATFVLGMQTTGGSLNPPVSIKIMWGIFFVSVTAILLVVGGLSAFQTAIVVSALPLSVIVILMCIGIVKTLNLDQKRGK

SEQ ID NO: 25482 - protein, 525 aa, Marinococcus halophilus
MSEKEKKFKFLNSIFFISFIIIFAFALWGAIAPQALQAQAEFTYGFIADTFGWFYLLFVLFLILFNFYMAFSKYGRVRLGGDDARPKYPFFTWIAMLFSCGFGVSIVFWGVAEPMTHFQTPPPWTNVEPGTPEAAREAMWNAFFNNGIHQWASFTFVGLAISYFLYRQEERSLISDTMNGVIGDGTRPLRKGFRNGVDIIAVIATVMGVATTLGLSVLQISGGLNSVFNVPASSTTQFIIVAVMFVFFMASTISGLDRGIKYLSNVNLGLALFLMVAVLFIGPTGFIFETITMGLGDYVQNFFQASLRMENYTNGTWVQDWPIYYWAWTIAWSPFVGMFVARISKGRTLREFVLGVMVAPPFIGIIWIGIFGGTAINLDLFHNTDIAGIVAEDTTRAMFAMLDNIPLGTLLSILSICLLFTFLVTSADSATFVLGMMTSNGDTNPSMLLKIIWGALIAGLATVLIISAGLNGLQTVSLIGAWPFSIVLFISAISLLKSVRKDYKETRLREEEERRQRIREDIENS

SEQ ID NO: 25483 - protein, 325 aa, Mycobacterium rhodesiae
MGDTVTVQPFGDTFPVESGETVLSAILRNGRFVKYGCKHGGCSTCRAQVVEGEFTQSDGTSFSLSDADRDAGVVLLCSTYADGDLVVDVGETMADLTEDEYNAGQDIVEFVGTVDRIVDYTADIKGIEISLDEPLAISFVPGQYVEVLVPGSDDAWRSFSMANRPSDDSQVHLVVRVIPDGRFTSQIGTTISAGTKLNLRGPLGQFAIRLSHRPIIFIAGGSGIAPVLSMLADLIEQNNQRRTTFLYGARTVADLPMLDELRQLADELDWFTFIPALSQPDDTPWDGETGLITEVYDRHFPSGQGHEAYLCGPPGMIDAALESLI

SEQ ID NO: 25484 - protein, 246 aa, Petunia x hybrida
MGRGRVELKRIENKINRQVTFAKRRNGLLKKAYELSVLCDAEVALIIFSNRGKLYEFCSSNNMFKSLERYQKCSYGTLEVNQSSKDNEQNNYREYLKLKAKYESLQRYQRHLLGEDLGPLNIDDLENLEVQLDTSLKHIRSTRTQLMLDQLSDLQTKEKLWVEANKVLERKLEEIYAENSLQQSWGGGEQSVTYGHQHNAQSQGFFQPLECNSTLQIGYNPITTSRQITAVTNAQNVNGMVPGWML

SEQ ID NO: 25485 - protein, 392 aa, Pseudomonas sp. HJ-2
  misc_feature (69)..(70): Xaa can be any naturally occurring amino acid
  unsure (1)..(392): unsure at all Xaa locations
MIEVVIVAATRTAIGAFQGSLAGTPAVELGATVIRRLLEQTALDSSQVDEVILGHVLTAGAGRIPLARXXVIAGLPHAVPAMTLNKVCGSGLKALHLGAQAIRCGDAEVVIAGGMENMSLSSYVLPKARTGLRMGHAQLVDSMIVDGLWDAFNDYHMGITAENLVDKYGISREAQDEFAAASQQKAVAAIETGRFRDEIVPVSIPQRKGEALSFDTDEQPRAGTTAESLGKLKPAFKNDGSVTAGNASSLNDGAAAVLLMSAAKAAALGLPVLAKIAAYANAGVDPAIMGIGPVSATRSCLEKAGWSLAELDLIEANEAFAAQALAVGQELGWDAGRVNVNGGAIALGHPIGASGCRVLVSLLHEMLRRDAKKGLATLCIGGGQGVALAIER

SEQ ID NO: 25486 - protein, 356 aa, Ralstonia sp. E2
MYSLTIEPIGQTIPIAPGQTVLDACLRSGVWLPHACCHGLCATCKVQVVEGEVDQGEASSFALMDFERDNGQCLACCATAQSDLTIEADIEEDADALGLPLADYEAEVVDVRALTPTIRGIWLRVKGGAKVAFQAGQYLNLQVPGCDQPRAFSLANAPDEELVELHVRKVEGGQATGYLHERLAVGDALRFSAPYGRFFVRRSAQAPMLFLAGGSGLSSPRAMIRELLAAGETLPITLVQGARNRAELYGEDEFRALAERHPNFRYVPALSDEPADSAWQGARGFAHEALAALYADGDGRADFRGHKAYLCGPPPMIEACIRTLMQGRLFEADIHTEKFLSASDAQNSARSPLFKI

SEQ ID NO: 25487 - protein, 631 aa, Emericella nidulans
MGLLSFRQPSWRISRSQFYPIWALSQLLLNPIAVLAQSAADYYVESLPGAPEGPLLKMHAGHIEVDPEHNGHLFFWHYQNRHIANRQRTIIWLNGGPGCSSMDGALMEIGPYRLKDNETLEYNEGSWDEFANLLFVDQPVGTGFSFANTNSYLHELDEMAAQFITFLEKWFAVFPEYERDDIYIAGESYAGQYIPYIAKAIQDRNKDIHEKQSSSARWNLRGLLIGNGWISPAEQYPAYLSFAYEEGLVEEGSKLGKELETLLSICKSKMETGPKISITDCEAVLNKLLDKTVDSNNQCINMYDIRLRDGSCGTTWPPDLVDVKPYLHTYEVIQALNISPEKESGWDECDGNVGAAFRPQKSEPSVKLLPGLLESGIEILLFSGDKDLICNHVGTEQLISNMKWAGGTGFETSPGVWAPRHDWTFEDEPAGYYQYARNLTYVLLYNASHMAPFDLPRRTRDMVDRFMHVDIASIGGAPADSRIDGEPLPQTSVGGQPNSTVHQEEEQQKIKETEWNAYAKSGEAVLVVVIIGVLVWGFLIWRSRRRHNGYSGIAIKSPSRTSIMGRFHNNHSNGADVEAGDFDEAELDDLHSPGLDRENYAVGEDSDDEAHRQDLPRAQESSSKSENNLVT

SEQ ID NO: 25488 - protein, 525 aa, Solanum chacoense
MASSGGNMNSFMNSFNSFSSSQFMTSSFSDLLSDNNDNNNKNWGFSDDRIKSFPMINSSSSPASPSSYLAFPHSLSPSMLLDSPVLFNNSNTLSSPTSGSFGNLNSKEGNSRSSEFSFQSRPATSSSIFQSSAPRNSLEDLMTRQQQTTEFSTAKTGVKSEVAPIQSFSQENMPNNPAPVHYCQPSQYVREQKAEDGYNWRKYGQKQVKGSENPRSYYKCTFPNCPTKKKVERNLDGHITEIVYKGSHNHPKPQSTRRSSSQSIQNLAYSNLDVTNQPNAFHENGQRDSFAVTDNSSASFGDEDVDQGSPISKSGENDENEPEAKRWKGDNENEVISSASRTVREPRIVVQTTSDIDILDDGYRWRKYGQKVVKGNPNPRSYYKCTFTGCPVRKHVERASHDLRAVITTYEGKHNHDVPAARGSGSYAMNRPPTGSNNNMPVVPRPTVLANHSNQGMNFNDTFFNTTQIQPPITLQMLQSSGSSSYSGFGNSSGSYMNQMQHTNNSKPISKEEPKDDLFFSSFLN

SEQ ID NO: 25489 - protein, 620 aa, Medicago truncatula
MNLKNGLLLFILFLDCVFFKVESKCVKGCDVALASYYIIPSIQLRNISNFMQSKIVLTNSFDVIMSYNRDVVFDKSGLISYTRINVPFPCECIGGEFLGHVFEYTTKEGDDYDLIANTYYASLTTVELLKKFNSYDPNHIPVKAKINVTVICSCGNSQISKDYGLFVTYPLRSDDTLAKIATKAGLDEGLIQNFNQDANFSIGSGIVFIPGRDQNGHFFPLYSRTGIAKGSAVGIAMAGIFGLLLFVIYIYAKYFQKKEEEKTKLPQTSRAFSTQDASGSAEYETSGSSGHATGSAAGLTGIMVAKSTEFTYQELAKATNNFSLDNKIGQGGFGAVYYAELRGEKTAIKKMDVQASSEFLCELKVLTHVHHLNLVRLIGYCVEGSLFLVYEHIDNGNLGQYLHGIGTEPLPWSSRVQIALDSARGLEYIHEHTVPVYIHRDVKSANILIDKNLRGKVADFGLTKLIEVGNSTLHTRLVGTFGYMPPEYAQYGDVSPKIDVYAFGVVLYELITAKNAVLKTGESVAESKGLVQLFEEALHRMDPLEGLRKLVDPRLKENYPIDSVLKMAQLGRACTRDNPLLRPSMRSIVVALMTLSSPTEDCDDDSSYENQSLINLLSTR

SEQ ID NO: 25490 - protein, 624 aa, Medicago truncatula
MNLKNGLLLFILFLDCVFFKVETKCVKGCDVALASYYIMPSIQLINVSNFIQSKIVLTNSFDVIMSYNRVVVFDKSGLISYTRINVPFPCECIGGEFLGHVFEYTTKEGDDYDLIANTYYASLTTVELLKKFNSYDPNHIPVKAKINVTVICSCGNSQISKDFGLFVTYPLRSDDTLAKIATKADLDEGLLQNFNQDANFSKGSGIVFIPGRDENGVYVPLPSRKAGHLARSLVAAGICIRGVCMVLLLAICIYVRYFRKKNGEESKLPPEDSMSPSTKDGDKDSYSDTRSKYILVDKSPKFSYKVLANATENFSLAKKIGQGGFGEVYYGVLGGKKVAIKKMKTQATREFLSELKVLTSVRHLNLVHLIGYCVEGFLFLVYEYMENGNLSQHLHNSEKELMTLSRRMKIALDVARGLEYIHDHSVPVYIHRDIKSDNILLNKNFNGKIADFGLTKLTNIANSTDNTNHMAGTFGYMPPENAYGRISRKMDVYAFGVVLYELISAKAAVIMIDKNEFESHEIKTNESTDEYKSLVALFDEVMDQKGDPIEGLRKLVDPRLGDNYSIDSISKMAKLAKACINRDPKQRPKMRDVVVSLMKLISTIDDESRTDSAELSLDVEHDSN

SEQ ID NO: 25491 - protein, 342 aa, Aspergillus niger
MMEEAFSPVDSLAGSPTPELPLLTVSPADTSLDDSSVQAGETKAEEKKPVKKRKSWGQELPVPKTNLPPRKRAKTEDEKEQRRIERVLRNRAAAQTSRERKRLEMEKLENEKIQMEQQNQFLLQRLSQMEAENNRLNQQVAQLSAEVRGSRGNTPKPGSPVSASPTLTPTLFKQERDEIPLERIPFPTPSITDYSPTLRPSTLAESSDVTQHPAVSVAGLEGEGSALSLFDVGSNPEPHAADDLAAPLSDDDFHRLFNVDSPVGSDSSVLEDGFAFDVLDGGDLSAFPFDSMVDFDPESVGFEGIEPPHGLPDETSRQTSSVQPSLGASTSRCDGQGIAAGC

SEQ ID NO: 25492 - protein, 387 aa, Chromobacterium violaceum ATCC 12472
MNIVIPAERLAGEHRVAATPDTVKKLVAAGHAVTVEQGAGLAAALPDAAFLAAGAGIAEQRQAMLAAADIVLAVRMPEAADAAALKPGAVLIGMLAPYQNPLLPQLAAQRVSAFALELLPRTTRAQSMDVLSSQNNIAGYKAVLLAGQFYPRFMPMLMTAAGTVKAAKALVLGVGVAGLQAIATAKRLGAVVEAYDVRPATREQVESLGAKFVEVPMSDEEKAASGGVYAREMSADFQVRQNALIAQRAAAADIVITTALIPGKPAPRLLSAEAVAGMKPGSVIVDLAAEAGGNCELTRAGEACLSPNGVHLVGLTNLPAMLAADASSLYARNLHTFLGLLLTPEGLKIDLEDDLVAATLIAHQGEQRFGAAARPAAANHDKEPQHG

SEQ ID NO: 25493 - protein, 588 aa, Chromobacterium violaceum ATCC 12472
MQISGAEIVVRCLQEEGVEFVFGYPGGAVLEIYDAIFRQDKFKHVLVRHEQAAVHAADAYSRSSDKVGVALVTSGPGATNAVTGIATAYMDSIPMVVISGQVPSPAIGLDAFQEVDMVGITRPCVKHNFLVKDVNEIAATIKKAFYIAKSGRPGPVVVDIPKDVTQARAEFRYPDSVHIRSYVPATRGHSGQIKKAVNLLLEAKRPYIYVGGGAVQGRAEAEVTELVRSLNLPCTNTLMGLGAYPGSDRQFLGMLGMHGTYEANMAMQYCDVLVAVGARFDDRVISVPSHFLGQAKKIIHIDVDPSSISKRVKADIPIVGDVKLVLREMLDQLKQAGQKPDGSALNQWWKQIEEWRGHDCLLYAPSDELIKPQMVVETLYDITGGQAIVTSDVGQHQMWAAQYYKFDRPKQWLNSGGLGTMGFGLPAAIGAQLANPNAQVACITGEGSIQMNIQELSTAKQYHTPVKVVALNNRYLGMVRQWQEFFYGTRYSESYMDALPDFVKIAEAYGHIGFKVENPADVEPVLREAFSDKLKERLVFLDFRTDQSENVFPMIQNGKGLDQMDLPAHMRAVQQVPFENNRDYGNMC

SEQ ID NO: 25494 - protein, 618 aa, Chromobacterium violaceum ATCC 12472
MCGIAGFFSRRPVNPAVPQAMLDELHRRGPDDASRLLLDSELNPADGGAIHNAMLHARLAIVDPRPVANQPMASDDGQVWICYNGEVYDWEIGKAELEAGGAVFRTHSDTEFILRGYQAWGIEGLLERLRGMFAFAILDKRCEKVHLARDRMGEKPLLYSLQDGDFAYGSLVRAVLPFLPADKRAFSPAAIDAYLAHRYIPSPATVFSHINRLENGYRLEFDLNTRQLTKQRYWQPKAESGDWLPELDRAVAMRTVADRPLGVLLSGGIDSTVIASRLAIQQLTQFSSFTAAFPGSTLDESGDAADSARRMGLPNVRVDMPENLAADFERIVADLDQPFADPSSFPTWYLAREVTKHVKVVLVGDGGDELLAGYKRMGKHLRTRWRQNIRLPLPIKPQLDSKRGKLATELAMDWKSAYSLRFSGFTPGQRSFLQGGRKLEKLCHWRAPDDIGPEPGDGSPGLHQLLELDFANYLPDYILQKSDLCTMAHGLEGRAPLLDHGFYQRLLSTSAAERYTRPAKLIFRRAIHPALPTDFFQRKKRGFNPPLSGWLKTSLAPRFDGLGSRLAEASGGQLDAGAVDAFARAYRDGAGHLAEQMLQLLILDESLTQLRRLCRELG

SEQ ID NO: 25495 - protein, 584 aa, Chromobacterium violaceum ATCC 12472
MKDSFKNSWAIYRRLLGYLLGYWKVLLLSMLSMAVAALTEPAVAKLLKPLIDGGFVNKDPQVIMWVPLAIIGIYLIRGLAGFINEYTASWLTGQLVQRLRQQMFAKLVNLPARYYDEHQSGRLMSRITNDVNQVTEAGFNVITVTVRDGLTALGMLGLMLTTDWQLTLICLVVMPAVTYCMRLVGQRLRGLARQNQQHMAQMTQVLAESIQCQRAIKVYGGQEREMARFDHTATSVRRNQVKQSAASAANTGVTQLMIACALAAILYFAGLRAQHGGLTAGDFMVFLTAMLGLFAPVKRISSVSQAMQRGLAAAESVFAFIDEPGEPDDGASALPATRGRLSFDAVSFAYPNVDSPALSGIDLEIQPGETVALVGSSGSGKTTLASLVPRFYEPSAGRLLLDGVPLADIPLRQLRGHIALVSQQVELFNDTVAANIAYGREDASREEIVEAARAANAMEFIEGLPDGLETVIGENGARLSGGQRQRLAIARALLKNAPLLILDEATSALDTQSERLVQAALENLMKNRTTIVIAHRLSTIENADRIVVMHQGRLAEQGRHQALLEQGGLYARLHSLQFSEPQAD

SEQ ID NO: 25496 - protein, 103 aa, Chromobacterium violaceum ATCC 12472
MYAVIKTGGKQYKVAIGEKLKVEQIPADVDSQIVLEEVLMIADGEQVVVGAPLVSGATVKATVVSHGRGEKIRIFKMRRRKHYQKHQGHRQNYTEIRIDAISK

SEQ ID NO: 25497 - protein, 386 aa, Chromobacterium violaceum ATCC 12472
MKFIDEARIEVMAGRGGNGVASFRREKFVPFGGPDGGDGGKGGSVYAVADENVNTLVEYRFVKKYLAQHGERGRGADCYGKGGDDIELKMPVGTVIHDADTGELVADLTHHGQRVMIAKGGKGGLGNIHFKSSTNRAPRQCTPGEQGEQRTLKLELKVLADVGLLGMPNAGKSTFIRSVSAARPKVADYPFTTLHPNLGVVRMDDTRSFVIADIPGLIEGAAEGAGLGHRFLKHLQRTGLLLHVVDIAPFDPDVDPVREARAIVEELKKFDEELHGKPRWLVLNKVDMLPEDERELTVSAFLNAYGWPQERPDDSLGFDIKAPRVFTISALNHEGTRELTFAIMSYLDVVRAQARKEAEALQQQAAAAKQKVIMPEAPAVSEGDDA

SEQ ID NO: 25498 - protein, 550 aa, Chromobacterium violaceum ATCC 12472
MTGDSPLQQQHSRHIGPIALMLTGLGSIIGSGWLFGAAHAAQIAGPAAIVAWIVGMVIILSIALSYAELGAMFPESGGMVRYARYSHGSLLGFIAAWANWIAIVSVIPIEAEASVQYMSTWPYPWAQNLYHNGELSTVGLSFAAVLVIAYFLLNYWGVKLFAKANSAITIFKVIVPAVTVGALIYSGFHSENLNNPAMGGFAPFGWASVMTAVATSGIVFSFNGFQSPINLAGEARNPGKSVPFGVVGSILLAAVIYVALQVAFLGALSPSELAHGWKGLDFSSPFAQLAMALGLNWLMMTLYFDAFVSPSGTGATYMASTSRMIYGMQRNGTMPEIFGRIHPLYRIPRPAMWFNLAVSFVFLFFFRGWGTLAAVISVATVISYLTGPISAAALRRCAPDLPRPLRLAGLSVVAPFAFVCASLVLYWARWPLTGQILFLIVAALPVYIWYQAKAGWPEFARELKGALWMVLYLPAMALLSYIGSVDFGGIGLLPYGVDMAVVAAASLGFYFWGVNSGWYTRYLRDEHDPKLVEAMQQEAKASGKLAEQRG

SEQ ID NO: 25499 - protein, 761 aa, Chromobacterium violaceum ATCC 12472
MDEQLRQSALEFHQFPTPGKIQVAPTKPLTTQRDLALAYSPGVTAPCDAIVEDPLNAYKYTARGNLVAVISNGTAVLGLGNIGALASKPVMEGKGVLFKKFAGIDVFDIEVNELDPDKLVDIICSLEPTFGGINLEDIKAPECFYIEKKCRERMGIPVFHDDQHGTAIVAAAAVLNGLRLVKKEIGEVRVVASGAGAAAIACLDLLVALGVKRENITICDSKGVVFVGRDEKLDESKLRYAIQDNGWRKLADAMAGADIFMGLSGPRLVSQDMVKSMARDPLILAMANPEPEILPPLVKEVRPDAIIGTGRSDFPNQVNNVLCFPFIFRGALDVGATTINEEMKLATVRAIADLAMAEQNDVVASAYGDQELSFGPEYVIPKPFDPRLIVKIAPAVAKAAMDSGVATRPIQDFDAYADQLAQFVYKTNLFMKPVFAQAKKDPKRVVMTEGEDERVLHATQEIVTQGLAKPILVGRPSVIEKRIEKLGLKMRPGVDFELVNNESDPRFNDYWQDYYQLMKRKGVSQEQARRRVIGNTTLIGAMMVRRGDADALICGTYGPYRQHFDILENVLGYANKDKVAGAMNALILPTGNIFITDTYVNAEPSAEQLAAITKMAAQSIQRFGIQPKAALLSNSSFGALNTASAQKMRAAFDQIRAAQPELEIDGEMQGDAALVESIRQQAMPDSTLKGSANLLIMPNVEAANISYNLLRVSASDGVTIGPILMGMAKPAHILTPISSVRRIVNMVALASVDAQVAAQQG

SEQ ID NO: 25500 - protein, 408 aa, Chromobacterium violaceum ATCC 12472
MALIVQKYGGTSVGTTERIKNVARRVAKWKAQGHDVVVVVSAMSGETNRLIALAKEIQDYPDPRELDVVVSTGEQVTIGLLAMALKEIGVPAKSYCGWQVKVVTDQAHTKARIQSIDDEAMRGDLKEGRVVIVAGFQGVDEEGSITTLGRGGSDTSAVALAAALKADECQIYTDVDGVYTTDPRVVPEARRLKTVTFEEMIEMASLGSKVLQIRSVEFAGKYKVRLRVLSSFEDEGEGTLITFEEDESMEKAVVAGIAFDRNEARINVKGVPDKPGIAYQILGPIADANIEVDMIIQNVGENGTTDFSFTVPRGEFNRALTILREVQTHIGAAKIDADDKVAKISIVGVGMRSHCGIASTMFRTLAEEGINIQMISTSEIKVSVLVDEKYLELAVRVLHKAFGLDQAA

SEQ ID NO: 25501 - protein, 463 aa, Chromobacterium violaceum ATCC 12472
MKPVLNRRALLRLGGGALLGAWAARSAGPRAAATAGGYRWCNWSGLQRCAAQALATPGDEAELARLLREASRSGTPLRCVGAGHSFTPLVPTPGTIVSLDRMSGLLSYDAAAGEAILQAGTRIGQLARLLDAQGMALRNQPDVDVQSFAGAISTATHGTGAGLPALHADARALRLLTPSGETLDCGQGRDDDLLQAARVSLGSLGVIARATVATLPAYYLQRRLWLLPAGQMLDAAPELARRHRHFEFYHLPFTGYAAAITHDIRPPGPASRPASGDEDMLRELRRLRDWLGGMPALRRWTAQKLIDPKLSEQAFDKSWRLLSTARPTRFNESEWHVPREAGIACVREVIERLERRDDVFFPLEFRFVRADDAWLSPFYRRDSCSIAVHAAAGEPHDYLLTELAPVFRKYEGRPHWGKLHPYGAAELAALYPRWNDFLKLRRELDPKGVLLNPHLRRVLGVPA

SEQ ID NO: 25502 - protein, 405 aa, Chromobacterium violaceum ATCC 12472
MSQPKLPIYLDYSATTPVDPRVAEKMIPYLTGKFGNPASRSHSFGWEAEEAVENARAEVAKLIGADPKEIVWTSGATESDNLAIKGAAQFYKSKGKHIITVKTEHKAVLDTCRELERQGFEVTYMDVLENGLLDIEAFKAAIRPDTILVSVMYVNNEIGVIQDIPLIGEICREKGIIFHVDATQAPGKVKIDLNTLKVDLMSLSAHKAYGPKGIGALYVRRKPRVRLEAQMHGGGHERGFRSGTLATHQIVGMGEAFRIAREEMDSECERIRMLRDRLWHGIQDMEEVYINGDADQRVPHNLNVSFNFVEGESLIMAIKDLAVSSGSACTSASLEPSYVLRALGRNDEMAHSSIRFTLGRFTTEEEIDYAIALLKSKIGKLRELSPLWEMYKDGVDLNSVQWAAH

SEQ ID NO: 25503 - protein, 400 aa, Chromobacterium violaceum ATCC 12472
MIQLDFYGTLVAASLVLLLGRKLVAHTGALCTYNIPEPVAGGLVVAAVLLAWRQFSGVEVRFDASLQTPLMLAFFAAIGLNANLASLKHGGKTVGVFLGVVVGLLLVQNTLGVAVASALGLDPLMGLLAGSITLSGGHGTGAAWSGTFADKYGLASAAELAMACATFGLVLGGLIGGPVARFLVKRVKAPGAEHNADQPPQGFEQPDAQRLITPHSFIETLALIAVCLLGGTFIASLLKGTAFELPTFVCVLFVGVLISNGLAALGWYRIFEREVSVVGNVSLSLFLALALMSLRLWDLAALALPIFALLLLQTLAMALYAVFVTFRVMGRNYDAAVLAAGHCGFGLGATPTAIANMQAVTERFGPSHLAFLVVPMVGAFFIDIVNAIVIKLYLALPFIG

SEQ ID NO: 25504 - protein, 283 aa, Chromobacterium violaceum ATCC 12472
MAAISFTSANNSTRLAMKKTIALALAVALTSTAALADRLDDIKKAGVLRVAAFDSNPPFGFLDAKTRQISGLDVDVAQHIAKKLGVKLQLIPTNPANRVPLLVSGKADIVAANFTVTDERKKQVDFSLPYFASGQQFIVRKGALQKPEQLAGLRVGVDKGTTQEVYLREKYPKTTVVAYDDTPLAFTALRNGNVQAITQDGSKLAALLANAPDKAKYELAPFTLTREFQAIGLPKGEARLTKVVNETLRELEKSGDAARIYDRWFGPKTKAPLPRDFKIGDAA

SEQ ID NO: 25505 - protein, 260 aa, Chromobacterium violaceum ATCC 12472
MSHSSTLAYVVDEAASKQKVLLSEPGRYLLSAAMAGALIAVVLAVSLKLGQVFFAAGDAGYYIATSGFFGVALVSIIVCKVELFTSNVMYFTVGRLSGRCRTCNLLRSWAMVYIGNLIGVLLFVAVLAGAGGMGALPANHLLFNVVEHKVHASTMEIFWKGVLCNWVICLAVWVPMRLANEAARLLIIMLLVFVFFFSGFEHSIANMAFFALAKLQGMAALEWGDILHNMLPATLGNIVGGAVGVGLVVFRLERHTLQAV

SEQ ID NO: 25506 - protein, 693 aa, Chromobacterium violaceum ATCC 12472
MQTFFLAPTGFNAGLTSVTLGAIRSLEQAGLRVGFVKPIAQDTKDGEAERSTHFAQAICRLNPPQPISMERVEYLLSQGQVDQLMEEVVSLYQQAAQNVDAVIVEGLVPDQKQVFSTFLNTKIARNLQAQTILVSSVKELGAAEIAEQLEMNIQAFGSQAIAGYILNHVLPAVDRAELAREVRESGNLKKAGLPLLGVIPYQSELLAPRTQDVARYLNANVVHAGQQASRRVRNMVVAARTAPNIVNLLKPGALIITPGEREDVVMATSMAAMNGVPLAGLLLTCDSQPDPRIQQLCQQAFTGGLPVLATSLNSMETAGALNAMSHQVPSDDLERMEKVIEHVAEFLDVSSLKQSVGEPRELRLPPPAFRFQLMEKARKANKRIVLPEGNEPRTIQAAAICQEKGIARCVLLGNRAEILQVAETQGVTLPESVEILDPNEIRGRYVEPMVELRKGKGLNAPMALAQLEDTVVLGTMMLAMNEVDGLVSGAVHTTANTIRPALQLIKTAPGSSIVSSVFFMLMPEQVYVYGDCAVNPDPTAEQLADIAIQSADSAVAFGINPRVAMISYSTGSSGSGSDVEKVREATRIAQEKRPDLLIDGPMQYDAASVESVGRQKAPDSQVAGRATVFVFPDLNTGNTTYKAVQRSANVVSVGPMLQGLRKPVNDLSRGALVDDIVYTIALTALQAEQTPAS

SEQ ID NO: 25507 - protein, 397 aa, Chromobacterium violaceum ATCC 12472
MNSSILVINCGSSSLKFALIDSASHEAVMTGLAEKLGLADACITFKHNGDKQTALLSAPDHAAAMHAIIEKLQQVSLLDSVKAIGHRVVHGGEHFKQSALLDETAINEIERCIKLAPLHNPAHILGIRTAIKEFPSLPQVAVFDTSFHQTMPEKAYLYAVPMKLYRENSLRRYGMHGTSYRFVAEEAAKMLGKPANETSLVIAHLGNGASISAIRNGKCADTSMGLTPLEGLVMGTRSGDIDPSVFGYLATERGMDIQSITNMLNKESGLLGLSELSNDCRELEEAAAKGHEGAKRALEVFAYRLAKYVASMSVGAGRLDAVVFTGGIGENSSFLRAEVINQLGFLGLKLDAAANEACIRGNAGRITAADSVPALVINTNEELMIAMDTAKLAGLAN

SEQ ID NO: 25508 - protein, 203 aa, Chromobacterium violaceum ATCC 12472
MWSMEADKAAALIAGRLQSYDFTGRVADLPYRAASPGLKPAAVLVPLVWHADGATVLFTRRTEHLSSHPGQVSFPGGKLESGDASAQAAALREAREETGLPESSVWVLGNLPDYVTVTGYVVTPVVGLLNPPLALAPAPDEVAEVFEVPLPLLLDRQAYSRHDYVRDGVAGQYLSLQWDRHTIWGATAAMMWMLADALGGASV

SEQ ID NO: 25509 - protein, 126 aa, Chromobacterium violaceum ATCC 12472
MQRNMLKSKLHRVTTTHAELHYIGSCAIDENLLEAADILEYEEVQIWNVTNGERFATYAIKAERGSGVISVNGSAARRAAPGDLLIIASFAQYEDAELKGHSPKLVFVDGDNRLTEVKGATPTQPA

SEQ ID NO: 25510 - protein, 642 aa, Chromobacterium violaceum ATCC 12472
MGKIIGIDLGTTNSCVAVVEGGNPKVIENAEGNRTTPSIIAYVEDGEILVGAPAKRQAVTNPKNTIYAAKRLIGRRFEDKEVQKDIDLMPFEILKAKNGDAWVKVRDQELAPPQISAEVLRKMKKAAEDYLGEEVTEAVITVPAYFNDSQRQATKDAGRIAGLEVKRIINEPTAAALAFGLAKQEGDRKIAVYDLGGGTFDVSIIEIADVDGEHQFEVLSTNGDTFLGGEDFDQRLIDYIVTEFKKEQGVDLKQDVMALQRLKEAAEKAKIELSSATQTEVNLPYITMDATGPKHLAMKITRAKFESLVDDLIARSIEPCRVALKDAGVSLSDITDVILVGGQTRMPKVQDAVKEFFGKEPRKDVNPDEAVAVGAAIQGSVLSGDRKDVLLLDVTPLSLGIETLGGVMTKLIQKNTTIPTKASQTFSTADDNQTAVTIHVLQGEREKAAANKSLGQFNLGDIPPAPRGIPQIEVEFNIDANGILHVSAKDKATGKQANITIQASSGLSEAEIERMVKDAEANAEEDKKLHELVTARNHAEGLIHSIKKSLGEHGDKIGADEKAKIESALKEAEEVVKGDDKEAIEAKAEELAKASQKLGEIMYAQAQAEAGAQGGAEQAEAGKKDEGNVVDAEFEEVKKDKA

SEQ ID NO: 25511 - protein, 179 aa, Chromobacterium violaceum ATCC 12472
MKLVILDRDGVINEDRDDFVKNTIEWVPLEHSLEAIANLTQSGWRVVVATNQSGIARGLFDMHALNAMHEKMHRLVGQAGGRIDAVVFCPHSADHGCECRKPLPGMVLEIAERFNVKLEGLPMIGDSLRDLEAIAAVGGQPILVKTGKGAKTLAKGGLPESTLVFNDLYDAAEHLINHH

SEQ ID NO: 25512 - protein, 616 aa, Chromobacterium violaceum ATCC 12472
MCGIAGWVSFERDLSTQRAVAETMTKTMALRGPDDEGLWLDRRAALGHRRLSIIDLEGGRQPMTADEDGRTLACLVYTGEVYNFRELRLELQGLGHAFRTRSDTEVVLRAYLQWGEAMLERLNGMYAFALWDAREQRLLLVRDRMGVKPLYYYPMPDGVLFGSEPKAILAHPEAERRVTAGGLREMLDLVKTPEAAAFAGMHEVRPGQVVTIDRGGLRKRRYWQLEAREHTDDLPTTIRTVRELLDDIVERQIIADVPLCTLLSGGLDSSVVTALAARSMRRQGKGTVRSFSVDFVKHGAAFEADYLRGSPDAPFVRDLAAHAGTEHREILLESRELADPRLRAAVLGAQDLPPAYWGDMLPSLYKLFEAIRAQSTVALSGESADEVFGGYRWFHDAAAVDGDAFPWLAGSSGAFFDGQSLIAPGLLRELDMPGFRRDSYAQALAEVPRLASDSTRERRMREISHMHLTRFVQALLDRKDRMSMAVGLEVRVPFCDHRLVEYVFNAPWSMKNFDGREKSLLRAAGKDVLPESIVRRVKSPYPATQDPAYEQALRQGLARVLDDSRSPALPLLDKAAAWKLLDRPFGKTSTSPERAGLEMALGLDEWLRHHQVSLDL

SEQ ID NO: 25513 - protein, 555 aa, Chromobacterium violaceum ATCC 12472
MPAIAFRPRLLDALRGYNRALLRADLMAGVTVGIVALPLAMAFAIASGVPPQAGIFTAVIAGALAAALGGTRLCVTGPTGAFIVILYGIVSKYGVANLLICTFMAGAMLVLMGVCRLGQVIRFFPMPLITGFTNGIAVLIFLTQLKDFFGLPIAKMPSGFFAVIAELSRHFSGLHWPTTLLSSALLLLILLWPRRLNRLLPSPFAALVLATLATMLFDLPVATLGSRFGGIPQGLPAPAGLDLNPAHLSDLLAPAFTIALLGAIESLLCAVVVDSLTADRHDANQELIGQGIANMVVPFFGGIPATGAVVRSVTNIGNGARTPLAAVFHAALLLLVLLLAAPLAAHVPLAALAAILVSVALKMGDWDIRKARQFPRHDTLVLVVTFVLTVAFDLTVAVEIGLLMAAVFFIRSMASHTGFRRLLPEHAQLFERHSIAGKSVPDGCAAFRVEGALFFGAADSVDIILREAPRARAVILQLHRLVLLDTSGLLALEALRARLAEQGKTLILCGAADEVMAMLEGSRLAERLGEGNLQPDLTSALRRAEAVLTDGVVWG

SEQ ID NO: 25514 - protein, 560 aa, Chromobacterium violaceum ATCC 12472
MSTENNAPVVNNFIRSIIDEDLATGRRSSVVTRFPPEPNGFAHIGHAKAICINFGLAEDYNGQCNLRMDDTNPEKESDEFVEAFKQDISWLGFKWNGEVRYASDYFDRLYDYAVELIQAGKAYVDDLSAEEMRQYRGNLTEPGKNSPYRDRTPEENLDLFTRMKNGEFPDGSKTLRLKIDMASGNINLRDPAIYRIRRVHHHRTGDKWCIYPMYDYTHCISDAIEGITHSLCSLEFEDHRPLYDWVLDNISIEHHPQQIEFSRLELLYALTSKRKLQALVNDGAVTGWDDPRMPTIAGMRRRGYSPAGIKLFAQRIGVSKSENIIDMAILEGAVRETLENDSPRVMAVVNPLKVTLTNYDAAVTASRSAPFHPHHPEFGERDVPIAREIWIERDDFAETPPPKWQRLTAGGEVRLRYSYVIKCDEVVKDAADEIVELKCSIDHDTLGKNPEGRKVKGVIHWVSAEHAIQADVRWYERLFTEQRPDAVRGEDGEYVDFRQFLNPESLKLVPAYVEASVLQAEPESRFQFERLGYFVTDRYEHRKGDKAVFNRTVGLKDSWK

SEQ ID NO: 25515 - protein, 660 aa, Chromobacterium violaceum ATCC 12472
MSDSPPIPWHSGEREMQRRAGSLEHMAATGPRVVRDHMPEQHRDFFRQLPFMVMAAVDEAGRPWAGIVEGRPGFVDSPDPRSLRIAAQPSPADPLRDCLRPGAAVGLLGIELHTRRRNRMNGELTAMDDGGFAVAVGQSFGNCPKYIQLREFEFSREPGPRILGSVEWMDELDDDARAAIAAADTFFVASAVQDSHGRWQADASHRGGKPGFVKMDGDTLTIPDFAGNGYFNTLGNLLLQPRAGLLFVDFASGDTLQLAGRAEVPDTETPPPFAGAERWWTFRVERVVRRRNALALRWTLREYSPFALATGAWPHAAPERQWLPLRVVHAEDESDAVRSIYLEPADGSAPPPFLPGQHLSLKVAGVDGVRMRNYTLSQTGGYRISVKRQGKASARLHQLAPGDIVEALPPRGDFTLARADRPIALLAGGIGITPLLAMLHQLTARPAAMPPTLLAYATRTIAERAFDAELEALQAKAAGRLRIVKAASQPETGRRLGVDYQHAGHVDIDLLRRNGLSLDGDFYLCGPAGFMQALYEQLIAAGVDDKRIHAEAFGPAGIQRIGQVAGKRPPPADHAVPVRFSASSIDAEWRPGQSLLELAESCGLNPDFSCRGGACGSCRAALLSGEATYLQPPEYAARSGEILLCCAYPAEGSGKLEINL

SEQ ID NO: 25516 - protein, 196 aa, Chromobacterium violaceum ATCC 12472
MSTPLSHATLEQLFLNARTHSHWQPRPVSDELLHQLHELLKQAPTSANCSPARFVFVKSEAAKAKLKPCLAAGNVDKTMAAPVCVIVAHDTRFYEHLPQLFPHADAKSWFEGNQPLIDTTAFRNGTLQGAYLILAARSLGLDCGPMSGFDNAAVDAAFFPDGRVKSNFLINLGYGEADKLFPRSPRFGFDEACQIL

SEQ ID NO: 25517 - protein, 859 aa, Chromobacterium violaceum ATCC 12472
MRFDKLTTKFQQALGDAQSLAVANDNPYIEPQHLLLAMLDDAEAGVGGLLARAGVNVPALKAGLKQAIDRLPRVQGHGGEITVSRDLANLLNIADKIAMKLGDEFIASELYLSALSQDKGEAGRLLKEHGGNHASIQAAIDAVRGGESVNSADAEGQREALKKYTMDLTERARQGKLDPVIGRDDEIRRAIQVLQRRTKNNPVLIGEPGVGKTAIVEGLAQRIVNGEVPESLKNKRLLVLDLAALIAGAKYRGEFEERLKAVLNDLSKDDGQTLIFIDEIHTLVGAGKADGAMDAGNMLKPALARGELHCIGATTLDEYRKYIEKDAALERRFQKVLVGEPSVEDTIAILRGLQEKYEIHHGVDITDPAIVAAAELSQRYITDRFLPDKAIDLIDEAASRIKMELDSKPEAMDKLDRRLIQLKIEREAVNKESDEASQKRLKLIEDEIAELSREYADLEEIWKAEKAAQQGSQSIKEEIDRLKVDMEELKRKGDWQKLAELQYGKLPQLEARLKEAESAGDKGEAKPNRLLRTQVGAEEIAEVVSRATGIPVSKMLTGEREKLLKMEDVLHQRVVGQDEAVSAVADAIRRSRSGLADPNKPYGSFLFLGPTGVGKTELCKTLASFLFDSKDHLIRIDMSEYMEKHSVARLIGAPPGYVGYEEGGYLTEQVRRKPYSVILLDEVEKAHPDVFNVLLQVLDDGRLTDGQGRTVDFKNTVIVMTSNIGSQQIQAMATDDYQVIKLAVMAEVKTQFRPEFINRIDEVVVFHGLDEKHIQSIARIQLKSLENRLAKLELSLQISDEALALLSEAGFDPVYGARPLKRAIQAELENPLAKAILAGKYPPKATVMVEARNGQLAFA

SEQ ID NO: 25518 - protein, 416 aa, Chromobacterium violaceum ATCC 12472
MIFQTLLAPGDKLLLDRNCHKSVHHGVILSGARPVYLDSSVNRQYGIFGPVPKTTIYQAIDDNPDARVLILTSCTYDGLRYDLKPIIEAAHEKGIKVIVDEAWYGFARFHPAFRPTALESGADYVTQSTHKVLSAFSQASMIHVNDPRFDEHLFRENFNMHASTSPQYSLIASLDVARKQAVMEGYRLLDRTLKLAQELREKINSTGAFRVLELDDLLPEEVREDGILLDPTKLTVDFSRSGFTADELQQALFERYNIQVEKSTFSTITLLLTIGTTRSKLSRLYDAMLRLAKEGRAPRPLGRMPEIPHFSRLACLPRDAFYEAGERLPLLDDDGRPNPALSGRVCCDQIVPYPPGIPVLVPGQVVDDTILAYLARLQKTQKSIEMHGLAEDGGEFYLRVLKPQELAELPGRSLFN

SEQ ID NO: 25519 - protein, 408 aa, Chromobacterium violaceum ATCC 12472
MSDIKKVVLAYSGGLDTSVILKWLQDEYQCEVVTFTADIGQGEEVEPARQKAVSLGIKPENIFIEDLREEFVRDFVYPMFRANTIYEGEYLLGTSIARPLIAKRQIEIANQVGADAVSHGATGKGNDQVRFELGYYALKPDVKVIAPWREWDLLSREKLLAYAETHGIDISKKKNGGSPYSMDANLLHISYEGTVLEDPAQEPEEDMWLWSVSPENAPDQAEYVELEYRKGDIVAVNGQALSPAGVLTELNRLGNKHGIGRLDIVENRYVGMKSRGCYETPGGTIMLKAHRAIESITLDREVAHLKDELMPKYAQLIYTGYWWSPERAMLQQMIDASQATVNGWVRLKLYKGNVIVVGRESKTDSLFDPTIATFDEDGGAYNHADAAGFIRLNALRMRIAANARNKRG

SEQ ID NO: 25520 - protein, 374 aa, Chromobacterium violaceum ATCC 12472
MLIGVPKEIKNHEYRVGLTPSGVRELVANGHKVLVQTHAGLAIGFTDEQYIQAGASIASNAEEVFERADMIVKVKEPQPVECRMLRPGQILFTYLHLAPDPEQTKLLIESDSVAIAYETVTDERGGLPLLAPMSEVAGRMAIQAGAHALEKAQGGRGVLLGGVPGVAPAKVVVIGGGVVGLNAARMAMGAGADVTILDKSLSRLKEIDMVFGGRIKTLMSNGANIDDSIRDADLVIGAVLVPGAAAPKLVTRAMLKTMKPGAVLVDVAIDQGGCFETSRPTTHQDPIYTVDGIVHYCVANMPGGVARTSTQALTNATLPYTLELANKGWRQALLDNAHLRNGLNVCRGRVTYQAVARDLGHAYVDPIEAIKAAN

SEQ ID NO: 25521 - protein, 296 aa, Chromobacterium violaceum ATCC 12472
MTDTPFHCGFVAIVGRPNVGKSTLMNHLIGQKISITSKKSQTTRHRVTGIHTEDAAQFVFVDTPGFQTYHKGALNEALNKSVKDSLGSVDCVLFLLEAMRFTAADREVMALLPKKTPVILVVNKLDKAKDKLTLQAFIDEVTAEFEFAGVEVVSAKHGQRLAELLDQVRPHLPESMPLYPEDMITDKNERFLAAEIVREKLFRYLGEELPYEMNVEVEMFEMDGALRRIHIAVLVDKEHQKPIVIGRGGEKLKKISTEARLDMEKLFDGKVFLQVWVKVKSGWADDVRFLREFGLD

SEQ ID NO: 25522 - protein, 296 aa, Chromobacterium violaceum ATCC 12472
MENIAFIGLGNMGGPMAVNLLNKGFKVSAFDLSADALAKVAAAGGRAASSAADAAESASVVISMLPAGKHVAGLYLGDNGLFARLPKGALVIDCSTIDAGTARKVAEGAREKGLSMLDAPVSGGTAGAAAGTLTFIVGGAAEDLAHARPVLEAMGKNIFHAGGAGAGQTAKICNNMLLGILMAGTAEALALGVKNGLDPKVLSEIISKSSGRNWATELYNPWPGVMDNTPASRGYAGGFMSELMLKDLGLAEETALQSHAANPLGALARNLYEEHVHQGNGKLDFSSIVKHFHSLN

SEQ ID NO: 25523 - protein, 394 aa, Chromobacterium violaceum ATCC 12472
MQQQEIVIVGMARTAMGGFQGALSGLTASQLGAAAIRAAVERAGVSAGDVDEVIMGCVLPAGQGQAPARQAALGGGLPQSTPCTTINKMCGSGMKALMMAHDQLLAGNGGVVVAGGMESMSNAPYLMPKARGGLRLGHGEIKDHMFLDGLEDAYQKGTLMGVFAEQCAEKYGFSRQDQDEFAIASLTRAQQAIKGGQFKDEIAAVTVPGRGGDTVVDTDEQPLKANLDKIPTLKPAFKKDGTVTPANSSSISDGGAALVLMTAAEAAKRGLKPIARVVGHSSFAHEPGWFTTAPVHAIEKLLAKTGWRAGEVDLYEINEAFAVVTMAAMHDLKLPHDKVNVHGGACALGHPIGASGARIVISLLSALKQRGGKRGVASLCIGGGEATALAVELI

SEQ ID NO: 25524 - protein, 258 aa, Chromobacterium violaceum ATCC 12472
MLQIPASPIVPWIGGKRRLAKHILPLFPEHTCYVEPFCGAAALYFLKEPAKAEVLNDVNGELVNLYRVVRHHLEEFVRQFKWALSSRQIFKWLQITPEETLTDIQRAARFFYLQRLAFGGKVEGQTLGTSTTSPPRLNLLRMEEDLSAAHLRLSRTYIENLDWADCIKKYDREHTLVYCDPPYWGTEGYGVEFGLHQYQRMAELARSMKGNMIISVNDIPEMRQAFDGLAIDRVDINYSVGGGGRSKERKGELIIRNW

SEQ ID NO: 25525 - protein, 224 aa, Chromobacterium violaceum ATCC 12472
MKIWLDTIDIDAIRKAQAMGVLAGVTTNPSILATANRDVEAVLSEILDAQTGPLAVQVVARGLDGMLAQARRIAAISPRMVVKIPAVGDGFRAMSMLEREGVATLATAIFETRQLALAALAGASYAAPYVNRIELSAGNAFEVLEQSQRLLDAYGYKTAILAAAVKTVEQFLRCAQTGVAAVTLPVAVFQQLYASSEDIEESLRKFDAAWQSNGLMRDAALFKA

SEQ ID NO: 25526 - protein, 400 aa, Chromobacterium violaceum ATCC 12472
MSKQVQEAYIVAATRTPVGKAPRGMMRHVRPDDMLAHVITGALAQVPSLDPKLISDCVVGCAFPEAEQGLNMARIGVLLAGLPNTVGGITINRYCSSGINAVQMAADRIRLGEADVVIAAGSESMSLVPMMGNKVSLNPEIFAKDENYGIAYGMGLTAEKVAQQWGVSREDQDAFAVESHRRALAAIDGGKFKNEITPLEVTYRTPNLETGEVVVKKRVLDTDEGPRRETTLEGLAKLKTVFDAKGSVTAGNSSQMSDGAGAVILVSERVLKEFNLTPLARYVTFSVKGVPPEIMGIGPKEAIPAALAQAGLKQDDLKWIELNEAFAAQALAVIRDLNLDTSKVNPHGGAIALGHPLGATGAIRTATLVHGMRDAGLKGHGMVTMCIGTGMGAAGIIEVL

SEQ ID NO: 25527 - protein, 392 aa, Chromobacterium violaceum ATCC 12472
MEVAIVAAQRTAIGSFGGGLAKIPAPELGATVIKALLEKTGVKPEDVSEVILGQVLTAGSGQNPARQALIKAGLPVTTPATTLNVVCGSGLRAVHLAAQAILAGDADIVIAGGQESMSLSPHILPGSRDGFRMGNAQLVDTMVNDGLTDAYNAYHMGITAENVAAKYGIGREEQDAFSLQSQQRAAAAQKAGKFRDEIVPVLVPQRKGDPLAFDADEFIKHDASADGLAKLRPAFKKDGTVTAGNASGINDGAAAVLLMSTQKADQLGLKPLAIIKGYALTGCEPEIMGIGPVSATRKALSKAGWTVEDLDLVEANEAFAAQALGVAKELGWGSDKVNVNGGAIALGHPIGASGCRVLVTLLHEMQRRGAKKGLATLCIGGGMGVALAVERP

SEQ ID NO: 25528 - protein, 439 aa, Chromobacterium violaceum ATCC 12472
MTFSDLGIAPTILRALQAAGYENPTAVQAEAVPAAIAGRDLLVSAQTGSGKTAAFLLPALTKLSERSTAKGQGPRVLVLTPTRELAQQVEKNALEYGKDLRWMRTACLVGGSSFGYQIRALSRPIDLIVATPGRLMDHMRSGRIDFSRLEMLVLDEADRMLDMGFIDDIEAIVKATPETRQTVLFSATLDGIVGRMAEKMTRDPQRIEIARTETSGGTIEEHLLYADDLNHKHRLLDYILKESGFDQCVIFSATKAYSEELADKLSDQGYSAACLHGDMPQSWRNRTLNDLRRGRIKVLVATDVAARGIDVPTITHVVNFDLPKQAEDYVHRIGRTGRAGRDGTAITLAESKEFHKVRRIEQYLKRQITEGVIDGLEPTRRPPKGPRRNNNGKGGYGDRRHGSGNGRGGYGNNRREGGYQGQRREGGYQGNRGPRSSAQ

SEQ ID NO: 25529 - protein, 148 aa, Chromobacterium violaceum ATCC 12472
MPLTQQQIRLVQESFAKVEPIADEAAKLFYDKLFEYAPDLRPLFKKDMAAQRQMLMSTLKLAVKGLDDLEQLTPVLRKLAQRHVDYGVKPGDYTPVGNALLWTLKQGLGEASWTQELRAAWVDAFRLMATVMKQAAYPEIQPIQDAGE

SEQ ID NO: 25530 - protein, 110 aa, Chromobacterium violaceum ATCC 12472
MPPAGCSSCVMCSCRSGNSRTSVAISLDLRAFYSTARFEEFNKMATGTVKWFNDSKGFGFITPDEGGDDVFAHFSQINAKGFRSLAENQRVSFDIVEGPKGKQASNIQPI

SEQ ID NO: 25531 - protein, 465 aa, Chromobacterium violaceum ATCC 12472
MSLMRKKSVQGMLAAAQTSRGLRKELSAFDLTMLGIGAIIGTGIFVLTGTGATIAGPGLVLSFVISAFACGFAAMCYAEFASMLPISGSTYTYAYATLGELIAWIIGWDLLLEYLLASSAVSVGWSGYFQSLLSGFGVTLPQALTAAAGSVPGKETLFNLPAFCIAMIITALLAFGIKESKRVNNIVVLIKVAVVVLFIAIGVWHVKPANWQPALPFGFSGVFHGAAIVFFSFIGFDAVTCAAEEVKNPAKDIPRGVIWSLVVCSILYVVVAAIMTGIVPYMNFAGVDHPVSLALQVAKLDWFAGFVDLGAILGMMTVILVMTYGQTRILFAMSRDGLLPKIFSEVNPKYGTPYKATWLIGTIIALLAGFVPLHTLAELVNIGTLAAFTLIALSVIVLRKREPDLPRKFVCPAVPTIPALAILCCGFLMTQLSLLTWTCFAAWLLIGLVVYFGYSRRNSLLHNPA

SEQ ID NO: 25532 - protein, 311 aa, Chromobacterium violaceum ATCC 12472
MLLTEAAALSTLAERLNGEFLDAVEAILACQGRVIVTGMGKSGHVGRKIAATLASTGTPAFFVHPAEAAHGDLGMITGDDVVIALSNSGESAEVVSLLPALKLKGSKLIAVTGRSESTLAQAADVLLHTHVEREACPLNLAPTTSTTAQIALGDALAVTLMEARGFGQSDFALSHPGGSLGRRLLVHVKDLMHGGDALPRVAPGTPLKDALLEMSQKRLGMVTVGDADGTLHGIYTDGDLRRTLEKGVDVYRLKVDEVMGRKPRTIQPDKLAAEAGFLMKQHQITSLVVVDAQGKLAGVLHMHDLLHAGVF

SEQ ID NO: 25533 - protein, 443 aa, Chromobacterium violaceum ATCC 12472
MNENSSTQKKGSLGVWMCTALVVGNMIGSGVFLLPASLAPFGGVSMLGWLVTSCGAICLALVFARLSSILPREGGPYAYIHAGFGDFAGFWIAWGYWIALWAGNAALAVAATSYLQVFFPILGHSEPLAGAVAIGLIWVVTWINSRGARSSGVVAVVTTLLKLLPLAAVTFIGFFHFQPENLAFNPHGKPLLSSLSATMALTLWAFLGLESASVPAGDVVEPEKTIPRATVIGTLLATVLYILSTVSLMGLMPADTLAASQAPFADAARLMWGDWGYWLVGFGAVVSCFGALNGWSLMQAHVPAAAAKDGLFPSRFDQRNAAGVPIFGLVLSSALVTILMAMKYAGGDSGVKIFEFIILLATATTLLPYAFCSMALIAIMLMRGKAFTAKDYIAPGFFAGIGFVYSLWALYGSGADIVMWGMLLLLMGLPIYVWQLKERYAAD

SEQ ID NO: 25534 - protein, 404 aa, Chromobacterium violaceum ATCC 12472
MLSEQTRSLVKATVPVLQQHGVALTSHFYRRMFEHNPELKNVFNQGHQHSGQQQQALAMAVLAYARHIDDPSPLLPVLTRVAHKHVSLGIRAEHYPIVGKHLLASIRELLGEAAGDDLIQAWAEAYGLLADTLIGIENGMYGDATSADGGWSGWRPFRVAKKEIESEEIASFYLEPSDGGALPAFKPGQYVSVKRFVAEWGLSQPRQYSLSDAPNGEYLRISVKREDAAQGKPAGRVSNLLHREVQVGDVLELSAPQGDFFLHEERDGPAVLISAGVGQTPMQAMLGQLLKRGGREVRFLHAARHGGAHAMGAKVRQLADRHPQLKVHVCYETPRAQDAIGVDYQAAGRLNLADVKGIALLPDADYYLCGPLGFMRAQRDSLRGLGVAADRIHYEVFGSHPGDD

SEQ ID NO: 25535 - protein, 552 aa, Chromobacterium violaceum ATCC 12472
MYRYDEVDHRLVRERVVQFRDQTRRFLAGELSEDEFRPLRLMNGLYIQRHAPMLRVAIPYGHLRSEQLRKLADIARRYDKGYGHFTTRQNIQFNWPELDKVPDILEELSTVEMHAIQTSGNCVRNTTTDAFAGVAADQLFDPRPYCEIIRQWSTMHPEFSFLPRKFKIAVSGSIEDRAATMVHDIGLHVSRNETGEAGFKVIVGGGLGRTPMVGEVIREFLPRQHLLTYLDAVLRVYNRFGRRDNKYKARIKILVKAMTRDGFAAKVEDEWSHLKDGPATLRDEDVAHYASFFADPDYPALADDPAELTGPLAEDKAFARWFERNTRAHRRPGYRSVVLSLKESGAPPGDITSEQMEAAADWADRFGFGELRVAHEQNLVLPDVAQKDLYALWQAARSQRMATPNIGLLTDIISCPGGDFCSLANARSIPVANAIQQTFDDLDYLYDLGDIACNFSGCMNACGHHHIGNIGILGVDKNGEEWYQITLGGSQGSDTTIGKVIGPSFAQADVPVAFSKIMQVYIERRLDGERFIETLRRIGAEPFKERVYAPVH

SEQ ID NO: 25536 - protein, 103 aa, Chromobacterium violaceum ATCC 12472
MSIQQDIQQTVADNAVVLFMKGSAQFPQCGFSSRAVQILKACGVDNFLTVDVLRDPDIRQGIKDFSNWPTIPQLYVKGEFVGGSDIMYEMYQNGELQDLLKDL

SEQ ID NO: 25537 - protein, 67 aa, Chromobacterium violaceum ATCC 12472
MAFGTVKWFNDAKGFGFITPDEGGEDLFAHFSAINMQGFKTLKEGQRVSFEVVSGPKGKQASNIQNA

SEQ ID NO: 25538 - protein, 383 aa, Chromobacterium violaceum ATCC 12472
MNRCLLAINAGSATLKFRAFSPDGRTLLARGMVDRFGSKEARLRLADAKGQALAERDLADAAHAAALAAVLNSLADQGLEAQALVHRVVHGGSRFREPVRIDAEVRAALDDYIALAPLHQPVSLEVVDAFSELDPRLPQIACFDTAFHATQPTVATRFGIARHWHDEGVRRYGFHGLSYAAISRRLPELGLAHGKVVVCHLGSGASACAIESGKSVASSMGFSAVDGLMMGSRPGYIDPEVILYWQEHEGMGVKDVRRELYKNSGLLGVSGVSADMRELLASDLPEAREAVELFCYRAAREAASLAAAMRGLDGLVFTAGIGEHSAEVRARILQQLSWLGFDLDHAANLAHARRLTAAGSRLPAYVLPTDEEGEMARQAARLL

SEQ ID NO: 25539 - protein, 342 aa, Chromobacterium violaceum ATCC 12472
MTCQVKVLPSGHTFGVEAHETILEAALRQGVGLPYGCRDGACGACKGKVLEGEVSQDGFQEKALSAAERAQGMALFCCSRPKGDVSIEAREVTGVGDIQIKTLPCRVEKIDKIHDVAVLKLKLPVSERLQFRAGQYIDILMKDGKKRSFSIANAPHDDAFLELHIRHQPGGSFSEYVFHQMKEREIMRFKGPMGSFFLREESDKPIVLIASGTGFAPVKGIIEHAIHHGITRPMQFYWGARTKADLYMSELAEGWAAAHPNIRYIPVLSEALPEDGWTGRTGFVHQAVLEDFADLSGHQVYACGAPVMVEAAHGTFIRERGLPEDEFFSDAFFLAKDMGGGK

SEQ ID NO: 25540 - protein, 316 aa, Chromobacterium violaceum ATCC 12472
MTHNVVFLDRDSLPVPVPVFGFPVHYREYPATASEQLAAHAAGADIVISNKVPLSREAIAALPELRLVAIAATGYNHVDLDACRERGVAVCNIRHYGDHTVAEHAFMLMMALMKNLPAYQRDVAAGVWSQSRQFCHFGAPIREVRGATLAIVGSGGIGGRLAQMARAFGMEVLFAERKGATRVREERVPFDEALARADVVSLHCPLTEETRGMIAQPELMAMKPGAILINTARGGLVDEADLVAALKYGQLGGAGFDVLSSEPPSPDNPLLKARLPNLIVTPHVGWASGEAMRRLAAQLVANIEAFVDGRKVNRLI

SEQ ID NO: 25541 - protein, 288 aa, Chromobacterium violaceum ATCC 12472
MRIGYIGLGIMGRPCVLNLLKAGLPVSVWARRRESAASLLEAGAAWADSPAELAGQVDVLVTNVSDTADVEAVLLGEQGAIHGAKPGLVCVDMSTISPNGARRIAAALAEKGVDFLDCPVSGGEVGAINGTLTIMAGGREEALEKARPALQAMGQTITHIGASGAGQVAKACNQIAVAVGVAAVAEIVKLAKACDVDPAPVRAALMGGFAQSRVLDVHGQRMIDDNYAPGFKAKLHAKDMHIVIDTAREQGISLPAAERTMRLIDQLVEQGDGELDSSAIARLIWQQN

SEQ ID NO: 25542 - protein, 577 aa, Chromobacterium violaceum ATCC 12472
MHLNDALAQQPDIAAVHCHHEQACGIAAEAYGRLAERTGVAMVTTGPGATNILTPVAGAWIESLPLLVISGQVKRADLLQGSGLRQKGVQEVDVVSMAKPVTKYAVTVTDPQAIRQHLEEALYLAHSGRPGPVWLDIPLDVQAAPIDPATLPGWQPEGETAPAAQDHVAAIADLLKQAERPLILAGHGVRIAGGADALRRLSETLQVPVAATWNAMDLMPWDSPLCAGRPGVVALRPGNFAVQNCDLLIAIGTRLDNILTAYNPKGFARAARKVVVDVDAAEIAKLEMEIDLPLAMDAKACLEGLLAAVERLPKAKWQSWLDRCADWKRRYPVQDGAPFPTSGQISHYHFVDALSDAAPENTLISTGSSGLAVEVFYTVFRNKPGQRVFLTSGLGSMGYGLPAAIGACLGNGSRPMIALESDGSLQLNLQELATLKALRLPIRLFIMNNNGYASIRNTQRNYFDSRYVGTGPEAGVLIPDLLELAEAYGLPAVRIERVEELAEGLAKVMAHPGPILCDVRLNENETLQPKAAALPQPDGSMLSMPLEDMSPLLPLEQLRAEMLIPLLPASEAAKRGV

SEQ ID NO: 25543 - protein, 296 aa, Chromobacterium violaceum ATCC 12472
MSRRNAGKRLALIGCGAMGTALGLRLLGLGWEVRVYNRSPERTAPLRDAGASAHATPAEAVAGADWVATVLTDSAALRALLFGDNGIASAPAAGRRLVDLGTHQPTQLAALGAEAAAAGWPLVEAPMTGSVHDASHGTLHFLVGGAEADVEWASPLLWALGRGVHHLGGLGAGNTAKLALNLLVGVMAGGLGEAIALLRAHGLAVDSFLDALDGSGLASPLYRRLGQRYLDGDHAPRFSLANLEKDLRWECEHALASGLQPRLAPALCRLLAPLSEEAKRRDYSALIADLAGAPSC

SEQ ID NO: 25544 - protein, 662 aa, Chromobacterium violaceum ATCC 12472
MCGIAGALLDRHAHDGDVAEARRMILRQTHRGPDGLAARRVGPALLASSRLAIVDVANGSQPFSDESRAIHAVFNGEIYNHLELRENLSRRGHSLSGGSDGEVIVHLYEEYGTDCFQWLDGQFAIAIFDSRDDSLHLARDRMGICPLHWARLDGALYFSSEIKGLLAVAGMPRRAEPRAMLQLAYFGAVCAPLTPFGGIHQLPAAHRLSFRAGRLEIGRYWSLDFPLAGEHARLSEAQAAEGLAARLERAVASHAQGEFEPTCFLSGGIDSAVIAALLQRRSQASIAAFCAASEHGRMDEGGAAARTAEWLGVDLKRVRIDEAGIADAFPRLIWHGETPVISTEASALMRLAGEAGKRSKIVLTGEGADEAFAGYLAFRQYRQLGALTGRGLSPLRTMVRPWLRGHYGSECLLPGEDRLGVLAEHFGCVPAQAYEWEFYREALTPLFSPELRAMAAAGGCWDGFEFDRGAVRGRHWLDRSLYVSYQVMLPNYLLGAHGDRIYAAHSVEGRYPFLDRALVEYAAALDPALKLRRGREKHILRVAAARWLPDEVAWRPKTRFVMPFGTPFVGPRAAPLYAELLSPGKLAEYGYFDPERVRSLFRALASPPSAGGKARRYLERLALGLGATFVVSAQLWHHLHLADGGSAVSGEAARRSAPATIA

SEQ ID NO: 25545 - protein, 875 aa, Chromobacterium violaceum ATCC 12472
MKSLIDRLTPTARQAIEQAASRALARTHFEIEIEHVLLAMFDQDDNAALAALRALGADLGRVERELDAALDNFRSGNTRNPVLSSWLPKWLEKAWLLASAEHGQDSVSTLDLLLALWQDDALRGALQSGAPALARQDAGRLSGAYAALRQHGGEAAGGEQPSAAADEGEGEAPAAPQGKRGGAALDKYTIDLTAQAKAGKIDPILGRDVEIRQMIDILMRRRQNNPILTGEPGVGKTAVVEGLARKIVLGEVPPVLSGVTLRTLDLGLLQAGASVKGEFENRLRQVIDEVKASPVPIILFIDEAHTLIGAGGAAGQNDAANLLKPALARGELRTIAATTWAEYKKYFEKDAALARRFQVVKVEEPAPEIAVQMVRGLTDAMAKHHKVEILNEAVAAAVQLSSRYIAGRQLPDKAISVLDTACARVALSRAGKPGPIEDVTVLIDNIDRETAALEREEGHAERIAELQAQRAKLEQDLAALHQAWEAQQKLIEEIDELKAAKDEAKPAKGRKLSPLQAKRKELRELQKHQPLAFECVDESVIADVIAGWTGIPLGRMVSNELEQVQKLAKLLAERVIGQDHALEQIAERVQIAKANLEDPGKPKGVFLLVGPSGVGKTETALALAEALYGGERNLITINMSEYQEAHSVSGLKGSPPGYVGYGEGGVLTEAVRRKPYSVVLLDEVEKAHPDVLELFFQVFDKGVLEDSEGREVDFKNTIILLTSNAGTDLVMRACEHGVTVEDETRDPTAEDLVEILRPTLQKTFKPAFLGRLTIVPYFPISDDVLRAIVGLKLDKIRRRIADNHGAQVEFPEELADQMAARCLDVDSGARNADAILTRTLLAQISNDLLSRMASGKPVKKIAVALKGEQVKVKVS

SEQ ID NO: 25546 - protein, 1482 aa, Chromobacterium violaceum ATCC 12472
MDRQSRLQGTLYKPEFEQDSCGFGLIAQLDDKPSHWLVATAISSLAKLTHRGAVAADGKSGDGCGLLFRKPDGFLREVAAEAGIALKSVYAAGLVFHHPDRATGERSLARLREHLEAQQLEVAGFRTVPVDTSACGETALASLPAISQVFVNCPFGMDELAFQRRLYMGRRLAEKANRGDDSCFYLPTLSPHTISYKGLVTPENLPRFFLDLADPRFESSLAVFHQRFSTNTWPQWKLAQPFRFLAHNGEINTVQGNRNWARARERIMASPHLDMDAVRPIVQTDGSDSMSLDNMLEGLLMGGIPLFRALRLLVPPAWQNVDSTDKDLRAFYEFNSMHMEPWDGPAGIVLTDGRYAACMLDRNGLRPARWVLTRDNILTIASEVGVWDYRAQDVVRKGRVKPGQLFAADLLNGELLMPEDIDAQLKSAKPYRQWIKDSAKYLELSIEDDAGVEPLSKEELARLQKLFNLSREERDQILRVLAADGQEAVGSMGDDTPMAVLSQKVRAPFDYLRQQFAQVTNPPIDPIREAVVMSLNTVFGPERNMFEESAEHAKRLEVRSPVLSHEKFTRVTTRPEPYLKATNFDLCYDPAETTLREAISCLTRHVVEAVQEGTVVVVLSDRHATGERLPIHALFATGAVHHALIDAGLRCKTNIVVETAAVRDAHQMACVLGYGATAVYPYLAYQTIIDLVNSGEVPLKANEALQHYRKGINKGLLKVLSKMGISTIASYRGAQLFEAVGIHQEVIELCLKGTVSRVSGANFADFEAEQKKLAKLAFNPMRGLNQGGLLKYVHGEEYHAYNPDVVQLLQKAVQNGDYGVYLQYAETVNTRPVAMLRDLMQLKLAGEPIPLDEVEPVEAIVKRFDSAGMSLGALSPEAHEALAIAMNRLGGRSNSGEGGEDPARYGTEKMSKIKQVASGRFGVTPHYLVNAEVLQIKVAQGAKPGEGGQLPGDKVSGLIARLRHAKEGVSLISPPPHHDIYSIEDLAQLIFDLKQVNPSALVSVKLVAEPGVGTVAAGVAKAYADLITISGYDGGTGASPLTSVKYAGSPWELGLSEAQQVLRANGLRGRVRVQTDGGLKTGLDVVKAAILGAESFGFGTGPMVALGCKYLRICHLNNCATGVATQEIKLRSKYFTGLPDMVVNYFLFIARETREWMAKLGVRSMEELIGRMDLMDVLEGESERQGRLDLSPLLSQGTVPDSEPRFCVSDSNPSFDKGELAERILQEALPAIHNKQMLELAYPIENTHRSIGARLSGEIARVHGAAGLPFGCLKVKFTGSAGQSFGVWNAAGLHLELEGDANDYVGKGMAGGRVTIYPPKDAGYQASESIIIGNTCLYGATGGQLFAAGIAGERFGVRNSGALAVIEGAGDHCCEYMTGGTVIVLGETGYNFGAGMTGGFAFVYDPNEKFAYRYNNELIDIHLINGEAMGMYRAYLLEKIAKHVELTGSETGRAMLQNFDDYVDYFWLVKPKAAKLESLLKD

SEQ ID NO: 25547 - protein, 261 aa, Chromobacterium violaceum ATCC 12472
MKKWKAVLLLTAVGSHAFAADLLDTVKQRGALKIALEGTYPPFNFKDAKQQLTGFDVEIATEIARRMKVKPEFVTAEWSGLLAGLQSGKFDIVVNQVGVTAQRQAVFDFSQPYTYSSAQLIVRKNESRDFKNLADLKGKKLGVGQGSNYADMAKAAAGVQVKTYPGAPEYLQDLATGRLDAALNDSLLIPFAIKQAKLPLKAGAPVGEVAAMAIPFAKGNPQFKSEIDKALGGMKADGTFRKISVKWFGIDVSKAPAAAKK

SEQ ID NO: 25548 - protein, 327 aa, Chromobacterium violaceum ATCC 12472
MAAYDSLMVFTGTANPELAQNVVKHLDISLGRADVGKFSDGEVAVELLENVRGRDVFILQSTCAPTNDNLMEILTMADALKRASAGRITAAIPYFGYARQDRRPRSARVPISAKLVANMLTSAGIDRVLTVDLHADQIQGFFDIPVDNVYATPVLLKDIRAQRFDDLIVVSPDVGGVVRARAVAKALNTDLAIIDKRRPKANVAEVMNIIGDVSGRTCLIVDDMIDTANTLCKAASALKERGAERVLAYATHAIFSGQAVDRIKNSDIDMVVVTDTIPLTAAAKACPNIRVASIAGLLAETLRRINNEESVSYLFNEELVATGACLP

SEQ ID NO: 25549 - protein, 400 aa, Chromobacterium violaceum ATCC 12472
MKNAYICDAVRTPFGRYGGSLSSIRGDELAALPIQALLARNPQLGAASIDDVIYGCANQAGEDNRNVARMAALLAGLPAAVPGTTVNRLCGSSLDALAMSARALKSGEAELLVAGGVESMSRAPYVVGKADSVFSRSLKMEDTTMGWRFVNPRMKTLYGVDTMPETAENVAKEFGVSRSDQDAFALLSQQRTAAAYERGFFADELMEVRIPQRKGEDKIFAQDEHPRQTSLEELARLKGVVTPDGTVTAGNASGINDGACALLLAGEEGIRRHGLVPRARILAAAAAGVAPRVMGMGPVPAINKALALAGLRLEQIDHIELNEAFAAQALAVLRELRLSDDDSRVNPNGGAIALGHPLGASGARLVSTAVYHLARTGGRYALCSMCVGVGQGIAMVIERI

SEQ ID NO: 25550 - protein, 510 aa, Chromobacterium violaceum ATCC 12472
MVLRLSLLFAVLFALWGAVAPGHMTAAASEWLSFTISRFGWFYLLSVFGFLLFALYLAFGRFGHIRLGKEDEEPEFSRLSWFSMLFSAGMGIGLVFWGVAEPLSHFATPASAATAPESAEAARLAMRHAFFHWGLHPWAVYSLTALALAYFKFNRGQKGLISAAFRPLLGDRVDGPIGVAIDVLAVLATVFGVATTLGFGTLQIESGLEMLFGVTPSATLTVAIVVIATALFLLSSLTGLSRGIKWLSNLNIVLAMLLFLAVVILGPTGFIFDTFTTTLGDYLGNLTSTSLRMSPFTQGTWMANWTLFYWAWWVTWAPFVGMFIARVSRGRTVREFIVGVLLVPALASFVWFSAFGGTALDLQLFGGADLVSAVKADVSTALYVMFEQLPGGRFLSLLAMTLVIIFFVTSADSATFVLGMFTSGGSLNPSHRVKLIWGVLLAAIALVLLQSGGLKALQAVLIVSALPFMLIMIGMAVSLYRALSEEEHDSRLRQIRRLRQLEALEKRLPD

SEQ ID NO: 25551 - protein, 456 aa, Chromobacterium violaceum ATCC 12472
MSEAHTGLQRELKNRHIQLIALGGAVGTGLFLGSASVLKSAGPSMILGYAIAGFIAFMIMRQLGEMVAEEPVAGSFSHFAYRYWGRFPGFLSGWNYWVLYVLVSMAELTAVGAYVQYWWPHVPAWLTALVCFVCINGINLANVKSYGETEFWFALIKVAAVIGMILFGGYLLLSGSGGPQASVSNLWNDGGFFPHGVKGLFMMMAVIMFSFGGLELIGMTAAEANDPQKTIPKAVNQVIYRILIFYIGSLVVLLSLYPWNKVAAGGSPFVMIFEQIGAGFTAHALNFVVLTAALSVYNSCVYATSRMLFGLARQGNAPRALGKLDTRGVPVYATLFSAAATFACVILNYLLPGEALGLLMSLVVAALVTNWAMISLTHLKFRRAKGGQKLVFPSFWFPLSNWICLAFMVMILGILLFTPGMAVSVYVLPVWLGLLWLGFRLKKPSPAEARLAGENA

SEQ ID NO: 25552 - protein, 545 aa, Chromobacterium violaceum ATCC 12472
MDSKRLIIFVLLSVGILFGWNEYFMPKHTPQQQAAKTQATTGAANNVAQPADANKLTRGQRIQVKTDLVEAEIDTVGGDLRSLKLLKHGAAEDHKQPFQLFEDSAKRVYVAQTGLVAASNPALPTHKTVFTSDKPSYQLTGDTLEVKLTAPDANGVKVSKVYTFKKNSYEIGVRYDIVNGGAAPLAPTAYYRLLRDSQAPEGEGRMAHTYTGPAVYTSEHKFQKVSFDDLAKGKGDYAKTTTDGWVAMLQHYFMSAWILKPLDGASVCKDERSCRFELKETAGLNSAAALVDYATVAPGKSLSVSVPLYAGPEEYNIISKLADGMEYAKDFGIFYIFASPLFWLLVKLHGLVSNWGWAIVLLTLTVKAVFYPLTAASYRSMAKMKALAPRLERLKAQHGDDRMKFQQAVMEMYKTEKVNPLGGCLPMLIQIPVFIGLYWALLASVELRGAPWVLWYTDLARPDPYYILPVIMAATMFLQTFLNPPPADPMQAKMMKIMPLAFSALFFFFPAGLVLYYVVNNVLSMAQQWFINKQIEKSNKAALQS

SEQ ID NO: 25553 - protein, 564 aa, Lachancea kluyveri
MSEITLGLYLFERLNQVDVKTIFGLPGDFNLSLLDKIYEVPGMRWAGNANELNAAYAADGYARVKGMSCIITTFGVGELSALNGIAGSYAEHVGVLHVVGVPSVSSQAKQLLLHHTLGNGDFTVFHRMSANISETTAWVTDIATAPAEIDRCIRTTYVTQRPVYLGLPANLVDLMVPASLLDTPIDLSLKPNDPEAEAEVVNSVLELIKDAKNPIILADACASRHDVKPETKQLIDITQFPAFVTPLGKGSIDEQHPRFGGVYVGTLSNDDVKEAVESADLILSVGALLSDFNTGSFSYSYKTKNIVEFHSDYIKIRNATFPGVQMKFALQKLLSEIGAVVKDYKPVAVPPKPTPNPACDPSTPLKQEWVWNQVGRFLQEGDVVITETGTSAFGINQTHFPNNTYGISQVLWGSIGFTTGACLGAACAAEELDKNKRVILFIGDGSLQLTVQEISTMIRWGLRPYLFVLNNDGYTIERLIHGENAQYNEIQPWKNLDLLPTFGAKDYETYRVATTGEWDKLAQDEAFNKNSRIRMVEVMLPVMDAPSNLVKQAQLTASINAKQD

SEQ ID NO: 25554 - protein, 628 aa, Bordetella bronchiseptica
MCGVLGAWWRHHDEHEDARFAAGLRKLAHRGPDDRGSEHFAAPHGRLSLGHTRLAVIDLSAAGHQPMHADADRLAVVFNGEIYNYRELRSELRQIGASFRGDSDTEVLLAAWQHWGVAALRRFKGMFAFALYDRRQQTLTLARDAFGIKPMYYHAAPERLLFGSELPAVQALLPHPPRLNWQRAYDYLAYGQYDQPPDTFIAGIRQLPAGHLLTLDLRTGQAGEPMAWDDPASQECRPIGFQEAAEELRARFLDNVRLHLRSDVPIGAALSGGIDSSAIVCAMRWLEPDLPIQTFSFISDDTHRSEERWVDLVNQHCGATGHKIHIAPHELLDDLDDLIRVQGEPVGSTSIYAQYRVFKLAREHGVVVTLDGQGADELLGGYGGYPTERLASLLETGRLGAAARLLRQQGRGAPARLLQAAALAAGGRHLANLRHATGRQHAPAWLDAQVLRDQGVTMREPAHAWAAATPLRGRRLVNELAHALYHRGLGALLRHGDRNSMRFSVESRVPFLTQDLAEFALSLPERYLVSDSGQTKHIFRKAMRGIVPDSILDRDDKIGFATPEQQWMQATAPQMRQWLVDAADIPFLRNAEVTAQFDAMIAGATPFSWQAWRWVNFQRWMQHATVLP

SEQ ID NO: 25555 - protein, 673 aa, Porphyromonas gingivalis W83
MANNGNNKKPGKPMRFNPIWLYAPVFLILATLFFVDRDITSQKELSWNEFQNIAKKQAFTDIVVNRKENTLKARVDPAKVDSVFKKGDIPSFQDRGNISDYYINTQIPSVDKFSDFYDQNQITAKVKYEDSKFSFTSILITWGPLILLLVFWFWMMRRMSGGGGGSGGGGGVFNVGKSKAKLYDKTNIHVTFSDVAGLHEAKQEVEEIVHFLKNPSKYTELGGKIPKGALLVGPPGTGKTLLAKAVAGEAHVPFFSLSGSDFVEMFVGVGASRVRDLFRQAKEKAPCIIFIDEIDAVGRARGKGNNFSGNDERENTLNQLLTEMDGFGSNSGVIILAATNRADVLDSALLRAGRFDRQIYVDLPDLNDRKEIFLVHLKPLKTDKSVDVEFLSRQTPGFSGADIANVCNEAALIAARSNKNFVDKEDFMNAVDRIVGGLEKKNKITTEEERRSIAIHEAGHATISWMLRYANPLVKVTIVPRGKALGAAWYLPEERQITTTEALQDQLCALLGGRAAEDLFLGRVSTGAANDLERVTKLAYAMVTYYGMSDKLPNINYYEMQNDGWNLTKPYSDTTAEVIDAEVNRIISEQYERAKSILREHEAGHHELADLLLKREVILADDVERIFGKRPWASRTEELLGLNAPATATEETTADAEAPIPVEGEEKTEEHPE

SEQ ID NO: 25556 - protein, 604 aa, Porphyromonas gingivalis W83
MKTFEELGIAKPFLKAIAELGFEQPMPVQEEVIPYLLGEDIDLIALAQTGTGKTAAFGLPLLQKIDLSGGRPQALVLCPTRELCLQIADDLNSYSKYLSDVHILPVYGGTPIDAQIRALRRGVQIVVATPGRLLDLMRREAVSLSDIHTVVLDEADEMLNMGFAEDLEQILADIPSERHLLLFSATMPKEISKIATSYMKDPKEIVIGNKNEGNANIKHLYYMVSARHKYLALKRIADYYPNIYGIVFCRTRKETQEIADQLIQDGYNADSLHGDLSQAQRDYVMQKFRVRNLQLLVATDVAARGLDVNDLTHVIHFGLPDDVESYTHRSGRTARAGKTGLSIAICHVKEKGKIKNIERTMQKQIERARIPSGAEICEKQLFNLADRIERVDIENTTAIDSVLNEVNKKLEWIEKDELIRRVMALEFNRMLDYYQRAEDVEEVVERKKDEVSGDRKNRKRGAGEAEEGMTRLFINFGKMDQMFPNRLIELINRCIPGRVNIGRIDLMPRFAFFDVDEFEAKNVVETLNRYEVDGRRIHVEYADTKKDYAGGKKGGDKNFSARRKDFDGRRSENPTSRKNKGRKEKPTEGRFYDKFDSKQRKRRK

SEQ ID NO: 25557 - protein, 206 aa, Porphyromonas gingivalis W83
MKAEIHNRTISEILAHEAEAIRTIPADNDYKAAIDLIVRQVHGSNGRLITSGMGKAGQIAANIATTFSSTGTPAYFLHPSEAQHGDLGLVRSGDIMLLISNSGRTREVLELVELTKRLVPDTKFILITGNPESQLAAEVDVCLATGNPAEVCPLGMTPTTSTTVMTVIGDVLVVGTMQEIGFGFEDYARRHHGGYLGDRSREICGR

SEQ ID NO: 25558 - protein, 261 aa, Porphyromonas gingivalis W83
MVRNPEEVLEQTYSMAASKYAKTWYQIFWLGIMAGAYIAIGGFLSLLVGKGFPEMAEANPGLAKLLSGAMFPVGLILVVLTGAELFTSNNAVLIPAAIKSRIPRLFPLKLWMVVYVANFIGAFLFTYFLVHLAGFADADPWHSAIVHLSEDKTSLPFHVAFLRGIGANWLVCLAVWLGLSAHDFTGKMFGIWWPVMAFVAMGFEHSIANMFYIPLGILQGASVSWGSFVIDNLLPVTIGNIVGGALFVGFFHVHIFDRGGK

SEQ ID NO: 25559 - protein, 220 aa, Porphyromonas gingivalis W83
MKFFIDTANLDQIREANDMGVLDGVTTNPSLMAKEGISGKDNCMRHYLAICEIVDGDVSAEVIATDYEGMIREGEELAALHPQIVVKVPCTAEGIKAIKYFSDKGIRTNCTLIFTVGQALLAAKAGASYVSPFVGRLDDIASDGIKLVENIVAMFGFYRYETEVLAASIRHTQHIIQCLEAGADVATCPLNAIKGLLKHPLTDSGLKAFLEDHRRVNEGK

SEQ ID NO: 25560 - protein, 250 aa, Porphyromonas gingivalis W83
MLKIKNLHATVQGKEILKGINLEINAGEIHAIMGPNGSGKSTLSSVLVGHPSFEVTEGEVTFNGIDLLELEPEERAHLGLFLSFQYPVEIPGVSMVNFMRAAVNEHRKAIGAEPVSASDFLKMMREKRAIVELDNKLASRSVNEGFSGGEKKRNEIFQMAMLEPKLAILDETDSGLDIDALRIVAGGVNRLRSPENAAIVITHYQRLLEYIKPDFVHVLYKGRIVKSGGAELALTLEEKGYDWIKEEIGE

SEQ ID NO: 25561 - protein, 759 aa, Porphyromonas gingivalis W83
MNSKLEEQARAYHAEGKPGKLEIRPTKPHSTQHDLTLAYSPGVAVPCKDIEQDPAFAYKYTAKGNLVAVISNGTAVLGLGDIGALAGKPVMEGKGLLFKIYAGIHVFDIEIDETDPKRFIEVVKAIAPTFGGINLEDIKAPECFEIEETLKRELDIPVMHDDQHGTAIISSAGLINALMIAGKKIEDVRIVVNGAGASAFSCTKLYESFGARRENILMLDSKGVITADRTDLTEQKRYFATERTDVHTLAEAIAGADVFVGLSRPNVLTQDMVRTMAPNPIVFALANPNPEITYEQATAAREDIIMATGRSDYPNQINNVIGFPYIFRGALDVSAKAINEEMKRAATMAIADLARETVPDEVLRAYGNTQLHFGKDYFIPKPVDPRLIVRVSTAVARAAVESGVAEHPIADWAAYEAELLGRVGLMSHLTRRLHESAKLNPHRVIYAACENPSVLKAAVSARAHGIARPIMLGDEKQIRDFAAELDLSLEGIEIVNYRSDEEKARRHHYARVFAEQNWRRGGNHTEALDKMFDPNYFGMMMVRLGDADAMITGIYSKHSYLAEVAKQTVGLQEGVGHFATMHMVSLKNGPLFLADTLINHNLSAEALVDIAVMAYEKAHCFGVKPVLAIVGFSDFGADSDADSTVEAAKAVAILHEKYPYILVDGEMRVSLALHAEKRDKQYPQNKIKGRNANVLIFPRLSAANACYQLLREADDAEEVLGPIQIGLAKPVYFADHDATVSDILNITAMAVLDSHACLI

SEQ ID NO: 25562 - protein, 300 aa, Porphyromonas gingivalis W83
MALSRIMECVPNFSEGRDKEKIEKIVNPFRTREGVKLLNYSNDEDHNRLVVTVVGEPEPLREAVLEAVGIAVELIDLTKHTGQHPRMGAVDVIPFIPIKNVTAEDADTLAKEVGRTIGEKYGVPVFLYEKSATAPHRENLAKIRKGEFEGMAEKIHEADWHPDFGPADRHPTAGTVAVGARMPLVAYNVNLNTNDLSIADAIAKKVRFLGGGLRFCKAMGVELTDRGIVQVSMNLTDFTKTAVYRAHEMVRMEAARYGVSVVGSEVIGLVPMQALIDCAEYYLGIENFSMDQILESRIME

SEQ ID NO: 25563 - protein, 627 aa, Porphyromonas gingivalis W83
MDKNTVIGLVLIGLVIFGFSWLNRPDPQEIEAQRKAAIEAARQDSIAKAEAELLAARTQGATPDSIKQAAGYNQYGLLAAATAGAEEQVELANGKIALKLSTKGGAIREVLLRDYKTHDGKPLYLFREGESDFNLPLRTVDNRLVDTRDLYFSPISRTDSSVVMRLAVDSASYLDLAYVLLPDDYRLRMTVSGQNLQSLFPANMTMQDLEWSQRIRRQEKSWKFENQYTSIYYKYSGDEVDRLSDSKQEDKKTLEEPLHWVSFKDKYFASVLVCDSYFENNKLAQKTAAAGSDYLKNCTMSATFPLDVRSGTKARFTFFFGPLKYNMLRAYDKGMKAEDNLDLDHLVYLGASIFRWINRYMIIPASTFLQQYFSNWGLIILLLTLGIKLLISPLAYKGYLSSAKMRLLRPQVQEINAKYPGKDQESMMKRQSATMNLYRAAGAGPMSGCLPMLLQFPFLIAMYMYFPTTIDIRQQSFLWAEDLSSYDAVFSWTADIPLLSQFYGNHVSLFCLLMSISNILYIRYTMNQSDTGQEGMAMLKWMPYITTVMFLFFFNQNASGLCYYYFLSSIITVIQYMSSRFIINEEKLMAKLEANKTKPRKKSKWMARLEEAQRQQEAMRRQQQKRK

SEQ ID NO: 25564 - protein, 394 aa, Porphyromonas gingivalis W83
MAAESNFVDYVKIYCRSGKGGRGSTHFRREKYIPKGGPDGGDGGRGGHVFLRGNRNYWTLLHLRYDRHIMATNGQSGGAKRSTGANGEDRIIEVPCGTAVYDADTGEFITDITEHGQQVMLLQGGRGGHGNTFFKTATNQAPRYAQPGEPAQERMVIMQLKMLADVGLVGFPNAGKSTLLSVLTAAKPKIANYPFTTLEPNLGIVAYRDKRSFVMADIPGIIEGASSGKGLGLRFLRHIERNALLLFMIPADTDNIAKEYEILSRELVAYNEELAQKRKVLAITKCDLIDEELCEMLREELPTGLPVVFISAVAQQGLEELKDTLWKELSKETLHEPDSIVRQALDLTSLTWDEEDDLFPASIEDDEDEEGLDDIDFDLEIEYDNEGDDAPDQL

SEQ ID NO: 25565 - protein, 398 aa, Porphyromonas gingivalis W83
MKVLVLNCGSSSVKYKLLEMPKGDVLAQGGVEKLGLPGSFLKLTMPNGEKVVLEKDMPEHTIAVEFILSVLKDDKYGCIKSYEEIDAVGHRLVHGGEKFSNSVEITPEVIAKVEECIPLAPLHNPANLKGVVAIEKLLPGIRQVGVFDTAFFQTMPEHVYRYALPYDMCNKHGVRRYGFHGTSHRYVSARACEILGLDYDKTRIITAHIGNGASIAAIKNGKALDVSLGMTPVEGLMMGTRSGDVDPGVLTFLMEAEGLEAAGISELINKKSGVLGVSGVSSDMREIEDAIKNGNERATLAMTMYDYRIKKYVGAYAAAMGGVDVLVFTGGVGENQYTTREKVCTDMEFMGIVFDSKVNEGMRGKEMVISKPESKVTVIVVPTDEEYMIASDTMTILK

SEQ ID NO: 25566 - protein, 336 aa, Porphyromonas gingivalis W83
MDLIQDVIRRAQENKQRIVLPEGLEPRTLEAADRLMADKVVNIILIGNVDSVKAKVAELGLKNLAEAVIIDPNNHPKKQQYTDLLLQIRQKKGLTPEKAAELVENPLYLGCLIVKSGDADGLIAGAQNTTGDVLRPALQVIKTAPGMTSVSGTFLLFTKAKEYGKDGLLLVADCAVIPNPTADELAQIAVATARTAKAIADIEPRVAMLSFSTKGSAKHEMTDKVVEATRMAQEMAPDLLIDGEMQADAALVERVAALKAPGSNVAGKANVLVFPTLEVGNIAYKLVERLGHAEAVGPILQGMAAPVNDLSRGCSVEDIYRMVAITANQAIAAKEQ

SEQ ID NO: 25567 - protein, 118 aa, Porphyromonas gingivalis W83
MYVEVLKSKIHRVTITEANLNYVGSITIDEDLMDAANIIAGEKVQIVDNNNGARLETYTIPGKRGSGVICLNGAAARIVHPGDIIIIMAYAWMPMEEAKVFKPAVVFPDTATNKIILK

SEQ ID NO: 25568 - protein, 863 aa, Porphyromonas gingivalis W83
MNINNYTIKSQEALQQAVELTRRHGQQAIEPQHLLKAVMDQGESLTDFLFAKMGLNKGSIATAVDKLIEKLPHVSGGEPYLSHETNQVLQAAEDAAHRMKDKYVSLEHIVLAILTTRCEASTLLKDAGATEQLLQSAIEELRKGRNVTSQSAEEQYNALEKYAVNLCQRARDGKLDPVIGRDDEIRRVLQILSRRTKNNPILIGEPGVGKTAIAEGLAYRIVRGDVPENLRNKQIFSLDMGALIAGAKYKGEFEERLKAVVNEVTGAEGEIILFIDEIHTLVGAGKSEGAMDAANILKPALARGELRAIGATTLDEYRKYFEKDKALERRFQMVMVDEPDELSSISILRGLKEKYENHHKVRIKDDAIIAAVKLSHRYITERFLPDKAIDLMDEAAARLRMEVDSLPEELDEISRRIKQLEIEREAIKRENDEEKVQFLDREIAELKEKEASEKAQWQNEKDRINQIQQLKIDIEELKFQADRAEREGDYGRVAEIRYGLIKQKETEIDTIQQQLHELQRGGSMIKEEVEADDIADIVSRWTGIPVSRMLQSERDKLLHLEDELHKRVIGQDEAIRAVADAVRRSRAGLQDPKRPIGSFIFLGTTGVGKTELARALAELLFDDESMLTRIDMSEYQEKFSATRLIGAPPGYVGYDEGGQLTEAIRRKPYSVVLFDEIEKAHPDVFNVLLQVLDDGRLTDNKGHVVNFKNTLIIMTSNLGSDIIRERMQNLTAENRRSLTARTADEVMQLLKHTIRPEFLNRIDETIVFTPLTEKEIYEIVRLQLDGIVRQLADNDVVLHYTEAVVTFAAREGYDPQFGARPVKRVLQRFVLNELSKALLADTVDSTRPVLIDCIDGSIVFRNE

SEQ ID NO: 25569 - protein, 317 aa, Porphyromonas gingivalis W83
MKIVIADSYAALPGDLDWSGIEEMGECVFYEYTRPEDLTLRAVDAEIVLTNKTPVTAADMEKMPHLRYIGLMITGLNLIDMDAARQRGITITNIPHYSTESVAQMAISHLLHITMPIGELSRQVKDGCWQSNYEQISRNTYQIELSGLTMAIVGLGAIGTRVAEMARGFGMKILAHTSKSPIELPSYIEKSDSLEKLFSRADVLSLHCPLTAQTQRMVSADRLALMKPTAILLNMSRGSLIDEKALASALNEGRLYAAGLDVLAEEPPCMDHPLLKARNCHITPHMGWNTDAARLRLSRTIKENLRAFISGHPVNVV

SEQ ID NO: 25570 - protein, 640 aa, Porphyromonas gingivalis W83
MGKIIGIDLGTTNSCVSVLEGNEPIVITNSEGKRTTPSVVAFVDGGERKVGDPAKRQAITNPTKTIYSIKRFMGETYDQVSREVERVPFKVVRGDNNTPRVDIDGRLYTPQEISAMILQKMKKTAEDYLGQEVTEAVITVPAYFNDAQRQATKEAGEIAGLKVRRIVNEPTAASLAYGLDKSNKDMKIAVFDLGGGTFDISILELGDGVFEVKSTNGDTHLGGDDFDHVIIDWLAEEFKSQEGVDLRQDPMAMQRLKEAAEKAKIELSSTSSTEINLPYIMPVNGIPKHLVMTLTRAKFEQLADRLIQACVAPCETALKDAGMSRGDIDEVILVGGSTRIPAIQEIVEKIFGKAPSKGVNPDEVVAVGAAIQGGVLTGEVKDVLLLDVTPLSLGIETMGGVMTRLIDANTTIPTKKSEIFTTAVDNQPSVEIHVLQGERSLAKDNKSIGRFNLDGIAPAPRQTPQIEVTFDIDANGILNVTAHDKATGKKQNIRIEASSGLSDDEIKRMKEEAQANAEADKKEKERIDKINQADSMIFQTEKQLKELGDKFPADKKAPIDTALDKLKEAHKAQDVAAIDTAMAELQTALSAAGEELYKNAGAAQGGAQPGPDFGGAQGPSAGDQPSDDKNVTDVDFEEVK

SEQ ID NO: 25571 - protein, 566 aa, Porphyromonas gingivalis W83
MNENKNSGIEEKKSLNFIEQIVESDLSEGKNDGRIQTRFPPEPNGYLHIGHAKAICIDFGIAQRYGGVCNLRFDDTNPVKEDVEYVDAIREDIEWLGFHWGNIYYASDYFQELYDFAERLIREGHAYVDEQTAEQIAAQKGSPTVPGTASPFRDRPAEESLDLFRRMNVGEFEEGAMTLRAKIDMASSNMHFRDPIIYRIIKHPHHRTGNEWNVYPMYDFAHGQSDYFEGVTHSICTLEFEVHRPLYNYFIELLRKDSYAPRQIEFNRLNLTYTMMSKRKLLQLVKDGLVSGWDDPRMPTLCGYRRRGYTPESIRNFIDKIGYTKYDGIIDVALLEHAVREDLNKRATRVSGVIDPIKLVITNYPEDKTEEMAAVNNPEDESAGVHTITFARELYIEKEDFMEDAPKKYFRMTPGQEVRLKSSYIVRCTGCKKDEDGNVVEVYAEYDPLTLSGMPESNRKVKGTIHWVSAQHSLPAEVRLYDRLFTDENPSDIKDKTLAEMLNPDSLKVLKNCRVEPFLADAAPGSHFQFQRIGYFTVDPDSRPGALVFNRTVSLKDSWQKAQKNA

SEQ ID NO: 25572 - protein, 313 aa, Porphyromonas gingivalis W83
MNNENNFSVFSGTNSRYLAEKICNSLGCPLGRMNIEHFADGEFAVSYEESIRGRDVFLVQSTFPSSDNLMELLLMIDAAKRASAHYITAVIPYFGWARQDRKDKPRVSIGAKLIADLLSKAGITRLITMDLHADQIQGFFDVPVDHLYGSTVFMEYIRKNMPLENLVVATPDVGGTKRANSYAKHLGVPMVICHKSRLKANEIAEMRIIGDVQDKDVLLVDDIVDTAGTITKAADLMKENGARSVCAIASHAVMSDPASMRVDQSTLKEMIFTDSIPYPHKCEKVKILSVADLFAEAIKRVCSHESITTLYYF

SEQ ID NO: 25573 - protein, 299 aa, Porphyromonas gingivalis W83
MQVEESGHRSGFVNIVGNPNVGKSTLINLLVGERISIITSKAQTTRHRIMGIVNTPEMQIVYSDTPGVLRPNYKLQQEMREFSESALGDADVLVYVTDVVEKADKNADFLARVSRMECPVLLVINKIDLSNQEALEQLVEEWRNILPKAEIHPLSATNNFNVGLLQKRIESLIPPSPPYFEKDALTDKPARFFVTEIIREKILLYYQKEIPYAAEVVVEEFKEEKTIIRIKSLIIVERNSQKGIIIGPKGAAIKRVGSMARRDLERFFGKKIFLEIFVKVEKDWRNRDNLLRAFGYQLD

SEQ ID NO: 25574 - protein, 319 aa, Porphyromonas gingivalis W83
MAKILVAFNTVSEGFDRLTARHEVVFPPKGRDFTQEEIAERIVDCDVLCSVFDIPIGRDLIDKGRSLKLIANYAVGYNNIDVTYAASKGIVVTNTPRAVIEPTADLALALLLSCTRRIAEWDRLFRRDGEMVERGRLCRLGVNLYGKTLGIIGFGNIGAAVARRCKAFGMNVLYNKRTRLSEAEEKAQGITFADKDDLIRRADVLSLHTPLTPETKHLIGTAELSMMKPTAILINTARGAVVDERALVEALREKRIAAAGLDVFENNDIPSPELFAMDNVSLTPHVGTQTYDSRVEMVHELCDNVLGFLHGDRPISRVN

SEQ ID NO: 25575 - protein, 412 aa, Porphyromonas gingivalis W83
MSTVIIASAVVFLLLTLILVVALLYAKSKLVPSGNVTITVNDERKMEVPLGGTLLNTLQNQGVFLSSACGGGGSCGQCRCRVVEGGGEILPTEKGFFSRKEQKDHWRLSCQTKVKEDLSIVIPEEVFGVKEWECEVLSNKNVSTFIKEFVVKLPEGETMNFKSGSYAQIKIPKYNIRYADYDIQDRFRGDWDKMDAWSLTCKNEEETVRAYSMANYPAEGNIITLNVRIATPPFDRAANKWKAGIKPGISSSYIFSLKPGDKVMMSGPYGDFHIQDTDAEMLYIGGGAGMAPLRAQILHLFRTLKTGRKVSYWYGARSKNEIFYEEDFREIEREFPNFKFHIALSDPQPEDNWTGYVGFIHQVIYDNYLKDHDAPEDIEYYMCGPGPMANAVKGMLENLGVPRNMLFFDDFG

SEQ ID NO: 25576 - protein, 446 aa, Porphyromonas gingivalis W83
MKVLKFGGTSVGDAERIRSVARLITSVKGRKIIVLSAMAGTTNSLVEIASHLVKRNVAQAKEVVQVLREKYHREINALYKRPDTLSAAKKAVDSLLDSLGHMCDVEGFTLFEEKRVLILGELMSTTMMQIYLQEMGAVVAMLPALEYMRTDKNAEPDKDYIRKHLLPMIEAHPDEDMLFLTEGYICRNAFGEIDNLQRGGSDYTASLIGAALNADEIQIWTDIDGMHNNDPRVVDVTAPVRRLHFEEAAELAHFGAKILHPTCIKPAKEKNIPVRLLNTMDPDAPGTLISLDTEKDCIKAVAAKDGITVIKVKSSNKLLSWHFMRKLFEIFEFYQEPVDMVATSEVGVSLTIDNDKNLPDIVRALSDIGDVTVDKDMVIICIVGDMEWDNVGFEARIINALKGVPVRMISYGGSNYNVSVLVKAEDKKKALIALSNKLFNSRATKA

SEQ ID NO: 25577 - protein, 651 aa, Wolinella succinogenes DSM 1740
MKIRATLNPPVFFSSILLIFGFVLFGALMPQRANTLFSMIQKGIIEKLGWFYILSVALFLIFVLYLAISRHGDVKLGADHSEPEFSYKSWFAMLFSAGMGIGLMYFGVAEPVMHFLSPPKMEGGTVEAAKEAMKITFFHWGIHAWAIYALVALALAYFSFRHQLPFTIRSAFYPLIGERIKGRLGDAIDTFAVISTMFGVATSLGFGVLQVNSGLSYLFEIPNTIWTQILLIAFITSLATISVVLGLSGGIKRLSELNLFLAIALMLFVLLAGPTLFIIQTFVQNIGAYLSDLTYKTFNLHAYEPTGWIGGWTIFYWAWWIAWSPFVGMFIARISKGRTIREFVIGVLMVPVGFTFLWLTVFGDSAIFLILKENLTSLGSAVQADSTTALFKFLESLPFSFITSLLATILIITFFVTSSDSGSLVIDMLTSGGIKETPLWQRIFWSSSEGFVAAALLLAGGLGALQTASIIFALPFSIIMLFMAYGMHKALRIEAIKKEALKVQGAITFSPSYSPIPWQKRLKNLISRHKKSAITLFIQERVFEAITAVSQELEREGVLSKVKKGEGSISLEVLHGEEIDFLYEVRNRGYTSTTFIMSSESEDEIYQYHRAEVFLKEGSQGYDLMGYSKEQIIADILNQYRRHMQFLHLLR

SEQ ID NO: 25578 - protein, 610 aa, Wolinella succinogenes DSM 1740
MCGIAGTLNSSCFSSKKLLAALAHRGPSGHGEFSHQGVNLFHARLSIQDLSPAGAQPMHRHHLSIVFNGEIYNHLELRAKVADYPFSTRSDTETILALFERFGERSLEWMDGMFALAILDQRTHKLFLARDRMGKKPLFYYQEGEEFLFASELNALLTLKPLQIDHAKLSAFLRCGFFPHDGAPYQGVQSLPQGSYAFIDLHHPRPLSPQRYFDLLSLYQAPKIEGFEASKEAVELALKESVKNRLESSDLEVGSFLSGGIDSSLITALASFFTPKLKTFTVAFEGAYDESSLAELVAKRYKTDHTTLHLNPSKLKEEVKGILACYGRPFMDSSAIPSYYVSQEAKKHLTVILNGDGADELFGGYRRYVPMSHGWLKLARPLSLLLPLLPLPKEKKSLYNYLHRLLAMSRKRGLDFYLSATIDSFEDAYAFSPNPHTQTLDQEITQILEDSSLSSLSKMLYLDSQNLLLSDLLPKMDIATMAHSLEGRSPFLGKSLLEVAPRIKDEYKIFGKSTKFILRELAKKYLPHALLEQPKRGFEVPLRAWVEGELKELIFDSLSKNCLSRELIESRFVDALLDKPQDFAPEKRAKMLWSLFSLEVWHEHYQKACE

SEQ ID NO: 25579 - protein, 618 aa, Wolinella succinogenes DSM 1740
MCGIVGYSQNHPQAIQEMLQSIRHRGPDDLGIYCDEGFSLGHTRLSILDLSHAGHQPMEFEHLVIVFNGEVYNFRAIQKELLGLGYTFFSDSDTEVILKAMHCWGEKAVDKFIGMFAFALWDKRKEELLLYRDRVGVKPLYYYFEGGELLFASELRAITAIKPNLALSQAGLYEYFQFGYISSNLSIHQAIHKLPAGHYLRFKAGKIEVKPYWSIHTFLEMPPFEKSEEELIDELEELLVDAFKLRMVADVPVGVFLSGGIDSSLVAAILQKHHGHIHTFTIGFENPRYNEALYAKGVAEHLGTEHTERILSAEEAREILYRFPEVYDEPFGDSSGIPTLLVSKVAKESGVKVVLSADGGDEIFCGYERYPIAHSLSRKILSLPYPLRAFAGRAMESFGAKRAGYLFKVRNLEHKFNQLSEMLRAKDLEEFYELLVHNSKNYEIKELLGETFPPKSRAFKVGERIHPMQGMMSWDYERYMVDDILVKVDRATMFHSIEGREPLLDHRIAEFAARLPFNMKFREGKTKYILRKVLERYLPKEMIERPKMGFGIPMFEWFSQDLRSLFETHFTPERLKSSGVLNPSYVLRELGKLQRGEPVNVNKLWLILVFLMWQEKAR

SEQ ID NO: 25580 - protein, 322 aa, Wolinella succinogenes DSM 1740
MNIDDIKQAKAVLQLEAQEMLRAAEGISTDFSKALDLMQFCRGKVIIMGVGKSGLIGAKIAATLASTGTPSFFIHPTEAMHGDLGMIGKEDVVLAISYSGESGELVAILPHLKRFGIPLITMSQNPQSSLSKVGDAFISIWIEREACPLNAAPTCSTTLTLALGDALAVCLMERRGFKECDFASFHPGGSLGRRLFVKVTDLMQSENLPLIPPHLPLKEAIVKMSDGRLGNAIIVDEEGRLTGVLSDGDLRRAMMREEFNLSAKAIDYATKNPKYCDDETILASEILRYIEENKIQLLVITDKEKRVKGAVHLHKLIEAGIK

SEQ ID NO: 25581 - protein, 562 aa, Wolinella succinogenes DSM 1740
MRLSGSEMVIEAFKNEGVKVVFGYPGGAIMNVYDEIYKQNYFKHILTRHEQAAIHAADGYARATGEVGVSIITSGPGFTNAVTGIATAYMDSVPMVILSGQVPITLIGTDAFQEIDAVGISRPCTKHNYLVKDISELPRILKEAFYIARSGRPGPVHVDLPKDISATMGEFFYPEEIKLKTYKPTYRGNARQIKKAAESIKHAKKPLLYVGGGVIASEASGLLRELSHTTSIPVVETLMARGSMEHNDPLLLGMVGMHGTYAANMAMSESDLIVALGARFDDRVTGKLSEFAKYAEIIHIDIDPSSIGKIVKINYPIVGDISEVLKELLPLLKDINPQATQSWLTQLDRYKALHPLKYEDSNLSIKPQWVIERIGELLGDQANITTDVGQHQMWSAQFYPFTRPRQFMTSGGLGTMGFGFPAAMGVKMGSPEKVSINITGDGSILMNIQELMTAVEKQIPVINVILNNNYLGMVRQWQTFFYDKRYSETDLSCQPDFVKLAESFGGVGFRCETKAEFDTALLKAVELGRVTMIDVKVDRLENVLPMVPSGGSLFNMMLEYKD

SEQ ID NO: 25582 - protein, 267 aa, Wolinella succinogenes DSM 1740
MKKILLGILLALGVAWAADMALWEKSTLNAIIKRGELRVSTDPGYYPFEMKDKKGNVIGFDIDIAREMAKAMGVKLVIVQGSFDSLISGLLTDKADLILAGMTITPERNLKVAFSNPYFTIGQTLLVRPDLKEKVKNYKDLDKPEYTVVTKLGVTGEIVARRMMKNAKIKTYDTEAEAVQEVLNGKADAFIYDFPFNSTFMMQKGKGLLVHLDQSITYEPLGIALKKGDPDFLNWLNHFLAQIKHDGTYDELYERWFVDNKWLDRIQ

SEQ ID NO: 25583 - protein, 267 aa, Wolinella succinogenes DSM 1740
MKKIWLGILISVCTLLGADMSLWQKSTLNEIIKRGELRVGLEPGYLPFEMKDKKGNVIGFDVDLAREMAKAMGVKLKLVPTSWDGLIPGLVTEKFDIIISGMTISQERNLRVNFVEPYIVVGQSLLVKKGLEKGVKSYKDLDKPELTLVTKFGVSAEYAAKRLFKNAKLKTYDTEAEAVQEVLNGKADMFIFDLPFNVAFMAQKGQGYLVHLDTSLTYEPLGWAIKKGDPDFLNWLNHFLAQIKHDGSYDELYERWFVDTKWLEKIQ

SEQ ID NO: 25584 - protein, 390 aa, Wolinella succinogenes DSM 1740
MYSHRIESLSESMTIAISTLARELQSKGKDVISLSAGEPDFETPQVIKDEAIKAIEDGFTKYTSVAGIPELLKAIQAKLARDNHLEYETKEILVSNGAKHSLFNIFQAIVEEGDEVIIPSPYWVTYPEVVTYCGGKNIFIETCDASGFKMSAAQLKAALTPKTKALVLTTPSNPTGSVYSRQELEAIAEVLKGTNVWVVSDEMYEKLVYGVEFTSVASISEDMLKRTITVNGLSKSAAMTGWRMGYLATKDKKLIKLMDNLQSQCTSNICSITQKASIPGLDGRIDPEVEKMRQEFERRRNFAVDALNAIKGLSVIKPEGAFYLFVNTKALELDSMQFCKDLLEEEGVAVVPGIGFGMEGYFRLSFATSMEKIEEGIKRIARFCEKRERA

SEQ ID NO: 25585 - protein, 437 aa, Wolinella succinogenes DSM 1740
MKIVKLLILALLPVLLFGDEAAAEAAETALELDAANTAWMLVATAFVMLMTPAGLALFYGGMTRSKNMLNTIGMSVVGYILASLVWVGWGYGLAFGEDIGGFVGALDGFFLSNVKVTDIWEGGNIPVLLFAAFQMTFAGITVALASGSVIERLKFSTWILFVVLWVTVVYAPVAHWVWGGGFLANEGVLDFAGGTVVHINAGVAGLVMAYMLGKRSDKDKAIFPSSVTLTMLGAILLWFGWFGFNAGSELAADGIAASAFMVTNTAAAAAALAWMLIEYAVYKKFTLIGIASGIVAGLVAITPAAGFVDTPASVIIGLVAGLVAFFGIHGLKKALGADDSLDAFGIHGVAGIWGALATGLFANPEVNELGTGLFYGNAGQFLIQLEGVVVTMVFTAIATAIVFKIVCLITGGGRVDAQEETMGLDESTHGEKSFHLK

SEQ ID NO: 25586 - protein, 631 aa, Wolinella succinogenes DSM 1740
MGKVLGIDLGTTNSAMAVFEGNEGKIIANKEGRNTTPSVVAFTDKGEILVGDPAKRQAITNPQKTIYSIKRIMGLMMSEDKAKEAQKRLPYKVVDRNGACAVEIADKVYTPQEISAKILMKLKEDAEAYLGEEVSEAVITVPAYFNDAQRKATKEAGTIAGLNVLRIINEPTSAALAYGLDKKHAEKIVVYDLGGGTFDVTVLETGDNVVEVLATGGDAFLGGDDFDNRIIDWAAKEFEAENGIDLKKDVMALQRLKDAAENAKKELSSANETEINLPFITADATGPKHLVKKISRAKFESLIDDLIEQTIQKIDFVIKDAGLAKSDIAEVVMVGGSTRIPKVQQRVKDFIGKELNKSVNPDEVVALGAAIQGGVLKGDVKDVLLLDVTPLSLGIETLGGVMTKIIDRGTTIPVKKSQVFSTAEDNQPAVTIQVLQGERELARDNKSLGMFELSGIPAAPRGVPQIEVTFDIDANGILTVSAKDKATGKSQEIKITGSSGLSDSEIEKMVKDAELHKEEDSKRKSMIEAKNQADSLLYQTEKSLGEFKDQLEESERTKIESAINDLKETLKKENLTKEEIDEKVKALTEVSHKLAEAMYKKENPQAADAQQGNTANAGKKKDDDVIDAEVE

SEQ ID NO: 25587 - protein, 358 aa, Wolinella succinogenes DSM 1740
MFVDNVDIYVSSGKGGAGAVSFRREKYVIQGGPDGGDGGKGGDLYFEVNANTDTLSKFKGAKHYRAKNGQPGMGRRMSGKSGEEMVIVVPPGTQVFDYESNELLLDLKEEGMRVKFLEGGKGGLGNYHFKNSVNQRPTYAQPGIAGEERHVRLELKLIADVGLVGFPNVGKSTLISTLSNARPEVANYEFTTLIPALGVVDVDEFSSFVMADIPGIIGGASEGKGLGLEFLRHIERTKTLLFVIDLSNYREPLEQFEILQKELSQFSPELSLRPFGIALSKVDALSKEEANEKIELFLKGIGLSSCQSNQYALSEALQNYIAPLESSIPAFVVPISSATHENIKPLKYLLHESVRRRG

SEQ ID NO: 25588 - protein, 857 aa, Wolinella succinogenes DSM 1740
MNAFEKMTHQLRETLEQALSLALHAKNPEVDLPHMAWALLINSTSILNQALNKMGVDKSALELEAKSLVDRLPQSSSLTKENIKISKRLADSLTQAEALGVKGGDKFIAVDTWLLANLKEEPLKSLFSKYLDVNELKKNLESIRGGAKIESATDDENLESLAKYGIDLTQKALENKLDPVIGRDEEISRMMQILIRKTKNNPILLGEPGVGKTAVVEGLAQRIIAKEVPLSLQNKRVVALDMSALIAGAKYRGEFEDRLKKVVEEVKKAGNVILFIDEIHTIVGAGASEGSMDAANILKPALARGELHTIGATTLKEYRKYFEKDAALQRRFQPIFLNEPTINEALQILRGIKERLEAHHNVTIYDSALVAAAKLSSRYITDRYLPDKAIDLIDEAAAELKMQIESEPTELSLIKRQIQRLEVEKEALLMEKESTHSEARIKEIQAELENAKERQRTLLAQFENEKAVFNEIASIKAKADELRRESELAKRSGDYNKAAEIDYGKIPELENREKELNTQWNRMQESGTLLKNAVSEESIAGIVSRWTQIPVKKMLQGEKEKVLGVEEELRKDVVGQDEALHAIARAIKRNKAGLSENNRPIGSFLFLGPTGVGKTQSAKTLAKFLFDSDKNLVRIDMSEYMEKHAASRLVGAPPGYVGYEEGGQLTEAIRRKPYSVVLFDEIEKAHPDVFNILLQVLDDGRLTDNKGVTVDFRNTIIILTSNIASDKIMENSDKERRESAVKAELKRYFKPEFLNRLDDIIIFNPLGLAQIVEIVEIMFEGIREKLKERQITLELTQSAKEQIAEVGFDPVYGARPLKRALYEEVEDRLAELILEDKISEGSHVVFDAQGGKIIARI

SEQ ID NO: 25589 - protein, 322 aa, Wolinella succinogenes DSM 1740
MDHTSVQSESRIAHFPIMFFAVVMGFGGISVAYFKAHEILGIPLLVFEGLRALTSLLFLVVFSLYAMKFLTHRAGAKKEFSHPIRINFFAAFSIALLLLAILWRGVPSLGGSLFWLGAGVHTFLTFYTVSFWINNNFEITHSNPAWFIPIVGNLIVPVAGDGMASATFLGYYFAIGIFFWVVLFTVVFYRIIFHNQLPQKFMPTLFIFIAPPAVGFLAYLKVGGGFDLFAQFLLNLALFFAFLLLFMYKNFMKLQFFISWWAFTFPMAALTIALLVAYEKSHEAVYLHLGELFLLFATLLVAGVSVKTLRHIYKREICVIEE

SEQ ID NO: 25590 - protein, 569 aa, Wolinella succinogenes DSM 1740
MRSFWGEFVPKSWIVWKEGYPRAHFMPDLFAGLTVAIVALPLAMAFAIASGVEPQRGLYTAIVAGILVSLFGGSRVQIGGPTGAFVVIIYDIVMRHGYEGLALATLMAGFFLILMGFFRFGAIIKYIPYPVITGFTSGIALIIFTSQIKDFLGLPLGVLPSDFLQKWALYAKEIGNVSLESLAVGGVSILLIIGCKRFAPKIPGPIVAVIFGAVAVQMLHLPIETIESRFGMIPSTLPTPSLPAWSFEQAKALVPDALTIALLAAIESLLCAVVADGMTGYRHRSNTELIGQGIANLGSVFFGGIPATGAIARTATSIKSGAKSPLAGILHGIFVWLFMFFLASLIVKIPLATLAGILIVVAWNMSEIEHFRGLLKAPRSDVAVLLSTFLLTVLVDLTVAVQVGVVLAAILFIKRISEVTEIKERRLDEEWSGDGLEGMDDPDATSKKVVPLGVEIYEINGPFFFGVADRLKGVLDVIEETPKVFILRMRRVPVIDATGMHALWEFQESCEKRGTILLLSGVSDRLYGALNRFGFIEALGEERVFDHIDKALAYAKLLVETAEERGRES

SEQ ID NO: 25591 - protein, 175 aa, Wolinella succinogenes DSM 1740
MLKKALFLDRDGVLNIDTGYLYEPKDWRFMPGIFEVLRWFKERDFLLLLVTNQSGIHRGYYTMSDFIEVSLFMQRELKRELGFGLDQIYFCPHTPKEECSCRKPLSGMILQGIKEFDLSASDSWLLGDKSSDIKAAKGAGIGHSVLLSALEEEGEKPTFRVDSLSCLSQILQNHS

SEQ ID NO: 25592 - protein, 764 aa, Wolinella succinogenes DSM 1740
MSHYTLPPSVAEDFASFKESHADFMAGKLDALTFKTIRVPFGIYEQRESDTYMVRVKLAGGILTPAQLHSLALLAEHYAKPHLHVTTRGGVQLHYAKLQDLPQIIQALHEMGLTGRGGGGNTVRNITADPYAGIAPDEAFDVTPCALSLTTKMLETKDSYSLPRKFKIAFSGSSEDRGGATYIDVGFIAKIHEGVRGFRLFVAGGMGAKSRLGSAFIDFLPQEEIFLFSQAIKQVFDQHGNRKNKHAARLRFLIEELGEGQFRELVFKEVQALRDQGGWEIKLEEAFEAIPLESDEIPPLNQEQKLWWNRFVIPQKQKGYYSAKVPLKLGDLESEHAKSLAQALQGFKYGKESIRFGSDQNLYLRNLQADELLSLYPLIQELSGQSSRARILGDMVACTGAATCQLGITRPRGAVVAIEKELQKANIDLDALQGFRIHLSGCPNSCGKHAIADLGFFGKVNREGGHPYPAYNVLVGAIIQEDSTRFAKKIAEVSAYALPLFVTEVLKLWLHAKPHYANFAAWVDQEGEAQIIHLASSYAKIPSFEEDKNPYFDYGSEEIFSLKGRGVGECSAGMYDLIEADKKALKEALEGGDEEENLAKIRLLASRMLLITKGEEARDERSVLQAFRRLFVEGGLIDSSFAPLLEGRPRIELKALGEAVIALYGTMDNSLKFAKEQPKEAPLAPTSSSSSAHRFKDYQGVACPMNFVKTKMDLAQMQSGEILEILLDEGAPIENVPKSVANEGHLILGQTKEGKGWRVRIQKR

SEQ ID NO: 25593 - protein, 1472 aa, Wolinella succinogenes DSM 1740
MDLLHSFRDNCGFGLLANIKNRSSHDTLVSAITALERMMHRGAIAADGKSGDGSGLLLSMPEKFMHKVAHQEGVSLPQQYAVAMLFIKEESHKERFKELCAKNDLKVLLFREVPVDTEALGTLALETLPVIIQAFVAPASLIATKRFEALLYLARKEIEHALKEDPDFYIASFSSKTISYKGLVMPTYIRAFFEDLRDPDFEISFALFHQRFSTNTLPKWRLAQPFRTIAHNGEINSVEANRYNALAKTEAVASQIFTREEMDRILPLLERGVSDSASLDNMFEFLIANGTDFFKAARSLIPAPWQNSPHMDSKLRAFYEYTSGRFEAWDGPAAVSLTDGRYIGCILDRNGLRPAKYVITKEDQIIISSEYGVMDIAPEKVLERGRLQSGEMIGVDLKSGRIFKNEDINDYLKDSNPYMEWLNENLIYLQEHMDSTFVDFSDYAREDLREKQRYFNITHEVIEQVIEPMSKDGKEAVGSMGDDTPLAAFSKEQRPFSDFFRQKFAQVTNPPIDPYREKVVMSLNTGFGAIPNILKEDPSYKRLKTVSPILMKENFEVLLAHGDQEKPHYKECFHNRFFPTLFKGDLKNSLETLVQKIIQSVKEEGIKIVILDDRGVDANHQSIPMAMLIGRLNQALLEAKVRSQVSIVAVSGEVYDSHSAAILIAYGANAIYPYMLYSTVYGLAKEKEKSNAEIKQQLRDTRSAMNAGILKIMSKMGISTVASYRNSALFDVIGLSREILKDCFSDSHGALFGLGYKEIEARIQKAHHHAFFEDKNDLFPIRVGGFYKYVHGDEYHDFRPDIIFGIHKVSLTGKKEDFLELKKGIDGRDKKFIRDFFEIKTDKKPLPLEKIESKESIFKRFDTAAMSLGSISPEAHETLAEVMNELGGRSNSGEGGEKEERSRGPKNSKIKQIASGRFGVTPFYLRSAEEIQIKVAQGAKPGEGGQLPGNKVTPLIAELRYTIPGVTLISPPPHHDIYSIEDLAQLIFDLKQINPEAKICVKLVSTLGVGTIAAGVAKAYADKIIISGCDGGTGAAPLSSIKFAGNPWELGLSEAHNALKVNHLREFVHLQTDGGLKTGLDVVKAALLGAESFAFGTSMLAVLGCKMLRVCHQNRCTVGIATQEARLREHFVGTKERLKNYFTLLAEDVREILAKMGYSTIEEIVGRSDLLQVIDDEMAKKFDFSSILLRLEGGNICKKPSNEPFDKNEFETNILAEVYDTIKNDKNKIVLEKTICNTNRSFGAKISGEIAKYYGNKGLSDGAIKIHLEGVAGQSFGAFLIHGVSLYLTGAANDYVGKGMHGGKIVITPEIKRNKIACAGNTCLYGATGGKLFVAGEVGERFGVRNSGALAIVEGTGDHACEYMTGGVVVILGETGINFGAGMTGGIAFVYDKKHDFIDHVNQELIEIKRIDTDELDEARHYLKKLLKQHINETGSEKAKNILAYFRDEVRNFWIVLPKNMKKAPLNPEDGD

SEQ ID NO: 25594 - protein, 536 aa, Wolinella succinogenes DSM 1740
MLDNFDKLNLQMRILIATAISLLFFIPYSYFFAPVKEAPLKESTSMERAEQQAAPQTSSSPKEGQVSSVAMAETSPSKDIIATVQGSHFRLEIDSLGRIAQVYLKDAKFLKEQKELPLLAPLSSLRPLEVRFSDATTNKEAFAKSYYSDRDLVEIRNTPETLTLTQELEGFKLTKKLTFYPDGNYDLEVETSGSQKRFFLSPGARPIAESDKFAFNGVVLKESGGTIHTTEDGDAKKDEIFEGARFVASVDRYYTTLFFVKEPQGLRVVISKNAEKNPEPFVEALDHLKLSGYIGAKDFRLLESIYPSLTDVVEYGFITFFAKPLFLLLDWLYKFCGNWGWAIVLLTLVVRIILFPLTYKGMVSMQKLKDIAPKMKEIQEKYKGDPQKLQVHMMELYKKHGANPMGGCLPLLLQMPIFFAIYRVLYNAIELKGADWILWINDLSVMDPYFILPILMGASMFLQQHLTPTTFTDPMQEKVFKFLPLIFTFFFVTFPSGLVLYWFVSNVFSIAQQLFINKTLEAKKRAAAAKPSGLSD

SEQ ID NO: 25595 - protein, 299 aa, Wolinella succinogenes DSM 1740
MSAETSITKAGFVAVVGRPNAGKSTLLNWLVGEKLAMVSHKANATRKRMKFIIPHQEAQIIFVDTPGLHHQEKLLNQFMLQEALKAIGDCDLILFLAPVSDSISHYEEFLRVSEGKKHLLLLSKIDTVDNGKLLQKIAQYAPYAESYEALIPVSVKKGVGKEAILSETAKQMPPSPPLFEEDILTTENFRQLYKELIRESIFENVSDEIPYESDVVIDKFEEEGGLDKVSATIVVEKDSQKGVLIGKGGATLQRIGKEARLLMEEMSGKKVFLKLFVKVQKGWSKDKKRLMDFGYDFED

SEQ ID NO: 25596 - protein, 528 aa, Wolinella succinogenes DSM 1740
MAKHKIVVCDHIHQKGLDLLAKEADIELLNASSVPKSELLPLLQDADIAITRSSTDVDSAFLEATKKIRAVVRAGVGVDNVDIDGCSRKGIVVMNVPTANTIAAVELTLAHMLSACRNFPGANDQLKNARLWKREDWYGTELKDKKLGVIGFGNIGSRVALRAKAFEMNVIAYDPYIKPSKATDLGIAYTSNFDDILACDMITIHTPKNKETINLIGKEEIAKMKDGVILINCARGNLYNEEALYEGLQSGKIRWAGLDVFNKEPATNNPLLDLPNVYVTPHIGANTLESQEKIAIQAAEAAIEAARGSNYPNALNLPIKESELPLFVKPYLELVQKMGFFATQANKAPIHSFKIIAEGEISQYIDSLSTFGLVGALNASLGDKVNYVNAPYVATERGIELKSESKSAQGGYKNKITVKLTTEKDIMTLSGTVFDENVQRIVEINGFGLDIEPKGRMILFKNTDVPGVIGMIGTTLAKHQINIADFRLGRNNHNQALAVIIVDDDVKKEVIEELRAIKACLGIENVVL

SEQ ID NO: 25597 - protein, 318 aa, Wolinella succinogenes DSM 1740
MSQNYFNDYILRIMNNIFIFAILAVSYNLINGVTGQLSLEPNGFVAVGAYITSIMLLSPEAKLDMYQLADPHALVLWMSSSFIPALLASGVCAALLALLLSFPVFRVRGDYLAIVTLGFGFIIKILAVNNPQITNGAIGLNEIPQITNIYWSGIIALAATILILQIVYSKFGRAMKAVRDDEDAAIAMGIDTFRIKTCAFTTSAFLEGIGGGLLAALLTTISPDLFDFMLTFQLLIIIVLGGLGSTSGAILGAIIVIGGGEWLRFLDQPLSFFGQDLGTYPGLRMVIFSVILLILMLFAREGIMGKKELWELFRRRRS

SEQ ID NO: 25598 - protein, 505 aa, Wolinella succinogenes DSM 1740
MDNHVNAHEEQEQAGFEQFGFKENLLRGIHEAGFKVPSPIQVEAIPLVLGGHDLIAQAQTGTGKTAAFGLPIIQNLKNDGSIEALIITPTRELAVQISDEIFKLGRNCRTKTVSVYGGQAIRRQVELLEKAPQVIIATPGRLLDHLRNDRLKNFNPTTIVLDESDEMLDMGFLDDIEEIFTYLPASRQTLLFSATMPAPIKNLAQKILHNPKMVKVTTNETTNSDISQRYYIINEYEREDAIVRLIDSEAPSKTIIFTRMKKEADDLSNRLIAKGYQAGALHGDMEQRERQAAVNAFKQGAIDILVATDVAARGLDISNVSHVFNYHIPLNPESYVHRIGRTGRAGKKGIAITLATPLEFKEIRRISETTKATIELYEIPTIAETLKQTDSKLIQNLLNHSITDDALRIYEQIRGEIDTTQLACKLLSMLMKKSSIMGPNKIGLSKEDLMQLKNRLSGDDRRDRNSRGGKGGSRGGSRNSGGYRRDSRDGNRSSEGNYSRRKRRD

SEQ ID NO: 25599 - protein, 309 aa, Wolinella succinogenes DSM 1740
MRGYKIFTGSAHPEFGGEIAKYLGIPLSSATVNRFSDGEINIQISESVRGRDVFIVQPTCAPTNDNLMELLIMIDALKRSSASSINAVIPYFGYARQDRKAAPRVPITAKLVADLLQRAGATRVITMDLHAGQIQGFFDIPVDNLYGSIVFRDYVKSKHLPNPIIASPDIGGVARARYFADQLGLDLVIVDKKREKANVSEVMNIIGDVQGKDVILVDDMIDTAGTMAKAAEVLKSKGATSVIALGTHPVFSGSAYEKIEKGALDEMVVANTIPLKKESSKIKVLSVAPLFAEVIRRVYHNESVNSLFV

SEQ ID NO: 25600 - protein, 121 aa, Wolinella succinogenes DSM 1740
MKFDMLWSKIHRATVTDANLNYVGSITIDEELMEAAELLVGQKVEILDVNNGERFSTYVIRGERGSREICLNGAAARKVAIGDKIIIVAYAQYDRSELSSYKPTVVLVDEKNDIVQIKHEV

SEQ ID NO: 25601 - protein, 401 aa, Wolinella succinogenes DSM 1740
MLIVQKYGGTSVGDLDRIQNVANKVAKTKKEGHRLVVVVSAMSGETDKLLGYAKHFSQIPDPRELDMILSSGERVTSALLALALQAMGFKSISLSGRGAGMITDKSHSKARIDHIDTARIDSLLEDDTIVVVAGFQGITPDGEVTTLGRGGSDLSAVALAGALKADLCEIYTDVEGVYTTDPRIEPKAKKIDKISYDEMLELASMGAKVLLNRSVELAKKLNVNLITKSSFSDNPGTLITKEEEIMENPVVSGIALDKNQARVSITNVQDRPGIAAEIFGALAEANINVDMIVQTIGYDSLTDMDFTIPKTELESAKLVLKRFEGSVGGIEFDDNIAKVSIVGVGMKSHTGVASKAFKALAQDNINIMMISTSEIKISMIINLKYAELSVRTLHATYELDK

SEQ ID NO: 25602 - protein, 404 aa, Wolinella succinogenes DSM 1740
MSKKINKIVLAYSGGLDTSVILKWLQEQYQCEVVTFTADIGQGEEVEPARAKAKLLGIKEENIFIKDLKEEFVRDYVFPMFRANTLYEGEYLLGTSIARPLIAKHLVEIAKEVGADAISHGATGKGNDQVRFELGGYALMPDVKVVAPWREWDLNSREKLLAYAEKHGIPIEKKGKKSPYSMDANLLHISYEGGILEDPASEPEEDMWRWSVSPLDAPDAPERITIEFERGDAVGINGVKMSPATLLAELNRLGGKHGIGRLDLVENRYVGMKSRGCYETPGGTILLKAHRAIESLTLDREETHLKDEMMPRYASLIYNGYWFSPERRALQALIDETQKNVTGSVGLKLYKGNVILAGRTSERSLFNTAYSTFEEDSVYNQKDAEGFIKLNALRFIIAGKANPS

SEQ ID NO: 25603 - protein, 604 aa, Wolinella succinogenes DSM 1740
MCSICGGTIKPSLIQKASDTMRHRGPDARSFWSDGKISLAHNRLSILDLSEAGNQPFGDERYRLIFNGEIYNFQELSSDYGLRLQSSSDTEVLWRLLILEGERILPRLNGMFSFLFYDGHKGEILMARDRFGKKPLFYFHEGKELGVASEIKALRAILGEKGALDQGALLDYLSYLAPCGEKSFFPTIHKLPAGCLARFSLSEGRLEKSSFYSLPSAPSRENIEEKEALRKIEELLVESVRYRLLSDVPVASFLSGGIDSSLISALYARLSPCSIETFSIGYDEYKHYDELPYAREVASHIGSIHHEKIATRKDFLEAFEEVLPILDEPLGDPAIIPTYLLSKEVAKSGFKVVLSGEGSDEIFFGYDGYFDSLKLLWLENSLGLKEKAILLDYHRKSEHGGKEWERLRRLLMDEKPYFRGINESWTPGQRARLFKQEPAWRDPILETFQDFPSKEGEGWYSYIDLKHWMAEVLMSKMDRMSMAHSLESRAPFLDYQLVDFVLSLPSSLRTGEITKNLLKKIALAYLPDSIVNRRKKGFSSPMFEWYFEAYQGRILEDYQRVNRELGWFEDSYLKFLYEKGRMGEYKSQNWGMILFSRWFLIHCG

SEQ ID NO: 25604 - protein, 606 aa, Wolinella succinogenes DSM 1740
MCGILGYLRKGSAGQSQLSCEQFNQILSKIAHRGPDHQDFVWFNEPEYQLYLGHVRLSIIDLDERASQPMLFKDRYLLVFNGEIYNYRELKEKLLLQGYGFATQSDSEVLLAAYDFWGETCVEHFNGMWAFAIYDKKRHSLFCSRDRFGVKPFYFYENEEIFVFASEIKALLPFFKEAKLNPKVILPYLARGFLDGGSETFFDGVYRLEASSNLFYDLRGKQKSFQTYYSILLNPLSAKEREIPSSAKELLSLLRQSVSLRLRSDVRVGACLSGGLDSSGVAALASQQYDFGEKLVAIHAKSSLKESDESSYAIEVANHLGLDLHMVEPSFEDFCESLDDLFYTQEEPFGSTSMFMQYFVMKKAKELGCKVMLDGQGADEVFLGYEHYFHNIFKDLRDRKFFLENDFFKDLKTFRYTKEQILEELKKADDAGVAWDVIKNRGNICSRYLCREWLDSYIAPVKTIQEFQKREIFYNHLPSLLRYEDRDSMRFGIETRLPYLDYRIVEWVLALPTEVKFQQGYLKFALREALEISGLLPKSIVWRYNKMGFESPQKLWIDRYRFEMMKVIEGSEIIRDIFFKVDIRRDDFLWKLFSIAKWEKMFNVKL

SEQ ID NO: 25605 - protein, 390 aa, Wolinella succinogenes DSM 1740
MQEPKMSVYLDNNATTLVDPKVKELMDPYFCQMYGNPNSLHRFGTETHPAIKKALDDLYEGINAADEDDVIITSCATESNNWVIKGVYFDILRHGVKNHIVTTDVEHPAVRATCAFLETLGVEVTYLPINDQGTISAEQVREAITEKTALVSVMWANNETGMIFPIQEIGEICRERGILFHTDAVQAIGKIPVDVQKAKIDLLSFSAHKFHGPKGMGALYIRKGVELTPLFHGGEHMSGRRSGTLNVAGIVGMGEAMRLAVQYLDFEKSNVRRLRDRLENALLELPDVFVVGSRENRVPNTVLISVKGVEGEAMLWDLNKAGIAASTGSACASEDLEANPVMIAIGADKELAHTAIRLSLSRFTTEAEIDYTIEVFKKSAERLRSISSSY

SEQ ID NO: 25606 - protein, 529 aa, Alvinella pompejana epibiont 7G3
MSKFTVVVCDHIHQSGLDILSNEPKINLIVAADEPKDKLVKDIIPQANVAITRSSTDVDEFFLEHAKELKAIVRAGVGVDNVDIDGCSKRGIVVMNVPTANTIAAVELTMAHMLSCVRKFPYAHNNLKQDRIWRRQDWYGTELKNKKLGIIGFGNIGSRVGIRAKAFEMDVIAYDPYIDPKRATDLDITYTKNFDDILSCDIITIHTPKTKETIGMVGEKEIEKMRDGVILINCARGGLYDEKALYNGLKSGKIAMAGIDVFEKEPATNNPLLDLDNITVTPHLGANTKESQRNIAVQSAESAILSAKGISYPNALNLPIKENDIPDSIKPYFELIQKMGNILAQATREKVEKIKVITEGEVSKYIDSITTFGVVGILKESLEDGVNYVNAEFIAKEVGITIEKEKSLKNSGLANRVTVILTTTNQTVQISGTIFGENTQRIIEINGYKLDLEPKGKMILFRNTDVPGVIGDVGRIIASYNVNISDFRLGRDSNSQALAVVKVDDNVNKSLLQELSSLETCISVAYVVI

SEQ ID NO: 25607 - protein, 319 aa, Rickettsia sibirica 246
MTNTNNYRIIAKRVISSEASALEKLSENIPEDFNRIIEFLLSFKGRIILTGIGKSGYIARKIAASFSSTGMPAFYLHPAEASHGDLGMVTRNDLVIMLSNSGETKELFNIIEYCKNSSIKIAAMTMNKNSTLAKRSDFLLIVPEYPEASVIGVPTISSLIMLSLGDALMTVIHEKRGFTKDDFKIYHPGGTIGANLTKIKNLMRSGDEIPLVYEDTSFAKTIIIMNKKRLGCTLVTDKNQNLVGIITDGDLRRHINDQIHLKTASSIMTKNPIHISSEIFAKEALNLMKAKNITNIPIVDDNIIIGIIHIHDLLRIGVS

SEQ ID NO: 25608 - protein, 797 aa, Rickettsia sibirica 246
MLPEIASSMPIASARNDEKLKQTNKTGISKMDEMNKINYAEALEYHEKDKPGKIAISATKSLVTQQDLSLAYSPGVAAPCLEIAKNLEDVYKYTARGNLVAVISNGTAVLGLGNLGAAASKPVMEGKAVLFKKFADIDAIDLEVNTEDPEEFINAVKYLSYSFGGINLEDIKAPECFIIEEKLKSLMDIPVFHDDQHGTAIITAAGLINAAYLTNRKLEDLKIVVNGAGAAAIACIDLLIALGADKSKIIVCDTKGVVYKGRLEGMNKWKELYASDTKFRTLAQSLNNADVFIGLSVKGAVTKDMVSRMASNPIIFAMANPDPEITPEDIQLVRDDAIIATGRSDYNNQINNVMGFPYIFRGALDIRAKTINTEMKIAAAKAIADLARRPVPEEVYKAYSGRKMVFGKEYIIPVPFDPRLITVVAAAVAVAAIESGVARVKDFSIGKYKKELGSRLNPTANYMNFLAEKIHNAPLKRIVFAEGEEEEVISAALMMRDKKYGHPIIIGRVERIEAMLKKIGQDISLDGIQIMNAALSDSLEKYTDYLYKRLQRKGYLYRDCAKLVKTDKNIFAACMLACGDGDALLTGVTKSYIDSLEDIMKVIAPKTNRSILGYSIMIAKDNNIIIADNCITEYPNSWELAQIATQTAEIAKNMGITPRVALLSFSTFGNSSKAKTARIREAVNILDNFSKDKEELSGMKVDFEYDGEMSVKVALDGDLRKLYKFCRLSGSANVLIMPGLNSAAISTELLQEFSSNSFIGPITNGFEKPVQILQAAATANEILKIATFACVEAINEV

SEQ ID NO: 25609 - protein, 627 aa, Rickettsia sibirica 246
MGKVIGIDLGTTNSCVAVMEGKEPKVIENAEGERTTPSIIAFANGEKLVGQSAKRQAVTNPRNTIYAVKRLIGRNFIDPMVRKDQGIVPYNIVKADNGDAWVEADNNKYSPSQISAFILQKMKETAENYLGDKVTQAVITVPAYFNDAQRQATKDAGKIAGLEVLRIINEPTAAALAYGFEKSASKTIAVYDLGGGTFDVSILEIADGVFEVKSTNGDTFLGGEDFDTRILNHLIDVFKKENGIDLSKDPLALQRLKEAAEKAKKELSSAVTTDINLPYITADSSGPKHLNIKFTRAELEKLVDDLIEKTIEPCRKALQDAGFKASDIQEVILVGGMTRMPKVQEAVKKFFGREPHKGVNPDEVVALGAAIQGGVLNKEVTDILLLDVTPLSLGIETLGGVFTRLIDRNTTIPTKKSQIFSTADDNQHAVTIRVFQGEREMAKDNKLLGQFNLEGIPLAPRGLPQIEVTFDIDANGIVHVSAKDKASGKEQKVTIQASGGLSDAEIEQMVKDAEQNADEDKKRKELIEAKNAADSLVYSTEKTLTEYGDKLSSDDKGAVEEALAALKAVLESEDTALIKEKTESLTAASMKIGEAMYKAQSESQPAAESATNDEKIVDADFQDVEKK

SEQ ID NO: 25610 - protein, 339 aa, Rickettsia sibirica 246
MTNRHLAKFAYREEFKGDTEALAAAVREDASTGSTSQLPLEVQFGKMSNQKTVSVCIIGRPNSGKSTLLNRIIGEKLSIVTPKVQTTRSIITGIITLKDTQVILYDTPGIFEPKGSLEKAMVRCAWSSLHSADLVLLIIDSLKSFDDITHNIVDKLRSLNIVPIFLLNKIDIESKYLNDIKAFLTENHPDSLLFPISALSGKNIDGLLEYITSKAKISPWLYAEDDITDLPMRFIAAEITREQLFLNLQKELPYKLTVQTEKWEDLKDKSVKINQVIVVSRESYKTIILGKNGSKIKEIGAKSRMQMERFFGFPVHLFLFVKVREMWENNQEFYQYMKI

SEQ ID NO: 25611 - protein, 155 aa, Rickettsia sibirica 246
MTKEDLPTKTIIAHLGRSSSLCAIKNGLSLTSSMGFSVLDGVMMGTRTGNLDPGVVLYLIDHEQMTTKAVTELLYKKSGLLGMSSESSDMRTLLANNSPDAKFAIDLFVYRIVLEIGKLTAALEGVDCLIFIASVGQNSAVIREMITEKLFMARH

SEQ ID NO: 25612 - protein, 401 aa, Rickettsia sibirica 246
MSIISTRLSSIKPSPTLAIVKKTLELKQAGVDIITLGAGEPDFDTPDNIKEAAIKAIKDGFTKYTNVEGMPLLKQAIKDKFKRENNIDYELDEIIVSTGGKQVIYNLFMASLDQGDEVIIPAPYWVSYPDMVALSTGTPVFVNCGIENNFKLSAEALERSITDKTKWLIINSPSNPTGASYNFEELENIAKVLRKYSHVNIMSDDIYEHITFDDFKFYTLAQIAPDLKKRIFTVNGVSKAYSMTGWRIGYGAGSKTLIKAMTIIQSQSTSNPCSISQMAAIEALNGPQDYIKPNALNCQKKRDLALSILKRVKYFECYKPEGAFYLFVKCDKIFGHKTKSGTIIANSNDFAEYLLEEAKVAVVPGIAFGLEGYFRISYATSMEELEKACIRIERTIDVIPA

SEQ ID NO: 25613 - protein, 560 aa, Rickettsia sibirica 246
MNNNIINLIAAIILSLSIIFGWQYFVVKPEQKKQQQQITVQKAENLKKQQLKALVEPATGIVVQAESQVQRIKIESESLTGSISLKGLRFDDLILKKYKQDLSKNSPEVRLFSPANTENAYFAEVGLVSNLSSVKLPNNDTIWNSDSEILSPEKPVHLFWVNEDGVKFLVTIAVDENYLFTIEQTIVNNSNKELPVQSYGLINRKYIAVEKAVNILHQGPIGCIDENLKEYSYDDIKDKKSEKFAASKVDWIGITDKYWLSSLIPDKSSNYSSNFNYALKQGTERYQVDFISPVQIIKPGENFSIKSRIFAGAKKVDLLDKYEKQYDIKLFDRAIDFGWFYIITKPVFYAMNFFYGYVGNFGVSILIVTVIIKLLMFTLANKSYRSMKKMKNLQPEIDRIKNLYSDDKARLNQEIMALYKKEKVNPVAGCLPILVQIPVFFSIYKVLYVTIEMRQAPFYGWIKDLSASDPTTIFNLFGLLPFSPPSFLMIGAWPILMAITMFLQQKMSPEPADPMQAQVMKFMPLIFLFMFSSFPVGLLIYWSWNNILSIIQQYYINKFN

SEQ ID NO: 25614 - protein, 857 aa, Rickettsia sibirica 246
MNIDKFTAHAKSVIASSQSLAAKNDHQQILPLHLLSSLLSEETGIIQTLINNTGGNINLLKDQVQLELNKIPKVQVEGGGQVYSSAEALKVLEKASSIAKDSGDSFVTIERIFEALTYDNTIAGKILTNNGINNKKIATAILQFRKGKKADTESAENSYDALKKYGRDVTELAESGKLDPIIGRDEEIRRTVQVLSRRMKNNPVLIGEPGVGKTAIIEGLAQRIFSKDVPESLINCRIIELDMGALIAGAKYRGEFEERLKAVLSEIKESSGEIILFIDELHLLVGTGKTDGAMDASNLLKPMLARGELHCIGATTLDEYRKYIEKDAALARRFQPVYVSEPTVEDTISILRGIKEKYELHHAVRISDSAIVAAATLSNRYITDRYLPDKAIDLIDEACSRMKIELSSKPEELDELDRRIIQIKVELAALKKENDEHSKKKIEHLTTALEKLESQSYDMGAKWQAEKAKLQQTQKLKEELDRSRNELERAERDANLAKASELKYGIIPEIMKKIQEAESMDNKGLLKEIVSESDIASIISRITGIPIDTMLSSERERLLVMEQKLRESVIGQDKAIKGVSDAVRRSRAGIQDINRPLGSFLFLGPTGVGKTELTKALAGFLFDDRNAILRIDMSEYMEKHAISRLIGAPPGYIGYDQGGVLTEAVRRRPYQVILFDEVEKAHPDIFNIMLQILDEGRLTDSQGITVDFKNTIIVLTSNLGAEILVNQKEDEDTYKVKDEVMEYVKAVFKPEFLNRLDEIILFHRLNRNNIHDIVKIQLESLKKILLAQNIILEFDESALNYLAEKGYDPSFGARPLKRLIQREIQNNLAKMILAGEISSGKTVKINSKDKELKVTIS

SEQ ID NO: 25615 - protein, 348 aa, Rickettsia sibirica 246
MRLPRRFAPRNDVENINHMHFIDEVKIYIKGGNGGNGCVSFHREKFIDRGGPDGGDGGRGGSVIFRSNHHLNTLVNYRYKQHFTAENGENGKDSNRSGKSGKSLVLDVPIGTQIFSEDGNILFYDFTVDDQSFEIIKGGSGGLGNSHFKSSVNQAPRKRTEGEIAEEMWIHLSLKLLSDVGLVGLPNAGKSTFLSVVTAAKPKIADYPFTTLVPNLGVVYVDDEEFVIADIPGLIEGAHQGHGLGDKFLKHIERCNVLIHLIDGSSNDVVADYNTVRLELELYSDYLKNKIEIICLNKCDVLTDEEIQEKINKLQKVTNKEIFPISTCTNAGVNKIVKLALETIKNQE

SEQ ID NO: 25616 - protein, 399 aa, Rickettsia sibirica 246
MALIIQKFGGTSVANIDRIKKIVPIIKTEIAKNNQVIVVVSAMAGVTNQLVTLCNEVSSLNNISQFAEYDVALSSGEIVTASLLALALQEEDIKARSFLAWQLPMLTDNNHSKALVESITTDLLEKYLQLNTIPIIAGFQGINKSNRLTTLGRGGSDTTAALIAAAMKADRCDIYTDVEGIFTADPRIIPNAKKIKEIDFLEMLELASSGAKVLHPRAGELVMRYKIDMRVLSTFSPDTEGTLITSKDKNMENGIINSITSNKNLLKIFVKSISLSFLQVANMITQNNNHIEFMQTNNEEYSFITNLTDKNNLQALLTNLKEDKQIQDFTFDTEIATISLIGYGIKNDCKLLETILSKLTNDNIDVHMIQLSEVKITLFINDQDAEKTIFNLYNLFKIS

SEQ ID NO: 25617 - protein, 107 aa, Rickettsia sibirica 246
MLENKNFKFIENEIKNNKVVLFMKGIKKSPACGFSGTVVAILNKLGVEFRDINVLFDAELREDLKKFSDWPTFPQLYINGELVGGCDIVRELYQSGELEKMLKAYTR

SEQ ID NO: 25618 - protein, 576 aa, Rickettsia sibirica 246
MDIKLLYRLAKYLRFYKKDLIIVMISLLSVSASLLLIGSVFRNLVDKGLSKDHISSVDKSILYICLLIIILSIASFFRSYFINNVAEKAVNQIRKEAYSNLINYEIEEFEELKIGDIISRLTNDIDQISTLIVNFLSFFIRNSVMLIGSITLMFFESFKLASIVIITIPILLIPLIKFGKYVKVLSKKALESKSLLASDIDETFNNIRAIYAFNHQINKIADFDTKLQNYLIYCKTRLKIRALFFAISIAIIFLAITLVVWIGASDIVKGHLSAGQIISFIYYAIIAGVSCGGIFELLSEMHLPVTALERIITIIDKTPIAHNNYLELNNSDPISIEFKNVDFTYHSRPNLRIINNMSLKINANKFLGIVGRSGAGKSTVIQLLLRFYRQENGTILINNQDITLLNPAEIRKLIAYVPQEASIFSGTIKSNIIFGNNEASDDEINEIIKITGIEEFAAKLHDGINAKIGERGVRLSGGQKQRIAIARALLRMPQILLLDEAMSALDTMSEQKLLESIKKIMRGNIIISIAHRISSIESADYILVIDKGGVVAEGSHNDLSKNSEIYRNICREQLTI

SEQ ID NO: 25619 - protein, 410 aa, Rickettsia sibirica 246
MKNFNLSEELIIALETMNITEPTEIQKQSIPVAMAGSDILASSQTGSGKTLAYLLPLIDSFIKNKTTALILVPTRELATQIHSTLNKVTTSYKINSAVLIGGEPMPKQFMQLKKNPKVIIGTPGRIIDHLNRGSLKIDRIGITVLDEMDRMLDMGMKEQLEEINKFLPEKRQVLMFSATMPKHIIAVSQKYLNNPVRITVGATNKAAAEIKQESMHVSDKEKFSALTKQLGNREGSVIIFVKTKRSADQLAKMLKYENHTAEAIHGDLSQRQRERVILSFRKSNHRIMVATDVAARGLDIPHTQHVINYDLPMCPEDYLHRIGRTGRAGATGHALSFISPDDVIRWRAIDRLVNKGESTPRSEFRSDKNNRKRSFGKRAGGDGKKFNAFDSSRKRTFDGNSYGNKRKKVS

SEQ ID NO: 25620 - protein, 410 aa, Rickettsia sibirica 246
MNPQLNNLTLPIYMDYQATTPIDPRVMEAMLPYFTTKFGNPHSRSHSFGWEAENAVEEARSMVAKLIGADTKEIIFTSGATESNNLAIKGIAKFYSNKKNHIITVVSEHKCVLDACRHLEQEGIKITYLPIKPNGIIDLETLKNAITDQTMLVSVMMVNNEIGVVQPLKEIGKICREKGVFFHSDIAQGFGKIPIDVNAFNIDLASISGHKIYGPKGIGALYVRKKPRVRVTPLINGGGQERGMRSGTLPTPLIVGLGMAAEIAYSEMEKDTKHVNYLFDRFLNNIHKRISEVYLNGDKNQRYKGNLNLSFAGVEGESMILAIKDLAVSSGSACTSASLEPSYVLRSMGIGEELAHTAIRFGIGRFTTEQEVDYAVNLICSKIDKLRELSPLWEMMQEGIDLKKIKWAVH

SEQ ID NO: 25621 - protein, 372 aa, Rickettsia sibirica 246
MIYLDHNATTFIDPRVKEFIISLMDKELNPSSAHSSGRFAKNLIETVRAQIATALGITLSSREYDITFTSSGTEGNNLIMKNFYDGDIFISAIEHLSIYNHINYAPNIKVISVNTQGLVDLEHLEELLAQSNTSKKLVSIIMANNESGVLQDIAEIGKITKKYEAKFHSDLVQGFGRIPINIKALGLDFATISGHKIGGGQGGAALISSSNFQVTPMIIGGGQEKSVRSGTENVLAIAGFGLASALRTDDISENYIKIKKLQENLEKKLKKYPNVNIVSNNVARLPNTTLITIPNTDAQAKLIGFDLHNICVSSGSACSSGKISKSHVLTNMGVGEEEAKSSIRISLSHTNTVSDIEAFIEAFEEIYDVIPS

SEQ ID NO: 25622 - protein, 500 aa, Pichia angusta
MPRQWTRFFEYKYLEMRRFSRLINTNSFFATMKDSMTEDLAADYDKADMVWVMVSGVLVWIMIPGVGLLYSGLSRKKHALSLLWASLMAICLISFQWFFWGYSLTFGTNSSVFLGSLDNFCLMKVLGDSNALSTVPDIVFCFFQGMFAMITGCIMLGGACERARLGPMMVFLFLWMTVVYCPCAMWTWNANGWLATLGAYDFAGGGPVHQASGFGALAYALICGKRHDPVAGSNLPKYRPHSVTSVVLGTVFLWFGWFGFNGGSSGDASIRGFYACVNTNLAAACGGLAWMFLDYFRCGRKWTTVGMCSGAVAGLVGITPAAGFVPVYFAVPIGALTAIACNYSVDIKNMIGIDDGLDVWCLHGVGGFTGSVLTGLFAADYIIATDYGVSGEGGWLNHHYKQLGYQLAASVSIDAWSFVVTSILLLVLNRIPFLKIRLSEEEEELGTDAAQIGEFTYQESRVYIPEPVRSVKSIPGTKATKSNELDADAVPLPKDEKVDV

SEQ ID NO: 25623 - protein, 879 aa, Arabidopsis thaliana
MEGRRQRLLVFIFGALAITHLVQAQPPDQRGFISLDCGLPVNESPYTDPRTGLTFSSDADFILSGLRGEAGDDNTYIYRQYKDLRYFPDGIRNCYNLKVEQGINYLIRAGFGYGNYDGLNVYPKFDLHVGPNMWIAVDLEFGKDREIIYMTTSNLLQICLVKTGSTIPMISTLELRPLRNDSYLTQFGPLDLIYRRAYSSNSTGFIRYPDDIFDRKWDRYNEFETDVNTTLNVRSSSPFQVPEAVSRMGITPENASLPLRFYVSLDDDSDKVNVYFHFAEIQALRGNETREFDIELEEDIIQSAYSPTMLQSDTKYNLSPHKCSSGLCYLKLVRTPRSTLPPLISAIEAFKVVDFPYAETNPNDVAAMKDIEAFYGLKMISWQGDPCVPELLKWEDLKCSYTNKSTPPRIISLDLSSRGLKGVIAPAFQNLTELRKLDLSNNSFTGGVPEFLASMKSLSIINLNWNDLTGPLPKLLLDREKNGLKLTIQGNPKLCNDASCKNNNNQTYIVPVVASVASVLIIIAVLILILVFKKRRPTQVDSLPTVQHGLPNRPSIFTQTKRFTYSEVEALTDNFERVLGEGGFGVVYHGILNGTQPIAVKLLSQSSVQGYKEFKAEVELLLRVHHVNLVSLVGYCDEESNLALLYEYAPNGDLKQHLSERGGSPLKWSSRLKIVVETAQGLEYLHTGCKPPMVHRDVKTTNILLDEHFQAKLADFGLSRSFPVGGETHVSTAVAGTPGYLDPEYYRTNRLNEKSDVYSFGIVLLEIITSRPVIQQTREKPHIAAWVGYMLTKGDIENVVDPRLNRDYEPTSVWKALEIAMSCVNPSSEKRPTMSQVTNELKQCLTLENSKRGVREDMGSRSSVEMSTSFTTEINPKAR

SEQ ID NO: 25624 - protein, 428 aa, Fusobacterium nucleatum subsp. vincentii ATCC 49256
MFIDEVIITVKAGNGGDGSAAFRREKFVQFGGPDGGDGGKGGDVVFIADSNINTLIDFKFKKLFKAGNGENGQKKQMYGKKGEDLIIKVPVGTQVRDFTTGKLILDMSVNGEQRVLLRGGKGGYGNVHFKNSIRKAPKIAEKGGEGAEIKVKLELKLLADVALVGYPSVGKSSFINKVSAANSKVGSYHFTTLEPKLGVVRLGEGKSFVIADIPGLIEGAHEGVGLGDKFLRHIERCKMIYHIVDAAEIEGRDCIKDFEKINYELKKFSEKLAGKKQIVIANKMDLIWDMGKYNKFKDYLAEKGIEIYPVSVLLNEGLKEVLYKTYDMLSHIEREPLEEETDITKLLKELKIEKEDFEITRDEEDAIIVGGRIVDDVLAKYVIGMDDESLVTFLHMMRNLGMEEALQEFGVQDGDTVKIADVEFEYFE

SEQ ID NO: 25625 - protein, 858 aa, Fusobacterium nucleatum subsp. vincentii ATCC 49256
MMNPNQFTENTISAINLAVDISKGNMQQSIRPEALALGLLMQNNGLIPRVIEKMGLNLQYIISELEKEMNNYPKVEVKVSNENISLDQKTNSILNRAEKIMNEMGDSFLSVEHIFKAMIEEMPIFKKLGINLEKYMEVLMNIRGNRKVDNQNPEATYEVLEKYAKDLVELAREGKIDPIIGRDSEIRRAIQIISRRTKNDPILIGEPGVGKTAIVEGLAQRILNGDVPESLKNKKIFSLDMGALVAGAKYKGEFEERMKGVLKEVEESNGNIILFIDEIHTIVGAGKGEGSLDAGNMLKPMLARGELRVIGATTIDEYRKYIEKDPALERRFQTILVNEPNIDDTISILRGLKDKFETYHGVRIADAAIVEAATLSQRYITDRKLPDKAIDLIDEAAAMIRTEIDSMPEELDQLTRKALQLEIEIKALQKETDDASKERLKVIEKELAELNEEKKVLTSKWELEKEDISKIKNIKREIENVKLEMDKAEREYDLTKLSELKYGKLATLEKELQEQQNKIDRDGKDDSLLKQEVTADEIADIVSRWTGIPVSKLTETKKEKMLHLEDHIKERVKGQDEAVKAVADTMLRSVAGLKDPNRPMGSFIFLGPTGVGKTYLAKTLAYNLFDSEDNVVRIDMSEYMDKFSVTRLIGAPPGYVGYEEGGQLTEAIRTKPYSVILFDEIEKAHPDVFNVLLQVLDDGRLTDGQGRIVDFKNTLIIMTSNIGSHLILEDPALSESTREKVTDELKARFKPEFLNRIDEIITFKALDLPAIKEIVKLSLKDLENKLKPKHITLEFSDKMVDYLANNAYDPHYGARPLRRYIQKEIETSLAKKILANEIHEKSDVLIDLDNNHIVFKEK

SEQ ID NO: 25626 - protein, 323 aa, Fusobacterium nucleatum subsp. vincentii ATCC 49256
MLDTEIIEIAKNIYDTEIKSLEMRMNKLSENFVKVVRKIYDCKGKVVVTGIGKTGIIGKKISATFASTGTTSIFMNSTEGLHGDLGIINQEDIVLAISNSGESDEILAIMPAIKNIGAYIIAMTGNINSRLAKASDLYINTHVEEEGCPINLAPMSSTTNALVMGDALAGCLMKLRNFSPQNFAMYHPGGSLGRKLLTRVGNLMKTGEALALCKADTSMEDIVILMSEKKLGVVCVMNEENNILVGIITEGDIRRALSHKEEFFKLKAKDIMTTKYTKVDKEEMATQALSIMEDRPHQINVLPVFDKEKFVGVIRIHDLLKVR

SEQ ID NO: 25627 - protein, 337 aa, Fusobacterium nucleatum subsp. vincentii ATCC 49256
MIIMSFLGQVRKKALQANRRIVLPESSDERVIRAASQILKEGLAQVILVGNQEAIMHSAKAYEVSLSGAKIVDPYNFERFNDYVNKLVELRAKKGMTPEEAKKLLLNNPTFFGAMLIKMGDADGMVSGSSSPTANVLRAAIQVIGTQPGVKTVSSVFIMELSQFKDLFGSILVFGDCSVIPVPTSEQLADIATSAAETAVKIAGINPRVALMTFSTKGSAKHECVDRVIEAGRILRERKVKFRFDDELQADAALVKSVGEIKAPLSDVSGNANVLIFPSLSAGNIGYKLVQRLAGANAYGPIIQGLNAPVNDLSRGCSVEDIVVLTAITSAQACIDC

SEQ ID NO: 25628 - protein, 398 aa, Fusobacterium nucleatum subsp. vincentii ATCC 49256
MKILVINCGSSSLKYQLINPETEEVFAKGLCERIGIDGSKMEYEVIAKDFEKKLEIPMPSHKEALELVISHLTDKEIGVIASVDEVDAIGHRVVHGGEEFAQSVLVNEAVLKAIEVNNDLAPLHNPANLMGIRTCMELMPGKKNVAVFDTAFHQTMKPEAFIYPLPYEDYKELKVRKYGFHGTSHLYVSGIMREIMGNPEHSKIIVCHLGNGASITAVKDGKSVDTSMGLTPLQGLMMGTRCGDIDPAAVLFVKNKRGLTDAQMDERMNKKSGILGLFGKSSDCRDMENAVKEGDERAVLAESVSMHRLRSYIGAYAAVMGGVDAICFTGGIGENSSMTREKALEGLEFLGVELDKEINSVRKKGNVKLSKESSKVLVYKIPTNEELVIARDTFRLAK

SEQ ID NO: 25629 - protein, 400 aa, Fusobacterium nucleatum subsp. vincentii ATCC 49256
MEEKMKISDRVKNMKYSAVRKLAPLAAEAEKKGIKVYRLNIGQPNIETPKLFFEGLKNIPDQVIKYADSRGISVLLEQVIEVYARDGHILKKEDIIVTEGGSEALTFAMLAICNPDDEVLIPEPFYSNYKSFLDISGAKIIPIPTDIKNNFALPKKEEIQKLITSKTKAILYSNPCNPTGKVYTEVEVKLLADLAIENDLFIIADEPYREFIYDDKDKHHSLLDIEKAKENVIIIDSVSKHYSACGARVGFLISKNKDFMTYIMKLCQARLAAPTVEQYAVANLMKAPKEYFKEIKEIYRRRRDIIVDSLNKIEGVTCSTPKGAIYAFAKLPVESSEDFCKWLLTEFVYDNSTVMLAPGEGFYETEGLGKNEVRFSFCVGEDDIEKAMKVLEEALKVYKK

SEQ ID NO: 25630 - protein, 783 aa, Fusobacterium nucleatum subsp. vincentii ATCC 49256
MSKLDQNKTPLFTVLKDEYVRRNILPFHVPGHKRGRGVDKEFFNFMGEAPFSIDVTIFKMVDGLHHPKSCIKEAQELLADAYGVKHSFFAVNGTSGAIQAMIMSVIKAGEKILVPRNVHKSVSAGIILSGSEPVYMNPEIDENLGIALGVKPQTVENMLKQDPDIAAVLIINPTYYGVATDIKKIADIVHSYDIPLIVDEAHGPHLHFHDELPISAVDAGADICTQSTHKILGAMTQMSVIHVNSDRVNVEKVKQILSLLHTTSPSYPLMASLDCSRRQIATQGQELLTRTIELAKYFRREANRIPGIYCFGEELIGKDGFFAFDPTKITISAKELGLKGGELESLLVDDYNIQMELSDYYNTLGLITIGDTEESVNKLLDALRDISRRFFGKGKTLEKNIIKLPETPELVLMPREAFYSEKNKVPFKESVGKISGEMIMAYPPGIPIIIAGERISQDIVDYIEELKEANLHIQGMEDPELETINVIEEEDAIYLYTEKMKNVLIGVQTNLGVNKTGTEFGPDDLIQAYPDTFDEMELISVERQKEDFNDKKLKFKNTVLDTCEKIAKRVNEAVIDGYRPILVGGDHSISLGSVSGVSLEKEIGILWISAHGDMNTPESTLTGNIHGMPLALLQGLGDRELVNCFYEGAKLDSRNIVIFGAREIEVEERKIIEKTGVKIVYYDDILRKGIDNVLDEIKDYLKIDNLHISIDMNVFDPEIAPGVSVPVRRGMSYDEMFKSLKFVFKNYSVTSADITEFNPLNDINGKTAELVNGIVQYMMNPDY

SEQ ID NO: 25631 - protein, 459 aa, Fusobacterium nucleatum subsp. vincentii ATCC 49256
MESNQKMKFWSIVLLTINSIIGTGIFLSPGAVAKLVGDKAAIIYLAAAVFAAVLAVTFAAASKYVVKSGAAYAYAKAGFGDEVGSYVGITRVVSASIAWGVMATGVVKTTLSIFGQDSSNMKNVTIGFITLMLILLIINLIGTKLLTIISNISTIGKMGALGITIIAGIFILIFSGGNHIEELNLLKDAEGNNLIPEFTTSVFVTALIGAFYAFTGFESVASGSADMEKPEKNLPRAIPLAIAIIAAIYFGIVFVSMYIDPVAMVTSKDPVVLASIFKNQLLQKIIVIGALMSMFGINVAASFHTPRVFEAMAKEKQVPEFFAKRTKGGLPLTSFILTAAIAVVIPLAFNYNMAGIIIISSISRFIQFIIVPLAVIVFFYGKSKEEVLNANKNFMIDVVIPIIALLLTILLLIKFNWVQQFSTKLDDGTTTINLKAVISMIIGYLILPIILRIYMRAKK

SEQ ID NO: 25632 - protein, 205 aa, Fusobacterium nucleatum subsp. vincentii ATCC 49256
MRYIYNLLQQFFAFLLNTTDKYVGNFGISIIVVTILIKILLLPLTLKQDKSMKEMKKLQPELEKIKQKYANDKQMLNIKTMELYREHKVNPLGGCLPILIQLPILFALFGVLRNGIIPKDSSFLWMKLVDPDPFYILPVLNGAVSFLQQKLMGTSDNPQMKNMMFVFPILMIVISYRMPSGLQLYWLTSSILAVVQQYFIMKKGA

SEQ ID NO: 25633 - protein, 316 aa, Fusobacterium nucleatum subsp. vincentii ATCC 49256
MINFNNVKIFSGNSNVELAKKIAEKAGLQLGKAEILRFKDGEVYIEIEETVRGRDVFVVQSTSEPVNENLMELLIFVDALKRASAKTINVIIPYYGYARQDRKSKPREPITSKLVANLLTTAGVNRVIAMDLHADQIQGFFDIPVDHMQALPLMAKYFKEKGFLGDDVVVVSPDVGGVKRARKLAEKLDCKIAIIDKRRPKPNVAEVMNLIGEVEGKIAIFIDDMIDTAGTITNGADAIAQRGAKEVYACCSHAVFSDPAIERLEKSALKEVIVTDSIALPERKKIDKIKILSVDSVFAAAMDRIINNKSVSELFE

SEQ ID NO: 25634 - protein, 366 aa, Fusobacterium nucleatum subsp. vincentii ATCC 49256
MTKKCVGCGVELQNTDKNLQGYTPKPINTKEDMYCQRCFQLKHYGKYAVNKMTREDYKKEVGKLLDDVKLVIAVFDIIDFEGSFDVEILDILREKDSIVIVNKLDLIPDEKHPSEVANWIKDRLAEESIVPLDIAIVSTKNGYGVNGVFRKIKHFYPDGVNAMVIGVTNVGKSSVINRLLGKKIATVSKYPGTTIKNTLNMIPFTNIGLYDTPGLIPDGRASDLVCDNCAQKIIPSGEISRKTFKAKYNRMIMIGNLVKFKILNNEEIKPIFSIYAAKDVQFHETTIEKAKELEAGNFFTIPCECCKEEYNKHKKVNKTLTINTGEELVFKGLAWVSVKRGPLNIQITLPEEIEISIRKAFINPRR

SEQ ID NO: 25635 - protein, 611 aa, Fusobacterium nucleatum subsp. vincentii ATCC 49256
MEIKMKKAIFLDRDGTINVEKDYIYKSEDLVFEEGSIEALKTFKNLGYILIVVSNQSGIARGYFTEEDLNIFNNNMNEILKKNGVEITEFYCCPHHPDGIGEYKKVCECRKPNNKMIEDAIKKYNINREKSYMIGDKTSDIGAGLKSNLKTVLVKTGYGLKDMEKVDKNETLIYENLKDFSEILKRGKLNELIFEEFSKKVQIKNVVMDSRKVIEGSLFFAINNGNSYVKDVLDKGTSLVIADNTDIKDKRVIKVTDTIATMQDLATKYRNKLDIQVVGITGSNGKTTTKDIVYSLLSVKAKTLKTEGNYNNHIGLPYTLLNVTDEEKFVVLEMGMSSLGEIRRLGEISSPNYAIITNIGDSHIEFLKTRDNVFKAKTELLEFVDKENTFVCGDDEYLGKLDVNKVGFNENNTYKIESYEFSNKGSKFILDGKEYEMSLLGKHNISNTAIAIELAKKIGLTDEEIQKGLKEIKISNMRFQEIKIGNDIYINDAYNASPMSMKAAIDTLNEIYNDKYKIAILGDMLELGENEVDYHMDVLNYLLDKKIKLIYLYGERMKKAYDIFMKNKSEEYRFWYYPTKEGIVESLKNIKMDKVILLKASRGIKLEEIIK

SEQ ID NO: 25636 - protein, 327 aa, Fusobacterium nucleatum subsp. vincentii ATCC 49256
MAYISSLDILETEIAIKKVKDFFESRLAKELDLLRVSAPLFVIPESGLNDNLNGTERPVSFDTKSGERVEIVHSLAKWKRMALYRYNIENHKGIYTDMNAIRRDEDTDFIHSYYVDQWDWEKIISKEDRNEEYLKETVRKIYCVFKETEEYITTEYPKLTKKLPEEITFITSQELENKYPNLTPKNREHAAAKEYGAIFLMKIGGKLSSGEKHDGRAPDYDDWDLNGDIIFNYPLLGIGLELSSMGIRVDEKSLDEQLKIANCEDRRSLPYHQMILNKVLPYTIGGGIGQSRICMFFLDKLHIGEVQASIWSQEVHEICRQMNIKLL

SEQ ID NO: 25637 - protein, 673 aa, Fusobacterium nucleatum subsp. vincentii ATCC 49256
MNDNQFENEDLKDKDDSDGHEKEENKKEEPKQENQQEQDSQDKDKKSSDEDKKQDDKYNPFNNKNKRDEERRRVVGKAIKVNFNFKGLLMLIFIITLAVVVPNIMDENKNQQVVDVSYSDFIKNIENKKIGVVEEKDGYVYGYKASEVKYLETKSNSIKSKLGFDGKKEVQGLKARLITNRLGEDANLMAVINNNAAIIQSVDPPEPSLFLSIVLAFLPYIIMIGFLVFMLNRMNRGGSGGGPQIFNMGKSRAKENGENISNVTFADVAGIDEAKQELKEVVDFLKEPEKFRKIGAKIPKGVLLLGQPGTGKTLLAKAVAGEAKVPFFSMSGSEFVEMFVGVGASRVRDLFNKARKNAPCIVFIDEIDAVGRKRGTGQGGGNDEREQTLNQLLVEMDGFGTDETIIVLAATNRADVLDKALRRPGRFDRQVVVDMPDIKGREEILKVHAKGKKFAPDVDFKIIAKKTAGMAGADLANILNEGAILAARAGRTEITMADLEEASEKVQMGPEKKSKVVPEDEKKMVAYHEVGHGIVGYIIGGGDRVHKITMIPRGQAGGYTLSLPEEEKSFHSKKYMLDRIARYFGGRAAEEIIFGKENITDGAGSDIYYATLIAKDIVTKYGMTEKFGPVFLEATEEDYMLQRKYYSEQTGKEVDDEIRKISLNNIQELKISY

SEQ ID NO: 25638 - protein, 418 aa, Fusobacterium nucleatum subsp. vincentii ATCC 49256
MEGLKVLKFDIFTTLMLAVLAIYFGDFLRKIFPILKKYCLPASVVGGTVFALISLLLFKMGIVQLDFDYKAINQLFYCIFFAASGAAASMALLKKGGKLVLIFAVLAAVLATFQNGIALVIGKFMDIDPLISMMTGSIPMTGGHGNAASFAPIAVEAGAPAAIEVAIAAATFGLISGCMLGGPFGNFLVKRFKLENSMSNEQVMEEIDVEGSGSILVDKPNLIQAVFLMCIAIGIGKLIELGLKSIQDSTGWKVALPIHVCCMFAGIVIRLIYDRKEGNHDVLYESIDIVGEFSLALFVSMSIITMKLWQLSGLGLALVVLLIAQLVLIITFCYFLTFRLLGKNYDAAVMAVGHMGFGLGAVPVSMTTMQAVCKKYRYSKLAFFVVPVIGGFISNLTNAVIITKFLDLAKDLHTIWIS

SEQ ID NO: 25639 - protein, 255 aa, Fusobacterium nucleatum subsp. vincentii ATCC 49256
MKNFSLFEKDRIECKPFIKWVGGKGQLLSEINKLYPVELGKNINKYAEIFLGGGAVLFDILSKYKLDEVYISDKNLELINTYKSIRDNVDILIKSLKEMEEQYIPLNNEDRKIYYYEKREEYNSLKINSEVNNIEKAILFIFLNKTCFNGLYRVNKKGKFNVPMGAYKKPKICDEENLKNVSLTLRNVKIVYADYRESEKFIDDKTFVYIDPPYRPLNITSSFTSYTENDFNDKEQIELVEYINVLNKKGAKISY

SEQ ID NO: 25640 - protein, 298 aa, Fusobacterium nucleatum subsp. vincentii ATCC 49256
MKAGFIAVVGRPNVGKSTLINKLVSEKVAIVSDKAGTTRDNIKGILNFKDNQYIFIDTPGIHKPQHLLGEYMTNIAVKILKDVDIILFLIDASKPIGTGDMFVMDRINENAKKKPKILLVNKVDLISDEQKEEKLKEIEEKLGEFNKIIFASGMYSFGISKLLEALDPYLEEGVKYYPDDMYTDMSTYRIITEIVREKILLKTRDEIPHSVAVEIINVERKEGKKDKFDINIYVERDSQKGIIIGKDGKMLKEIGVEARKEIEELLGEKIYLGLWVKVKDDWRKRKPFLKELGYVEEK

SEQ ID NO: 25641 - protein, 233 aa, Fusobacterium nucleatum subsp. vincentii ATCC 49256
MNILEIKNLSLKISDEIILKNINFELKEKEIISIIGKSGSGKTMLSKMIMGLKNKNMQIEGEILFKDNNIFDFSEEELRKYRGEGIGYITQNPLNVFLPFQKIKTTFLETYLSHKNISKNEVIELAKKNLKQVNLENTEEILNKYPFELSGGMLQRVMVAIIIGLDAKIIIADEVTSALDSYNRYEMIKIFKELNKLGKSIILITHDYYLMKSISERCLVMENGEVIEKLIQN

SEQ ID NO: 25642 - protein, 311 aa, Fusobacterium nucleatum subsp. vincentii ATCC 49256
MFLTWLGHISGTFKFNFENIFQSTFMLAFFTTVGLGASFTLLKKGGKLLIIYWLTCGIISILQNVIGMSISKTTGLEAPYALLSSAISMVGGHSAALSYGDTFAKMGYQSAPLVGAAAATFGLISAVLIGGPLGRRLIEKNNLKPDNTENFDQSVTEINADKGEKLSDLDIIKNVVAILLCMAIGSYISTLIGKLIKMDFPSYVGAMFVAVIVRNLNEKIHMYNFSFSLVDSIGNVMLNLFLSLALMTLKLWELSGLIGGVLLVVACQVIFMIIKLAFNLVGFKKLGVLINNAAVFFPGLWGLGLGPTPSA

SEQ ID NO: 25643 - protein, 114 aa, Fusobacterium nucleatum subsp. vincentii ATCC 49256
MALMSMKLWQLIDLAVPLIIILLVQTVLMAFFAYFITFNIMGRDYDAAVMSTGHCGFGLGATPNAMANMETFTKANGQSVKAFFIIPIVGSLFIDFINAGVIQTFASWIVKNFM

SEQ ID NO: 25644 - protein, 171 aa, Hordeum vulgare
ENDGEVELDDVWFAYPSRPSHLILKGITLKLAPGSKVALVGPSGGGKTTIANLIERFYDPIKGRILLNGVPLVEISHQYLHQMVSIVSQEPTLFNCPIEENIAYGLEGKASSADVENAAKMANAHDFICGFPDQYKTIVGERGIRLSGGQKQRVAIARALLMNPRVLLLDE

SEQ ID NO: 25645 - protein, 316 aa, Capsicum chinense
MGSKYSKATNSISDASNSFESYRFPLEDLEEATNNFDDKFFIGEGAFGKVYKGVLRDGAKVALKRRTPESSQGIEEFETEIETLSFCRHPHLVSLIGFCDERNEMILIYKYMENGNLKRHLYGSDLPTMSMSWEQRLEICIGAARGLHYLHTRAIIHRDIKSINILLDENFVPKITDFGISKKGTELDQTHLSTVVKGTLGYIDPEYFIKGRLTEKFDVYSFGVVLFEVLCARSAIVQSLPREMVNLAEWAVESHNNGQLEQIVDPNLADKIRPESLRKFGDTAVKCLALSSEDRPSMGDVLWKLEYALRLQESVI

SEQ ID NO: 25646 - protein, 359 aa, Capsicum chinense
  misc_feature (288)..(288): Xaa can be any naturally occurring amino acid
  unsure (1)..(359): unsure at all Xaa locations
NMSYRVPFAALLEATSNFDESLVIGIGGFGKVYKGVLYDGTKLAVKRGNPKSQQGLAEFRTEIEMLSQFRHRHLVSLMGYCDEKNEMILVYEYMENGTLKSHLYGSDLPSMSWKQRLEICIGSARGLHYLHTGYAKAVIHRDVKSANILLDESFMAKVADFGLSKTGPELDQTHVSTAVKGSFGYLDPEYFRRQQLTEKSDVYSFGVVLFEVLCARPVIDPSLPREMVNLAEWAMKWQKKGQLEQIIDPTLVGKIRPDSLRKFGETAEKCLADFGVDRPSMGDVLWNXEYALQLQEAVIQDDPEENSTLLIGELSPQVNDFSQVDAGASAALIGTPNLDDLSGVSMSRVFSQLVKSEGR

SEQ ID NO: 25647 - protein, 385 aa, Thermus thermophilus
MRGLSRRVQAMKPSATVAVNAKALELRRQGVDLVALTAGEPDFDTPEHVKEAARRALAQGKTKYAPPAGIPELREALAEKFRRENGLSVTPEETIVTVGGSQALFNLFQAILDPGDEVIVLSPYWVSYPEMVRFAGGVVVEVETLPEEGFVPDPERVRRAITPRTKALVVNSPNNPTGAVYPKEVLEALARLAVEHDFYLVSDEIYEHLLYEGEHFSPGRVAPEHTLTVNGAAKAFAMTGWRIGYACGPKEVIKAMASVSSQSTTSPDTIAQWATLEALTNQEASRAFVEMAREAYRRRRDLLLEGLTALGLKAVRPSGAFYVLMDTSPIAPDEVRAAERLLEAGVAVVPGTDFAAFGHVRLSYATSEENLRKALERFARVLGRA

SEQ ID NO: 25648 - protein, 385 aa, Thermus aquaticus
MRGLSRRVQAMKPDAPVAVNAKALELRRQGVDLVALTAGEPDFDTPEHVKEAARRALAQGKTKYAPPAGIPELREALAEKFRRENGLSVTPEETIVTVGGSQALFNLFQAILDPGDEVIVLSPYWVSYPEMVRFAGGVVVEVETLPEEGFVPDPERVRRAITPRTKALVVNSPNNPTGAVYPKEVLEALARLAVEHDFYLVSDEIYEHLLYEGEHFSPGRVAPEHTLTVNGAAKAFAMTGWRIGYACGPKEVIKAMASVSRQSTTSPDTIAQWATLEALTNQEASRAFVEMAREAYRRRRDLLLEGLTALGLKAVRPSGAFYVLMDTSPIAPDEVRAAERLLEAGVAVVPGTDFAAFGHVRLSYATSEENLRKALERFARVLGRA

SEQ ID NO: 25649 - protein, 856 aa, Populus nigra
MMSSLQKPFSMFLRVLFFLLLMCIIPSFFAFPSNSSATSFGAAKYEAAEGNEEAEALLKWRASLDDSHSQSVLSSWVGSSPCKWLGITCDNSGSVANFSLPHFGLRGTLHSFNFSSFPNLLTPNLRNNSLYGTIPSHISNLTKITNLNLCHNHFNGSLPPEMNNLTHLMVLHLFSNNFTGHLPRDLCLGGLLVNFTASYNHFSGPIPKSLRNCTSLFRVRLDWNQLTGNISEDFGLYPNLNYVDLSHNNLYGELTWKWGGFNNLTSLKLSNNNITGEIPSEIAKATGLQMIDLSSNLLKGTIPKELGKLKALYNLTLHNNHLFGVVPFEIQMLSQLRALNLASNNLGGSIPKQLGECSNLLQLNLSHNKFIGSIPSEIGFLHFLGDLDLSGNLLAGEIPSEIGQLKQLETMNLSHNKLSGLIPTAFVDLVSLTTVDISYNELEGPIPKIKGFIEAPLEAFMNNSGLCGNANGLKPCTLLTSRKKSNKIVILILFPLLGSLLLLLIMVGCLYFHHQTSRERISCLGERQSPLSFVVWGHEEEILHETIIQAANNFNFNNCIGKGGYGIVYRAMLPTGQVVAVKKFHPSRDGELMNLRTFRNEIRMLIDIRHRNIVKLHGFCSLIEHSFLVYEFIERGSLKMNLSSEEQVMDLDWNRRLNVVKGVASALSYLHHDCSPPIIHRDISSSNVLLDSEYEAHVSDFGTARLLMPDSTNWTSFAGTLGYTAPELAYTMRVNEKCDVYSFGVVTMEVIMGMHPGDLISFLYASAFSSSSCSQINQHALLKDVIDQRIPLPENRVAEGVVSIIKIAFACLLANPQSRPTMRQVASELIARWPPLPKSFSAITVEDLMPQTTVTG

SEQ ID NO: 25650 - protein, 403 aa, Candida tropicalis
MALPPVYIVSTARTPIGSFQGSLSSLTYSDLGAHAVKAALAKVPQIKPQDVDEIVFGGVLQANVGQAPARQVALKAGLPDSIVASTINKVCASGMKAVIIGAQNIICGTSDIVVVGGAESMSNTPYYLPSARSGARYGDAIMVDGVQKDGLLDVYEEKLMGVAAEKCAKDHGFSREDQDNFAINSYKKAGKALSEGKFKSEIAPVTIKGFRGKPDTVIENDEEIGKFNEERLKSARTVFQKENGTVTAPNASKLNDGGAALVLVSEAKLKQLGLKPLAKISGWGEAARTPFDFTIAPALAVPKAVKHAGLTVDRVDFFELNEAFSVVGLANAELVNIPLEKLNVYGGAVAMGHPLGCSGARIIVTLLSVLTQEGGRFGVAGVCNGGGGASAVVIEKIDADAKL

SEQ ID NO: 25651 - protein, 80 aa, Helianthus annuus
TSMAFNMEESSKKRPFLSSFDDILEEEYYDEQLTEKKRRLSPEQVHMLEMSFEEENKLEPERKTELAKKLGLQPRQVAVW

SEQ ID NO: 25652 - protein, 1123 aa, Solanum lycopersicum
MSSSRPSQSSTTSSRSKHSARIVAQTSIDAKLHADFEESGDSFDYSSSVRVTSVAGDEEKPKSDKVTTAYLHQIQKGKFIQPFGCLLALDEKTLKVIAFSENAPEMLTMVSHAVPSVGEHPVLGIGTDIRTIFTGPSGAALQKALGFGEVSLLNPVLVHCKNSGKPFYAIVHRVTGSLILDFEPVKPYEVPMTAAGALQSYKLAAKAITRLQSLPSGSMERLCDTMVQEVFELTGYDRVMGYKFHEDDHGEVVSEITKPGLEPYLGLHYPATDIPQAARFLFMKNKVRMICDCRAKHVKVVQDEKLPFDLTLCGSTLRAPHYCHLQYMENMNSIASLVMAVVVNDGDEEGESSDSSQSQKRKRLWGLVVCHNTTPRFVPFPLRYACEFLAQVFAIHVNKELELENQFLEKNILRTQTLLCDMLMRDAPLGIVSQSPNIMDLVKCDGAALLYKNKIHRLGMNPSDFQLQDIVSWLCEYHTDSTGLSTDSLYDAGFPGALALGDAVCGMAAVRISDKDWLFWFRSHTAAEVRWGGAKHEPGEKDDGRKMHPRSSFKAFLEVVKTRSIPWKDYEMDAIHSLQLILRNAFKDAEVVNSNTNSIYKKLNDLKIDGMQELESVTAEMVRLIETALVPILAVDVDGQVNGWNTKIAELTGLPVDEAIGKHLLTLVEDSSVDTVNKMLELALQGKEEKNVEFEIKTHGPSRDSSPISLIVNACASKDVRDNVVGVCFMAHDITGQKSIMDKFTRIEGDYRAIIQNPHPLIPPIFGTDQFGWCSEWNTAMTKLTGWRRDDVMDKMLLGEVFGTQAACCRLKNQEAFVNFGVVLNNAITGQESEKIPFGFFARYGKYVECLLCVSKRLDKEGAVTGLFCFLQLASHELQQALYVQRLSEQTALKRLKVLAYIRRQIRNPLSGIIFSRKMLEGTSLGEEQKNILHTSAQCQRQLNKILDDTDLDSIIDGYLDLEMLEFKLHEVLVASISQVMMKSNGKNIMISNDMVEDLLNETLYGDSPRLQQVLANFLLVSVNATPSGGQLSISGRLTKDRIGESVQLALLEFRIRHTGGGVPEELLGQMFGSEADASEEGISLLVSRKLVKLMNGEVQYLREAGQSTFIISVELAVATNSS

SEQ ID NO: 25653 - protein, 217 aa, Pimpinella brachycarpa
MVRGKTQMRRIENATSRQVTFSKRRNGLLKKAFELSVLCDAEVALIIFSPRGKLHEFASSSMHETIERYRKHTKDVQSNNTPVVQNMQHLKHETASLAKKIELLEVSKRKLLGEGLGTCSINELQQIEQQLEKSVCTVRARKMQVFKEQIEQLKEKEKTLAADNAILLAKYDVQPRQESPEDGGNLTSTTENSENSDVETELFIGPPEKRFKRIMEK

SEQ ID NO: 25654 - protein, 313 aa, Helianthus annuus
MTCTGMAFFSSNFMLQSSQEDDHHAPTSLSPILPPCSTTTQDFSGAAFLGKRSMSSYSGLNNNNMDGCDQEGNMNGEDELSDDGSQLLAGEKKRRLNMEQVKTLQRNFELGNKLEPERKMQLARALGLQPRQIAIWFQNRRARWKTKQLEKDYDALKRQFEAVKAENDSLQSQNHKLHAEIMALKNREPAELINLNIKETEGSCSNRSENSSEIKLDISRTPATDSPLSSHHQHQHQPIPNLFPSSNIDRPNSNNIVAHQLFHNSSSRPADHQLHCHKLDQSNAIKEECFSTMFVGMDDQSGFWPWLEQPQFN

SEQ ID NO: 25655 - protein, 478 aa, Bacillus subtilis
IKTAVNGEENRQIEKDAALERRFQPVMVHEPSIEQAISILEGIKDKYEKYHSVTFSDEAIKACVTLSSRYIQDRHLPDKAIDLLDEAGSKADLELDTVNEEEAAERLKAIDAEKTKALQEENYELAAKLRDEEVALEKQLAQESPVSSSEIGAEHIQAIIEQKTGIPVGKLQADEQVKMKELEERLHQRVIGQEKAVKKVAKAVRRSRAGLKSKNRPVGSFLFVGPTGVGKTELSKTLADELFGTKDSIIRLDMSEYMEKHAVSKIIGSPPGYVGHDEAGQLTEKVRRNPYSIVLLDEIEKAHPDVQHMFLQIMEDGRLTDSQGRTVSFKDTVLIMTSNAGTGEKQTKVGFQSEESVMEEQTLIDSLSSFFKPEFLNRFDSIIEFQSLKKEHLVKIVSLLLAELEDTLKERGISLCVTDDAKEKIAEIGYHPAFGARPLRRTIQELIEDEMTDLLLDDNEIKAFHVVMEEDDIKVRAQ

SEQ ID NO: 25656 - protein, 229 aa, Leavenworthia crassa
QESGMCVLLGLMIFMSILILMIYLTCLRIKTVGLDSIFLWEDSLVLKDVKKLFLLDAWVPADDVLSLCKAVLEAYRDLGTRGNRQKTRMMWLIDELGVEGFRSEVEKRMPNGKLERGSLEDLVKKQWERRDYLGVHPQKQEGLSFIGLHVPVGRLQADDMDELARLADTYGSGELRLTVEQNIIIPNVETSKTEALLQEPFLKNRFSPEPSILMKGLVACTGNQFCGQA

SEQ ID NO: 25657 - protein, 229 aa, Leavenworthia uniflora
QESGMCVLLGLMIFMSILILMILLTCLRIKMVGLDSIFLWEDSLVLKDVKKLFLLDAWVPADDVLSLCKAVLEAYRDLGTRGNRQKTRMMWLIDELGVEGFRGEVEKRMPNGKLERGSLEDLVKKQWERRDYFGVHPQKQEGLSFIGLHVPVGRLQADDMDELARLADTYGSGELRLTVEQNIIIPNVETSKTEALLQEPFLKNQFSPEPSILMKGLVACTGNQFCGQA

SEQ ID NO: 25658 - protein, 294 aa, Spirulina sp.
AKTDIPVNIYKPKNPYIGKCLSNEELVREGGTGTVRHLIFDISGGDLRYLEGQSIGIIPPGTDNNGKPHKLRKYSIASTRHGDHVDDKTVSLCVRQLEYKHPETGETVYGVCSTYLCNLEAGADVAITGPVGKEMLLPEDEDATIIMMATGTGIAPFRAFLWRIFKEQHEDYKFKGLWALFFGIPYSPNILYQQELEELQEEFPENFRLTLAISREQQNPEGGKMYIQDRIKENADQLWELIQKPNTHTYICGLKGMEGGIDEGMSAAAGKFDVDWSDYQKELKKKHRWHVETY

SEQ ID NO: 25659 - protein, 1086 aa, Cryptococcus neoformans var. grubii
MASNDPKAKVILQSIATEKRNIEGARAVIRAFEASSKNETVIQQAQNEIRTATMSIKFLEDELAKLQVDGSGASSGTPGRGEPSGRAGAGVPGRQGPQGIATTSPGGRGMAGDRERPLPPPPPGAEQDNAKKPETKNYSQLDLLRYDAPLTGAKITRMLNQLQFKLQVEEQYRTGIEKMAQAYRAEGDKRLKSETDAKKSESEGKIQLLRKAKKRYESLAKFGGAVEDDEDLMSDGKRKEALRKPISGKLVISLRSARDLNHRTLPRRSSKTYSETTVIIKVEGNERAVSHPSRNDKWHEDFHIPVEKANEVEITIYDTVAPGDSAPIGMLWLRVSDLVEALRRQKVGIEGQGAGWVTAATAATMGPRSSGNAPDSVTLHSAGTLRGRPDAEGKGPDGIDGWWSVEPAGAISLRMDFVKDTVAGARRPYEALGRQGAVRMRKGDVYEMNGHKFVQRQFYQPIMCALCQEFLLTGEGYQCEDCRYACHKKCYPKVVTKCISKSNADGEGDEEKINHRIPHRFTSYTNMSANWCCHCGYMLPFGRKNAVKCSECALTCHQTCSHLVPDFCGMTMEMANLLLKNLRDIKTTQHRKPVPSTSTSSSVSTLPSYHSQEARSHPVQSAAPQQPALSPHPPAGTLPSADQRPIQPQAQNQQTGAYDNLRPAGGRAMPQLPPVAVPSSKISFEGERPQEPHAQIHPVMPSAQPQPQTLPPSAQSVQPPVKPHYVPQPPVQQQVTQRLPPQQPVMTRKRKVGLDDFNFLAVLGKGNFGKVMLAEEKTSSNLYAIKVLKKEFIIENDEVESTQSEKRVFLAAAQERHPFLLGLHSCFQTETRVYFVMEYISGGDLMLHIQKKQFTLRQAKFYACEVLLALQYFHSKGIIYRDLKLDNILLTLDGHVKVADYGLCKEEMWFGKTTSTFCGTPEFMAPEILLEQRYGRAVDWWAFGVLTYEMLLGQSPFRGEDEDEIFDAILEDEPLYPITMPRDAVSLLQRLLTRDPTRRLGAGEGDAEEIKQHLFFRDVNFDDVYHKRIPPPYFPVIGNATDTSNFDQEFTREQPTLTPVHTQLSEADQKEFAGFSWIAPWAAAQA

SEQ ID NO: 25660 - protein, 1086 aa, Cryptococcus neoformans var. neoformans
MASNDPKAKVILQSIATEKRNIEGARAVIRAFEASSKNETVIQQAQNEIRTATMSIKFLEDELAKLQVGGSGGASGTPGRGEPSGGTGAGVPGKQGPQGVVASSPGGRGMAGDRERPLPPPPPGAEQDSAKKPETKNYSQLDLLRYDAPLTGAKITRMLNQLQFKLQVEEQYKTGIEKMAQAYRAEGDKRLKSETDAKKSESEGKIQLLRKAKKRYESLAKFGGAVEDDEDLMSDGKRKEALRKPISGKLVISLRSARDLNHRALPRRSSKTYSETTVVIKVEGNERAVSHPSRNDKWHEDFHIPVEKANEVEITIYDTVAPGDSAPIGMLWLRVSDLVEALRRQKVGIEGQGAGWVTAATAATMGPRSSGNAPDSVTLHSAGTLRGKPDAEGKGPDGIDGWWSVEPAGAISLRMDFVKDTVAGARRPYEALGRQGAVRMRKGDVYEMNGHKFVQRQFYQPIMCALCQEFLLTGEGYQCEDCRYACHKKCYPKVVTKCISKSNADGEGDEEKINHRIPHRFTPYTNMSANWCCHCGYMLPFGRKNAVKCSECALTCHQTCSHLVPDFCGMTMEMANLLLKNLRDIKTTQHRKPVPSTSTSSSVSTLPSYHSQESRSHPVQSAALQQPAPSSRPPAGALPSTDQRPIQPQVQNQQTGAYDNLRPAGGRAMPQLPPVAVPSNKISFEGDRLQEPHGQIPPVMPAAQPQPQTLPPSAQSVQSPVKPQYVPQPAVQQQVAQRLPPQQPLMARKRKVGLDDFNFLAVLGKGNFGKVMLAEEKTSSNLYAIKVLKKEFIIENDEVESTQSEKRVFLAAAQERHPFLLGLHSCFQTETRVYFVMEYISGGDLMLHIQKKQFTLRQAKFYACEVLLALQYFHSKGIIYRDLKLDNILLTLDGHVKVADYGLCKEEMWFGKTTSTFCGTPEFMAPEILLEQRYGRAVDWWAFGVLTYEMLLGQSPFRGEDEDEIFDAILEDEPLYPITMPRDAVSLLQRLLTRDPTRRLGAGEGDAEEIKQHLFFRDVNFDDVYHKRIPPPYFPVIGNATDTSNFDQEFTREQATLTPVHSQLSEADQKEFAGFSWIAPWAAAQT

SEQ ID NO: 25661 - protein, 495 aa, Saccharomyces cerevisiae
MTTDNAKAQLTSSSGGNIIVVSNRLPVTITKNSSTGQYEYAMSSGGLVTALEGLKKTYTFKWFGWPGLEIPDDEKDQVRKDLLEKFNAVPIFLSDEIADLHYNGFSNSILWPLFHYHPGEINFDENAWFGYNEANQTFTNEIAKTMNHNDLIWVHDYHLMLVPEMLRVKIHEKQLQNVKVGWFLHTPFPSSEIYRILPVRQEILKGVLSCDLVGFHTYDYARHFLSSVQRVLNVNTLPNGVEYQGRFVNVGAFPIGIDVDKFTDGLKKESVQKRIQQLKETFKGCKIIVGVDRLDYIKGVPQKLHAMEVFLNEHPEWRGKVVLVQVAVPSRGDVEEYQYLRSVVNELVGRINGQFGTVEFVPIHFMHKSIPFEELISLYAVSDVCLVSSTRDGMNLVSYEYIACQEEKKGSLILSEFTGAAQSLNGAIIVNPWNTDDLSDAINEALTLPDVKKEVNWEKLYKYISKYTSAFWGENFVHELYSTSSSSTSSSATKN

SEQ ID NO: 25662 - protein, 303 aa, Candida parapsilosis
MATDSNFLIDFLMGGVSAAVAKTAAAPIERVKLLIQNQDEMLKQGRLSHKYTGIIDCFRRTAADEGIVSFWRGNTANVIRYFPTQALNFAFKDQIKALFGFKKDEGYWKWFAGNLASGGIAGALSLAFVYSLDYARTRLANDAKSAKGDGKGREFNGLIDVYKKTLASDGIAGLYRGFGPSVIGIVVYRGLYFGLYDSLKPVVLVGPLEGSFLASFLLGWVVTTGASTASYPLDTIRRRMMMTSGQAVKYDGALDCARKVVAAEGVKSLFKGCGANILRGVAGAGVISLYDQLQVLLFGKKFK

SEQ ID NO: 25663 - protein, 402 aa, Streptomyces anulatus
MEFRQSSKLSEVCYEIRGPVIEHANALEEAGHSVLRLNTGNPALFGFEAPEEIVQDMIRMLPQAHGYTDSRGVLSARRAVAQRYQALGLDEVSVDDVFLGNGVSELVTMAVQALLEDGDEILIPAPDFPLWTAVTTLSGGKAVHYVCDEAADWYPDLDDMASKITDQTKAVEIINPTGAVYPKEILEGILDLARRHGLMVFADEIYDQILYDDAVHHSVAALAPDLVVLTFCGLSKTYRVAGFRSGWLVITGPRQHARDYLEGLTMLASMRLCPNAPAQFAIQAALGGRQSIRELTAPGGALHEQRDRAWEKLNEIPGVSCVKPKGALYAFPRLDPKVHPIHDDEKFVLDLLLQEKIQVVQGTGFNWPRPDHFRILTLPHADDLDAAISRIGRFLSGYRQGR

SEQ ID NO: 25664 - protein, 415 aa, Fusarium oxysporum
MALTAAQVAIVKSTAPILKEHGKTITTTFYRNMLGAHPELKNYFSLRNQQTGAQQAALANSVLAYATYIDDLGKLSHAVERIAHKHVSLFIKPEHYPIVGTHLIGAIGEVLGSALTTEIKDAWVAAYGQLADIFIQREGQMYEAAGEWNSWRKFKIVKKEAENDSVTSFYLEPTDGKPLPKFLPGQYVSVQIPIPELDGLLQSRQFSLSEAPGTNHYRISVKLQGPTEEPAVEDLAAGKIAGLLSTRLHNRYNVGDEVELSPPAGEFSLDPADTSAAKKPLVLLSAGVGATPLVSILDSVLQSPTASRPITWIHGARYSGSTCFVPHVLDSAKKHENITAKIFLEDVKEGDQYDFKGEIDLAKLQKEQLLQLDNADAEYYICGPEDWMVNVRAFLEENGVPRERQHLELFKTGDI

SEQ ID NO: 25665 - protein, 445 aa, Saccharomyces cerevisiae
MDDKVSEKESSPKQTEEDSEGKMAHVQPASYVNKKKYVFGKTLGAGTFGVVRVRKNTETGEDVAVKIVIKKALKGNKVQLEALYDELDILQRLHHPNIVAFKDWFESKDKFYIITQLAKGGELFDRILKKGKFTEEDAVRILVEILSAVKYMHSQNIVHRDLKPENLLYIDKSDESPLVVADFGIAKTLKSDEELLYKAGTALGYVAPEVLTQDGHGKPCDIWSIGVITYTLLCGYATIDRKVQDFLDECTTGEYPVKFHRPYWDSVSNQAKQFILKALNLDPSKRPTAAELLEDPWIICTELKTHNLLPGLKEGLDARQKFRNSVERVRLNMKIQKLRDLYLEQTESDSDFDEGSQANGSVPPLKATDTSQLSKKLSEEEQSKLKSELTSKAFAQLVNTVLAEKEKFLNINRVCSSDSDLPGSDIKSLDEAKEKPEGKDTKTEE

SEQ ID NO: 25666 - protein, 447 aa, Saccharomyces cerevisiae
MPKESEVINSEFHVDVQDPERLNGHPVAKFINKLSGQPESYVNRTNYIFGRTLGAGSFGVVRQARKLSTNEDVAIKILLKKALQGNNVQLQMLYEELSILQKLSHPNIVSFKDWFESKDKFYIVTQLATGGELFDRILSRGKFTEVDAVEIIVQILGAVEYMHSKNVVHRDLKPENVLYVDKSENSPLVIADFGIAKQLKGEEDLIYKAAGSLGYVAPEVLTQDGHGKPCDIWSIGVITYTLLCGYSPFIAESVEGFMEECTASRYPVTFHMPYWDNISIDAKRFILKALRLNPADRPTATELLDDPWITSKRVETSNILPDVKKGFSLRKKLRDAIEIVKLNNRIKRLRNMYSLGDDGDNDIEENSLNESLLDGVTHSLDDLRLQSQKKGGELTEEQMKLKSALTKDAFVQIVKAATKNKHKVLAGEEEDDSKKTLHDDRESKSED

SEQ ID NO: 25667 - protein, 157 aa, Cuscuta japonica
MSLIPSFFEGRRSNAFDPFSLELWDPFFSNTVANLSGSSSAREASAFANARIDWKETPEAHIFKADVPGLKKEEVKVEVEEGKVLQISGERSKEKEEKNDTWHRVERSSGKFLRSFRLPENAKVDQVKAAMENGVLTVTVPKVEEKKAEVKSIQISG

SEQ ID NO: 25668 - protein, 539 aa, Bacillus subtilis subsp. subtilis str. 168
MNQLHRRMGTFSLMMVGLGSMIGSGWLFGAWRAAQIAGPAAIISWVIGMVVILFIALSYSELGSMFPEAGGMVKYTQYSHGSFIGFIAGWANWIAIVSVIPVEAVASVQYMSSWPWEWAKWTSGLVKNGTLTGEGLAFASVLLLIYFLLNYWTVNLFSKANSLITIFKIIIPGLTIGALLFVGFHGENFTGGQSIAPNGWASVLTAVATSGIVFAFNGFQSPINMAGEAKNPGKSIPIAVVGSLFVATVIYVLLQIAFIGAVNPSDIAHGWSHLNFNSPFADLAIALNINWLVIVLYADAFVSPSGTGITYTATTSRMVYGMEKNKYMPSIFGKLHPIYGVPRQAMFFNLIVSFIFLFLFRGWGVLAEIISVATLISYITGPITVMTLRRTGKDLYRPLRLKGLNVIAPLGFIFASLVLYWARWPLTGQVLFIILIGLPIYFYYQAKAKWKGFGRNFKAGVWMVFYLLAMMVISYLGSDKFGGLNVIHYGWDMVLIAMVSLVFYVWALKSGYQTEYLKDAKEINSQLLNGQSEAAAGKE

SEQ ID NO: 25669 - protein, 115 aa, Lawsonia intracellularis
MRFVDEVTISVSAGKGGNGCVSFRREKFIPKGGPNGGDGGDGGNIIFKADSRLLTLYDFRVQRHYRAQNGEGGKGSQRHGKKGEDLILHLPVGTIIFEQLLDKEYFLVDLDRPGV

SEQ ID NO: 25670 - protein, 393 aa, Delftia acidovorans
MEDIVIVSAVRTAVGKFGGTLAKIPATELGSIVIREALNRAKVGTDQVGEVIMGQVLAAGAGQNPARQAMMKAGVAKETPALTINAVCGSGLKAVMLAAQAVATGDSEIVVAGGQENMSLSPHVLPGSRDGQRMGDWKMADTMIVDGLWDVYNQYHMGITAENVAKEKSVSREQQDALALASQQKATAAQDAGKFVDEIVPVSIPQRKGDPVVFAADEYINRKTNADALAGLRPAFDKAGSVTAGNASGLNDGAAAVVVMSASKAKALGLTPLARIVSYATSGLDPATMGLGPVFASRKALERAGWTAQDVDLFELNEAFAAQACAVNQELGIDPAKVNVNGGAIAIGHPIGASGARILVTLLHEMQRSGAKKGLAGLCIGGGMGVAMAVERV

SEQ ID NO: 25671 - protein, 309 aa, Mesembryanthemum crystallinum
FVGVYDGHGGPETSRYINDHLFHHLRRFASEHQCMSADVIRKAVQATEEGFLSIVSKQWPVKPQIAAVGSCCLLGVICNGMLYVANLGDSRAVLGRLVKATGEVLAVQLSTEHNACLEAVRQELRSTHPDDSHIVVLKHNVWRVKGLIQVSRSIGDVYLKKAEFNREPLYAKFRLREPFRRPILSSEPSISVHELQPHDQFVIFASDGLWEHLSNQKAVDIVQNNPHNGSAKRLVKIALQEAAKKREMRYSDLKKIDRGVRRHFHDDITVIVVFLDSNLVSRATTGSKGPHISVRGGGITLRSNTPAPS

SEQ ID NO: 25672 - protein, 155 aa, Solanum lycopersicum
MDLRLMGIDNTPLFHTLQHMMEAAGEDSVNAPPKKYVRDAKAMAATPVDVKEYPDSYVFVVDMPGLKSGDIKVQVEEDNVLLISGERKREEEKEGVKFIRMERRVGKFMRKFSLPENANTDAISAVCQDGSLTVTVQKLPPPEPKKSKTIQVKVA

SEQ ID NO: 25673 - protein, 248 aa, Malus x domestica
MGRGRVELKRIENKINRQVTFAKRRNGLLKKAYELSVLCDAEVALIIFSSRGKLYEFCSSFSMMKTLEKYQSCSYGSLEANLPANETQNSYQDYLMLKARVEVLQQSQRNLLGEDLSHLNTKELEHLEHQLETSLKQIRSRKTQFILDQLSDLQNREQMLVEANKALKRKLEETSVHAPEGMAWEAAGHGPNNIQQTRLPSHSEAFFHPLEGNNSSSQIGYTHMGSDNEMNVGNPGQYVNGYIPGWML

SEQ ID NO: 25674 - protein, 246 aa, Malus x domestica
MGRGRVELKRIENKINRQVTFAKRRNGLLKKAYELSVLCDAEVALIIFSNRGKLYEFCSSSSILKTLDRYQKCSYGAVDQVNRPAKELESSYREYMKLKGRYESLQRTQRNLLGEDLGPLNTKELEQLERQLEGSLKQVRSTKTQYMLDQLSDLQNKEQLLIEANRDLTMKLDEISSRNQLRQSWEGGDQGMAYATQHHHAQSQGFFQPLDCNPTLQMGYSAVGSEQMSATTNAQQVNCFIPGWML

SEQ ID NO: 25675 - protein, 242 aa, Malus x domestica
RVELKRIENKINRQVTFAKRRNGLLKKAYELSVLCDAEVALIVFSNRGKLYEFCSSPSILQTVDRYQKCSYGAVDQVNIPAKELESSYREYMKLKGRCESLQRTQRNLLGEELGPLNTKELEQLERQLEASLKQVRSTKTQYMLDQLSALQNKEQLLIEANRDLTMKLDEIGSRNQLRQSWEGGDQGMAYGTQHHHAQSQGFFQPLDCNPTLQIGYPAEGSEQMGATTHAQQVNCFIPGWML

SEQ ID NO: 25676 - protein, 178 aa, Brassica rapa
MENMGTRVIEPLIVGRVVGDVLDNFTPTIKMNVSYNKKQVSNGHEFLPLAVSSKPRVEIHDGDLRSFFTLVMTDPDVPNPSDPFLKERLHWLVMNIPGTTDATFGKEVVSYELPKPNIGIHRYVFVLFRQKQRRVKFPSNIISRDQFNTREFAIENDLGLPVAAVFFNAQRETASRRR

SEQ ID NO: 25677 - protein, 178 aa, Brassica rapa
MENMGTRVIEPLIVGRVVGDVLDNFTPTIKMNVSYNKKQVSNGHEFLPLAVSSKPRVEIHDGDLRSFFTLVMTDPDVPNPSDPFLKERLHWLVMNIPGTTDATFGKEVVSYELPKPNIGIHRYVFVLFRQKQRRVKFPSNIISRDQFNTREFAIENDLGLPVAAVFFNAQRETASCRR

SEQ ID NO: 25678 - protein, 177 aa, Brassica oleracea
ENMGTRVIEPLIVGRVVGDVLDNFTPTIKMNVSYNKKQVSNGHELFPLAVSSKPRVETHDGDLRSFFTQVMTDPDVPNPSDPFLKERLHRLVMNIPGTTDATLGKEVVSYELPKPNIGIHRYVFVLFRQKQRRVKFPSNIISRDQFNTREFAIENDLGLPVAAVFFNAQRETASRRR

SEQ ID NO: 25679 - protein, 177 aa, Brassica oleracea
ENMGTRVIEPLIVGRVVGDVLDNFTPTIKMNVSYNKKQVSNGHELFPLAVSSKPRVEIHDGDLRSFFTLVMTDPDVPNPSDPFLKGRLHWLVMNIPGTTDATFGKEVVSYELPKPNIGIHRYVFVLFRQKQRRVKFPSNIISRDQFNTREFAIENDLGLPVAAVFFNAQRETASRRR

SEQ ID NO: 25680 - protein, 1502 aa, Photorhabdus luminescens subsp. laumondii TTO1
MSVSFCESRTEPREVHTMLYNKSQEKDNCGFGLIAHIEGEPSHKVVRTAIHALARMQHRGAILADGKTGDGCGLLLQKPDRFFRMVAQEQEWHLARNYAVGMLFLSQDPQIAQNCRAIIEQELQNETLSVVGWREVPINRDILGEIALSSLPHIEQIFVNAPAGWRARDLERRLFVARRRIEKRINDSDFYVCSLSNLVTIYKGLCMAADLPRFYPDLADLRLESAICLFHQRFSTNTVPRWPLAQPFRYLAHNGEINTITGNRQWARARAYKFKTPLIPDLHTAAPFVNETGSDSSSLDNMLELFLNGGMDLIRAMRLLVPPAWQNNPDMDEDLRAFFDFNSMHMEPWDGPAGIVMSDGRYAACNLDRNGLRPARYVITKDKLITCASEVGIWDYQPDEVVEKGRVGPGELIVIDTRQGRILHAEETDNDLKSRHPYKEWMDKNVKRLTPFEELLEDQAGHRDLNDQSLAVYHKQFAYSNEELDQIIRVLGENGQEATGSMGDDTPFAVLSSRPRIIYDYFRQQFAQVTNPPIDPLREAHVMSLTTCIGREMNVFCEAEGQAHRLSFKSPILLYSDFHQLITQQSPHYRAEQLDLTFNPQETNLQNALFALCDQAEQLARDGAVLLVLSDRNITPNKLPIPAPMAIGAIQHRLVEKNLRCDTNLIVETASARDPHHFTVLLGFGATAIYPYLAYESLAKMVDNGTINKPYADVMLNYRNGINKGLYKIMSKMGISTIASYRCSKLFEAVGLHSELTEFCFNGVVSRIGGANFSDFEQDLRNLSKRAWLARQPLDQGGLLKYVHNGEYHAYNPDVVSTLQAAVHSGEYNDYLKYSRLVNQRPITTIRDLLAIKTEAEPLPIEEVEPAEELFKRFDTAAMSIGALSPEAHEALAEAMNTLGGFSNSGEGGEDPARYGTKKVSRIKQVASGRFGVTPAYLVNADVIQIKVAQGAKPGEGGQLPGDKVTPYIAKLRYSVPGVTLISPPPHHDIYSIEDLAQLIFDLKQINPNALISVKLVSEPGVGTVATGVAKAYADLITIAGYDGGTGASPLSSVKYAGCPWELGLVETQQALVANGLRHKIRLQVDGGLKTGVDIIKAAILGAESFGFGTGPMVALGCKYLRICHLNNCATGVATQDEKLRRDHYHGLPERVMNYFRFIARETREIMATLGVKNLTDLIGRTDLLEVLEGISAKQSKLNLDPLLATAEPHQGKTLYCTENNPPFDNGALNKNLLTQAASYIENQQSKTFYFDIRNTDRSVGASLSGFIAARYGNQGIAAAPIKIHFNGTAGQSFGVWNAGGLELTLIGDANDYVGKGMAGGRIVIHPPVGSAFKSHQATLIGNTCLYGATGGKLFAAGRAGERFAVRNSGAITVVEGIGDNGCEYMTGGIVCILGRTGINFGAGMTGGFAYVLDENDDFRKRVNLELVEVLAVDALAIHEEHLRGLITEHVLLTGSQRGEDILANWQQWLSKFALVKPKSSDVKALLGHRSRSSAELRIQAQ

SEQ ID NO: 25681 - protein, 483 aa, Photorhabdus luminescens subsp. laumondii TTO1
MRMQSEVILPLLGYLALVFLLSVYAYQRHQKGPFLTEYFLGNRSMGGFVLAMTITATYISASSFIGGPGAAYKYGLGWVLLSLIQLPAIWLSLGVLGKKFAILARRYNAVTLNDMLYARYGSRFLVWFASLSLLVAFVGAMTVQFIGGARLLETAAGIPYGTGLMIFGISIALYTAFGGFRASVLNDALQGLVMLLGTVLLLVAIIYKAGGLSEAVTTLRTINPELVSAQGADHILNGPFMASFWVLVCFGVIGLPHTAVRCISYRDSKAVHRGIIIGTIVMTILMFGMHLAGALGRAIIPDLTIPDQVIPTLMITVLPPFAAGIFLAAPMAAIMSTINAQLLQSSATIVKDLYLNLFPQQIVQEKKLARISSFSTLILGLLLLLAAWHPPEMIIWLNLLAFGGLQAVFLWPLVLGLYWEKANAYGAISSMITGATSYTLLASFNIHLLGFHPIVPSLLLSLLAFWMGNAIGQRLPPKAVRPH

SEQ ID NO: 25682 - protein, 644 aa, Photorhabdus luminescens subsp. laumondii TTO1
MRHHYMTTETEISFADLGLSAPILSALEDLGYEKPSPIQQQCIPHLLNGRDVLGMAQTGSGKTAAFSLPLLHNINAELKAPQILVLAPTRELAVQVAEACADFSKHMRNVNVVALYGGQRYDVQLRALRQGPQIVVGTPGRLLDHLKRGTLDLSNLSGLVLDEADEMLRMGFIEDVENIMSQIPAEHQTALFSATMPEAIRRITRRFMNDPQEVRIQASVTTRPDISQSYWSVYGMRKNEALVRFLEAEDFDAAIIFVRTKNATLEVAEALERNGYNSAALNGDMNQALREQTLERLKDGRLDILIATDVAARGLDVERISLVVNYDIPMDAESYVHRIGRTGRAGRAGRALLFVENRERRLLRNVERTMKLTIPEVELPNAELLSQRRLERFAANVQQQLESSDLDQYRTLLSKLQPAEDLDIETLAAALLKMAQGERPLILPPDPVRRPRREFNERDDRRRNGFDDRGERSDRPRRERRDVGEMELYRIEVGRDDGVEVRHIVGAIANEGDISSRYIGNIKLFATHSTIELPKGMPGDLLSHFTRTRILNKPMNMQLMGDAQPFERRERRGGGRNGNGNGNSSGSGPRRDRENFNGGGRRFNGERRGGEGRGEGQSRSNFRGRGDDHGSSAPRRRYNNSNAQ

SEQ ID NO: 25683 - protein, 442 aa, Sinorhizobium meliloti
MSYHNPYTPPRKSATFDDYTLAEIRRAAATGIYDIRGAGTKRKVPHFDDLLFLGASISRYPLEGYREKCDTSVVLGTRFAKKPIHLKIPITIAGMSFGALSGPAKEALGRGATASGTSTTTGDGGMTDEERGHSQTLVYQYLPSRYGMNPKDLRRADAIEVVVGQGAKPGGGGMLLGQKISDRVANMRNLPKGIDQRSACRHPDWTGPDDLEIKILELREITDWEKPIYVKVGGARPYYDTALAVKAGADVVVLDGMQGGTAATQDVFIENVGMPTLACIRPAVQALQDLGMHRKVQLVVSGGIRSGADVAKALALGADAVVIGTAALVAIGDNDPHWEEEYQKLGTTAGAYDDWHEGKDPAGITTQDPELMKRLDPVAAGRRLANYLKVMTLEAQTIARACGKNHLHNLEPEDLCALTMEAAAMAQVPLAGTSWYPGKGTF

SEQ ID NO: 25684 - protein, 482 aa, Zea mays
MAASVTVENLNPKVLKCEYAVRGEIVIHAQRRQQQLQTQPGSLPFDEILYCNIGNPQSLGQQPVTFFREVLALCDHPCLLEKEETKSLFSADAISRAKQILATIPGRATGAYSHSQGIKGLRDAIAAGIMSRDGFPANADDIFITDGASPGVHMMMQLLIRNEKDGILCPIPQYPLYSASIALHGGTLVPYYLNEKNGWGLEISDFKTRLEDVRSKGIDVRALVVINPGNPTGQVLAEDNQYDIVKFCKNEGLVLLADEVYQENIYVDNKKFNSFKKIVRSMGYGEDDLPLVSLQSVSKGYYGECGKRGGYMEITGFSAPVREQIYKIASVNLCSNITGQILASLVMNPPKAGDESYASYKAEKDGILESLARRAKALEDAFNKLEGFSCNKAEGAMYLFPQIHLPQKAIEAAKAAKKAPDAFYALRLLESTGIVVVPGSGFGQVPGTWHIRCTILPQEDKIPAVISRFRAFHEAFLAEYRD

SEQ ID NO: 25685 - protein, 203 aa, Nicotiana tabacum
HEETWGELPLKVDDSEDMVIYTLLKDALNVGWSPFNFTAGEVKSELMEEEIVVSPADTTAAPAAELPRGRHYRGVRRRPWGEFAAEIRDPAKNGARVWHRTYETDEEAAIAYDKAAYRMRGSKAHLNFPHRIGLNEPEPVRVTAKRRASPEPASSSENSSAKRRRKAVAAEKSGAVEVESKSNVLQVGCQVELLTRGHQLLVS

SEQ ID NO: 25686 - protein, 1538 aa, Rhizobium sp. NGR234
MSVDRVQRRIAAILAADVVGYSRLMGKDEEATLAILKAHREIVDTLIAEHSGRIFGSAGDSVVAEFASPVEAVRCATEIQLALDRQNKEMPEQSRMRLRIGINLGDVVIDGDNLMGDGVNVAARLETLAPPGGICISEAIHTQVRDRLSLDFLDMGEYKVKNIVRPVRVYRVPLASEERIRSPFRGLDAFDFEHAELFFGRARAIATCTERLEQLAASGRAFLLIYGMSGSGKSSLLRAGLLPAITKAGATPGIALWRRCVIRPSQGPSAVASLAAGLLRKEALPELAEEKSAAELADLLRSAPERAVALVRAALGRAANAAGIAPSQCRLALAVDQLEELFTTEAEPASRALLVRLLMAFAGSGLVWVIGTIRSDFYHRCSDVPGFSVLKDGLGSYELLPPTSAEIAQMIREPARSAGLRFEESADHGRLDDVLQGAATADPGSLPLLQFMLDALYEAGRDRRLLTFAAYRALGGLEGAIARRADEVIDGLPLEIEEALPVVLRGLSTVRLGDETVAARPAPLADLASSPAQATLAEALIAARLLVSDEDAEGHAIIRVAHEALLSRWPRARDIVNANRTFLETRARVQADAHRWLLDNRNPDLLLPAGKRLAEAEELLQSRREEVDGQVISYVDASMLAHEVRLEKERQAERARIETEEATKRERLEHEAARQRLEAEAATRLARRTRIGAAVALVLAVGAAAGAVVGLRGQSEAIRQAERAEGNAREAKAAEMQARAAEAQAREAKDQALRNQSLSLAFLSHTTETAGDTEAAILLALEALPKDMAAPSRPYLPEAEAALYQALLQHRQTAVFRHDDGVTDAAFSPTGDRIVTSSYDKTTRIWNVEDSFQIAILKGHEGPVERASFSPDGSRVATAGRDGTARIWDAASGGQLYLLPQPGNVNTAMFNAAGTRLLTGSDMRAPAVWDTQTGKKVAAAEGDWTTSAMFSPDGLSFAAGYGEERLVRIWSAEDGRPIREIYNRSWPDEVIFSPDGSKLVANAWRTLTWNAVPRLWDVPSGSEVATFGDHASDTQGTTFSHDGRLIATVSLDGTARLWDGVSGKERGVLGRETAGLKRDQAGVPGPEIDKEMNCAFSPDDKLLATASLGNLVRLWDVESDSEFAVIAGHRGLVEHVAFSPDGTRLLTASHDETARLWDIDGVLTTSMRHRRPPTFAAFSPDGTRVITGGGDDTANIWDVASGREVVRLEPNSGFIGDATFSPDGHLVATASSYGRIVLWDAKSGHEALRLNSGKAAVVNLQFSPGSDLIASASDDGAARLWNTSTGVQIAVLTTGGNLRKVLFSPDGELVLTALKDYTARLWKRDGTEVRVLAGHEKRITAAAFSPNGRLVATSSLDGTARVWSIEDGSVVATMRRPGEALTDVAFSPDSKSVVTASRDGSARIWDVADGAEQAALRGHKGFVREATFSPSGLYVVTASPQDGTVRLWSASSGREIAILTGLETVGNVEPASTLAVFNSEGTRMAGVFGDKVARIIRVFPTPQDMIDYARTVVPRELTPCERQRFFLPVEGDIGECPN

SEQ ID NO: 25687 - protein, 230 aa, Pisum sativum
MQEFHSIEGVNHHQHLNHALKCPRCDSFNTKFCYYNNYNLSQPRHFCKNCRRYWTKGGVLRNVPVGGGSRKSKHSKNSKAVSSSSSTASSPPGADEHKSNSESSTFTAAATEAISNTPISNAAVTPSSKNDAFLFGNNIIDASSFGFGFNHQHQRQHGNDQVHVAQQQNSHQRLSLLHQQQLSNGFGSLDWEASAGNCLFDVPNTVGQPYWTHSHWSDHHVNQSSLFHLP

SEQ ID NO: 25688 - protein, 515 aa, Methanocaldococcus jannaschii
MCGINGIIRFGKEVIKEEINKMNKAIKHRGPDDEGIFIYNFKNYSIGLGHVRLAILDLSEKGHQPMGYNVDEDKIIYRDDELDRADIIIVYNGEIYNYLELKEKFNLETETGTDTEVILKLYNKLGFDCVKEFNGMWAFCIFDKKKGLIFCSRDRLGVKPFYYYWDGNEFIFSSELKGILAVKEINKKENINKDAVELYFALGFIPSPYSIYKNTFKLEARQNLIFDLDKREIRKYYYWELPDYKPIYDKKKLIEEGKKLLYDAVKIRMRSDVPVGAFLSGGLDSSTVVGVMREFTDLSKLHTFSIGFEGKYDETPYIKIVVDYFKTQHHHYYFKERDFEELIDKYSWIYDEPFGDYSGFPTYKVSEMARKFVTVVLSGDGGDEVFGGYMTHLNGYRMDFIRKLPKFLRVVGSKLPVKKDLNGIANLYLLKEAFRLSLINPEEFYAESIKEDAIRPEIYKKWTIEKLRYCLNKGDNKLGEALRIFDLLFNTLCDNFLVKVDRASMLTLWKLEVHF

SEQ ID NO: 25689 - protein, 658 aa, Arabidopsis thaliana
MGIELQNHQSHHEEASPAEEPMSRWLINTPEPPSMWQELIGYIRTNVLAKKKHKRNKTKNSSSNLVYSCLKSAFPILSWGRQYKLNLFKKDLMAGLTLASLCIPQSIGYANLAGLDPEYGLYTSVVPPLIYSTMGTSRELAIGPVAVVSLLLSSMVRDLQDPVTDPIAYRKIVFTVTFFAGAFQAIFGLFRLGFLVDFLSHAALVGFMAGAAIVIGLQQLKGLFGLTHFTNKTDVVSVLSSVFHSLHHPWQPLNFVIGSSFLIFILLARFIGKRNNKLFWIPAMAPLISVVLATLIVYLSNAESRGVKIVKHIKPGFNQLSVNQLQFKSPHLGQIAKIGLISAIIALTEAIAVGRSFATIKGYRLDGNKEMMAMGFMNIAGSLSSCYVATGSFSRTAVNFSAGCETVVSNIVMAITVMISLEVLTRFLYFTPTAILASIILSALPGLIDVSGALHIWKLDKLDFLVLIAAFFGVLFASVEIGLLLAVGISFARIMLSSIRPSIEALGRLSKTDIFGDINQYPMANKTAGLLTLRISSPLLCFANANFIRDRILNSVQEIEGEENEQEVLKENGLQVVILDMSCVMGVDTSGVFALEELHQELASNDIRLVIASPRWRVLHKLKRAKLDEKIKTENIYMTVGEAVDIYVRARSTSHELC

SEQ ID NO: 25690 - protein, 220 aa, Capsicum annuum
MESEHEKSETPNFKRPLKKKCENAKRFTDEQVKLLESMFKLGTKIEPREKLQLARDLGLQPRQVAIWFQNKRARWKSKQLEHEYRILQSKFDHLNTQFESLKIEKERLLIELETLNDQLGNKLARGSKSQDSRDSELHTSPENGFTDLLELKHCAGCSNSRFGHKSVNEEDDETTEETDKYFTPKEEAEFWNLDELGDNNSLEHWCVGLGSISNSKLWDF

SEQ ID NO: 25691 - protein, 505 aa, Vinca major
MAIVDFLAAFLIFILTQKLIQTLFRRTYRRKLPPGPKGWPVIGALPYLGTMPHTSLAYMAKKYGPVMYLKVGTNDMVVVSTPDAARAFLKTLDINFSNRPPNAGATHLAYGAQDMVFAHYGPKWKLLRKLSNLHMRGGKALEDWSNVRISELGHMLETMYESSKKGEAVVVAEMLTYAMANMIGQVILSRRVFVTKGSDSNEFKDMVVELMTSAGLFNIGDFIPSIAWMDLQGIEGGMKRLHKKFDVLLTKLLEEHKESSSKRKGKPDLLDYVLANRDNSEGERLTTTNIKALLLNLFSAGTDTSSSIIEWALSEMLRNPSILKRAQHEMVQVIGRNRRLVESDISRLPYLQAICKETFRKHPSTPLNLPRIATEACEVNGYYIPKGTRLSVNIWAIGRDPDVWENPLEFNPDRFLSGKNAKIDPRGNDFELIPFGAGRRICAGTRMGILLVEYILGTLVHSFDWNLPSSVTKLNMDESFGLALQKVVPLAALVTPRLPINAYSP

SEQ ID NO: 25692 - protein, 409 aa, Methylophilus methylotrophus
MALIVQKYGGTSVANPERIRNVARRVARYKALGHQVVVVVSAMSGETNRLISLAKEIMQDPDPRELDVMVSTGEQVTIGMTALALMELGIKAKSYTGTQVKILTDDAFTKARILDIDEHNLKKDLDDGYVCVVAGFQGVDANGNITTLGRGGSDTTGVALAAALKADECQIYTDVDGVYTTDPRVVPEARRLDKITFEEMLELASQGSKVLQIRSVEFAGKYKVKLRVLSSFEEEGDGTLITFEENEENMEEPIISGIAFNRDEAKITVTGVPDKPGIAYQILGPVADANIDVDMIIQNVGADGTTDFTFTVHKNEMNKALSILRDKVQGHIQAREISGDDKIAKVSVVGVGMRSHVGIASQMFRTLAEEGINIQMISTSEIKIAVVIEEKYMELAVRVLHKAFGLENA

SEQ ID NO: 25693 - protein, 511 aa, Vibrio vulnificus YJ016
MVTYNYRSKIIVEVVMIPVVALVGRPNVGKSTLFNRLTRSRDALVADFPGLTRDRKYGQAKVGEHDFIVIDTGGIDGSEEGVETKMAEQSLAAIREADVVLFMVDGRAGLTPSDEAIAAHLRKIEKATMLVVNKVDGIDADAASADFWQLGVDEMYQIAAAHGRGVTALIERALDPFFDNLLSTNSEGEIEDLTNMEDEEAEQQEYSEEDAEESLKRLQDQPIKLAIIGRPNVGKSTLTNRILGEERVVVYDMPGTTRDSIYIPMERDGREYVLIDTAGVRRRGKVHETVEKFSVVKTLKAVEDANVVLLVIDARENISDQDLSLLGFALNAGRSIVLAVNKWDGLDNEVKENVKKELDRRLGFVDFARIHFISALHGTGVGHLFESVQEAYRSATTRVGTSVLTRIMKMATEDHQPPMVRGRRVKLKYAHAGGYNPPIVVIHGNQVRELPDSYKRYLMNYFRKSLDIMGTPIRIQFQNSDNPFENRVNKMTLSQERARKRMMSAVKNRKK

SEQ ID NO: 25694 - protein, 671 aa, Vibrio vulnificus YJ016
MWLPFNISIAQIDSLISIEQSVFHTDCNFVLGNFMKRHFELIDKPTFFGALALLFSVIIPLLVWPSQGEYWIGVAKTFMTDKLGFLYLGLGLAAFFFMVYIIFSDIGQIKLGDADEKPEFATGSWAAMLFCGGIGASILYWGTIEWAYYYQNPPFQLEAGSEEAIRWAATYGIFHWGPIAWSIYLIPALPIAYFFYVRKQPVLKISAALMPVIGEARSYGKLGKVIDVLFIFGLLGGAATTLGLAAPLINEGISYLFGIPSTTLSQIGVLLLCTALFAYSSYKGMDGGIKVLSNINFWGALALLAFILVTGPTLFMLETGLDSIGRMLSNFFVMATWAEPFGGYGPFEDTHFPQDWTIFYWAWWLVFAPSMGLFVARISRGRTIKQMVSGSIFFGSMGCALYFMVLGNFGLSLQLSGQLDVVAILNQHGATRAIFAILEQLPLSTVVIAVFTILCIIFTATTFDSISFILASVVQNNVTEDPLRWNRLFWAFTLSLMPSILLFMGGLATLQTAAIVGGLPLLGIAIMLMISGIKAASLDLAHQEGYEDPVINIEEFPDVDPWSREGMALAKFERLKDEAVEAAEQEREALAAIWKLKKVIRSEALSRGESGLELGEAPEEQLTEIQRLTNAAMEAKEHKLQASEAAQAARIEFNELIKEKELQSLQSESLS

SEQ ID NO: 25695 - protein, 227 aa, Vibrio vulnificus YJ016
MIFVYRGCFDDVPHGLETRNVALLRYNLGLYSFVTETDTLAKPAVFLDRDGVINVDHGYVHDEHDFEYIEGVFEATKALKDMGYLLVLVTNQSGIARGKFSEDRFLSLTQWMDWNFADNGVEFDGIYYCPHHAEHGVGDYKQDCDCRKPKPGMFISARDFLKIDMARSVMVGDKAEDMMAAEAAGVATKILVRTGKPVTQQGEQLATVVLDSIRDVPLYVKEQVKGR

SEQ ID NO: 25696 - protein, 490 aa, Vibrio vulnificus YJ016
MDFLIIQTDLSKLLCPFPHQNKHRMLDYQRLIFFGSRGRNAVSALNVAKFGGTSVANFEAMSRCSAIIENNPETRLVVSSACSGVTNLLVELANGVQSQERRAELLAQLAEIHDAILNQLEDATEAAAEVYAILDTITSLAEAASIQASNKLTDHLVACGELMSTHILAQLMRERGVNAVRFDIREVLRTDDNFGRAEPDVAKIAELAQEKLLPLCRDYVVVTQGFIGSDEEGNTTTLGRGGSDYSAALIAEGVKASGLEIWTDVPGIYTTDPRIAAKAAPIPEISFAEASEMANFGAKILHPSTLVPALRHDIPVFVGSSKEPEKGGTWIRHEAQSSPLFRALALRCNQTMVTLRSAKMFHAYGFLAKVFEILAKHKISVDLITTSEISVSLTLDKTDTSGGAPEVPQAAREELEELCTVEVEHNLCLVALIGNHMETKGYAKEVFSTLGDFNLRMICYGASDHNLCFLVDAHDSKSVIQKLHQDLFER

SEQ ID NO: 25697 - protein, 304 aa, uncultured bacterium
MTTFAELNIMQMSHKAGFVNIIGNPNVGKSTLMNAFVGERLSIITSKAQTTRHRILGIVNGEDFQLVLSDTPGIIKPAYEMQESMMNFVKSAFEDADILIYMVEIGEQDLKDEAFFNKIIHAKIPVLLLLNKIDNSNQEQLEEQVAFWKEKVPNAEIFPISALQNFNVPEVFGRIIELLPESPAYYPKDQLTDKPERFFVNETIREKILLNYSKEIPYAVEIVTEEFFEDEKIIRIRSIIMVERETQKGIIIGHKGAALKKVGTDARADLEKFFGKQIHIELVVKVNKNWRSNANMLKRFGYNQ

SEQ ID NO: 25698 - protein, 191 aa, uncultured bacterium
MKLIILDRDGVVNHDRDDYVKSADECVPIEGSIDAIARLNKAGFTVVIATNQAGLAKGKFELEDLEAMHEKITGLVEEQGGELGGIFYCPHHPDDNCKCRKPAPGMLDAIEAEFNTSVESCYFVGDSLRDLQAAVRKGCKPALVKTGNGVRTLAQLAVPGLQTDLPIIDAEQVQVFDNLATATDFILAAIN

SEQ ID NO: 25699 - protein, 973 aa, Adiantum capillus-veneris
MSSKTMTYSSSAAEPRSSSSSVVGSKHNRRVVVAQTTADAKLHAVFEQAQSEGDTGGSSFDYMRSIEDARGSVLSERVPAQAVTAYLQRMQRGGLIQPFGCMLALEEGSFRVIAYSENAAEMLDLMPQSVPSVGVQVLVLGIGTDARTLFTYASAAALEKASGAVDVSMLNPITVHCRSSSKPFNAIVHRIDVGLVIDFEPVRPADVAVWAAAGALQSHKLAAKAISRLQALPVGDIDLLCDSVVEEVRELTGYDRVMAYKFHEDEHGEVLAEIRRSDLEPYLGLHYPATDIPQASRFLFMKNRVRMICDCRALPVRVIQDKELRQPLSLAGSTLRAPHGCHSQYMANMGSIASLVMAVVVNDNDEDVSNRSQQPKMRRLWGLVVCHHTTPRAVPFALRSACEFLMQVFGLQLNMELELAAQMREKHILRTQTLLCDMLLRDAPIGIVSESPNIMDLVKCDGAALYYGKNFWLLGTTPIEAQIKDLAEWLLDVHRDSTGLSTDSLADAGYPGAAALGDAVCGMAAAKITTRDFLFWFRSHTAKEIKWGGAKHDPEDRDDGRKMHPRSSFKAFLEVVKRRSLPWEDMEMDAIHSLQLILRGSFQDIDDSDTKTMIHARLNDLKLHGMDELSTVANEMVRLIETATAPIFAVDAGGFINGWNAKVAELTGLTVEEAMSRSLVRDVVVNASMETAERVLDLALQGQEEQNVEIKLKTYGDQAIKGPVILIVNACSSRDFTDNVVGVCFVGQDVTGQKVVMDKFTRIQGDYKTIVQNPNPLIPPIFGADEFGYCSEWNPAMEKFSGWKREDVIGKMLIGEVFGSDLACCKLRGQDSMTKFMIILNAAMGGRDSDRFPFGFFDRYGKYAEALLIANKRTDSDGAITGVFCFLHTASPELQQALQVQKRSARTALDRLKEVAYMKQEIRNPLYGIVFTRKLLDNTNLTDEQKQIMETSSLCEKQLQNILDEDNFEKLDQ

SEQ ID NO: 25700 - protein, 1140 aa, Adiantum capillus-veneris
MSSKTMTYSSSAAEPRSSSSSVVGSKHNRRVVVAQTTADAKLHAVFEQAQSEGDTGGSSFDYMRSIEDARGSVLSERVPAQAVTAYLQRMQRGGLIQPFGCMLALEEGSFRVIAYSENAAEMLDLMPQSVPSVGVQVLVLGIGTDARTLFTYASAAALEKASGAVDVSMLNPITVHCRSSSKPFNAIVHRIDVGLVIDFEPVRPADVAVWAAAGALQSHKLAAKAISRLQALPVGDIDLLCDSVVEEVRELTGYDRVMAYKFHEDEHGEVLAEIRRSDLEPYLGLHYPATDIPQASRFLFMKNRVRMICDCRALPVRVIQDKELRQPLSLAGSTLRAPHGCHSQYMANMGSIASLVMAVVVNDNDEDVSNRSQQPKMRRLWGLVVCHHTTPRAVPFALRSACEFLMQVFGLQLNMELELAAQMREKHILRTQTLLCDMLLRDAPIGIVSESPNIMDLVKCDGAALYYGKNFWLLGTTPIEAQIKDLAEWLLDVHRDSTGLSTDSLADAGYPGAAALGDAVCGMAAAKITTRDFLFWFRSHTAKEIKWGGAKHDPEDRDDGRKMHPRSSFKAFLEVVKRRSLPWEDMEMDAIHSLQLILRGSFQDIDDSDTKTMIHARLNDLKLHGMDELSTVANEMVRLIETATAPIFAVDAGGFINGWNAKVAELTGLTVEEAMSRSLVRDVVVNASMETAERVLDLALQGQEEQNVEIKLKTYGDQAIKGPVILIVNACSSRDFTDNVVGVCFVGQDVTGQKVVMDKFTRIQGDYKTIVQNPNPLIPPIFGADEFGYCSEWNPAMEKFSGWKREDVIGKMLIGEVFGSDLACCKLRGQDSMTKFMIILNAAMGGRDSDRFPFGFFDRYGKYAEALLIANKRTDSDGAITGVFCFLHTASPELQQALQVQKRSARTALDRLKEVAYMKQEIRNPLYGIVFTRKLLDNTNLTDEQKQIMETSSLCEKQLQNILDEDNFEKLDQGNVDLDTLEFTMGTVMDAVISQGMIRSREKGLQLIRETHVEIKNTRLFGDQYRLQQVLADFLTTAIRFTSSSDGWVGIKVVPTIKNMKDGLHIVHFEFRVSHPGSGIPEDLVQQMYDRSQEITQEGMGLSVSRKLVKLMNGDVKYTREAGVCYFLVTVELPLVQEDD

SEQ ID NO: 25701 - protein, 564 aa, Lachancea kluyveri
MSEITLGRYLFERLNQVEVQTIFGLPGDFNLSLLDKIYEVPGMRWAGNANELNAAYAADGYARIKGMSCIITTFGVGELSALNGIAGSYAEHVGVLHVVGVPSVSSQAKQLLLHHTLGNGDFTVFHRMSANISETTAWVTDIATAPAEIDRCIRTTYVTQRPVYLGLPANLVDLMVPASLLDTPIDLSLKPNDPEAEAEVVNTVLELIKDAKNPVILADACASRHNVKSETKQLIDITQFPAFVTPLGKGSIDEQHPRFGGVYVGTLSNDDVKEAVESADLILSVGALLSDFNTGSFSYSYKTKNIVEFHSDYIKIRNATFPGVQMKFALQKLLSQVGEVVKDYKPVAVPAKPTPNPACDPSTPLKQEWVWNQVGRFLQEGDVVITETGTSAFGINQTHFPNNTYGISQVLWGSIGFTTGACLGAACAAEELDKNKRVILFIGDGSLQLTVQEISTMIRWGLKPYLFVLNNDGYTIERLIHGENAQYNEIQPWKNLDLLPTFGAKDYETYRVATTGEWDKLAQDEAFNKNSRIRMVEVMLPVMDAPSNLVKQAQLTASINAKQE

SEQ ID NO: 25702 - protein, 564 aa, Lachancea kluyveri
MSEITLGRYLFERLKQVQVQTIFGLPGDFNLSLLDKIYEVPGLRWAGNANELNAAYAADGYARVKGMSCIVTTFGVGELSALNGIAGSYAEHVGVLHVVGVPSVSSQAQQLLLHHTLGNGDFTVFHRMSSEISETTAVITDIKDAPKEIDRCIKVTYSKQRPVYLGLPANLVDLKVSASLLDTPIDLSMTPNDADAEDEVVETVLAMVSKAKNPVILADACCTRHDVKRETKKLIDLTQFPAFVTPMGKGSIDEDHPRFGGVYVGTLSDPEVKEAVESADLVLSVGALLSDFNTGSFSYSYKTKNIVEFHSDYTKVRNATFPGVQMKLVLQKLLSKVSDAASGYKPVPVPKGTRSNPGVESSTPLKQEWIWNHISDWLEEGDVVITETGTSAFGINQSRFPNSTYGISQVLWGSIGYSVGSCLGAAFAAEELDKNRRVILFVGDGSLQLTVQEISTMVRWGLKPYLFVLNNDGYTIERLIHGETAQYNDVQPWLHLNLLPTFGAKDYDSIRISTTGEFLKLTEDQAFSRNSKIRLIEVMLPVMDAPSTLVKQAQLTAATNAKQG

SEQ ID NO: 25703 - protein, 577 aa, Lachancea kluyveri
MSTMQLGTYLFYRLSQVTKTVFGVPGDFNLNLLEHVYNFDESQIKWCGNANELNAGYAADGYSRINKFGCFITTYGVGELSALNAVSGAFAENAPVLHIVGTSSMLAKRGACPLNQIHHLIPPKKTYEAPDHKVYEKLAEPFSIHTESLSDENLEKIQDQIDSVIESIFCHMKPGYLFIPSNLPDAEIPVDLNKQLNFDFITKLRVDPHATSEMVSLTLKRIYSSRNPGFIVDQFMRFDLEKLNLFLEKFNFYCYNTTTARGFADESLPNFHGVFNNELSTNGTLEILDQNDFILHLGTNINEVSYFVGGSTPLDKKDVIFIGKDYAQVGTNGHIITGINCHVFFEELLQRMNSKTMPKVKTRKSTALYNNGYTVDDDSKTVTQANLSQVVSAQLRENDVIINEMCSFMFEMPNIKYSKGCQFVGQPFYGSIGYALPATLGASLAIKDYKKSGRVILFQGDGSAQMTLQELASYIRFEIDPIIFMLNNSGYSVERVIKGPTRSYNDIIVDWDWCNILSVFGDRNGDRSTSYKVEKLGELKNVLTKRLDYSDGKIKMVEIILDRMDVPFGFKKLIGAN

SEQ ID NO: 25704 - protein, 327 aa, Saccharomyces cerevisiae
MNSESREDMAINSIKLLAGNSHPDLAEQISKKLGIPLSKVGVYQYSNKETSVTIGESLRDEDVYIIQTGIGEQEINDFLMELLILIHACQIASARKITTVIPNFPYARQDKKDKSRAPITAKLVANLLQTAGADHVITMDLHASQIQGFFHIPVDNLYAEPSVLNYIRARKTDFDNAILVSPDAGGAKRVAALADKLDLNFALIHKERQKANEVSKMVLVGDVTNKSCLLVDDMADTCGTLVKACDTLMEHGAKEVIAIVTHGIFSGSAREKLRNSRLSRIVCTNTVPVDLDLPIADQIDISPTFAEAIRRLHNGESVSYLFTHAPV

SEQ ID NO: 25705 - protein, 773 aa, Saccharomyces cerevisiae
MLNGRLPLLRLGICRNMLSRPRLAKLPSIRFRSLVTPSSSQLIPLSRLCLRSPAVGKSLILQSFRCNSSKTVPETSLPSASPISKGSARSAHAKEQSKTDDYKDIIRLFMLAKRDWKLLLTAILLLTISCSIGMSIPKVIGIVLDTLKTSSGSDFFDLKIPIFSLPLYEFLSFFTVALLIGCAANFGRFILLRILSERVVARLRANVIKKTLHQDAEFFDNHKVGDLISRLGSDAYVVSRSMTQKVSDGVKALICGVVGVGMMCSLSPQLSILLLFFTPPVLFSASVFGKQIRNTSKDLQEATGQLTRVAEEQLSGIKTVQSFVAEGNELSRYNVAIRDIFQVGKTAAFTNAKFFTTTSLLGDLSFLTVLAYGSYLVLQSQLSIGDLTAFMLYTEYTGNAVFGLSTFYSEIMQGAGAASRLFELTDRKPSISPTVGHKYKPDRGVIEFKDVSFSYPTRPSVQIFKNLNFKIAPGSSVCIVGPSGRGKSTIALLLLRYYNPTTGTITIDNQDISKLNCKSLRRHIGIVQQEPVLMSGTIRDNITYGLTYTPTKEEIRSVAKQCFCHNFITKFPNTYDTVIGPHGTLLSGGQKQRIAIARALIKKPTILILDEATSALDVESEGAINYTFGQLMKSKSMTIVSIAHRLSTIRRSENVIVLGHDGSVVEMGKFKELYANPTSALSQLLNEKAAPGPSDQQLQIEKVIEKEDLNESKEHDDQKKDDNDDNDNNHDNDSNNQSPETKDNNSDDIEKSVEHLLKDAAKEANPIKITPQP

SEQ ID NO: 25706 - protein, 114 aa, Frankia sp. BMG5.3
IVKGGKEPEIWGFDGSSTNQAPGSNSDCVLQPVFTCPDPLRGGDNVLVLCEVQLTDFTPHPTNTRAAARAVAEKYADMSPMFGIEQEYTFFQNGRPLGWPAAGYPEAQGPYYCG

SEQ ID NO: 25707 - protein, 124 aa, Frankia sp. BMG5.2
PLTRSKTRIVKSGKEPEIWGFDGSSTNQAPGSNSDCVLQPVFTVPDPLRGGDNVLVLCEVQLTDFTPHPTNTRAAARKVAEKYADMTPNFGIEQEYTFFQNGRPLGWPATGFPEPQGPYYCGVG

SEQ ID NO: 25708 - protein, 574 aa, Gloeobacter violaceus PCC 7421
MELSESHGVQPMNSRGFPGIPKEGSWTRKARRQAAGQDQVLVTPPPADWRPQPYLEGVGGLGEVLVTLKELVELPLKKPEVLEQLGLEPVRGVLLVGPPGTGKTLTARALAEQLGVRFLAIIGPEMMGKYYGEAESRLRGLFAKAARLAPCLLFIDEIDGLAPDRASTDHEADRRVVAQLLGLMDGVTKTPGVVVLAATNRPDHLDPALRRPGRFDREVRFGVPDRDGRLEILRILTRRMPFDETVDLEAVADRAVGLVGADLKGLCQKAAYRALRRQGGNLESAPGMSVSQSDFVAALKEVKPAVLRAVQVEAPAVAWEAVGGLEPVKQTLRESVEGALLYPELYRRAGAKAPRGILLYGPPGTGKTLLARAVASQARANFIAVKGPELLSRWVGASEQAVRELFAKARQAAPCVIFVDEIDTLAPERGSGGADSGVSDRVVGQLLTELDGLEEAGAVLLIGATNRPEVLDPALLRAGRLDLQLKIDLPDRESRLAILRVHNRERPLAGVDLEFWAGSTEGWSGADLALFSNQAALAAVRRHREAGHTDPARIVLGPDDFEAAYRTLKQQRGD

SEQ ID NO: 25709 - protein, 196 aa, Gloeobacter violaceus PCC 7421
MLRQAVFLDRDGVLNQERGYLHRLADLELIPGVAKAVRRLNDAGMFTVLVSNQSGPARGYYPPSHVDALHERLATLLAAEAGAALERMLYAPTLSPTEGGTHAGYSHWSTWRKPNTGMLVAAAWRFGLDLSASFMVGDKATDIDLARNAGCRGILVQTGFGEQVRSGSYQYTVEPDYLAADLSDAAGWILSAATSW

SEQ ID NO: 25710 - protein, 121 aa, Gloeobacter violaceus PCC 7421
MVYAIVETGGKQVLVQPGRFYDVELLALDVEAALTFDKVLLVRHEGGAVVGRPTVEGAAVQGRILQHGKAAKVTVYKMRPKKGYRRKKGHRQRFTRVMIESIDFEGRSFTAEAKAEAVSST

SEQ ID NO: 25711 - protein, 332 aa, Gloeobacter violaceus PCC 7421
MVFPDLLPRRSTVQPVRLMGDERLRLFSGSANPELAQLVARYLGLAPGPLVRKSFADGELYVQIQESIRGCDVYLVQPTCSPVNDSLMELLILIDACRRASARQITAVLPYYGYARADRKTAGRESITAKLVANLITAAGVDRVLAMDLHSAQIQAYFDIPLDHVYGSPVLLQYIKEKQLGDMVIVSPDVGGVSRARAFAKKLDDAPLAIVDKRRQAPNEVEVMNVIGDVKGKTAILVDDMIDTAGTISEAAKVLLRQGAKEVYACATHAVFSSRAIDRLSDGTFTEVLVTNTIPVPPDRRFPQLRVLSVADLIGEAIWRIHEDSSVSSMFR

SEQ ID NO: 25712 - protein, 405 aa, Gloeobacter violaceus PCC 7421
MKVLVLNAGSSSQKSCLYDLPHTQLPQEPPQPLWEAQIDWPHGGDGAKLKIKTVHHRHEKTLQGGSRSEDSARMLETLYSGETRVIADPSEIEMVGHRVVHGGEAYRESTRITPEVKAAIDQLARFAPVHNPANLAGIEALEALLGPQVPQIAVFDTAFHSRLPAAAYVYPGPYEWLDQGIRRYGFHGISHRYCAERAAQILGRDLAQLRLITCHLGNGCSLAAVQGGFSIDTTMGFTPLEGLMMGSRSGSVDPGILIHLMRQADYTVDKLDHILNQASGLEGVSGISNDLRPLFKAIDEGNARAKLALDIYIHRLRAGIGAMAVSLGGLDALIFTAGVGENAAPVRAGACEALGFLGVALDPQKNNGRPRDADIAAADSAVRVLVIHTQEDWAIARECWQHLRR

SEQ ID NO: 25713 - protein, 183 aa, Gloeobacter violaceus PCC 7421
MSDTLTLKDEAGRTLACELVTELEIDGSQYGLVVPQATPVRLMAWEAAEGDDDTEEEDALLADLDDEEIERVFPTARAVLAEQDLKLVDSAYLLIVEGDIPNAEEAEVYSIADDEDGEEMEEEEYQLLEEFFFEDRRYGIFTPLDPVMLFVELPEGGEPRVLEPEETARLMPNFEEALLDLAE

SEQ ID NO: 25714 - protein, 252 aa, Gloeobacter violaceus PCC 7421
MLEITNLQARVEGKAILKGIDLTVRPGEVHAIMGPNGSGKSTLAGVLAGREEYEVTGGAVRYLDQDLLELAPEERARAGLLLAFQYPVEIPGVSNVYFLKAALNALRKHRGEGELDAVEFLALVRGKLKTVQMAESFLRRSVNEGFSGGEKKRNEILQMALLEPCLAILDETDSGLDIDALKIVADGVNGLRSPERSFLVITHYQRLLDYIVPDFVHVLMNGRIVRSGGRELALELEEKGYGWLEAEVTVGA

SEQ ID NO: 25715 - protein, 358 aa, Gloeobacter violaceus PCC 7421
MAPQQVRRGHGTIEILGEWTRRLGSRPLIVGGQNTLARWRPTLEKILQEAGLEAVFADYGIDCTEANLARLVDKASGHDVVIGVGGGKALDMAKLVAARRGLPMIALPTSAATCAAWAALSNIYSEAGQWLYGVELDHAPEGLIVDYDLIATAPVRTLVSGMGDALAKWYEASISSGDSDDVLVISAVQQARVLRDLILQLGEAAVGEPGGRAWEQMVDASICLAGMVGGLGGARCRTVAAHAVHNGLTSLGATRRSLHGEKVALGVLVQLRLEETVGRQRLASIAREQLEQFYRRVGLPLSLEDLHLAALDDEQLLAVARLCCQPQSDIHYLPFAVEPEQLARVLRESARPRAARLS

SEQ ID NO: 25716 - protein, 1534 aa, Gloeobacter violaceus PCC 7421
MIDPNWFADELMHEHDACGVGFLADSRGRASHDLIVRALEAVTCLEHRGGCGADRDSGDGAGLLSAVPWSIIDAWCAGSGLATPDPDRRAVGMLFLPRDAQIQQRCRAIATERFADEGFRVVGWRPVPVRPDHLGLQAASTRPDILQVILESEHPCPPTERERKLYLARKAIRSSIDQGFAREVARDFHFASLSCRTIVYKGMVRSEVLGRFYEDLLDERFESTFVLYHRRFSTNTFPRWPLAQPLRLLGHNGEINTVLGNRNWMSAREPDLKSELWGGRIEKLKPILELEGSDSASLDNAFELLVRSGRDPLHSMMMLVPEAYDNQPALADFPEVAGFYQYHGPLQESWDGPALVVFSDGVQVGATLDRNGLRPARYAITDDGLVIVASEAGVVDVPLERVIEKGRLGPGQMIAVDLESGEILKNWDIKQKVSRRQPYREWVTRHRQTLEAQPYLDGPQLDTHDLLVRQRATGYTLEDVERVILPMAQAGKEPVMSMGDDTPLAVLSQKERLLYDYFKQRFAQVTNPPIDPIREGLVMSLEMYLGPRGSWLEEKPEFARLLRLTSPILNENQLAELRSLDAPFNSRTLALVFALDEGTEALEKRLEALCAEAEQAVRSGASVLILSDRALGGERATLPPLLAVGAIHHHLIAVGLRLRASLVVETAQCWSTHHFACLFGYGASAVCPYLAFETIRNWWAAPTTRELVRNGKIEDQSVTRLQQNYVCSVEAGILKILSKMGISLLSSYSGAQIFEAIGIGAPVIGKAFCGTISRVGGMGFADIAREALQFHIAAYPDVSAQKLVNYGLITYRPGGEFHINNPKMVKALHAAIKLPERAGAERERLYGEYIDQIRSRPPAALRDLLEFKSDRSPIALEAVESVESILHRFCTGGMSLGALGREAHEVLAIAMNRIGGKSNSGEGGEDPVRFKPLTDVLPDTTSPSLPGIVGLRNGDSASSAIKQVASGRFGVTPEYLASARQLEIKIAQGAKPGEGGQLPGHKVDHYIATLRRSKPGVSLISPPPHHDIYSIEDLAQLIFDLHQINPKAFVSVKLVAEVGIGTIAAGVAKANADVIQISGHEGGTGASPLSSIKHAGVPWELGLTEVHQVLLANQLRDRVTLRVDGGLRTGYEVVQAAMLGAEEYGFGSIAMIAEGCIMARVCHLNTCPKGVATQNPELRRRFDGLPEHVVNFFWFIAEEVRSLLASLGYRSLEEVMGRVDLLIEREVPLAKTARLDLTSLLGGPEHAGRDWLAHSECAHGNGPVLDDLILQDPEIEWAIAHHGQVHKFFPVLNTDRSVGARVSGRIAGLYGDTGFGGELVLVFSGSAGQSFGAFNLQGMTLVLTGEANDYVGKGMNGGEILIRPFAGARYEPHRNVIIGNTCLYGATGGALFANGQAGERFAVRNSLATAVVEGCGDHGCEYMTGGVVVVLGPVGRNFGAGMTGGIAYVFDADDSLRAHVNLDSDKVLQRVPRGAGEAQLLGLIQDHYRKTDSDLARRILENWEAHLPLFWQVVPPSEKDSPVARSESVLTPAE

SEQ ID NO: 25717 - protein, 518 aa, Gloeobacter violaceus PCC 7421
MERSCRYCLEGAVANPIEKIKDEKPGLAVKAELIEFARLGWEAISKGDLERLKWIGWFFRKKTPGRWMVRLRVPGGILSSEQLRVVGGILAEFSDVKQLDITTRQNLEMRGLRIEDSVSIQERLEAVGLTTVQSGMDNVRNIVGSPVAGIDPDELIDVRPLVQQMQDLITEGGRGSFAFSNLPRKFNISITGDRENSAHAEINDIGFIPARREERIGFNVLVGGVLNSQRATPALPLDAFVLPEQVAPLCAAVLRIYSDHGPREARTRARLIYLLEDWGISKFRAAVEADLGFALPPAAHEEFIDYDKRDHVGVWPQKQAGYCFVGLHVPIGRLWAHQALEVADLAEVYGQGEVRLTVEQSFLIPHVAEEKLEALLVEPLLAVFSPEPNPLLRGLVSCTGAQFCNLAIIETKERALKLAHVLASELDLPQPVRIHWSGCPNSCGQPQIGDIGLIGTRTKVAGQSVDAVDILMGGQVGREARFGEVVREGVPCDELAAVLKGLLIEHFGAEERPVALAS

SEQ ID NO: 25718 - protein, 427 aa, Gloeobacter violaceus PCC 7421
MPEDSAQFTLTRRGLLQAAAAATVGSLLTPGYVGAADAPETTKARLGFISLSDCAPLVIAKEKGLFDKYGMKDVEVAKQASWGVTRDNLELGAGGGGIDGAHILTPMVYLIANGNITKGSKKVPMFILARLNVNGQGISVANKYKLLKVGLDAAPMKAEALKAKANGDPITVAQTFPGGTHWAWLRYWLAAGGIDPETDVKMITVPPPQMVANMKTGVTDAFCVGEPWHQQLINQQIGYTAVTTGQIWNRHPEKSFALRADYVEKYPKATKALLMAVQEAQIWADKAENKDELAQVVSKRSWIGAPVSDIVARYKGIIDYGDGRPVERNSPHIMQFWKDFASYPYQSHDLWFLTEDIRWGVLPATTDTKKLVAAVNREDLWREAAKALGQPAPKGTSRGVEKFFDGVAFDPTKPEAYLKSVKLKKLA

SEQ ID NO: 25719 - protein, 142 aa, Gloeobacter violaceus PCC 7421
MLMEVTAMALQVKLLEQSFEGVKPNAHAFAASFYDNLFSDFPQTQALFAHSDMQAQQQKLLASLVLVVENLRQPQVLSTALQDLGNRHAGYGIVPEHYPMVGTSLLKTFETYLGDAWTPEVKQAWVDAYGAITGLMLTGAES

SEQ ID NO: 25720 - protein, 443 aa, Gloeobacter violaceus PCC 7421
MKAVADRVGSPRPTLGLTDAVALIVGIVVGAGIFETPALVAANTGGPLWTLLAWLLGGGISLIGALCYAELTTAYPHAGGNYYYLLRAFGRDLAFLYAWARLAVVQTGSIALLAFVSGDYASQLWRLGEYSPSIYAALVIALFTALNIAGIRQGARTQNLLAVATVLGLAAVIVGGLLAPAPAQPLAAPAPASTNFGLAMVFVLLTYGGWNEAAYISAELRSVKRNMVRALLVSIGIITALYLLANVAFIHALGTAGMAGSQAVAADLMRRVAGAPGAAFISALIVVCALSSANASIITGGRTNYALGQDFTLFRFLGRWRTGTETPANALAVQGVIALGLVVLGTATRGGFKTMVEYTAPVFWLFFLLTGAALLVLRSRDPQIERPFRVPLYPLTPLLFCLICGYMLQASLAYTGTGALVGVAVLLVGLPLLWIARRTRTDS

SEQ ID NO: 25721 - protein, 471 aa, Gloeobacter violaceus PCC 7421
MADLQKEGGLDGGLKRTLGPINLISLGVGAIIGAGIFVITGQAAAQYAGPAITISFILAAFACAFAGLCYAEFAALLPISGSAYTYAYATLGELVAWIIGWDLIIEYALSAATVAVGWSGYVVSFLRDFGIVMPPQFTASFGQPVTLADGTTAAGLLNVPAVLIILALSLLLVVGVSESASVNGIIVVVKVAVIVAFLVFGASYIDTANWTPFIPEPVEPGRYGYFGILRAAGVIFFAYIGFDAVSTAAQEAKNPQRDMPIGILGSLVVCTVLYILVALVLTGIVDYRQLGVPDPIAVGVDAIGLGWLTFIVKIGAIAGLTSVMLVTLYGQTRIFYTMSRDGLLPPLFSAIHPRFKTPYLSTMLLGLFVSVVAGLVPLGILGELVSIGTLFAFIVVSAGVLFLRYRQPDLPRPFRCPLVPWVPLASIVACLALMSGLPADTWLRLFAWLGLGLLVYFVYGRVHSKLQSRRA

SEQ ID NO: 25722 - protein, 601 aa, Gloeobacter violaceus PCC 7421
MGLIVQKYGGTSVGSAERMRSVAERIARTHRQGHDLVVVVSAMGHTTDALVKMACEMHGEPDPREMDMLLTTGEQQSVALLTMALHALGCKAISLTGAQVGVVTEPNHTRARIRRVQTGRINELLAAGYVLVVAGFQGICHSRFWEITTLGRGGSDTSAVALAAVLKANRCEIYTDVPGVLTTDPRLVGDAALLEEITSEEMLELASLGAQVLHPRAVEIARNYAVPLVVRSSWSDAPGTIVLSPRLPVDRAIDNLETERPVDAVYIDNHQAKIALLRVPDRPGVAAALFGHLAKAGIDVDLIIQSIHHPNAPEPTNDIAFTVQRSDLAAAVATSETAAAALGGCAVVVDPVPTKVSIRGAGIIGRPGVVAQMFKALAEARINIQMISTSETSLSCVIAGEQAEKAGEVLCGQFGLRAPVYEEPPVVSGARPVAQAVRGVALDTNQAQVAILQIPDRPGVAAEIFQCLAQEGIAVDMIVQSQRGADTNDIGFTVSRSAVRAAQRALASLCMGFAGCGGVVVRESVAKLSLVGAGIVGTPGVAARMFETLASLGTNIEMISTSTIKVSCIVEAACCEASLQAVHRAFGLGSGAMVAVEGRSS

SEQ ID NO: 25723 - protein, 611 aa, Gloeobacter violaceus PCC 7421
MNKNWRNAGLYVLLAIVVISLASAFFSGQPQAQPELRYSEFIQQVQQGQVKSVIVNQEGSNATVTLKDDSKVRVNIPPGDRQLYTILEKSGVEASVNQPSSNNFWFSALSSFFFPLLLLGGLFFLLRRAQGGPGNQAMNFGKSKARVQMEPQTKTTFTDVAGVEEAKLELQEVVDFLKNSERFTAVGAKIPKGVLLVGPPGTGKTLLAKAVAGEAGVPFFSISGSEFVEMFVGVGASRVRDLFEQAKKNAPCIVFIDEIDAVGRQRGAGLGGGNDEREQTLNQLLVEMDGFEGNTGVIIIAATNRPDVLDAALLRPGRFDRQVVVDRPDFKGRLEILKVHARGKTLGKDIDLEKIARRTPGFTGADLANLLNEAAILAARRSLTEISMDEVNDAVDRVLAGPEKKNRLMTEKRKWLVAYHEVGHALVGALLPEYDPVQKISIIPRGMAGGLTWFVPDEERADSGLYSRVYMTNMMAVALGGRIAEEIVYGEAEVTTGATNDLQQVAQIARNMVTRYGMSEKLGPVALGRQGGSMFLGRDIMTERDFSEHTASVIDEEIRELIEKAYALSKSVLLSHRNLMDRVTEVLVQKETVDAEELEQLIETSLNKAAA

SEQ ID NO: 25724 - protein, 550 aa, Gloeobacter violaceus PCC 7421
MASSVLTVGEYLIERLYSHGVHHIFGVPGDYVLGFFKQLCDSPIKVINTCDEQGAGFAADAYARVRGLGAVCVTYCVGGLKVANTTAQAYAEKSPVVVISGAPGTNERHKNPLLHHKVREFDTQLKVFEQLTVAATVLDDPQTAFCEIDRVFEAALRYRRPVYIELPRNVARATGSACHLRELPQETSDPATLGEAVKEAVARINASRQPVILAGEELHRFALQPLLAQLIEKTNIPVASTILGKSVFPESHPRYLGVYEGAMGREDVRDYVEASDCLVLLGALMTDMNLGIYTANLDPRRSIYCATEKLTIGYHSYEDVRLQDFAAGLLAGEIERRVDGPTPHPLPLAQFQPVQDRPMTVLRLFQQLNAFLDDETIVVADPGDALFAGADLFIPGKTRFLAPAYYASLGFAVPAALGAQMADARLRPLVLVGDGAFQMSGLELSTIARFGLDPIVVLLNNRGYGTERPMQDGSFNDVLNWNYSRLPELLGTGRGFEVSTEDQLAAALHEARRHRGSFSLIDVHLEPGDLSPALRRMTDSMGQRVRPAAV

SEQ ID NO: 25725 - protein, 448 aa, Gloeobacter violaceus PCC 7421
MAGKPLGQRGAGAQAADFEQSARWKPTRRQFLQVSGAASAGLLLVPGYAGAADAPEVTAVRIGFVGQTDASPIIIAKVKGYFEKHGLKDVELIKQPSWGVTRDNLELGSRGGGLDVAMVLRPMPFLMALGVNTKGNKKIPIYVPLQLNVDGQGITVAKVFNAENVRLDASVMKPKIEKAKAEGKKLKFASTFKGGTSDLMLRYWLAAGGIDPDNDIDCLYVPGPQLVASMKVGNLEGFCVGDPWHERAISEKIGYSAVISGELWKDHPEKALAMRADWADKHPKAARAILKGIMEAQQWCDVMTNRDELCTILSSREYANVPVANINNRLKGSIEYGNNRPVVSNSPYVMRFWRENASYPYKSHDLWFMTENIRWNLLPAATDVKAVVGAVNRADLWQQAAKEGGIAAAQVPKVASRGVEVFFDKTRFDPANTTAYLKALKIKRVALA

SEQ ID NO: 25726 - protein, 526 aa, Gloeobacter violaceus PCC 7421
MPKVLVSDAIDQAGIEILTQVAQVTYEPDLSPATLLETIPQYDALMIRSGTKVTALVIEAAQRLRIIGRAGVGVDNVDLQAATRKGIVVVNSPEGNTIAAAEHAIALMMSLSRHVGEANASLKAGQWKRSQFIGVEVYKKTIGVVGLGRIGSHVTRVARALGMQIVAFDPYISAERAQQLGARLVDLEQLFHEADYITLHVPRTPETTHLINEKTLASMKPTARIINCARGGLIDEQALYVALKEGRIAGAALDVFENEPLGESPLCALGREVILTPHLGASTEEAQTNVAIDVAEQIRDVLLGLPARTAVNIPGLRAEVLQELKPYLELADTLGNLVGQLAGGRVDALDIRLQGILAAKDAQPIVVAALKGLLTPALRERVNFVNALLEAKERGIRVTETRDSAFADYAGSIRLEARGPEGERSVTGALLAEDELRITNIDEFPISVAPSRYMLITLHRDMPGIIGKVGSFLGSYNVNIAGMQVGRKLVRGDAVMMVSLDDPLPEGLLGEIESVPGIRKAYTVNL

SEQ ID NO: 25727 - protein, 369 aa, Gloeobacter violaceus PCC 7421
MDFGVGFLTNSVMLPILDFLYRIVPNYGVGIVLLTLIVKGLLWPLTAGSIRSMRKMQVVQPEMQRRTKEIQEKYKNEPERMQQEMAGLYKEYGNPLAGCLPLVVQMPILFALFATLRGSPFADTVHMATVQVKPTSELTRVETEGKSWEYTIYLTDGMQERQKITFSPNFARVPVGKAVQFKVDQVNGQPFTALSPRFEIVGGAEKGKFLANGTLEALAPGDVNVHVVVPGIAAEKGFLFVEKLGRSGISGKDGIYWDSLLMIVLFGVSLYFSQNMTAKHNPSMTEQQKQINKITPFIFSGMFVFFPLPAGVLLYILLSNLFQIVQTYLLYREPLPENIQRILDQAKRKEETDKPLPFENKQRRNKKKA

SEQ ID NO: 25728 - protein, 296 aa, Gloeobacter violaceus PCC 7421
MAHAATRTFEVPVNIYRPASPFRGKALQNINLTPDDPDNDVRHVVLDLSGGDLRYFEGQSIGIVPPGTDAQGKPHKLRLYSIASSRIGDNKDGKTVSLCVKRVVYKHPETGEIVRGVASNFICDLAPGDDVSITGPTGKTFLLPEDPSTNLVLIATGTGIAPFRAFLRRIYDEMDTPWQGKVWLFFGMQNSNSYLYQDELAGYTAKGDFEIVEAISREQKNAQGGRMYVQHRIAEHAAALWELISGGNTYTYICGLKGMEDGIDDAFTAAAAAKDTVWKDYRYNLKQSGFWHVETY

SEQ ID NO: 25729 - protein, 456 aa, Gloeobacter violaceus PCC 7421
MASTSGGVLRRSLGLIDGAALIVGITIGSGIFASPGRVVEQVGSVGMALAVWVVGGLLSLAGALCYAELGAALPVAGGEYAYLSRTLGRPLGFMFTWTQFFVMKTGSQAIISIVFASYLGSVLFGLDPRGAGVDGDWRIKAIAVATILLLTAVNCLGVRQGAVVQVVFTALKLLALAGIIAMGFAAFFQGGSSHFVDPFAGSIAAPSAFGLAMITCLWAYDGWNNLNYVSEELREPERNLPRAIVFGTLGVMAVYVLANVAYLSALTPAQMAGSRAVATNLAVQVIGPIGGVLVPIAVAISTFGSTNGSLITGARVFYAAARDGQFPRFFGYVSPRAVPAAALVAQGAWASMLVLPGDFGTLVDYFGFAAWLFYALAVVGLMILRAQAPDLPRPYKVRPYPLVPLVFLAASGFLIVNSLLTTPQSWFALGFMGLGLGVYFLFFRVPRVAVPTTSQP

SEQ ID NO: 25730 - protein, 437 aa, Gloeobacter violaceus PCC 7421
MATAFSALGLSESVVKALDELGFEQPTPIQLKSIPFLLDGRDLLAQAQTGTGKTAAFGLPLVDRSDPQDARVQALVLAPTRELAVQVCEAIHTYSKHSGVRVLPIYGGQPIDRQMRRLRAGAQIVVGTPGRVLDLMRRGSLDLSALRTLVLDEADQMLDMGFIEEVQTILDAAPPERQLVFFSATLPASIRKLAARHLRTPMTLTMPAEERDTPAIAQRVYFVNFKNRAQALTRVLAAEDPASALIFTRTKQAADELAEQLQDDGHRAEALHGDLNQSAREAVLGRFRRQQLNVVVATDVAARGLDIADLSHVINYDMPQDGESYIHRIGRTGRAGRTGVAISFALPTDRYRLRLIERATGSTLVPAKIPSAGEIQVRRTERLVEQLRRQLQADESDPSLVLYREVVGQLREEFDLGDIAATFLKLAQQRPGSTGSG

SEQ ID NO: 25731 - protein, 630 aa, Gloeobacter violaceus PCC 7421
MKFSWKTLLLGAIPLILIGVLLWQSLPNGATRGDSPNMATANLSYTEFLSYIRQGKVEKVDILEGGRIAIAMLPDPSIPDTAPQRFRVNLPTSDLDELYGLMRDKKVDFASLPPNNSGAFLGILGNLFFPILLLGGLFLLLRRSSNSNGPGQAMNFGKSKARFQMEAKTGVKFDDVAGIDEAKEELQEVVQFLKRPERFTAVGAKIPKGVLLVGPPGTGKTLLAKAIAGEAGVPFFSISGSEFVEMFVGVGASRVRDLFKKAKENAPCIVFIDEIDAVGRQRGAGIGGGNDEREQTLNQLLVEMDGFEGNTGIIIIAATNRPDVLDAAILRPGRFDRQITVDRPDMAGRLEILKVHSRNKKLAPDIDLDVIARRTPGFAGADLSNLLNEAAILAARRRQTEITMREIDDATDRVIAGLEKPPLVDSKKKRLIAYHEVGHALVGTLLAEHDPVQKVTIIPRGRAGGLTWFTPSEEQMLITRNQLLARITGALGGRAAEEVVFGEDEVTTGASSDLQQVSNLARQMVTRFGMSELGLLSLTGGGEVFLGRDLMQRSDMSEDVASMVDEQVRAIVKQCHRQAVSMLTEHRALMDRIVDVLLEKETVDGEELRRIVSEVVPVPMKDQALPVLSS

SEQ ID NO: 25732 - protein, 395 aa, Gloeobacter violaceus PCC 7421
MSRLATRVASLTPSLTLAIAAKAKALAAGGVDVCGLSAGEPDFDTPAPIKAAAKAALDRGETKYGPVAGQPRLRERIARKLERENGLPYTPEQILVTNGGKQGLYNAIMALIEPGDAVLIPSPYWLSYPEMVSLAGGTSVLLPTTEATGFKITPEQLEAAITPRTRLLILNSPSNPTGMVYSRPELEAITEVVLRHDLMVLSDEIYEKLVYDGARHHSIGGLGREMFARTITSGGFSKAFAMTGWRLGYLAGPTDLIGAAGAIQSHSTSNVAAYSQAGALAALEDPQVALEVERMVRVFAERRTAMYDAVAAIPGLRCARAQGAFYLLPDISATGLNSTAFCEQLLDQFHVAAVPGIAFGSDSHVRLSYATDLDTIYKGVERLGQFVRQCLAVRA

SEQ ID NO: 25733 - protein, 245 aa, Gloeobacter violaceus PCC 7421
MVGNLDNRKEKILVVDDEASIRRILETRLSMIGYDVVTAADGEEALEVFSREHPDLVVLDVMMPKLDGYGVCQELRKDSDVPIIMLTALGDVADRITGLELGADDYVVKPFSPKELEARIRSVLRRADRDTASGIPSSGVIHVGDLKIDTNKRQVYKRGERIRLTGMEFSLLELVVSRSGEPFSRSEILQEVWGYTPERHVDTRVVDVHISRLRSKLEDDPSNPELILTARGTGYLFQRITEPKE

SEQ ID NO: 25734 - protein, 163 aa, Gloeobacter violaceus PCC 7421
MIESTQPATRRGYLMKFLVAIDGSETGLSALAKALELAKPTGASLLLLTVAEQANATFWPGMLPTGEPLYQGPPLAELEQIARSVGEAALEKGAKLCEAAGVDYQTRLEFGHARDTICEVAEQEKPDILVIGSRGLGSVQRLMLGSVSDYVIHHAHCPVLVVR

SEQ ID NO: 25735 - protein, 369 aa, Gloeobacter violaceus PCC 7421
MLKSSQFRWGPIGSVAQLPIRQTIFQWSERLPAPLRRYGLLGVGLLIPALMLLTSQPSYLANVAVTVAVYMVLAMGLNIVVGLAGLLDLGYIAFFAVGAYTYAIGAPHGLSFWLALPVAALLAAGFGVLLGAPTLPLRGDYLAIVTLGFGEIIRISLNNLDWLTRGPAGISGVPAPVIPWIGAKGFTWLTLYQPLQLYFIALAFVAFVYWMTSRLKQSRVGRAWVAIREDEIAAAAMGVDTVKLKLLAFATGAALAGMVGVLFAVQLTYVSPDSFTLIESVMVVSMVVLGGMGSVPGVALGALILIVLPEALRGFSEYRLLLFGAAMILVMLIRPQGLLGERQGVPPRPTGAGLEDETPLEVEKRDLPV

SEQ ID NO: 25736 - protein, 311 aa, Gloeobacter violaceus PCC 7421
MTVASRARPFLKWAGGKTQLLDQIAERFPAVLKHGQIDRYVEPFIGGGAVFLYVAQRYAVEQFVLFDINRELILAYRTLQRAADDLIEKLEALGLHYHALDGDERRGFFYRVRERFNTLAGEIDYDHFDGRWVERTAQIIFLNRTCYNGLFRMNTKAQFNVPFGRYRNPSICMPENLKAVAALLARARIEWGDFTDCAALAGPGTFMYFDPPYRPLSKTARFTAYSAFGFDDAEQLRLAQLYRTLDAAGAKLMLSNCDPLNTDPADDFFERAYAGFEIRRVHASRLVNCRAARRGVITELLITNYPQTAGG

SEQ ID NO: 25737 - protein, 260 aa, Gloeobacter violaceus PCC 7421
MPAALRTAVLTVSLLALLQTVGAAAPLEAILQRRYLIVGVKENLYPLGFRDKRGELAGFEIDLARQFAEALFADPTAVKLVPVRNRDRLEALEKQHVDLVIANLSIGVPRARAVDFSFPYLTVNQAVLLKRESTLRTLSDLERVRLAVLSGSSNERAIRAFLPGAGLVPVASYQEGVQALETGRADGFAADGTVLGGWVQDRPAYRLLSTELDTSGLSVAMPRGLQNDSLRRWVNGQIERLLKQGWLAERARIWGLTGRS

SEQ ID NO: 25738 - protein, 545 aa, Gloeobacter violaceus PCC 7421
MNTAELLVQCLENEGVRYIFGLPGEENMQFLEALQSSSIQFVTTRHEQGAAFMADVYGRLTGRAGVCLSTLGPGATNLMTGVADANLDRAPLVAITGQVGTDRMHVDAHQYLDLVAMFAPVTKWSTHIVRPSNTPEIVRKAFKIAQAEKPGAVHIELPENIASMAAIGEPLRISDNHDIFASFSSITRAAELISQADNPLILVGNGAIRCNASAALTEFAARLNIPVANTFMGKGVIPYTHPLALWAVGLQQRDYISCGFDRADLVIAIGYDHIEYSPKKWNPMGDIPIVHVGRTAAEVDSSYIPQVEVVGDISDSLQEILSRADRQGKPDPYAIQLRDDIRAEYTEYAHDTGYPVKPQKIIYDLRQVLGSEDILISDVGAHKMWVARHYHCDRPNTCIISNGFAAMGIAIPGAVAAKLVHPHRKVVAVTGDGGFMMNMQELETALRIGTPFVTLIFNDGGYGLIEWKQQTHFNRSAFVRFGNPDFVRLAESMGLKGYRVEAGDELLPILKTALEQEVPAIIDCPVDYRENMELSQRVMQLSCAV

SEQ ID NO: 25739 - protein, 118 aa, Gloeobacter violaceus PCC 7421
MLRTVLLSKIHRATVTGACLEYMGSISLDAQLLAAAHILAFEQVHVVNLNNGARLITYAIEATAGSGAVVLNGAAARLAAPGDRVIVLAYGQGTTEELENHQPRVVHVDTGNRIVACV

SEQ ID NO: 25740 - protein, 398 aa, Gloeobacter violaceus PCC 7421
MRAKKVVLAYSGGVDTSVCIPYLKHEWGVEQVVALAADLGQGEDLEAVRQKALASGADQAIVQDAREDFVYDYAFAALQANALYEGRYPLATALARPLIARILVKCAQAVGADAVAHGCTGKGNDQVRFDVSIGALDPKLKVLAPAREWGMSREETIAYGERYGIPAPVKKKSPYSIDFNLLGRSVECGVLEDPWAEPPEEVYAMTKCVADTPDQPTYIELEFERGVPVALNGASLGGVKLVGELNRLAGENGVGRIDMVENRLVGIKSREIYECPAGVVLVLAHQALEALTLPREVTAYKRGVEDTYAQLVYNGLWYSPLRGALDGFIDFTQQRASGVVRVRLHKGTATVVGRKSPYSLYDVELATYSEGDSFDHKAAEGFIYVWGLPTRIYAQVRK

SEQ ID NO: 25741 - protein, 392 aa, Gloeobacter violaceus PCC 7421
MVPPVKHRLSERALAVVPSLIRDASRYCDELGALNLAQGLPDFAAPAFLKEAAQRAIAADRNQYCDPWGLAQLREAIAAKCTRDNALAVDPATQVTVCCGATEGINLALMALLDPGDEVVVFSPFYENYRPNLATVEAKPRYVPLSAPDWRVDEAVLERAFAGTAPRAVIVNNPANPTGKVWSRQELELVARYCERHDAYAITDEIYEYILYDGAEHISLASLAGMAERTVTVSGLSKTFCVTGWRLGYVIASEPLTAAIRRLHDFLTICAPAPMQHAAVAALEAPADYYADLRRLYQAKRDRLVTALYRSGFEPVRPAGAYYVWTDAGVLGAKNALAAAGRLAVEAGIAAVPGDCFLPPGHPNCNLRFCYAKSDETLAAAVERLDRWSGHG

SEQ ID NO: 25742 - protein, 596 aa, Gloeobacter violaceus PCC 7421
MQATGAFAVVDSLCCQGVRHIFGYPGGAILPVYDEIYKAEAEGRFQHFLVRHEQGAAHAADGYARATGRVGVCVATSGPGATNLVTGIATAHMDSVPMVAITGQVPRRSIGSDAFQEADILGITLPIVKHSYVIRNTGDIGRIFSEAFHIASSGRPGPVLIDVPKDVGQESFEYTPVQTTPKIPGYRPTTRGNPRQVAAAAKLILEADRPLLYVGGGAISAGAHAELMRLAELGLIPTTTTLMGKGAFPEDHPLAVGMLGMHGTAYANFAVTECDLLIAVGARFDDRVTGKLDEFAARARVIHIDIDPAEVGKNRGPEVPIVGDVKLVLQDLIKKLIEFQPRTRAWLERIERWKAEYPLEVPSDGTRLYPQEVMVAFRELATDAYYTTDVGQHQMWAAQFLKNGPRRWISSGGLGTMGYGFPAAIGVQVALPDEDVVCISGDASFQMNLQEIGTAVQYDLPVKAAIVNNGWQGMVRQWQEFFYDRRFSHSHMKPSMPDFVKLAEAFGAEGMVIDHPDQLKEGIEALMERDRPVICDFHVVPDANCYPMVPPGKANHQMVGLPRPLPMQPLELIYCPNCGTKNTTANRFCPECGTKL

SEQ ID NO: 25743 - protein, 222 aa, Gloeobacter violaceus PCC 7421
MSWDDPFASLFRQAESGSQFPPVVEHYDRGKTIFFPGDPAVRVYFLKRGAVKLSRVYEHGEEITVALLRENSVFGVLSLITGHRSDRFYHAVAFTPVDLIAVGVEQMERIIQEDPDISRLLFQGLASRILQTEMMIETLAHRDMGSRLESFLLILCRDFGLPTKDGVTIDLRLSHQAIAEAIGSTRVTITRLLGDLRKKKLISISKKRITVHDPIKLGQRFA

SEQ ID NO: 25744 - protein, 112 aa, Gloeobacter violaceus PCC 7421
MSQSTHEKIDSLVKNNKVLIFMKGTPQFPQCGFSAASVQILSSLGHPFEAVNVLDDFEIRQGIKDYANWPTIPQVYVDGEFVGGCDILIEMHNRGELKPLLDQAFEGEGAKA

SEQ ID NO: 25745 - protein, 467 aa, Gloeobacter violaceus PCC 7421
METTPLWDALRAVALASGTGFHTPGHNGGAGLPPALKHWPDWGRLDLTELAGLDNLHAPTGVIAHAQRLAAAVWGAERSWFLVNGATAGIQAMLLAALGQGQKVLVPRNCHQSIVHALVLSGAVPVFVQPVWDRRWQLAHGLTATTVEAALAVHPDIRAVVAVHPTYFGAVGETRAIARVAHAKGIALLVDAAHGAHLRFHPDLPECALAAGADLVVHSAHKTLPALTQAALLHQQGTLVDPARVEMALNLLQTTSPSYLLMASLDLARAHMVRHGREQLGHILEMAHRLRHKLPFAVLGGDGTPGFDPTRLVIDVGEKGWSGHAAETWLEQNAQVRAEMATHRHLVFILNSAHTEFDGEQLQASLLALATAQPTGATPPDLLPPPLPELRYSPREAFGRSHRSVPLAAAAGLTSAADVCTYPPGVPVLLPGEVVAAQSVEYLGAAIDTGAETVGIDGRGHIRVTID

SEQ ID NO: 25746 - protein, 290 aa, Gloeobacter violaceus PCC 7421
MSKAAVLGMGAMGSRMAAALLKAGHQVTVWNRNSQKTAPLAEMGAKAAQTPRAAVEEVDFAVCMVRDDAASRFVWLDFETGALAGLPADAVAIESSTLSVAGVQELAEHFQARGKTLLDAPVSGSRPQAEAGQLIFLVGGDAGAVAKAGPILNAMGGTVHHAGPLGNGAAVKLAINALLGVQVAAMGELIALLRHCGIDEVRAVEIIGSTSVCSPAARGAASAMAVGNYAPLFPSALMEKDLGYLQNMAAAHRARAPLTQAARSVFGEAMSRGYGEDNMTGVAQLYWQGP

SEQ ID NO: 25747 - protein, 364 aa, Gloeobacter violaceus PCC 7421
MHIGVPKEIKDQEFRVGLTPAAVRALSDQGHSVAIEARAGEGSGFTDRDYLEAGARIVETAAEVYAQPMIVKVKEPLPLEYALLGKGQILFTYLHLAASRELTEALLNSGATCIAYETVALADGRLPLLTPMSAIAGRLAVQFGSRFLEKQQGGRGVLLGGVPGVAAGHVAILGGGIVGTEAARIAVGMGARVTILDVNLDRLAYLEDLFGSRVELLFSTRRTIEQMVPGADLLIGAVLVTGRRAPKLVSREVVGRMNPGSVIVDVAVDQGGCVETLRPTSHSEPVYLEAGVVHYGVPNMPGAVPWTATQALNNATLPYVMKLAELGYPQATERDPALALGINIAHSRLIHPAVQQVFPDLIHA

SEQ ID NO: 25748 - protein, 125 aa, Gloeobacter violaceus PCC 7421
MLRTVLLGKIHRATVTGACLEYVGSISVDSRLLAAAGILPHEQVHVVNLNNGARLVTYAIEASEGSGAVVLNGAAARLAAAGDQVIVLAYGQGTAVELEHHQPQVVYVDAQNRIVSVHRSVEHAG

SEQ ID NO: 25749 - protein, 638 aa, Gloeobacter violaceus PCC 7421
MGKVVGIDLGTTNSVVAVLEGGQPTVIANAEGSRTTPSVVAFTKNHDRLVGQLARRQAVLNPENTFYSVKRFIGRKYDEITDEAKQVAYRVVRDGSNVKLHSTNEDKDFAPEEISALVLRKLVDDASKYLGEKITQAVITVPAYFNDSQRQATKDAGRIAGIEVLRIINEPTAAALAYGLDKKANETILVFDLGGGTFDVSILEVGDGVFEVKSTSGDTHLGGDDFDRRIVDYLADEFKKLEGVDLRTDRQALQRLTEAAEKAKIELSGVTQTQINLPFITAGADGAKHLDMSLTRAKFESLCADLLRRVEKPVEQALRDAKLSKENIDEVVLVGGSTRIPAVQELVKRIIGKDPNQSVNPDEVVAVGAAIQAGVLSGEVRDVVLLDVTPLSLGVETLGGVATPIIPRNTTIPTRKSETFSTAADGQTSVEIHVIQGERSMAGDNKSLGRFRLDGIPPAPRGVPQVEVTFDIDANGILSVTAKDKASGKAQTISITGASTLSKDDVAKMVNEAESFAGEDKKRREAVDLKNEADSLAYQAERQLTEFGDKVDSSDKSKIEGLIKDLREALSREDMDKVASLKADLQQAVYDLSSKLYQQSAPSGAAAGPDEGAPSGSGGTSGTRGGDDVIDAEFTETK

SEQ ID NO: 25750 - protein, 335 aa, Gloeobacter violaceus PCC 7421
MQFIDRSEIEVEGGRGGDGMVAYRREKYVPAGGPAGGDGGHGGAVVLEATANLQTLLDFKYRHRFEADDGTKGGPKNLTGAKGKDLVIAVPCGTVVQDAVTGETIGDLTEPGQRLVVAVGGRGGHGNTHFASNQNRAPDYATEGRLGQQRKLLLELKLLAEVGIIGLPNAGKSTLISVLSAARPRIADYPFTTLVPNLGVVRKVTGDGVVFADIPGLIEGAHQGVGLGHEFLRHIERTRVLVQLIALDSADPLADYRTVIDELGRYGRELLHKSRIVALNKADVCLPEEAEHWRRILSTETGEPVLVISAAARSNLDALLARVWQVLEAPQGVTT

SEQ ID NO: 25751 - protein, 425 aa, Gloeobacter violaceus PCC 7421
MITRAIYMDNNATTPVDPVVLEVMLPYFTEKFGNAASRNHAYGWEAEEAVENARAQIAAAVGADPKEIIFTSGATESNNLALKGVAEVYREKGNHIITVVTEHKCILDSAKYLEQHGCRITYLPVKPDGLIDLAELEAAITPETVLISVMFANNEIGVIQPVAEIAKIAKSHGVLFHTDAAQALGKVPIDVQALGIDLMSMSGHKLYGPKGIGALYVRRKNPRVRLEAQLHGGGHERGMRSGTLYVPLIVGMGAAAERAVQNLEVEAARTRKLRERLLEQITGRLSEVYVNGSLEHRLSGNLNLSFAFVEGEALLMGLNDTVALSSGSACTSASLEPSYVLKALGVGDELAHSSLRFGIGRFNTEEDIDRTSAKIVEVVNRLREMSPLWEMHQEGIDLKQMAWPPTDFLLPTAHPERIPGHAVQR

SEQ ID NO: 25752 - protein, 304 aa, Gloeobacter violaceus PCC 7421
MIIPEAPPGFRSGFVAIVGRPNVGKSTLVNRLVGEKVAIVSPTAQTTRNRLRGILTLPTAQIILVDTPGIHKPQHRLGEVLVHNARSAAGSADGIVLVVDGSVEAGAGDRFIAESLKGSKAPVWPVLNKVDRRSRNQVEPIRESYRKLFDPELVFYEISALKGSGIEPLMESIISSLPEGPYYYPPDLFTDQPERFIMGELVREQVLLATREEVPHSVAVVIDKVEEGETLTRVLATIMVERDSQKIILIGKGGQMLKAIGTGARHQMQKLVGHQIYLQLFVKVKERWRQSDSTLRDLGYRREQ

SEQ ID NO: 25753 - protein, 330 aa, Photorhabdus luminescens subsp. laumondii TTO1
MKKSFIEKQQQISFVKSFFSRLLESKLGLIEVQGPILSCLGDGIQDNLSGHEKAVQVKVKTLPDSTFEVVHSLAKWKRRTLGRFGFQPEQGLYTHMKALRPDEDRLTPIHSVYVDQWDWEKVMEDGQRSLAYLKQTVGKIYEAIKETEKAVNKEFGLAPFLPDQIHFVHSETLLSRYPDLDAKGRERAIAKELGAVFLIGIGAKLSDGQSHDVRAPDYDDWTTPNSDGFVGLNGDIIVWNPVLEDAFEISSMGIRVDAEALERQLALTSDEERLQYDWHQALLKGDMPQSIGGGIGQSRLVMLLLQMKHIGQVQCSIWSPEVRETVEDML

SEQ ID NO: 25754 - protein, 270 aa, Photorhabdus luminescens subsp. laumondii TTO1
MKKKRAFLKWAGGKYPLVDDIKRHLPAGSRLIEPFVGAGSVFLNTDYDSYILADINSDLINLYNTVKLRADEFIVHTRPLFTQEYNTAEHFYQLREQFNQSTDPFHRSVLFLYLNRHCYNGLCRYNSHGKFNVPFGRYKKPYFPEEELHWFAEKAQNATFICEHYQHTLNEAHKDSVIYCDPPYAPLSATANFTAYHTNSFNIADQENLANIAFKLSSERAIPVLISNHDTPMTRKWYYQASLHIVKARRTISRNILARSKVDELLALYR

SEQ ID NO: 25755 - protein, 403 aa, Photorhabdus luminescens subsp. laumondii TTO1
MMREVFICDAIRTPIGRYGGVLSKIRADDLGAVPLKYFLQKYQDLDWSAVDEVIYGCANQAGEDNRNVARMSALLAGLPVTVAATTVNRLCGSGMDAISIGARAIKAGEADLIIAGGVESMSRAPFVMGKAETPFSREANGLHDTTIGWRFINPQMAELYGVDSMPETAENVAETFGISRQDQDLFAFRSQQKAKAAQLSGRFSLEIVSVSVPQKRGEFLVVDQDEHLRPETTLEGLAKLRAPFRAGGSVTAGNASGVNDGACALILASAEAVQRHGLTPRGKVIAAATAGVEPRIMGFGPAPATQKLLLKTGISLDEVDLLELNEAFASQALATLRALGVRDDDERVNPNGGAIALGHPLGMSGARLVTTALLELSLRQKRYAICTMCIGVGQGIAILIERV

SEQ ID NO: 25756 - protein, 501 aa, Photorhabdus luminescens subsp. laumondii TTO1
MSSEFCFVKYGFDKNLNKLINEFQFDELSTGTILFRSTTKVSKFKSERYTAFLIGNIYNISTIRSILGKIEGRSSVLSDVEILLLSRDKFGNSIISIAEGDYCLFIEDKKGNIEVITESRGLNLVNLVQTDLIWITNSLKIVGKVEGDKAFDFKPESEVIKNSLKPDNFSPIRNVSRLKPGTINKLTFDEQRYLHLEVEYVISPVEENSFDIKESVLLEIIDSDLRNSISRLSKNNETIGVPLSGGLDSSLVTALASKYFDKVKTWSIGTELSNEFEFSKIVSDYLGTEHEVKILSEDEVISGVVKAIYYNEIFDGLSSEIQSGLFNVYELAKGKVNSLITGYGSDLLFGGILDPEKSYIEPNKILSEQVYRTKWTGEFSTHGAGNYGLNVYHPFWTNNLISLCHNLDPYFKIRDNEVKNILREYANSINILPKEIVWRKKIGIHEGSSVNKSFATMIGTEVNNYQDKTRFSYSIYKEFLTGRLSIEEANSTKLCEIIRRN

SEQ ID NO: 25757 - protein, 278 aa, Photorhabdus luminescens subsp. laumondii TTO1
MKSRVVITALLAGLTLVTGAAKADKLDDIKKTGAVRIAVFDSNPPFGFIDPQTKKLAGYDVDIANAIANDLGVKLELRPTNPANRLPLLASKKVDLIAANFTVTHERAKQVDFSIPYFATGQKFIARKGILKSPEDIKNLRIGADKGTVQEITLREHYPTAKVISYDDTPLAFAALRNGNVQAITQDDAKLVGLLANVPEAQKAEFEISPFSITREYQAVAAAKGQERLVEAVNQTLLKLEKEGEAAEIYNRWFGPETKSAQPRGDFKFAPLEQQTQS

SEQ ID NO: 25758 - protein, 490 aa, Photorhabdus luminescens subsp. laumondii TTO1
MQQGKIWIVDDDSSIRWVLERALSNAGMECTSFADADSALTALAQNTPDVLISDIRMPGMNGLNLLNNIKQSNPLLPVIIMTAHSDLDAAVNAYQQGAFDYLPKPFDIDEAVALLERALSHSRDQNQSIKSPQVVTPVSDMIGEAPAMQDVYRIIGRLSRSSISVLINGESGTGKELVAHALHRHSPRANEPFIALNMAAIPKDLIESELFGHEKGAFTGANQVRHGRFEQANRGSLFLDEIGDMPLDIQTRLLRVLAEGQFYRVGGYAPVKVDVRIIAATHQDLERLVQKGKFREDLYHRLNVIRMQLPPLRDRVEDIPRLTRHFLQQTAKELGVETKILHPDAEIALMRLPWPGNVRQLENICRWLTVMAASQEVLVQDLPSELFETHHNTESGMTTSVNTVSINTVPANTTPTNTIPKNWSQLLAQWATTALEHGQQDLLSEALPLLERTLLDCALKHTKGHKQEAARLLGWGRNTITRKLKELGLE

SEQ ID NO: 25759 - protein, 402 aa, Photorhabdus luminescens subsp. laumondii TTO1
MYHLDVYGTLVASALVLLLGRKLVQSVPFLEKYTIPEPVAGGLLVALILLAVKQTTGWEINFDLSLKDPLMLTFFATIGLNANLSSLKAGGKVLFTFVFVVVGLLLVQNTVGIALAELLGLDPLMGLLAGSVTLSGGHGTGAAWGKLFSERYGFENATEVAMACATFGLVLGGLIGGPVARFLVRNTKTPGLRGDDTEVPTAFEKPYTGRMITALVMLETIALIAICLMAGNFVSELLQGTWFELPTFVCVLFIGVILSNSLSVLGFYRVFDRAVSVLGNVSLSLFLAMALMSLKLWQMASLALPMLVILTIQAIVMALYAIFVTYRVMGKNYDAAVLAAGHCGFGLGATPTAIANMQAITDRFGPSHVAFLVVPMVGAFFIDIVNAIVIKLYLLLPVFPAV

SEQ ID NO: 25760 - protein, 881 aa, Photorhabdus luminescens subsp. laumondii TTO1
MIQIDLPTLVNRLNPMTRHALEAAAAQCVSQQQPEITVSQLLLQMINTPLSDVRAIFNQAEVDSDLLKEQLDQMIPHHQAMVQAYPNFSPMLVEWLQDSWLLASTEMQHQELRSGVMLMTLLFSPLRYLTPQSARLLSGINRELLRQNFTQWTAGSAEQPVVENDKNGQNKAAAGSDSLLARFTQNMTEQARQGKLDPVLCRDKEIDLMIDILCRRRKNNPIVVGEAGVGKSALIEGLALRIIDNRVPEKLHNSELMTLDLGALQAGAAVKGEFEKRFKGIMNEINQSSVPIILFIDEAHTLIGAGNQQGGLDISNLLKPALARGELKTIAATTWGEYKKYFEKDAALSRRFQLIKVAEPTAEEAIIIMRGLRAIYEQSHGVLIDDEALKASAVLSDRYLSGRQLPDKAIDVLDTACARVAINLTSPPRQISALKNQLHQQQMESDVLAREQRMGLNQHTDRLDELRQQQQETTEKLAALEASWQQQQQLVQQIIELRRQLLTDETEFTNETKQSETSAEMTTEELIAQLAELNEQLEQLQQQQTLISPHVDKNQIATVIAEWTGVPLNRLSQSELSVVTELPMHLGQSIKGQDLAIQCLHQHLLTARADLRRPGRPLGAFLLVGPSGVGKTETVLQIAELMFGGRQYLTTINMSEFQEKHTVSRLIGSPPGYVGYGEGGVLTEAIRQKPYSVVLLDEVEKAHPDVLNLFYQAFDKGELADGEGRVIDCKNVVFFLTSNLGYQTIVDNADKPAEMHDRLYPELAAFFKPALLARMEVVPYLPLGHDTLKTIIQGKLARLDNLLRQRFNADVTLSDEVVEEILQRATRTENGARMLESIIDGALLPPLSLLLLQKMAAGKQIRTIQLTVNDHQFNAVVEEIP

SEQ ID NO: 25761 - protein, 636 aa, Photorhabdus luminescens subsp. laumondii TTO1
MGKIIGIDLGTTNSCVAIMDGTTARVLENSEGDRTTPSIIAYTQDGETLVGQPAKRQAVTNPQNTLFAIKRLIGRRFQDEEAQRDVAIMPYKIIAADNGDAWLEVKDQKMAPPQVSAEVLKKMKKTAEDYLGEPVTEAVITVPAYFNDAQRQATKDAGRIAGLEVKRIINEPTAAALAYGLDREVGNRTIAVYDLGGGTFDISIIEIDEVDGEKTYEVLATNGDTHLGGEDFDSRMINYLVDEFKKDQGIDLRNDPLAMQRLKEAAEKAKIELSSAQQTDVNLPYITADATGPKHMNIKVTRAKLESLVEDLVKRSMEPVRVALQDAGLSVSDVNDVILVGGQTRMPMVQKVVADFFGKEPRKDVNPDEAVAMGAAVQGGVLAGDVKDVLLLDVTPLSLGIETMGGVMTSLIVKNTTIPTKHSQVFSTAEDNQSAVTIHVLQGERKRAGDNKSLGQFNLDGIQAAPRGMPQIDVTFDIDADGILHVSAKDKNSGREQQITIKASSGLNEEEIQRMVRDAEANAESDRKFEELVQVRNQADQLVHGTRKQVEEAGDKLPAEDKTAIESAVAELEKVAKGEDKADIEAKIQALVQASAKLLEIAQQQAQAGATADAGDSAKKDDDVVDAEFEEVKDKK

SEQ ID NO: 25762 - protein, 188 aa, Photorhabdus luminescens subsp. laumondii TTO1
MTQGIPAVFLDRDGTINIDHGYVHEIDDFQFIDGVIEAMIELKKMGYALVLVTNQSGIARGIFDEEQFLQLTEWMDWSLADRGVDLDGIYYCPHHPDATEEQYKKSCDCRKPQPGMLLDAQRELSIDMTASFMIGDKLEDMQAATLAKIGTKVLVRTGKPVNTEAEQAANLIINSLADLPKAIKGIKK

SEQ ID NO: 25763 - protein, 461 aa, Photorhabdus luminescens subsp. laumondii TTO1
MQNNETQLKRGLTGRHIRFMALGSAIGTGLFYGSAAAIQQAGPAVLLAYLIGGAAVFMVMRALGEMAVHHPVAGSFSHYASHYLGPLAGFLTGWNYIFEMLIVCLADVTAFGFYMKLWFPHVEQWIWVLSIVCFIGAINLCHVKIFGEMEFWLSIVKVTAIIAMIIGGMIIMIYGFGQETDHATGIASLWEYGGFMPNGISGVIASLAIVMFAFGGIEVIGITASETKNPEKTIPKAINAVPFRILLFYVLTLFILMCIYPWNQIGQEGSPFVQIFSSLGINSAANILNIVVITAAISAINSDIFGAGRMMYGMAQEGQAPKSFTKLSRNGVPWMTVIVMSAVLLIGVILNYMIPEEIFVIIASIATFATVWVWLMILLSQVAMRRKMSKEEVKTLKFPVPMWPIAPALTIIFMVFVIVLLGYFEKTRIALIVGITWVILLSITYFFSKKKNISQIHQINK

SEQ ID NO: 25764 - protein, 126 aa, Photorhabdus luminescens subsp. laumondii TTO1
MLRTMLQGKLHRVKVTQADLHYEGSCAMDQNFMDAAGILEYEAIDIYNVDNGERFSTYAIAAERGSRIISVNGAAARRAAVGDKLIICSYVQIPNEDARHHKPNIAYFDGDNIMRRIAKAVPVQVA

SEQ ID NO: 25765 - protein, 393 aa, Photorhabdus luminescens subsp. laumondii TTO1
MYNLTRPIYLDNNATTPLDPDVLQTMMPYFTSAYGNAASNHHAFGWKAMEAVDNARKLISTSINATSHSDIIFTSGSTESNNLAIAGLQHRGKRGHVITSTIEHKAVLDCCSRLEAMGTEVTYLPPQSDGIVSPDLISRAIRDDTYLVSIMAANNEIGSIQKIEEIGAICKEHDIPLHTDATQALGKIKFDVQRMNISLASFSAHKIYGPKGVGALYIDSRNKNITLAPLIVGGGHERGLRSGTLNVPGIVGFGRAVELSVKNLPDESMRLRYLRDLLRSYIIENVADVRINGHLTECLPGLLNVSFNGLDADSLLLELSEVALSSGSACTSANRAPSHVLKAIGVSDTQAQASVRFGLGRFNNEDEIRYVCLRLEKAVNKLRSMVPKPFGVL

SEQ ID NO: 25766 - protein, 408 aa, Photorhabdus luminescens subsp. laumondii TTO1
MDIIILGVVMFTLIVLVLTALILFAKSKLVNTGNIRVEVNGDPEKSFTAPAGDKLLNMLSSQGIFVSSACGGGGSCGQCRVKIKDGGGDILPTELSHISKREAKEGCRLACQVNVKQNLKIKLPEEIFGVKKWECEVISNDNKATFIKELKLKIPDGDVVPFRAGGYIQIEAQPHIARYEDYDVPKEYREDWDKFNLFRFVSEVKEPTVRAYSMANYPEEHGIIMLNVRIATPPPKNSEAPPGIMSSYIWSLKPGDKVTISGPFGEFFAKDTDAEMIFIGGGAGMAPMRSHIFDQLNRLNSKRKISFWYGARSKREMFYTEDFDQLAAENENFTWNVALSDALPEDNWDGYTGFIHNVLYENYLRDHPAPEDCEFYMCGPPVMNAAVIKMLKDLGVEDENIMLDDFGG

SEQ ID NO: 25767 - protein, 857 aa, Photorhabdus luminescens subsp. laumondii TTO1
MRLDRLTNKFQLALADAQSFALGHDNQFIEPIHLMSSLLKQEGGSIRPLLTSIGIDAGRFSNQLELALERLPRVQGIGGDVQPSNDLVRHLNLCDKLAQKAGDNFISSELFVLAALEERGTLSDILKAVGATKEKITKAIEQMRGGEKVDDQGAEDQRQALKKYTIDLTERAEQGKLDPVIGRDEEIRRTIQVLQRRTKNNPVLIGEPGVGKTAIVEGLAQRIINGEVPEGLKNKRVLSLDMGALLAGAKYRGEFEERLKGVLNDLAKQEGNVILFIDELHTMVGAGKADGAMDAGNMLKPALARGELHCVGATTLDEYRQYIEKDAALERRFQKVYVAEPSVEDTIAILRGLKERYELHHHVQITDPAIVAAATLSHRYISDRMLPDKAIDLIDEAGASLRMQMDSKPEALDRLERRVIQLKLEQQALKKESDDASKKRLEMLNEELLVKEREYSELEEEWKAEKAALTGTQHIKAELENARISLEQARRSGDLAKMSEIQYGKIPGLEKQLAAATQAESKHMKLLRNKVTDAEIADILARWTGIPVARMLESEKDKLLRMEQELHKRVIGQDEAVNAISNAIRRSRAGLADPNRPIGSFLFLGPTGVGKTELCKALANFLFDSDDAMVRIDMSEFMEKHAVSRLVGAPPGYVGYEEGGYLTEAVRRRPYSVILLDEVEKAHSDVFNILLQVLDDGRLTDGQGRTVDFRNTVVIMTSNLGSDMIQERFGSLNYDEMKDIVMGIVSHNFRPEFINRIDEAVVFHPLGRRHLSAIADIQLQRLYKRLEERGYQVTITQQALEILAEAGFDPVYGARPLKRAIQQEIENPLAQKILSGQLLPGKPVTLDVENSHIVAKQ

SEQ ID NO: 25768 - protein, 555 aa, Photorhabdus luminescens subsp. laumondii TTO1
MSEADARPTNFIRQIIDEDLATGKHTSVHTRFPPEPNGYLHIGHAKSICLNFGVAKDYQGQCNLRFDDTNPVKEDVEYVDSIKNDVQWLGFEWSGDIRYSSNYFDTLYQYAIELINKGLAYVDQLSPEEIREYRGTLKEPGKNSPYRDRTIEENLVLFEKMRAGEFDEGKACLRAKIDMASPFIVMRDPVLYRIKFAEHHQCGNKWCIYPMYDFTHCISDALEGITHSLCTLEFQDNRRLYDWVLENITIDCRPRQYEFSRLNLEYTVMSKRKLNLLVADKIVEGWDDPRMPTISGLRRRGYTAASIREFCRRIGVTKQDNNVEMAALESCIRDDLNENAPRAMAVLDPVRLVIENMPEGEQILSMPNHPNKPEMGSREVPFSREIYIDRADFREEANRQYKRLVLGKEVRLRNAYIIKAERVEKDADDNITTIYCSYDDQTLNKDPADGRKVKGVIHWVSAVHAVAAEFRLYDRLFCVPNPGAEDDFLATINPESLVIRQGFVEPSLADAKSEQTYQFEREGYFCADSCHSSAENLVFNRTAGLRDTWAKISQD

SEQ ID NO: 25769 - protein, 434 aa, Photorhabdus luminescens subsp. laumondii TTO1
MEHFLFMNFKSLGLSADILRAVEEQGYSAPTPIQQQAIPVVLAGKDLLASAQTGTGKTAGFTLPMLQRLNDSPIQMKGRRPVRALILTPTRELAAQVGENVRDYSKYLRLRSLVVFGGVSINPQMMKLRGGVDILVATPGRLLDLEHQNAVDLSRVEILVLDEADRMLDMGFIHDIRRVLNKLPPKRQNLLFSATFSDDIKSLASKLLRDPVSVEVARRNSASEQIEQLVHFVDKKRKGELLSFLIGSRNWQQVLVFTRTKHGANRLAEQLNKDGVTASAIHGNKSQGARTRALADFKDGRIRVLVATDIAARGLDIDQLPYVVNFELPNVAEDYVHRIGRTGRADATGQALSLVCVDEHKLLKDIERLLKREIPRMAIPGYEPDPTIKAEPIQNGRQARGDNRQKNSHRRSGAPSRQRSSSHDVSHKSPNVRG

SEQ ID NO: 25770 - protein, 355 aa, Photorhabdus luminescens subsp. laumondii TTO1
MNQKLLFIDRDGTLITEPPTDFQVDRLDKLALETEVIPALLALQKSGFRLIMITNQDGLGTDSFPLEQFEPPHNLMMQIFSSQGIHFDEVLICPHKPEENCHCRKPKIKLVEKYLTEGLMDTANSYVIGDRETDLQLAKNMGIQGLHYHPKNLGWFAICEQLTRQDRHAHVQRITKETSINIDVWLDHEGSSDINTGVGFFDHMLDQIATHGGFRMHVQVKGDLCIDDHHTVEDTGLALGEALKLALGDKRGICRFGFVLPMDECLARCALDISGRPHLEYKAEFKHQRVGDLSTEMIEHFFRSLSYAMACTLHLKTKGSNDHHRAESLFKAFGRTLRQAIRVEGDTLPSSKGVL

SEQ ID NO: 25771 - protein, 285 aa, Photorhabdus luminescens subsp. laumondii TTO1
MKADTPFNLLPPAIMTQIANDIGVYKTTKPVAITYLSAITAGIFISIAFVFYITATTGTTSVPYGLAKLVGGICFSLGLMLVVVCGADLFTSTVLTIISKATGRITWYQMMINWINVYFGNLIGALFFVAIIWFAGQYHVADGLWGLNVLQTANHKIHHSFIEALFLGILANLMVCLAVWMSYAGRSLMDKIFVMILPVSMFVASGFEHSIANMFLIPLSIAIKHFAPTEFWINVGATPEQFSQLTISHFITNNLIPVTIGNIIGGAILVGLTYWSIYLRSEQKH

SEQ ID NO: 25772 - protein, 581 aa, Photorhabdus luminescens subsp. laumondii TTO1
MNDKDLSTWQTFCRLWPIVSPFRIGLIVAAVALILNAAGDTLMLSLLKPLLDEGFGKASSDVLKWMPLIVIALMIMRGLSGFVSSYCISWVSGKVVMQMRRRLFSHMMGMPVSFFDQQSTGTLLSRITYDSEQVASSSSSALITVVREGASIIGLFVLMFYYSWQLSLILIVIAPIVSLVIRVVSKRFRSISKNMQNSMGQVTASAEQMLKGHKEVLIFGGQNVETERFNKVSNHMRQQGMKMVSASSISDPIIQLIASFALAFVLYAASFPDIMETLTAGKITVVFSSMIALMRPLKSLTNVNAQFQRGMAACQTLFSILDMEQEKDDGKLELKKANGDIEFRNVTFCYPTKELPALQNISMYIPAGKIVALVGRSGSGKSTIANLLTRFYDVNEGNIFLDGHDLREYKLSSLRGQVALVSQNVHLFNDTVANNIAYASENRYSREEIEKAAEMAYAMDFIRKLDNGLDTMIGENGVLLSGGQRQRIAIARALLRDSPVLILDEATSALDTESERAIQAALDELQKNRTSLVIAHRLSTIENADEILVVEDGHIVERGDHLSLLERNGVYSQLHRMQFGQ

SEQ ID NO: 25773 - protein, 468 aa, Photorhabdus luminescens subsp. laumondii TTO1
MAENIHTSLSTKTGETQLQRNLSNRHIQLIAIGGAIGTGLFMGSGKTISLAGPSIIFVYMIIGFMLFFVMRAMGELLLSNLNYKSFSDFSADLLGPWAGFFVGWTYWFCWVITGIADVVAITSYISYWQPDFPQWITSLLCVSLLLSLNLATVKLFGEMEFWFAMIKIVAIIALIATGAVLIGMHFQSPAGHTASLANIWNDGGFFPKGLSGFFAGFQIAIFAFVGIELVGTAAAETKDPMKSLPRAINAIPIRIITFYVLALIIIMSVTPWRSIIADKSPFVELFVLIGLPAAASIVNFVVLTSAASSANSGVFSTSRMLFGLAKEGDAPQQFSRLSRRSVPASGLIFTCLCLSCGVVLIYLIPDVMHVFTLVTTVSAILFMFIWSMILCSYLVYRKRRPALHKASTYKMPLGIIMSWVCLTFFAFVLILLTLRDDTRQALIITPVWFLILIIGFQIVKKRRTRLYS

SEQ ID NO: 25774 - protein, 315 aa, Photorhabdus luminescens subsp. laumondii TTO1
MPDMKLFAGNAIPELAQRVANRLYTNLGDAAVGRFSDGEVSVQVNENVRGGDIFIIQSTCAPTNDNLMELVVMVDALRRASAGRITAVIPYFGYARQDRRVRSARVPITAKVVADFLSSVGVDRVLTVDLHAEQIQGFFDVPVDNVFGSPILLEDMLQKELENPIVVSPDIGGVVRARAIAKLLNDTDMAIIDKRRPRANVSQVMHIIGDVAGRDCVLVDDMIDTGGTLCKAAEALKERGAKRVFAYATHPIFSGNAVDNIKNSVIDEVVVCDTIPLSAEIKALNKVRTLTLSGMLAEAIRRISNEESISAMFEH

SEQ ID NO: 25775 - protein, 509 aa, Photorhabdus luminescens subsp. laumondii TTO1
MRIGVPKERLANEARVAATPNTVEHLLKLGFNVVVESGAGHLASFEDSAYQQVGAEITDRHNIWRSDIILKVNAPEDDEIALMREGSTLVSFVWPAQNPELLQKLSDRKVTVLAMDSVPRISRAQSLDALSSMANIAGYRAIVEAAHEFGRFFTGQITAAGKVPPAKVMIIGAGVAGLAAVGAAGSLGAVVRAFDTRPEVKEQVQSMGAEFLELNFEEEAGSGDGYAKVMSEAFIKAEMALFAEQAKEVDIIVTTALIPGKPAPRLITKEMVESMKPGSVIVDLAAQTGGNCELTQADKLVITANGVKIIGYTDLPSRLPTQSSQLYGTNLVNLLKLLCKEKNGEINIDFDDVVIRGVTVVKEGEMTWPAPPIQVSAQPQAKPASIKAEKPAAKPVSPWLKYGLLALAVILFGWLANVAPKEFLSHFTVFALACVVGYYVVWNVSHALHTPLMSVTNAISGIIVVGALLQIGDGGWVSFFSFIAVLIASINIFGGFTVTQRMLKMFRKD

SEQ ID NO: 25776 - protein, 533 aa, Photorhabdus luminescens subsp. laumondii TTO1
MALYKASSRPKSDSGQGKFKKQLTLTDLTFIGLGAIFGSGWLFAASHVSVIAGPAGIFSWLIGGIAVLLLGIVYCELGAALPKSGGIIRYPVFSHGELMGYLMGSITLIAFSSLIAIEVVAARQYAAAWFPFLSQPGSGDPTLTGWLVQFILLAFFFYLNYNSVKTFAKSNNIISIFKFIVPLLVIIILFNYFNPSNLQVHGFSPFGISGIEAAVSTGGIIFAYLGLTPIISVAGEVEKPQKTIPIALILSISLSTVIYVLLQLAFLGGIPSDLLFSGWNNIGQYFSLPFRDIALILGVGWLAFLVVCDAVISPSGTGNIYMNATPRVVYGWAKSGTLFNVFTHVDEKSGIPRPALWLTFILSVFWTLPFPSWEKLISVVSAALILSYALAPVTASALRRNAKEIKRPFYVKWFAIIGPLSFIISAFIVYWSGWKTVSWLLGLQIILFFIYLLFKNKVPIGKVSLRQQITSALWLISFYSAMIILSYLGTFGGKGIIPAPWDIVAVAVISLIAFYWGTFSALPNAILPTEDED

SEQ ID NO: 25777 - protein, 1148 aa, Photorhabdus luminescens subsp. laumondii TTO1
MKSEFKEGYCTLCRSRCGTVNEVRNDTLIKIQQNPKHPTGNAMCMKGKAAPELAHSPNRILHPLRRTNPKGDADPGWEKITWDEALTYVAEKLAFYKAESGAESVAFSVTSPSGTPLSDSLEWIERFIRNFGSPNVCYSTEVCNWHKDEAHKFTFGCSIPVADYRNAELIILWGHNPTNTWLAQAEALGAGRNAGAKLIVVDPRHTALAKESDNWLNINPGTDAALALGLINIIINRRGYDQAFVARWTNASLLVRNDNGLFLREKDINISAKKNRYVVWNNITQSPLPYDIHENVPCDENDHYALLGEFSINSAEDVNKKIPCKSAFQRLLNECQPYTPEYVEKITGITKEKLLYAADLIISSKRIAYHSWTGVAQHTNATQSERAIAVLYALTGCFDTQGSNRVYNKHPVNPVNARRLMPKEQQEKALGFKERPLGPPLDGWITSHDLYQAILHKRPYPIRAMMAFGTNMLSSHADTKIGIDALKQLEFHVHCDLFETPTAHYADILLPVNTPWEREGLRVGFEISAKAEELVQLRQKMISPRGESRSDNEIVFDLACRLGMNDLFFNGSVEAGWNYILEPIGLTVEALREKPAGISMPLIQHDRKYAGIDPVKNTVKGFDTETGVVEIYSEKLWRHGYPPLPIYDEPKENLNSESHFPYRLTSVKNGFYCHSQQRSLTRLRKKSPYPKLEINSRLAEKKGINNGDWVEVITRNGEARFKASLDDNIAYDTIIAEFGWWQACPDYGKEGFPAIGKNSSNYNALISDDSCDPISGASPLRSFRCDIKLAEDINPERRPWQGRKAFRVVDTKPEAKGVKTVIFESQDGTMLPDYEPGQHITVQVSIPGQDAPVIRAYSLTGTATLEGRKSYSISVRHQKSITSDGETFEGVMSSYINKTLVAGAEVNLTPPGGNFIIPLNAKQPVVMLAGGIGITPFISYLESLPANGEKPELLLLYANQNSNTHTFSKRLKEIESKIKQLKVINYYSNPLPVDIEGINYQYHGYITADAVPETLIKQQARFYMCGPAPMMKTFEEGLLTLGVPPFDIYKEMFRSLTPVKIKDGKSFAVKFEKSGVPLEWSPDKGTLLNFGEKSGIKMASGCRVGQCESCAVKLKSGEVQHLNGVEPSEQGMCLTCQCIPISDISIDA

SEQ ID NO: 25778 - protein, 384 aa, Photorhabdus luminescens subsp. laumondii TTO1
MKMSVVNFSDKPVDGANVHTWPKSPDRDLIACGRDAYAEKTVQEALNGDPDKAVKLSELNDILAACEPFNFKGVTLYAKDPVLALIKALSEKSAYLVDDSYPPKQWQSGGVDKHNRIKDFIESPGMFIKGIEMIDMGQLYLGNCGFVSTIGAIASHPEGHNLLFSAIYPPVYNPTGIYSIRIINQSTVGYLLIDDDLPRVSFSAMEDKNEFWYYLIEKAFAKLHGSYENLGGGNEIYFGIESTANTSINQGNQDRIWDEKFIDIFKIKHHVTYQGTGSSTDLVSGHAYLILDAQQWNDIKLVRLHNPWNVVKYKGPYSPDAAEWENIPADVQNDIFQNNRFEGKSFWMPYDLYVKNLPKISDMYLSKIIPDSLKSIANPSPIQE

SEQ ID NO: 25779 - protein, 585 aa, Photorhabdus luminescens subsp. laumondii TTO1
MQWKKLQRWMPGLGNFSHYRKEWFSHDLRAGLSVAAVALPVAIAYAELMGISAIIGLYACILPMFAYALFGTSRQLIVGPDAATCAVIAAAVAPLVFGNEDVRWQLTIVMTLMTGIWCVLASHFRLGAFADFLSKPILKGLMNGVALTIIVDQLAKVFGFAGVPMGLIERVIALPAKLMSTHLPTLAMSVAMVLILLTVRFLRPTWPGPLLAMVLATYISWQFDLEKYGVQIVGSVSGGGLPVVPMPDFQPGIMRELVIPSLNLAVISFVSFMMTARSFASKNGYQIDADCELRALGIANIASALSQGFAVSAASSRTAVNDTIGGKTQLVSVIAATIILLVLLFMTRFLAYIPLSSLGVVLIYSASSLLGLRQIWSLRKRNHQAFTLSLFTFIAVLVVGLINGVGFAVLLGLLQFLRIIFRPTDQLLGVNDQGMIHSINHGNDIKPIDGVMMYRFNSPLTYFNVSYFKKRVLQHVDRIQKINKTQKRPGWLVVDAAVSFTHDDVSVFAAIDELISELKVRDITLVLAGRRTELTRWIKQNKLRSSDDDLIVVPDLYFAVRMIQSKPEWYSNYAKRYNSVIEINQ

SEQ ID NO: 25780 - protein, 116 aa, Photorhabdus luminescens subsp. laumondii TTO1
MTTTIEKIERQIKENPILLYMKGSPKLPNCGFSAQAVQALSACGERFAYVDILQNPDIRAELPKYANWPTFPQLWVEGELIGGCDIIIEMYQRGELQTLIKETADKCRSQGENATE

SEQ ID NO: 25781 - protein, 248 aa, Photorhabdus luminescens subsp. laumondii TTO1
MLSIKNLRVSVEGNEILKGLNLDVKPGEIHAIMGPNGSGKSTLSATLAGREEYEIDDGEITFKGKNLLGFEPEERAGEGIFLAFQYPVEIPGVSNQFFLQTAVNAVRQYRHQEPLDRFDFADFIEEKIELLDMPPDLLTRSVNVGFSGGEKKRNDILQMAALEPTLCILDETDSGLDIDALKIVANGVNSLRDPNRSFIIVTHYQRILDYVKPDFVHVLYQGRIIKSGDFSLAKKLEEQGYGWLIDQQ

SEQ ID NO: 25782 - protein, 187 aa, Photorhabdus luminescens subsp. laumondii TTO1
MISLSDFVNRFQLQLPPPPKRLSDNNRHAAVLLPIICKPKPTLLLTRRSATLRSHAGQVAFPGGVADPKDKSIIATALREAEEEVNIPHQKVQVLGQLAPLNSSGGYLVTPIVGLLPPGLSLHSNPAEVAKIFEVPLSEALSLSSYHYLDVSRRGQQHRVYFYWYQQHLIWGLTATIIHQLAQQVQV

SEQ ID NO: 25783 - protein, 759 aa, Photorhabdus luminescens subsp. laumondii TTO1
MDEKLKQSALDFHQFPQPGKITITPTKPLITQRDLALAYSPGVAAPCLEIAEDPLAAYKYTARGNLVAVISNGSAVLGLGNIGALAGKPVMEGKGVLFKKFSGIDVFDIEVDESDPDKLIDIIAALEPTFGGINLEDIKAPECFYIEKKLREKMNIPVFHDDQHGTAIICTAAVLNGLRIMKKEISAVRLVVSGAGAASIACMNLLVALGLQRKNIVVCDSKGVIYRGRDKNMEETKAAYAIEDNGSRTLGDVIPGADIFLGCSGPGVLTQDMVKMMAKDPLIMALANPEPEILPPLAKQVRPDAIICTGRSDYPNQVNNVLCFPFIFRGALDVGATTINEEMKLACVHAIADLALAEQSEEVASAYDDQDLFFGPEYIIPKPFDPRLIVKIAPAVAKAAMDSGVATRPIKDFGAYIEKLNEFVYKTNLFMKPIFSQAKKAKKRIVLAEGEEVRVLHATQELISLGLAYPILIGRPSVIEMRIQKLGLHIEAGKDFEVVNNENDPRFKKYWQEYHHIMKRRGVSAEQARRAVIGNPTLIGAIMVLRGEADGLICGTVGSYSEHYDVVRNVFGFRDGVHTAGAMNALMLPSGNTFIADTYVNNDPTPEQLAEITLMASETIRRFGIEPKVALLSHSSFGSTDCLSAQKMRQTLELVNKMSPSLEIDGEMHGDAALVESIRRDIMPDSPLKGAANLLIMPNMESARISYNLLRVTSSEGVTVGPVLMGVAKPIHILTPISSVRRIVNMVALAAVEAQTHPL

SEQ ID NO: 25784 - protein, 510 aa, Photorhabdus luminescens subsp. laumondii TTO1
MCGIGGVFNTENRLIDDIENKLQTIMSKIAHRGDPSRFNEKVVRNNFSIATNRLAIVERDSAYQPISNQEHDLHLVLNGQIYNYKSLRNELIKQGYQFKNGGDAEVALIAYICYGKSFIKKLDGMFSFILFDNKNNKFLLGRDHVGIKPLYYTQKEGNWYVASEIKSLIEFNSEIKPVEPGSIFDGLTSEKYISYDTTIPASSDNVEQAKEKIYSLLDNAVRKRVDTDLPVSIMFSGGIDSTIVLYLAKKYHHDITAISFGLPGSKDIEIAQRYCTENNIKHIIYTFTQEELINNIQDAIYYGEFFEQIDAIDSTIAHFGYYIANRLGFKIALCGEGSDEIFAGYDLFKTYPDPHHLSLYRLNNLHRTDLQRVDRASMRNTVEARVPFMDSALVPYVLSLDFSYKLNNGIEKYILREAFRGKIPEYIIDRPKIRMPDGSGVKNTIIDYVKDIKCNLPRNMVDSLNSIGLTHQSSLYFAEKYLSLGYPLPKERFKESGKDFSESGYFNFIS

SEQ ID NO: 25785 - protein, 459 aa, Photorhabdus luminescens subsp. laumondii TTO1
MAGQSQRSTLKRGLKNRHIQLIALGGSVGTGLFLGIAQTIKMAGPSVILGYAIAGFIAFLIMRQLGEMVVEEPVAGSFSHFAYKYWGDFPGFLSGWNYWAMFTLVGMAELTAVGMYIHYWWPDIPTWVSATIFFVLINTVNLINVRLYGETEFWFSIIKVTAIICMIVFGSYLLVSGNGGPQASITNLWQHGGFMPNGISSLIMAMAVIMFSFGGLELVGITAAEAENPRISIPKATNQVVYRILIFYIGSLTVLLSLYPWGNVVEGESPFVMIFHNLDSFWVANILNIVVLTAALSVYNSGVYCNSRMLYGLAKQGNAPEMLTKVNESGVPIRAIVMSALATSIGVLINYVMPGKAFELLMALVVTTLVINWVMICMAHLKFRAEKVKQGIAPSFKAFWYPFGNYLCLVFLAFILVIILMMDSIRISVILMPFWVGVLWLGFLMSHSRRDKMKTEELG

SEQ ID NO: 25786 - protein, 571 aa, Photorhabdus luminescens subsp. laumondii TTO1
MNDAKTSQNQQLITTLTNIVGKSHILTAPHKTERYRKGFRSGQGDALAVVFPGSLVEQWHVFKVCVEADKIILMQAANTGITEGSTPNGKGYDRDIVIISTLRMNKIQILKQCNQVVALPGSTLWQLERALKPLGREPHSVIGSSCIGASVIGGICNNSGGSLVHRGPAYTEMALYGRVNECGKPELINHLGIYLGETPEEILSCLEEQRYSDQDVEQGQRKASDHEYTQRVRDVDADTPSRFNSDERRLFEASGCAGKLVVFAVRLDTFPAEPLSQVFYIGTNQTGVLTELRRHILANFHNLPMAGEYMHRDIFDIAEIYGKDAFIMIDKLGTDKMPTYFTLKGRMDAIFNRVPFLPVNLIDRIMQGLSRLLPSHLPKRLKEYRNRFEHHLILKMSGDGVEEARSWLEDYFSRVEGDFFACTPEEGAKAFLHRFSAGGSAIRYQAVHSNEVGNILSLDIALRRNDREWFEQLPPEFDDVLVHKLYCGHFMCYVFHQDYIVKKGVDVQALKARMIELLDKRGAEYPAEHNVGHLYQAKPQLKAFYRMSDPTNTLNPGIGKTSKLKNWGEGS

SEQ ID NO: 25787 - protein, 460 aa, Photorhabdus luminescens subsp. laumondii TTO1
MSHNTVITLGTNQTGANNRVQLRKTLTLVQVVMMGLAYLQPMTIFDTFGIVSGLTDGHVATSYAIALIAILFTAVSYGKLVKRFPSAGSAYTYAQKSISPHVGFMVGWSSLLDYMFMPMINILLAKIYLQAIFPSVDPWIFVVGFALLMTAFNLRGINVVANLNTAIVIVQVTVMVVFVGLLIHGVYNGEGVGTLWNAKPFVSEDAHLIPMITGATILCFSFLGFDGISSLSEETPNAGKVIPKAIFLTVLIGGVIFIAVSYFLQLYFPDISRFENPDESQPEIMLYVAGTLFQSIILVFSCVTVLASGMAAHAGVSRLLYVMGRDGVFPEKIFGYVHPKWRTPVINVSLVGIIGLSAITFDLVTATALINFGALIAFTFVNLSVISQFYIRERRNRTLKDTINFLVLPVIGACTVSVLWMNLEQSSMELGLTWGAIGLVYMVFLTRRFRQPMPQCSEMV

SEQ ID NO: 25788 - protein, 404 aa, Photorhabdus luminescens subsp. laumondii TTO1
MLAVKKSSKLDNVCYDIRGPVLKEAKRLEEEGNKVLKLNIGNPAPFGFEAPDEILVDVIRNLPTAQGYSDSKGLYSARKAIMQHYQARNMMDVTVEDIYIGNGVSELIVQAMQALLNTGDEMLVPAPDYPLWTAAVSLSSGKAVHYMCDEGSDWFPDLNDIRNKITPRTRGIVIINPNNPTGAVYSKELLLEVVEIARQHNLIIFADEIYDKILYDDAEHHSIAALAPDLLTVTFNGLSKTYRVAGFRQGWMVLNGPKKHAKSYIEGLEMLASMRLCANVPMQHAIQTALGGYQSISEFILPGGRLYEQRNRAWELINQIPGVSCVKPKGALYMFPKIDAKRFNVHDDQKMVLDLLLQEKVLLVQGTAFNWPEPDHLRIVTLPRLDELEMAIQKFARFIGKYHQ

SEQ ID NO: 25789 - protein, 400 aa, Photorhabdus luminescens subsp. laumondii TTO1
MSSKLVLVLNCGSSSLKFAIIDPANGEEYLSGLAECFNLPEARIKWKMDGAKHEAALGAGAAHSEALNFIVNTILAEKPELSDQIAAIGHRIVHGGEKFTASVTINDEVIQGIKDAVPFAPLHNPAHLIGIEEAKKGFPHLADKNVAVFDTAFHQTMPEEAYLYALPYNLYKEHGIRRYGAHGTSHFFVSREAAKTLNKPVEELNVIVCHLGNGGSISAIVNGQCVDTSMGLTPLEGLVMGTRSGDIDPAIIFHLHDSLGMSVEQINKLLTKESGLLGLTEVTSDCRYIEDNYATKADAKRAMDVYCHRLAKYVGAYSALMEGRLDAIIFTGGIGENSALVREQVMKKLALLGFEYDHDRNLAARFGKSGAITTDNSRPALVIPTNEELVIAQDAARLTA

SEQ ID NO: 25790 - protein, 713 aa, Photorhabdus luminescens subsp. laumondii TTO1
MSRTIMLIPTSTSVGLTSVSLGVIRSMEQKGVSLSVFKPIAQPRCRAAQDQTTTIIRANSSIKTAEPLDMAHVESLLTTNQKDVLMEKIVALYHENTKDAEVILIEGLVPTRKHSFAQSLNYEIAKTLNAEIVFVLALGNDSPEQLKERVELARAEFGGNKNQNITGVIINKLNAPVDDQGRTRPDLSEIFDESSKAIVSNIDPNTLFKNSPLPILGCIPWSFDLIATRAIDMAKHLNARIINEGAIKTRRVKSVTFCARSIPHMLEHFRPGSLLVTSADRPDVLVSACLAAMNGVEIGAILLTGGYAIDEPIKQLCERAFNTGLPVFMVDTNTWQTSLNLQSFSLEVPADDHERIEKLQNYVAHHINKEWIDSLTANSERPHRLSPPAFRYQLTELARKAGKRVVLPEGDEPRTVKAASICADRGIARCVLLGDPEEIRRVAAAQGVELGAGIEIVDPIAVRERYVPRLVELRKNKGMTEVVAREQLEDNVVLGTLMLEQGEVDGLVSGAVHTTANTIRPPLQLIKTAPGSSLVSSVFFMLLPEQVLVYGDCAINPDPTAEQLSEIAIQSADSAKAFGIEPRVAMISYSTGNSGAGSDVEKVREATRLAQEKRPDLIIDGPLQYDAAIMADVAKSKAPNSPVAGQATVFIFPDLNTGNTTYKAVQRSADLVSIGPMLQGMRKPVNDLSRGALVDDIVYTVALTAIQSAQGEA

SEQ ID NO: 25791 - protein, 388 aa, Photorhabdus luminescens subsp. laumondii TTO1
MGVAMNVNENPTGVIYLDHCATTPCFPEVVDIMRFYMEHEFGNSSSAHVMGRRARHAIENAAQQVASLIGARPEEIAFTSGATEANNIALFSSFAHNECAPAGALLCPIDHKSVLLVGKELSRRGLAVEYLPVAANGRVQPEDVITKLTADTRIVSVAHVNSELGTVQPVDEIAAITRRSGAWLHVDAVQSIGKIPVNVKETGIDMLSFSAHKMRGPKGVGALFVDARVAGHLRPFIYGGGQNHLRSGTLPTPLIVGFGLACQMIQSTLIQRQAKVTALRDYFITRLHQRVPNAVLNTDISCSSPYIVNVQFEGIASEALISGLHQVAISSGSACNSAELQPSHVLTGIGLSSAQANASVRFCFDPDLDNAILDTAIEHLVFRLNSIR

SEQ ID NO: 25792 - protein, 464 aa, Photorhabdus luminescens subsp. laumondii TTO1
MQASLQLERGLNARHIRFMALGSAIGTGLFYGSAEAINMAGPAVLLAYLVGGAAVFMVMRALGEMAVHRPDAGSFASYAHQYLGPLPGFITGWTYTFEMIIVCLADVTAFGIYMGLWYPEVPRWIWVLSIIFIIGALNLCKVKVFGEMEFWLSILKVAAISAMIIAGTGIILFGFSGHFQATGVQNLWQHGGFMPNGLGGIIESLAVVMFAFGGIEIIGITSSEAKNPAKVIPQAINSIPFRILLFYVLTIFVLMAIYPWNSIGQEGSPFVAIFQGLGIGSAANILNIVVITAAISAINSDIFGAGRMMYGMAEKGLAHKKFMHLSRNGVPWVTIMVMTLALLCAVVLNYLLPKQVFVIVASIATFATVWVWLMILLSQFAMRRKMSPGEAQKLQFPVPMWPVAPILTIVFMIFIIAVLSYFPATRIAFYVGGAWIALLTSAYYLWIRKNVIIVSAQSAKETRC

SEQ ID NO: 25793 - protein, 404 aa, Photorhabdus luminescens subsp. laumondii TTO1
MKLPIYLDYSATTPVDPRVAEKMMNYLTRDGIFGNPASRSHRFGWQAEEAVDIARNQIADLVGADPREIVFTSGATESDNLAIKGAANFYQKKGKHIITSKTEHKAVLDTCRQLEREGFEVTYLAPQSNGLIDLNDLEAAVRDDTILISIMHVNNEIGVVQDIAAIGEMCRSRGIVFHVDATQSVGKLPIDLTKLKVDLMSFSAHKIYGPMGIGALYVRRKPRIRIEAQQHGGGHERGMRSGTLPVHQIVGMGEAYRIAKQEMESESQRLRGLRLRLWQGIKDIEEVFLNGDLEHGAPHILNVSFNYVEGESLMMSLKDLAVSSGSACTSASLEPSYVLRALGMNDELAHSSIRFSLGRFTTEEEIDYAIELIHKSIGRLRELSPLWEMFRQGVDLNSIEWSHH

SEQ ID NO: 25794 - protein, 396 aa, Photorhabdus luminescens subsp. laumondii TTO1
MLDNQTIATVKSTIPLLSATGPKLTAHFYERMFKHNPELKNIFNMSHQLNGDQREALFNAICAYAANIDNLKVLLPAVEKIAHKHASLNIQPEHYQIVGTHLLATLNEMFQPGNEILDAWGKAYGVLADIFINREEQIYHSGELTDGGWRGLRPFRINRKEVKSEVICSFEFAPQDGGKVMDYKPGQYLSIYLQDDSFANREIRQYSLTAAPNGSSYRIAIKREPQGIVSNHMHDKMQEGDTVWLTAPRGDFFLDIKPETPVTLISAGVGLTPMMSMLYHLHQQNHNSPINWLHAAEHGGHHAFSHEVAAIAQAMPNFAGTIWYREPRDEDQQGIHYQHKGFMDLTVLNEALKTEGMHFYFCGPVAFMQYVAKQLLDMGIDKQFIHYECFGPHKVI

SEQ ID NO: 25795 - protein, 302 aa, Photorhabdus luminescens subsp. laumondii TTO1
MSEQETYCGFVAIVGRPNVGKSTLLNQLLGQKVSITSRKPQTTRHRIMGIHTEGAYQIIYVDTPGLHIEEKRAINRLMNRAASSSIGDVELVIFVVEGTHWTPDDEMVLNKLRNLRCPVLLAINKVDNVTDKTSLLPHIGFLSKQMSFLDVVPMSAEKGMNVDTIAKIVRGYIPKAAHHFPEDYITDRSQRFMASEIIREKLMRFLGDELPYSVTVEIEQFVANERGGYNIHGLILVEREGQKKMVIGNKGSKIKTIGIEARQDMERLFDAKIHLELWVKVKAGWADDERALRSLGYVDDLK

SEQ ID NO: 25796 - protein, 256 aa, Photorhabdus luminescens subsp. laumondii TTO1
MKEQSLPIVPWIGGKRRLAKHILPLFPEHTCYVEPFCGAAALYFLKVPSKCEVINDLNGELVNLYRVIKHHLEEFVRQFKWALVSRQIYKWLQITPEETLTDIQRAARFYYLQKQAFSGKVAEHTFGTSTTSPPRFNLLRIEEELSMAHLRLARTIIENMNWTQCVQRYDRPHTLFYCDPPYWGTEGYGIDFGLENYDLLAELAHTIRGEMVISVNDIPEMRKAFKGLKMQVVNIGYNLKVTGKAKQSKELIICNF

SEQ ID NO: 25797 - protein, 413 aa, Photorhabdus luminescens subsp. laumondii TTO1
MVKVSLEKDKIKFLLLEGVHQSTVENLRAAGYSNIEYHKGALDPKELKEAIRDTHFVGIRSRTQLTEDIFQAAEKLVAVGCFCIGTNQVDLKAAAKRGIPVFNAPFSNTRSVAEMVLGELLLLLRRIPLANAKAHRGVWDKQAKGCYEVRGKKLGIIGYGHIGTQLGILAENIGMDVYFYDIENKLPLGNAHQVRHLSELLNMSDVVSLHVPETPSTKNMIGATELTLMKPGSILINASRGTVVDIPALCDALESEHLSGAAVDVFPVEPATNNDPFESPLRKFDNVLLTPHIGGSTQEAQENIGYEVAGKLAKYSDNGSTLSAVNFPEVSLPVHADDTNRFLHIHENRPGILNSINQVFAEQDINIAAQYLRTSGDMGYVVIDIVTENPAQAEMVFQKLKALPGTIRSRLLY

SEQ ID NO: 25798 - protein, 575 aa, Photorhabdus luminescens subsp. laumondii TTO1
MEMLSGAEMVVRSLIDQGVKHIFGYPGGAVLDIYDALHTVGGIEHILVRHEQGAVHMADGYARSTGKVGVVLITSGPGATNAITGIATAYMDSIPMVVLSGQVASSLIGNDAFQECDMVGISRPIVKHSFLVKKAEDIPKVLKKAFYLASSGRPGPVVIDLPKDTVNPAVKLPYIYPDQISMRSYNPTIQGHKGQIKRALRKLLNAKKPVIYVGGGAINADCSAELLVLAEKFNIPVVSSLMGLGSFPATHPQSLGMLGMHGTFEANKAIHNSDVIFAVGVRFDDRTTNNLEKYCPEATVLHIDIDPTSISKTVSADVPIVGDAKQVLGQMLSLLETVEDTQDPDALKDWWLSIQQWRSRKCLSFDRSGEKIKPQAAIEVLYRLTKGEAYVTSDVGQHQMFVALHYPFDKPRRWISSGGLGTMGFGLPAALGVKLVKPEATVVCVTGDGSIQMNIQELSTALQYGLPVLVLNLNNRFLGMIRQWQDMIYAGRHSQSYMESLPDFVKLAEAYGHVGISIQRYDELESKLAEALKEVTENQRLVFVDITVDETEHVYPMQIRGGAMDEMWLSKTERT

SEQ ID NO: 25799 - protein, 307 aa, Photorhabdus luminescens subsp. laumondii TTO1
MTISTLGNQQDDSLVSNAFGFLRFPLNFQPYSSDAEWVITGVPFDMATSGRAGSRHGPAAIRQVSTNLAWESRRWPWDFKLHNCLKVVDCGDVVFNFGDAQDMSDKLQAHAEKVLASGKRMLSFGGDHFITLPLLRAHAKHFGKMALVHFDAHADTYPNGSQFDHGTMFYHAPNEGLIDPHHSVQIGIRTEHGRDNGFTVLDADQVNDRSVDDLLAQIKETVGDMPVYLTFDIDCLDPAFAPGTGTPVIGGLTTDRALKLLRGLQPLNIVGMDVVEVAPAYDQSEITALAGATIALEMLYLQASKKR

SEQ ID NO: 25800 - protein, 439 aa, Photorhabdus luminescens subsp. laumondii TTO1
MRHCNSLIEKIDMKRQFSVAASVVASCVPSLSQAAEGVVDKADNAFMMICTVLVLFMTIPGIALFYGGLLRSKNVLSLMAQVMVSFALVCVLWVIYGYSLAFEPGNGFFGGFSQVMLKNLAFTDLSGNFYQLIHVAFQGSFACITVALIIGALGERIRFPALLVFTVLWLTFSYLPMAHMVWGGGVLSQDGALDFAGGTVVHINAAVAGLVGAYLLGKRTGFGKEAFKPHNLPMVFTGTTVLYIGWFGFNAGSASAANEIAALAFLNTIVATAAAILSWVFAEWLFRNKPSLLGACSGCIAGLVGITPAAGMVGVGGALIIGLIAGFTGLWGVVALKRWLRVDDVCDVFGIHGVCGIVGCLLTGVFTAKSLGGIGYAEGITMLGQVGIQAFSILVCVIWSVVVAFIAFKIADLLVGLRVTVEIEREGLDINSHGESAYN

SEQ ID NO: 25801 - protein, 322 aa, Photorhabdus luminescens subsp. laumondii TTO1
MPKIDFQQAGKKVLHIERDGLTELEQHINGDFDRTCELMFNCEGKVIVMGMGKSGHIGCKIAATFASTGTPSFFVHPGEASHGDLGMITPKDIVLAISNSGESSEILSLIPALKRQKIPLICMTNNCNSSMGKAADIHLCIKVPQEACPLGLAPTTSTTATLVMGDALAVALLQARGFTAEDFALSHPGGTLGRKLLLLVSDLMSTGDDIPKVNRNATLREALLEITRQKLGMTVICDENRYIDGIFTDGDLRRVFDMGVDLYNVKISDVMTTGGIRIKPHALAVDALNLMQSHHITSLLVAEDNKLLGVLHMHDLLQAGVV

SEQ ID NO: 25802 - protein, 425 aa, Photorhabdus luminescens subsp. laumondii TTO1
MKHANWVNAIIASAALFVLSVFMMGMQLSLDGTQLVVHHADEVRWLWIGIGCAVVFLFQLLRPAVQQIMKKVPIKSWSLPDFDGSTKGQKLLAILVIIAAIIWPFIVSRGSVDIATLTLIYVMLGLGLNVVVGLSGLLVLGYAGFYAIGAYTYALLSHYYGLGFWQSLPLAGLTAALSGLLLGFPVLRLRGDYLAIVTLGFGEIVRILLLNNTEITGGPNGISQIPKPTFFGLEFNRSVKEGGWDTFHNFFGLKYDPSDRVIFLYLVVLLLVILTVLIINRLLRMPLGRAWEALREDEIACRSLGLSPTRIKLAAFTISAAFAGFAGTLFAARQGFVSPESFTFAESAFVLAIVVLGGMGSQTAVILAAILLVVSREMMRDLNAYSMLLLGAMMVLMMIWRPQGLLPTKRRHVKLERQVQGGKQA

SEQ ID NO: 25803 - protein, 366 aa, Photorhabdus luminescens subsp. laumondii TTO1
MLKIIQSPSKYIQGPDALLHIGQYTKTIADHVLVIIGNSAMKLVGDTVHSSLEQYEITRHFEVFGGECSRNEIKRLSDILKKHECQAVIGIGGGKVQDTAKAVAYESRLPVLIAPTIASTNAPTSALSVIYSDDGKYEDYLFLPTNPDIVLIDTSIIAKAPTRFLIAGIGDALATYFEARICGAGYKPRMTEGGISRTAVALAHLCYETLLEEGYKAKLAVETDVSTPAVENVIEAITYLSGLGFENTGVAAAHSVHNGFTVLEECHHMYHGEKVAFGILVQLILENSPNEELDTLLDFCVQMGLPVTLDQLGVKDGEKLKEKVMAVATASCAEDETIHNMPFEVTPEKVYAAIMAADRMGRDWLY

SEQ ID NO: 25804 - protein, 893 aa, Photorhabdus luminescens subsp. laumondii TTO1
MDTVCTALLCRLNSYCARALEAAAAFCQTRAHAEITVEHWLLKLLEGGEGDITVIARRYAWDMDALWQSLLTTINRLPHSINQRPRLSSDLCSLLQVAWCIASLEEGNESIRSVHLLQVLRGQPAWLRIHHSWPLLNLSVTQLQCLRPLLDQQSDERPEIQIAACLTADGSIAEIAGSDPDKYALNPQPLSSALQNVLDKFTLDITARAAEGGIDPVFGRDREIRQMIDILSRRRKNNPILVGEPGVGKTALVEGLALRIIEGNVPDSLKTVSVRMLDLGLLQAGAGVKGEFEQRLKNVIEAVQQSPAPILLFIDEAHTLIGTGNQAGGADAANLLKPALARGELRTIAATTWSEYKQYFERDAALERRFQTIKVDEPDDETACLMLRGLKARYARYHGVHIQEDAVKAAVTLSRRYLTGRQLPDKAVDLLDTASARVRMSLDTVPEALTQLQSQLTALEIEQQAILEDIALGQCHHSDRLTQIEMQRHELYRQQQQRDKQYQQEKQLTQQLLDARQDISRQGDIARLQQQLATRQQGQPLLSSDVDVRSVATVIADWTGVPLSSLLKDEQTGLLHLEQHLGERVVGQEAALREIAQRLRAAKTGLTPEQGPLGVFLLVGPSGVGKTETALALADNLFGGARSLITINLSEYQEPHTVSQLKGSPPGYVGYGQGGILTEAVRKRPYSVVLLDEVEKAHRDVINLFYQVFDRGFMRDGEGREIDFRHTVILMTSNLGSDQLMALLAQQPDAPNAVLHELLHPMLRDHFQPALLARFQTVIYRPLQAGALRRIVEIKLEQVTRRLHSHYGLTCTVESSLCDILVNACLLPDSGARNIDSLLNQQILPVLSQALLERLAHHNKPAGVTLGFDEEEGITLAFTDAEPVASLDSEENP

SEQ ID NO: 25805 - protein, 459 aa, Photorhabdus luminescens subsp. laumondii TTO1
MSAVSSQCPEIGGHVVAKFGGTSVANFDAMNNSADIVLANKAVRVVVLSASAGITNLLVALAAGCDADKRADYLKQIHSIQYAIIDRLHESDTIRQEIDRLLENIKTLAKAASLATSAALTDELVSHGELMSTRLFTELLRQRGKDAEWFDIRKVMYTDESFGRAEPNYEQLQSLATEHLLPQLKNSLIVTQGFIGREENGRTTTLGRGGSDYTAALLGEALGLKRVDIWTDVPGIYTTDPRVVPAAQRIDKIAFDEAAEMATFGAKILHPATLFPAIRCGIPVFVGSSKNPQAGGTLVCDTTEAPPQFRAIALRQKQTLLTLHSLKMLHAQGFLAEIFTILSRHNISVDLITTSEVNVALTLDTTGSTSTNGSLLTNALMTELSTLCRVEVEEDLALVAIIGNQLSQTNGLGKKVFSVLEKFNLRMISHGASNHNLCLLVQGKDAEQIVQTLHQRLFE

SEQ ID NO: 25806 - protein, 653 aa, Photorhabdus luminescens subsp. laumondii TTO1
MSDMAKNLILWLVIAVVLMSLFQSFGPSDSNSRRVDYSTFINELAQDQVREVRITGREINVSRKDNSRYTTYLPVQDEKLLDTLLNKNVKVVGEPPEEPSLLTSIFISWFPMLLLIGVWIFFMRQMQGGGGKGAMSFGKSKARMLTEDQIKTTFADVAGCDEAKEEVGELVEYLREPGRFQKLGGKIPKGILMVGPPGTGKTLLAKAIAGEAKVPFFTISGSDFVEMFVGVGASRVRDMFEQAKKAAPCIIFIDEIDAVGRQRGAGLGGGHDEREQTLNQMLVEMDGFEGNEGIIVIAATNRPDVLDPALLRPGRFDRQVVVGLPDVRGREQILKVHMRRVPLDTDVDASVIARGTPGFSGADLANLVNEAALFAARGNRRVVSMVEFEKAKDKIMMGAERRSMVMTEEQKESTAYHEAGHAIIGRLVPEHDPVHKVTIIPRGRALGVTFFLPEGDQISASRQKLESQISTLYGGRLAEEIIYGPDSVSTGASNDIKVATSIARNMVTQWGFSEKLGPLLYAEEEGEVFLGRSVAKAKHMSDETARLIDQEVKAIIDHNYQRARQILMDNLDVLHSMKDALMKYETIDAPQIDDLMNRTNVRPPAGWESDNGSSNNSRPTGNTPPPQAAKPTDDINTLAQGGEQVGQSGNKDQ

SEQ ID NO: 25807 - protein, 391 aa, Photorhabdus luminescens subsp. laumondii TTO1
MKFVDEARILVVAGDGGNGCVSFRREKYIPKGGPDGGDGGDGGDVYLLADENLNTLIDYRFEKSFRAERGQNGQSRDCTGRRGQDTTIKVPVGTRVRDAVTGEVLGDMIRHEQRLMVAKGGFHGLGNTRFKSSVNRAPRQRTMGTSGETRELMLELMLLADVGMLGMPNAGKSTFIRAVSAAKPKVADYPFTTLVPSLGVVRMDNEQSFVVADIPGLIKGASDGAGLGIRFLKHLERCRVLLHLIDICPVDGSDPVENARIIVNELQQYSEKLAEKPRRLVFNKVDLLEPEEARQRAQAIADELGWEGDFYMISAINRQGVKALCWDIMEFMKTQPRNMSRTEGETQPEKVEFMWDDYHKKQLEQVSEVDDDWDDDWDEDDDEGIEVIYKR

SEQ ID NO: 25808 - protein, 396 aa, Photorhabdus luminescens subsp. laumondii TTO1
MSSDRVLVIYYNRLYNPLIIRSLKSEYREVIALYIDEGQVRDIEDIELECMVAGADKFIYKDYRAQYAEHFLTKAIKANAIYQNGYFLSAALSRPAIAEAAVEVANELNIDYIAHQFRGNDQVRMDMNIEILNKIPIASLRDFKYDENIVNSYAMKYGIPQEFGCNNPYSTSENIWGLSVECGPLAEPEALIPEDAREKLFEHALSATEPIFLSLGFENGIPISIDGEKKSLYEIIEILNEIGKKLSIGIFDIVEDGIVGLKTRAIYQSPAAHILITAHRDLECYCSNRHENWFKEIVDKKWVELVYSGLWYDPLLTHLNHFIDSMNQHVNGEIKLELGYKYANVCSRISKTTIYDDNLAIYNCGHLYSQNDAEGFAKIFNIHTKQSAKSKMRQKL

SEQ ID NO: 25809 - protein, 396 aa, Photorhabdus luminescens subsp. laumondii TTO1
MTSLYFDYNATTPLSVKAQLAIKDAMSVFANPSSHYSLSSMAKKLLTDARISMAALMGTVPEQILFTSGGTESNNQALSSLLATLSGSDLSAHHVISSSIEHPSVLAPLLWYQQRGLQLTLINPDNQGRISVQSIQENLQPQTRLITLMAINNETGVIQPYEAVASLAKEAGVYLHIDAVQAIGKRPFSCDTLSGVTTISFSGHKFNGPKGIGGLYHAPGIQLNPLLHGGGQEQGVRSGTENTLGLAGLAAAAKESLNSLQGRFNTYKTLRTTLLSRLDQHHVNYLINGNTNPAFQAPWTLNLSFSGIRAESLASRLDLRHGISLSLGSACSNNKSTQRSHVLAAMGLPDDRIDSAVRISFGYATSQDDIEILANAIKQETYNLLKISGKSLITQE

SEQ ID NO: 25810 - protein, 404 aa, Photorhabdus luminescens subsp. laumondii TTO1
MHTKDIKKIVLAYSGGLDTSAIIPWLKEHYGNCEVVAFVADVGQSREDLEGVEQKALRSGASECHVVDLREEFIKDYVYPVLKTGALYEGSYLLGTSMARPIIAKAQVELALKVGADALAHGATGKGNDQVRFESTYTALAPQLKVVAPWREWDLRSREALLDYLKARDIPTTATLEKIYSRDENAWHISTEGGVLESTWNASNKDCWVWTVDPEEAPDEAELVSVMIEKGEVVGVNGKVMSPYQCLEALNILGVKHGIGRIDIVENRLVGMKSRGCYETPGGTIMMAALRGVEQLVLDRDSFKWRQQLGLEMSYVVYDGRWFAPLRRSIQAAAETLAADVSGEVVLKLYKGQVTAIQKRSTNSLYSEAFATFGEDEVYDHSHAAGFIRLYSLPSRIRALNSKE

SEQ ID NO: 25811 - protein, 811 aa, Photorhabdus luminescens subsp. laumondii TTO1
MGALVVATAENDRQLHKFGGSSLADVKCYQRVAKIMANYSQPGDLMVVSAAGSTTNQLINWLKLSQSDRISAHQVQQVLRRYQQDLIRGLLPETVAEELVKRFIADLEKLSALLDKPVSDVTYAEVVGHGEIWSARLMSAVLEAQGIPSAWVDARQFLRAERAAQPQIDVTLSQPLLNQLLTQNLNKRLVVTGFISSNHDGETVLLGRNGSDYSATQVGALAGARRVTIWSDVAGVYSADPRKVKDACLLPLLRLDEASELARLAAPVLHARTLQPVSFSDIDLLLRCSYQPEQGSTRIERVLASGTGAKIVTSHDDVCLIELHVAAHHNFKQTYKDIDLLLKREQIRPLATGIHLDCNLIQLCYTSEVVNSALSVLEDATLPGKLSLREGLALVALVGAGVCKNPLHCHRFYQQLKDQPVEFIWHAEDGISLVAVLRTNQTEHVIQGLHQSLFRAEKRIGLILFGKGNIGSRWLELFAREQKNISARSDFEFVLAGVADSRRSLLDYQGIDASRALAFFDDEATEYDVDELFLWMRAHPYDDLVILDVTASEELARCYSDFASYGFHVISANKIAGASSSRDYRFIRDAFAKTGRHWFYNATVGAGLPINHTVRDLRESGDTILSISGIFSGTLSWLFLQFDGSVPFSDLVEQAWQQGLTEPDPRIDLSGQDVMRKLIILAREAGYEIEPEQVRVESLVPKEAESGSIEQFFDNSGAINEQMVQRLAAAQEMGMVLRYVARFNANGKAKVGVEAVRPDHPLASLLPCDNVFAIESRWYRDNPLVIRGPGAGRDVTAGAIQSDLNRLSQLL

SEQ ID NO: 25812 - protein, 231 aa, Photorhabdus luminescens subsp. laumondii TTO1
MHKILLVDDDRELTSLLKELLEMEGFNVVIAHDGEQALKFLDDSIDLLLLDIMMPRKNGITTLKELRLHHQTPVIMLTARGSDLDRVLGLELGADDYLAKPFNDRELVARIRAILRRSNWSEQQQTDNGPPTLQVDNLQLNPGRQEANFANQILDLTGTEFTLLYLLAQHLGQVVSREHLSQEVLGKRLTPFDRAIDMHISNLRRKLPEREDGLPWFKTLRGRGYLMVSAT

SEQ ID NO: 25813 - protein, 183 aa, Photorhabdus luminescens subsp. laumondii TTO1
MQHNKIKVAFLDRDGVINKEVNYLHKIEDFEYTSKCIVGLKKIRDLGYEIIIITNQAGIARGYYSEKQYQLLTDWYRNDLKEKGVDILDIFHCPHYPDGIVPELSKDCYCRKPSPGMIEQARKKYSIDIKSSILVGDKNSDIHAGERAGIPRCFLVKTGHPTSEPTENAILSNNLFTISKLIE

SEQ ID NO: 25814 - protein, 546 aa, Photorhabdus luminescens subsp. laumondii TTO1
MDSQRNLLLIALLFVSFLVWQAWEADKNPQPTTVQATQQTDMPSSENQAVPGSGKGKLITVKTDVLSLTINTRGGDIEEADLLAYPDTLGSNQPFKLLETTPAFTYQAQSGLTGKDGPDNPMNSERPLYTAAQDSYVLADGQDELRIPMNFVTKNGIVYVKTFVLKRGEYAISVDYRIHNTTEKPLQMTFFGQLKQSVELPKHRDTGSSNFALHTYRGAAYSSDDTKYKKYSFSDIEGESLSVTTKGGWIAMLQQYFATAWVPVANETSTFYTVALGKEMAAIGYKSAPISVAANSEKTVSSTLWIGPEIQDEMAAVAPHLDLSVDYGWLWFISQPLFKLLKFLHGFIGNWGFSIIVITFIVRGIMYPLTKAQYTSMAKMRLLQPKLAAMRERIGDDKQRMSQEMMALYKAEKVNPLGGCLPLLIQMPIFLALYYMLMGSVELRHAPFAGWIHDLSAQDPYYILPLLMGVTMFIIQKMSPTTITDPMQQKIMTYMPVIFTIFFLWFPSGLVLYYIVSNLVTIIQQQLIYRGLEKRGLHSREKKPAK

SEQ ID NO: 25815 - protein, 364 aa, Hyphomicrobium chloromethanicum
MSTYSLRVERKQRETDDCASLWLSVPTDLRSAFAHRPGQFIAVSAEINGEEVTRQYSLSSAPDDSRGIRITVKKIPGGRMSSWLVDRVNEGDRIEVAAPRGRFFRPLDRAHRVLLLAAGSGIAPILPIAQKLLADGVGHRITLAYGSRALDDIILRKDVDELPNIFRTCALEHVLSRPGPTWDGPRGRLDSAYLLSRQDLWDGNASHLPLIVYLCGPESFMDAAEAFFLSHGVDASAIRRESFDLVLEDDADEPPLFVAGTEEVGEPSAICEEIVANVGGEETRVVPEPDETILAALIRGEAPVPFSCQEGTCSSCIAKIKKGSASVRSGVLKTLRQDDLDEGLLLACLARPASRHILIDFDDI

SEQ ID NO: 25816 - protein, 1111 aa, Arabidopsis thaliana
MSSNTSRSCSTRSRQNSRVSSQVLVDAKLHGNFEESERLFDYSASINLNMPSSSCEIPSSAVSTYLQKIQRGMLIQPFGCLIVVDEKNLKVIAFSENTQEMLGLIPHTVPSMEQREALTIGTDVKSLFLSPGCSALQKAVDFGEISILNPITLHCRSSSKPFYAILHRIEEGLVIDLEPVSPDEVPVTAAGALRSYKLAAKSISRLQALPSGNMLLLCDALVKEVSELTGYDRVMVYKFHEDGHGEVIAECCREDMEPYLGLHYSATDIPQASRFLFMRNKVRMICDCSAVPVKVVQDKSLSQPISLSGSTLRAPHGCHAQYMSNMGSVASLVMSVTINGSDSDEMNRDLQTGRHLWGLVVCHHASPRFVPFPLRYACEFLTQVFGVQINKEAESAVLLKEKRILQTQSVLCDMLFRNAPIGIVTQSPNIMDLVKCDGAALYYRDKLWSLGVTPTETQIRDLIDWVLKSHGGNTGFTTESLMESGYPDASVLGESICGMAAVYITEKDFLFWFRSSTAKQIKWGGARHDPNDRDGKRMHPRSSFKAFMEIVRWKSVPWDDMEMDAINSLQLIIKGSLQEEHSKTVVDVPLVDNRVQKVDELCVIVNEMVRLIDTAAVPIFAVDASGVINGWNSKAAEVTGLAVEQAIGKPVSDLVEDDSVETVKNMLALALEGSEERGAEIRIRAFGPKRKSSPVELVVNTCCSRDMTNNVLGVCFIGQDVTGQKKLTENYSRVQGDYARIMWSPSTLIPPIFMTNENGVCSEWNNAMQKLSGIKREEVVNKILLGEVFTTDDYGCCLKDHDTLTKLRIGFNAVISGQKNIKKLLFGFYHRDGSFIEALLSANKRTDIEGKVTGVLCFLQVPSPELQYALQVQQISEHAIACALNKLAYLRHEVKDPEKAISFLQDLLHSSGLSEDQKRLLRTSVLCREQLAKVISDSDIEGIEEGYVELGCSEFGLQESLEAVVKQVMELSIERKVQISCDYPQEVSSMRLYGDNLRLQQILSETLLSSIRFTPAWKGLCVSFKVIARIEAIGKRMKRVELEFRIIHPAPGLPEDLVREMFQPLRKGTSREGLGLHITQKLVKLMERGTLRYLRESEMSAFVILTEFPLI

SEQ ID NO: 25817 - protein, 376 aa, Vitis aestivalis
MGCFPCAGKSNKKGKKNQEKNSKDQIPSTSERLKVNSSVDGRKDASKDGGSDHIAAHTFTFRELAAATKNFRAECLLGEGGFGRVYKGRLESTNKIVAIKQLDRNGLQGNREFLVEVLMLSLLHHPNLVNLIGYCADGDQRLLVYEYMALGSLEDHLHDLPPDKKRLDWNTRMKIAAGAAKGLEYLHDKASPPVIYRDLKCSNILLGEGYHPKLSDFGLAKLGPVGDKTHVSTRVMGTYGYCAPEYAMTGQLTLKSDVYSFGVVLLEIITGRKAIDNSKAAGEHNLVAWARPLFKDRRKFSQMADPMLHGQYPLRGLYQALAVAAMCVQEQPNMRPLIADVVTALTYLASQKYDPETQPVQSSRMGSSTPRSRREL

SEQ ID NO: 25818 - protein, 249 aa, Vitis aestivalis
MAPKEKVAGVKPSANAKEVHFRGVRKRPWGRYAAEIRDPGKKSRVWLGTFDTAEEAAKAYDSAAREFRGAKAKTNFPLVSENLNNNNQSPSQSSTVESSSREGFSPALMVDSSPLDLNLLHGGGVGVGVGVGVGAAAGYATAMRFPFQHHQFQVSSPSPAAGIVPTGGLPAANHLFYFDAMLRTGRVNQDFQRLRFDRAASDFRAALTGGVQSDSDSSSVVDLNHNDLKPRARVLIDLDLNRPPPPEIA

SEQ ID NO: 25819 - protein, 621 aa, Lotus japonicus
MKLKTGLLLFFILLLGHVCFHVESNCLKGCDLALASYYILPGVFILQNITTFMQSEIVSSNDAITSYNKDKILNDINIQSFQRLNIPFPCDCIGGEFLGHVFEYSASKGDTYETIANLYYANLTTVDLLKRFNSYDPKNIPVNAKVNVTVNCSCGNSQVSKDYGLFITYPIRPGDTLQDIANQSSLDAGLIQSFNPSVNFSKDSGIAFIPGRYKNGVYVPLYHRTAGLASGAAVGISIAGTFVLLLLAFCMYVRYQKKEEEKAKLPTDISMALSTQDASSSAEYETSGSSGPGTASATGLTSIMVAKSMEFSYQELAKATNNFSLDNKIGQGGFGAVYYAELRGKKTAIKKMDVQASTEFLCELKVLTHVHHLNLVRLIGYCVEGSLFLVYEHIDNGNLGQYLHGSGKEPLPWSSRVQIALDAARGLEYIHEHTVPVYIHRDVKSANILIDKNLRGKVADFGLTKLIEVGNSTLQTRLVGTFGYMPPEYAQYGDISPKIDVYAFGVVLFELISAKNAVLKTGELVAESKGLVALFEEALNKSDPCDALRKLVDPRLGENYPIDSVLKIAQLGRACTRDNPLLRPSMRSLVVALMTLSSLTEDCDDESSYESQTLINLLSVR

SEQ ID NO: 25820 - protein, 623 aa, Lotus japonicus
MKLKTGLLLFFILLLGHVCFHVESNCLKGCDLALASYYILPGVFILQNITTFMQSEIVSSNDAITSYNKDKILNDINIQSFQRLNIPFPCDCIGGEFLGHVFEYSASKGDTYETIANLYYANLTTVDLLKRFNSYDPKNIPVNAKVNVTVNCSCGNSQVSKDYGLFITYPIRPGDTLQDIANQSSLDAGLIQSFNPSVNFSKDSGIAFIPGRYKNGVYVPLYHRTAGLASGAAVGISIAGTFVLLLLAFCMYVRYQKKEEEKAKLPTDISMALSTQDGNASSSAEYETSGSSGPGTASATGLTSIMVAKSMEFSYQELAKATNNFSLDNKIGQGGFGAVYYAELRGKKTAIKKMDVQASTEFLCELKVLTHVHHLNLVRLIGYCVEGSLFLVYEHIDNGNLGQYLHGSGKEPLPWSSRVQIALDAARGLEYIHEHTVPVYIHRDVKSANILIDKNLRGKVADFGLTKLIEVGNSTLQTRLVGTFGYMPPEYAQYGDISPKIDVYAFGVVLFELISAKNAVLKTGELVAESKGLVALFEEALNKSDPCDALRKLVDPRLGENYPIDSVLKIAQLGRACTRDNPLLRPSMRSLVVALMTLSSLTEDCDDESSYESQTLINLLSVR

SEQ ID NO: 25821 - protein, 408 aa, Vibrio vulnificus YJ016
MNSVVSVGPQESFLIAVGVLFLGHFINGQIPILKRFNIPEPIVGGLVVALVITLAHFNGITFDFDLPLQKTFMLMFFATVGLAANYKQLLKGGVKVLLFLLIASIYIVVQNGIGVSLASMLGLDPLLGLIAGSITLSGGHGTGAAWSHTFTQNYGLENALEIAMASATFGLVMGGILGSPVAQRLVDKHQLESEYGRELQAHQRFADLVTYNENEEDKVTAKKVIESLALMFLCVIGARYLSQWVNQLDIAWLMIPDFVYALLLGVFVTNFLELTKVRKLDLETVDMLGTVSLSLFLAMALMSLKLWNIFDLAMPFLFILSIQSLVMVLFSYFVTFKVMGRNYDSAVIASGHCGFGLGATPTAVMNMGSIVNRFGPSPQAFLVVPIVGAFFIDLVNMLILQGFIAFLG

SEQ ID NO: 25822 - protein, 404 aa, Vibrio vulnificus YJ016
MKKIRSIEDVQNVASQAKHVLTLFSGGLDSSYLLEILKNSRAKVTAVAIDLGDDIEESKLKLITDHYGFDLKILDAKQEFVEHSLFSAIQAQALYLGDYPVSSSLSRPIIVKKAVELAQILGCDAIIHTANQSQNSLRRLNGAIERSGYQGFYGSPYEYSAISREEKAQTLFHSGLVGFKSRNVSGDSNLWCREFESGILDDPENFTLADSLFTWSRWQPEHHLEGDSIKIGFKQGYPVTLNDKPITLLELIAFINNHVGAYEIGHYVGFDHLDQDEKVLEVREAPAAMLLMKAYKLLETATLPTDVLKAKAWHNETWTQEAVEGRFGSLLQNASYAFIAHTAEHVSGSVLFKLSRGNAIPTSIVADNARYLRDRDNWEINVAHARSMRSVQLEPTSDKQHQVA

SEQ ID NO: 25823 - protein, 652 aa, Vibrio vulnificus YJ016
MVCFCSSKAHFYDCLRIGENSEVQVFSVLSNDYHGKSRMIIIKEAFMSSATLQQINVYPVKSVGGIALTSAWVEKQGLAFDRRFMVATALGEMVTARKYPQMVTIRSALVADGIVFTYPDKPALMLKYQDFKRQETPAQVWKDNFTAYTTTDEADDWFSDILGIRVELLFSGEQSNRVREKIGHNVSFADGYPLLVISDASLKELNRRSPETHSMDQFRTNLVVSNCDAFAEDGWKKIRIGEVIFEAVKPCERCILTTVDVEKGQFRANKEPLNTLLTFRANEQGGVFFGQNLVALNEGMIQVGDRVEVLEVKEKEVYPDSACHDIRLTCVEKEAIARDFVTFWLEPEHGQLPAYLPGQHLPVEITVDGDTISRRYTLSSSPSRPGRYAISVKRIDGGRVSNWLIDHLEVGDELFAQSPQGQFHIQEDKHQPLLLLSAGSGVTPMLSMLRYLADHDLVEDVVFYHQCRSVEDIPCKEELDALKSRYPGLTVKISLTQAPIDWFGLKGRLSLSHLKQIKAVESRQVFVCGPEGFMQKAKNLLLKKGLPESHYHQEAFGVSTSPNSERKTVELEFNGETFTADNQQTLLEHVENHGLTIAHSCRAGFCGACKVNVISGQVHQPEVPALTEQEKREGKALACCCVPLTDVRFQSL

SEQ ID NO: 25824 - protein, 459 aa, Vibrio vulnificus YJ016
MTAPFNTLSLKPELLSTLDSLGYTEMTPIQAQSLPLVLDGKDVIGQGKTGSGKTATFALGLLSNLNVSRFRVQSLVLCPTRELADQVATEIRTLARGIHNIKVLTLCGGMPMGPQILSLEHGAHILVGTPGRILDHLSKGRIDLAELNTLVLDEADRMLEMGFQDAIDAIIDAAPTQRQTLLFSATFPEQIETIASKVMQNPEMVKVESTHQKSTIEQRFYQLESTEERDNALEALLLTHRPESTVVFCNTKKEVQNVTDELNHRRFSVIELHGDMEQRERERALTMFANKSISILVATDVAARGLDVDNLDAVINFELSRDPEVHVHRIGRTGRAGAKGIAISFFSEKELYRVERIEEYMGIDVHPAKLPQPENPKPYYPSMRTIQILGGKKQKVRAGDILGSLTKEAGIDGKLIGKINILPMVSYVAIDNSVAKIAEQQLQNGKMKGRNFKARIMKG

SEQ ID NO: 25825 - protein, 586 aa, Vibrio vulnificus YJ016
MSSKNNKNLGILLKLSTFVSPYRWRVAAALVALVATASLTLSVGYGVRMLIDQGFAQQSLQELTNAIQFIVGVTLCIAIGTFFRFYLVSSVGERVSADIRLAVFNHVITLHPSYFETNSSGDIMSRLTTDTTLLQSIIGSSFSMAMRSALMCVGAIIMLFATNFKLTLIVLASVPFVLVPILFYGRRVRALSRQSQDSMADVGSYAGEAIEHIKTVQSFSSEQHEKASFAVEVEKAYEIGRQRVKQRAILISGVIVIVFSAIAGMLWVGGSDVIHGKMSAGDLGAFVFYAIMVASSTATISEVLGELQRAAGATERLIEILQVESDIKAPSHHQSIPADIPAEVSFDLVNFNYPSRPNQPAIKGLNLTAEQGKVLALVGPSGAGKTTLFELLQRFYDPQQGHVLLGGIDIRQFDPNELRQQMALVPQQPALFSHDVFHNIRYGNPDATDEQVIEAAKKAHAHEFIEKLPEGYRSFLGERGVRLSGGQKQRIAIARAILKDPKILLLDEATSALDSESEHHVQQALEALMKGRTTLIIAHRLSTIQHADKIAVLDNGELVDIGNHHALMQSCELYQRLVALQFKHLN

SEQ ID NO: 25826 - protein, 483 aa, Vibrio vulnificus YJ016
MSVATSENTQYFSPKEMMAEAEKFALSKANKTSAMTLGLAIMAGAFIGLAFLFYITVTTGSANAGWGLSRFAGGLAFSMGLILIVICGGELFTSSVLSSISWANKQISFTKMLAIWGKVYIGNFIGAMFLLLLVTGAGLYQMDGGQWGLNALNIAQHKLHHTTIQAFSLGVLCNLLVCLAIWLTFSSANAMTKAVMTMLPVAMFVSSGFEHCVANMFMVPLGIVIANFAPDAFWAQVGANASQYADLNVGHFITANLIPVTLGNIVGGAVLVGLANWCIYRRPELKAAKISTITQTTHITSVKEFTMKNAAVVRDIMDAQPVVLGVEMPIATALDTLLDNHIISAPVVDIEGRLVGFLSAHDVMVDLWCQDYLPSTGQKVVDLMSRDVVAIDVNDRLVDVVEFLCIDKEQLYPTSSMGIATRMTSLSLEERAKSMKVNKPHVLPVLENGKFAGVVSRQEVLNALRPIYGERLNLVETRQLETA

SEQ ID NO: 25827 - protein, 562 aa, Vibrio vulnificus YJ016
MRRVPSLHRVICNENLYFNYKTLEVASCVRYKKMINKANSQGIAMQIGVPRELLAGETRVAASPSSVEQLIKLGFDVVVETQAGALASFDDSAYESAGAKMVSKEEAWNSELILKVNAPIIDEEKSIDEIALIKEGATLVSFIWPAQNPQLMEQLSSKNINVLAMDAVPRISRAQALDALSSMANIAGYRAVVEAAHEFGRFFTGQITAAGKVPPAKVFVAGAGVAGLAAIGAAGSLGAIVRAFDVRPEVKEQVESMGAEFLSVDYQEAAGSGDGYAKEMSDDFNKKAAELYAAQAKDVDIIITTALIPGKPAPKLITKEMVDSMKAGSVIVDLAAANGGNCEYTIANQVITTANGVKVIGYTDMVGRLPTQSSQLYATNLVNLFKLLCKEKDGNINIDFEDVVLRGVTVVKDGEITWPAPPIQVSAQPQAKPKAVEKPAPKVQEPVSPVKKLAGLAVGVGAFAWIASVAPAAFLTHFTVFVLACVVGYYVVWNVTHALHTPLMSVTNAISGIIVVGALLQIGQGNGAVTFLAFIAVLIASINIFGGFTVTKRMLEMFRKDK

SEQ ID NO: 25828 - protein, 475 aa, Vibrio vulnificus YJ016
MQRKQRRYDSSESWRFFFWRKSMKKRWTVGVLTSWLAFAPPVVLAEVGEAEKEDLKFGFIKLTDMAPLAIAYEKGFFEDEGLYVTLEAQANWKVLLDRVIDGELDGAHMLAGQPLGATIGIGTQAKVITAFSMDLNGNAITVSNDVWQQMKPNLAKDSDGKPVHPIKADALKPVVTSYRDQGKAFNMGMVFPVSTHNYELRYWLAAGGIHPGYYAPHKGDNSGQINADVLLSVTPPPQMPATMEAGTIKGYCVGEPWNQQAVFKGIGVPVVTDYEIWKNNPEKVFGVAQDWAEKYPNTHIRVVKALIRAAHWLDENDNRNRTEAVKLLSRSEYVGADAEVIANSMTGTFEYEKGDKRQVPDFNVFFRYNATYPYYSDAIWYLTQMRRWGQIEHQKPDSWYMDIAKQVYRPDIYQRAAEALIEEGTLSASDFPDFAKESGFRPPQTHFIDQIHYDGRSPNAYLQQFAIGLKGSESL

SEQ ID NO: 25829 - protein, 854 aa, Vibrio vulnificus YJ016
MASLSLSALVDKLTPEAKRALEQAAALASSRTHHSIEMTHWLLTLVQSAGPDEIELYRSFKVDLNQLQTDFTLQLEKYKTGCQTVPGLSSHTVTILQNAWMTATIAFEAEKIAAVHLLHAFLSDDTLFALSSTVSKELSKIQPSALIEYAQTHVELANELPSHRASTQALDQFTIDLTEQAELGQIDPVIGRDDEIRLMTDILLRRRQNNPILTGEAGVGKTAVVEGLALKIAQGDVPPALKAVRIKSLDLALLQAGAGMKGEFENRLKNVVKEVKESAVPIVLFIDEAHGLIGGGAQAGQGDAANILKPALARGELRTIAATTWAEYKKYVEKDAALTRRFQVVKIEEPSPELAIEMLRGLVPVMEKHHGVHITTEALKAAVFLSSRYISGRQLPDKAVSVLDTACSRVALSQNSIPGLLDQKYKKRQMIEAQQLQLTNELAFGHSHQTALDELESKLSLLQNEIHQLETTWRDEEGAVKQAKALRDSILAEPSAEKANQLQSIEQQLSSNPMPLVFSHVNEALIAEIIAGWTGIPLGKLKSDEIKAILDLQQHLQERVVGQDHALSKMAEVIKTARAQLNEESKPNGIFFLVGPSGVGKTESALAIAEQVYGSEENITVINMSEFKEEHKVSLLLGSPPGYVGYGEGGVLTEAVRRKPYSVILLDEMEKAHPGVQDIFYQVFDKGMIKDGEGRDIDFKNTIIIMTSNSGTETTMELFQDPELAPDPEALKEALRDDLLQDFKPAFLGRVNVIPYIPLHRDVLEKITALKLSKIQKRIKTNYKAEAVINDRLINSIVDSCNETGSGARALQNVIENKVLPKISESVLNAILNDIRINKIEIEGEVDDLSISIV

SEQ ID NO: 25830 - protein, 356 aa, Vibrio vulnificus YJ016
MVGGRSPTGTTGEILVAHSAQSWSLKVLPIEHYKPAWNAARAESQPSVKNMENVMQNIGFIGLGNMGAPMAENLLKAGHQVKVFDLNQAACEKLAQQGASVCANLEELAQDVSCVITMLPAGEHVRSVYLGTHQGDKGLLALVAENSLLIDSSTIDPQSARLVGEEAAKRGLDFVDAPVSGGVAGAHAATLTFIVGGSDNAFARAETILKNMGKNIFHAGQAGDGQMGKICNNLMLGILMSGTCEALNLGIDNGLDPTVLSNIMLQSSGRNWALELYNPCPGVMENAPASRGYQPGFMSKLMLKDLGLGLDAAAKSQSSVPMGALARNLYAFHNAAGNEELDFSSLFEFYAKNNKE

SEQ ID NO: 25831 - protein, 417 aa, Vibrio vulnificus YJ016
MSKTRFSRQGANMAKSIWIVAAKRTPIGRFQGALAALSAPQLGAAAIHAAMDAVSLSAQQVDEVYMGCVLPAGCGQAPARQAALKAELGYSTPCTTVNKVCGSGMKAVMLAYDQLKAGDKCCMIAGGMESMTNAPYLLKESRSGMRMGHKTTFDHMFLDGLQDAYEGHLMGVYAQQIADKLNYTREQMDTWAIQSAQRATQAQHEAQFKEEITPIFLEGRSSMTLDHDEHPTTIQLDKIPKLKPAFADDGTVTAANSSSIADGAAALILADGDWAEKQGLTPLAIIRGHASHARLPAEFTVAPVYAIEQLLSQLDWGIDEVDLWEINEAFAVVTQIAIQQLGLAEDKVNIKGGACALGHPIGASGARILVTLIHSLRQLQALGTNGDAKCRRSVKGVAALCIGGGEATAIGIEIPVF

SEQ ID NO: 25832 - protein, 505 aa, Vibrio vulnificus YJ016
MNSTLFLTGFGIYVLFLIWLGWFVSRNQKSGEDFLLGGRGLPLFLVLGTTVATMVGTGSSMGAVGFGYANGWAGALYGIGGAVGILLLALWFAPVRKLNFMTMSEELAYYVGANRIVKNVVGLLIFIASIGWLGAHILGGGMYLAWIADIELSTAKIVIAAAFTIYVVIGGYTAVVWTDTIQAVILFVGFILMAVLSVQHIGGLDNLYSAMDPAAVSFLAIDKLGLIPAISLSVVIGVGVLATPSFRQRIYSGKDISTIRRSFVGSGVLYLFFSIIPAIIGMAAHAINPELTNSNYAFPYVAATVLPVGVRMIVLIAGLSATMSSASSDAIAGVSILLRDVYVMFTGRVPNKESMLNYSRLALVVVIGFALLFALTSNDIISYITKMISTVMSGMFVCGMLGRFWSRYNWQGALATLAGASAASVTVMMSPSLTTFWGNPVIPSCLVALTAGVVVSLLTPANQVSAEMARAILDDERALMEMELSDKGELDRDESLANRQAAREL

SEQ ID NO: 25833 - protein, 509 aa, Vibrio vulnificus YJ016
MGFTSLGLSAPILKAIQEKGYDTPSPIQLQAIPAILEGKDVMAAAQTGTGKTAGFTLPILERLAKGPRVRANHIRALILTPTRELAAQVQENVFMYSRHLDLNSAVVFGGVKINPQMLRLRKGADVLVATPGRLMDLYSQNAVKFDQLEVLVLDEADRMLDMGFIRDIRKILALLPAKRQNLLFSATFSDEIRELAKGLVNNPIEISVNPANSTARTVEQCIYPADVKKKPAMLAKLIKDGDWRQVLVFTRTKHGANRLAAFLTDQGLTAAAIHGNKSQGARTKALADFKSGDVRVLVATDIAARGIDIPQLPQVVNFELPKVAEDYVHRIGRTGRAGETGKAISLVCALEAPELFAIERLIQELLPRKALEGYAPTNAVPESKLDTRPIKPKKPKKPKKPKAPNAEAAGSDASSKGNQKAKAADKPQGQNRGNGKAKRQFSAPKEGNNDSANKGKRPNTKGSKPANNANGKTHGKPSHAKPNSAKTGNSKPANGKPSAQRRKPRPQSA

SEQ ID NO: 25834 - protein, 402 aa, Vibrio vulnificus YJ016
MEKVFIVAAKRTPIGAFGGSLKTVAAGELASVAIKGAIEQAKVDASLIDEVIVGNVVSAAQGMGIGRQAAILAGIPAEVPAYTLNMVCGSGMKTVMDGVSHIRSGDAKVVVAAGVEVMSQIPFTVPANVRDGNKMGHMALQDLLIADGLTDVFNQYHMGVTAENVAKEVGITRDQQDEYALASQQKAVAAIEAGKFKDEIVPVEVTVRRQTVTFDTDEYPKANATLEALKGLRPAFDKEGTVTAGNASGINDGASAVILASEQAVKEYGLQPIAEVVSYAQSGLDPKIMGLGPVEAVSKALEKAQLNTADIDVYELNEAFAAQALGVIHQLADKHQVPVASIQDKANPNGGAIALGHPLGASGNRILVTLIHELQKQNGQYGVASLCVGGGMGTAVIVKAVK

SEQ ID NO: 25835 - protein, 542 aa, Vibrio vulnificus YJ016
MMRAVKHRQLSLLFPFLKWLPKVNAQSLQADFWAGLTGAIIVLPQGIAYAMIAGLPAEFGLYTAIIPAILASLFGSSHHLISGPTAALSVIVFTTVSQFAEPSTPLYIQLCFTLTLCAGVIQLLFGLLRFGAVVNFVSHSVVLGFTAGAAIVIGVSQLKHVLGLQYNSGETAIENLLLLGSHAVHFNAKELSVGMVTIVMCVMCKRIWPKLPHMLLATLASMAFALWMNHAGYPVLMVSEVSSRSLSLSSPFAGLNHVEPMLGGIVAVAMLGLVEAISISRSVALKSRQSLDSNQEFVGQGLSNIVGSFFSCYVSSGSFTRSGVNYSSGAKTPLAAVFAALLLLVIMLLFAPYAANIPIAGMGGLLLVVAWHLVDVHHITTIVKHDKKEAVVLVATCLAALFLHLELSIYVGVGASLFFYLRKTSRPAIERLSHDELNLEQQDDIAVIRINGSIFFGCVQYLHQEMQNVSAKHLIILGRGINFIDHLGVQMLDDYVSTSGRHVYFCRFKASAKASLLNGATSVREEHFSERLTPLLTLICKG

SEQ ID NO: 25836 - protein, 497 aa, Vibrio vulnificus YJ016
MIESSFAITGTFIAYLILMVAIGVYAYKKTSSSSDYFLGGRSLGPWPAALSAGASDMSGWLLLGLPGYAYAAGIESFWLAGGLLVGTWANWLVSAKRLRTYSIQTDALTLPEFLSRRFDDKSKLIQTISAFFILLFFLFYTSSGLVAGGKLFETVFGLDYSTAVIIGTLCVVSYTLFGGFLAVSWTDLVQGLLMAAALMIVPIAVMEGGFGQLATDMHNINPELLTLWNDAKGEPLSAIAIISLVAWGLGYFGQPHILARFKASRTNRELGTARRIAVGWTALSMAGAILVGLVGLVWVNGHPGTELADGEKIFMLLVNTVFHPVIAGILLAAILAAVMSTADSQLLVSSSALAEDFYKQVIKPDASSQEIVMVGRIGVVVISIIALILAMTPDSSVLGLVSYAWAGFGAAFGPAVVLSLYWKGMNRNGALAGILIGGITIVVWKQLTGGWFDVYEIVPGIIFSTIAIVGVSKLTGGADNTVLEQHREFEKKLVELE

SEQ ID NO: 25837 - protein, 539 aa, Vibrio vulnificus YJ016
MDSQRTLLVLLLALVSFLLFQQWQVAKNPAPQAVEQAQTSSTLPAPSFADELDPAPAQQASAKLITVTTDVLTLSIDTVGGDVVAADLNQYSAELNSANAFELLRDTQGHQFIAQSGLVGPQGIDLSSNNRPSYQVSADSFTLADDQNELRIPMTYQANGLEYTKTFILKRGSYAIDVEFDVINKSGNNATLGMYAHLRQNLMDAGGSITMPTYRGGAYSTEDTRYKKYSFEDMQDRNLSLTLTNGQGWAAMIQHYFAAAWIPRNEPGANLYTRVIGNMGDIGVRMPNKTVADGDSAHFTATLWAGPKLQDQMAEVAPNLDLVVDYGWLWFIAKPLHWLLSVIQSFVGNWGVAIICLTFIVRGAMYPLTKAQYTSMAKMRMLQPKLQAMRERIGDDRQRMSQEMMELYKKEKVNPLGGCLPLILQMPIFIALYWALMESVELRHSPFILWIHDLSAQDPYFILPLLMGGSMFLIQKMSPTTVTDPMQQKIMTFMPVMFTFFFLWFPSGLVLYWLVSNIVTLIQQSLIYKALEKKGLHTK

SEQ ID NO: 25838 - protein, 387 aa, Vibrio vulnificus YJ016
MKNVVIVDCLRTPMGRSKGGAFRHTRAEDLSAHLMKGILARNPQVNPSEIEDIYWGCVQQTLEQGFNVARNAALLAGLPIEIGAVTVNRLCGSSMQALHDGARAIMTGDAEICLIGGVEHMGHVPMNHGVDFHPGMSKHVAKAAGMMGLTAEMLGKLHGISREQQDEFAARSHARAHAATLEGRFKNEILPTEGHAADGTLFTLDHDEVIRPETTVEGLSQLRPVFDPANGTVTAGTSSALSDGASAMLIMSEEKANELGVTIRARIKGMAIAGCDPSIMGYGPVPATQKALKRAGLSIEDMDVIELNEAFAAQSLPCAKDLGLLDVMDEKVNLNGGAIALGHPLGCSGARISTTLINLMEAKDAKYGLATMCIGLGQGIATVFERP

SEQ ID NO: 25839 - protein, 362 aa, Vibrio vulnificus YJ016
MLTTTIFPGRYVQGKDARKQLGVELNRFGKKGLMICDSFVYDTLFSEFEPYLETVEVEVIRFASECCDEEITRLTAMLKNFEGEFVVGLGGGKTIDTAKATSYEARVPVAIVPTLAASDAPCSALSVIYTQEGEFKRYLFLPQNPNLVLVDTQIIAKAPVRFLIAGIGDALATWFEAESCQQSFASNMTGYMGSLSAYALARLCYDTLLEYGVIAKTSNEQGVVTPALERVVEANTLLSGLGFESGGLAASHAIHNGLTVLEPTHVFLHGEKVAFGLLSSLFLTDKPAQTIATVYDFCEKVGLPTTLSQIGLENVSDEDLLAVAEASCAEGETIHNEPRTVTPDMVFAAMKAANVEGLRRKS

SEQ ID NO: 25840 - protein, 323 aa, Vibrio vulnificus YJ016
MTLSFDYRAVAKQVLATEIRGLEQLSQYFDEQFEQACELILNNAGKVVVMGMGKSGHIGKKIAASLASTGTSSFFVHPGEASHGDLGMIERGDIVLAISNSGESSEILALFPVLKRLGIRIISMTGKPSSTMAKLADYHLQITVPEEACPLGLAPTTSTTATLVMGDAMAVALLQARGFTAEDFALSHPGGALGRKLLLKLNDIMHTDEQLPRVSPNALVRDALLEISQKGLGMTAIVDQDNLLLGIFTDGDLRRILDKRVDIHSAQIGEVMTKHPTVANPSMLAVEGLNLMQQKKINGLMLCQDGKLVGALNMHDLLKAGVM

SEQ ID NO: 25841 - protein, 388 aa, Vibrio vulnificus YJ016
MKFVDEAVIKVQAGDGGNGVVSFWREKFVTKGGPDGGDGGDGGDVYIQADENLNTLIDYRFQRFYEAERGQNGSGGNCTGKRGKDITLRVPVGTRAVDIHTNEIVAEVAEHGKKVMVAKGGWHGLGNTRFKSSVNRAPRQKTMGTKGEIRELRLELLLLADVGMLGLPNAGKSTFIRAVSAAKPKVADYPFTTLIPSLGVVSVVPEKSFVVADIPGLIEGAADGAGLGIRFLKHLERCRVLLHMIDIFPIDQSDPVQNALTIIDELEQYSEKLANKPRWLVFNKVDLVSEEQADEIIQEVIDALGWEEQYFKISAVNRQGTKELCYKLADFMEQLPREEQEVSEEEKVNFMWDYHPDANQGEVITEDDDDWDDWDDEEDDGHVIYVRE

SEQ ID NO: 25842 - protein, 857 aa, Vibrio vulnificus YJ016
MRLDRFTSKFQIAISDAQSLALGRDHQYIEPVHLMVALLDQNGSPIRPLLTILNVDVTHLRSKLSEMLDRLPKVSGIGGDVQLSSAMGAMFNLCDKIAQKRQDAYISSEIFLLAAIEDRGPLGQLFKELGLTEQKVSQAIEQIRGGQKVNDQNAEELRQALEKFTIDLTERAEQGKLDPVIGRDDEIRRTIQVLQRRTKNNPVIIGEPGVGKTAIVEGLAQRIINNEVPEGLRGRRVLSLDMGALVAGAKYRGEFEERLKSVLNELSKEEGNIILFIDELHTMVGAGKGEGSMDAGNMLKPALARGELHCVGATTLDEYRQYIEKDPALERRFQKVLVDEPTVEDTIAILRGLKERYELHHHVEITDPAIVAAASLSHRYVSDRQLPDKAIDLIDEAASSIRMQIDSKPEALDKLERKIIQLKIEQQALSNEHDEASEKRLRSLNEELNEKEREFAELEEIWNAEKAALSGTQHIKAALEQARMDMEFARRAGDLSRMSELQYGRIPELEKQLDLATQAEMQEMTLLKNKVTDNEIAEVLSKQTGIPVSKMLEAEKEKLLRMEEVLHKRVIGQKEAVEVVANAIRRSRAGLSDPNKPIGSFLFLGPTGVGKTELCKTLANFMFDSEDAMVRIDMSEFMEKHSVARLVGAPPGYVGYEEGGYLTEAVRRKPYSVILLDEVEKAHPDVFNILLQVLDDGRLTDGQGRTVDFRNTVVIMTSNLGSSRIQENFAMLDYQGIKEQVMEVVTKHFRPEFLNRVDETVVFHPLSQDHIKSIAAIQLNRLANRMEEHGYQLEVSDKALELIAQVGFDPVYGARPLKRAIQQSIENPLAKSILAGSVLPDKKIQLIVNNDQIVAHQ

SEQ ID NO: 25843 - protein, 404 aa, Vibrio vulnificus YJ016
MKLPIYLDYSATCPVDPRVAEKMVQYMTMDGTFGNPASRSHRYGWQAEEAVDTAREQIAELLNADPREIVFTSGATESDNLAIKGAAHFYSKQGKHVITSKTEHKAVLDTCRQLEREGFEVTYLEPESNGLISLSKLEAAMRDDTVLVSIMHVNNEIGVIQDIEAIGELCRSRKIIFHVDAAQSAGKVAIDVQKLKVDLISLSAHKIYGPKGIGALYVRRKPRIRLEAQMHGGGHERGFRSGTLPTHQIVGMGEAFRIAKLDMEKDYQHALALRNRLLDGVKDMEAVTINGDLDQRVPHNLNISFAFVEGESLLMSLKDLAVSSGSACTSASLEPSYVLRALGLNDELAHSSIRFSFGRFTTEEEIDYAIEQIRVAVAKLRDMSPLWDMYKEGIDLNTVEWAHH

SEQ ID NO: 25844 - protein, 314 aa, Vibrio vulnificus YJ016
MPDMKLFAGNATPELAQRIADRLYISLGDATVSRFSDGEVAVQINENVRGSDVFIIQSTCAPTNDNLMELVVMIDAMRRASAGRITAVIPYFGYARQDRRVRSARVPITAKVVADFLSNVGVDRVLTIDLHAEQIQGFFDVPVDNIFGTPVLLEDMHARGLEDPVVVSPDLGGVVRARATAKALGDIDIAIVDKRRPRANVSEVMNLIGDVEGRDCVIVDDMIDTGGTLCKAAEALKERGAKRVFAYATHAVFSGNAAKNIKNSVLDQVIVTDSITLSKEMAATGKVTQLTLSGMLAEAIRRISNEESISAMFN

SEQ ID NO: 25845 - protein, 554 aa, Vibrio vulnificus YJ016
MCSVFGILDIKSDAAALRPIALEMSKKLRHRGPDWSGIYASDRAILAHERLAIVGLNSGAQPLYSPDKKLILAVNGEIYNHKEIRARYEGKYDFQTDSDCEVILALYQEMGADLLEELNGIFAFVLYDEEKDQYLVGRDHIGIIPLYQGYDEHGNYYVASEMKALVPVCKTISEFPPGSYYSSTDAGPQRYYIRDWNEYAAVQGNTSSKEELTAALEAAVKRQLMTDVPYGVLLSGGLDSSITSAVAKRYAAMRIEDDEQTEAWWPQLHSFAIGLDGAPDLKAAREVAAKIGTVHHEMTYTIQEGLDAIRDVIYHIETYDVTTIRASTPMYLMGRKIKAMGIKMVLSGEGADEIFGGYLYFHKAPNAQEFHEETVRKLLALNMFDCARANKSLAAWGVEGRVPFLDKEFIDVAMRLNPADKMCGNGKMEKHILRECFEHYLPDSIAWRQKEQFSDGVGYGWIDTLKAVAEEKVTDQQMEAAKFRFPYNTPTTKEGYVYREIFEELFPLPSAAECVPGGPSVACSSAKAIEWDESFKNCIDPSGRAVKAVHNEAY

SEQ ID NO: 25846 - protein, 556 aa, Vibrio vulnificus YJ016
MSEADARPSNFIRQIIDKDLADGKHTSVHTRFPPEPNGYLHIGHAKSICLNFGIAQDYQGKCNLRFDDTNPEKEDIEYVESIKNDVSWLGFEWDDEICYSSNYFDKLYEYAVELINKGLAYVDELSPEQIREYRGTLTAPGKPSPYRDRSAEENLALFEKMRDGGFEEGKACLRAKIDMASSFMVMRDPVLYRVRFASHHQTGDKWCIYPMYDFTHCISDALEGITHSICTLEFMDNRRLYDWVLDNITIDCRPHQYEFSRLNLEYTVMSKRKLNQLVTEKLVNGWDDPRMPTISGLRRRGFTPASIREFCKRIGVTKQENMIEFSSLESCIRDDLNENAPRAMAVLDPVKLVIENFPAGEVENLTVANHPNKPEMGEREVPFSREIWIEREDFREEANKKYKRLVLGSEVRLRGAYVIKAERVEKDDEGNITTIFCTYDSETLGVNPADGRKVRGVIHWVSADKGVPAEIRLYDRLFTVPNPAAADDFASTINPESLTVMNGFVEPSLVEAEAEKGYQFERMGYFCADSKDSSKEHLVFNRTVGLRDTWAKIEAK

SEQ ID NO: 25847 - protein, 125 aa, Vibrio vulnificus YJ016
MRKICSHSVNEEAMETIDKIKQQIAENPILLYMKGSPKLPSCGFSSQAAQALMACGEKFAYVDILQNPDIRAELPKYAEWPTFPQLWVEGELIGGCDIVIEMFQKGELQPLIKEAAARAAGSDAE

SEQ ID NO: 25848 - protein, 357 aa, Vibrio vulnificus YJ016
MSKQQKILFIDRDGTLIVEPPVDFQVDRLDKLKLEPFVIPSLLSLQDAGYRLVMVTNQDGLGTDSYPQEDFDAPHNMMMEIFESQGVKFDDVLICPHFEKDNCSCRKPKLGLVKEYLQAGKVDFQNSFVIGDRQTDLQLAENMAIRGIQYNPETMGWKQILKDLTVKARVAEVVRTTKETDIKVFVNLDEQGGNAISTGLGFFDHMLDQIATHGGFQMVCKVEGDLHIDDHHTVEDTALALGQALKEALGDKRGIGRFGFSLPMDECLAQCALDLSGRPYLKFDAQFSREQVGDLSTEMVVHFFRSLTDTLACTLHLSSAGNNDHHIIESLFKAFGRTLRQAIKVEGTELPSSKGVL

SEQ ID NO: 25849 - protein, 371 aa, Vibrio vulnificus YJ016
MPLNHSCPPLWGHLSSFYPNKECSMFFEWQGNEPATLQCVDKFFETDDTVSIRLADLTESLLFQFKPGQFVNLGVEIDGKMEFRAYSISSLAGEEYLQFTIKRVEGGKVSNFIIDSLLIGDTVQALAPAGEFNCVDHPPRELDGQGKALLISAGCGVTPVFAMAKHWLSNEMNVDIEFLHIARSAQETIYFDHLSTCQSAYAHFHLKLLLKDAQGTTHPQGRFNAQWLQDLVPDFATRTIYLCGPNQFMQDTQDYLQALGFDMNHFYHESFTPEKVEAMEASDEEVCISVPDFAQTINAKKGQLLADVLENAGLPLIVACRSGICGSCKCKVANGQVRSISQETLTADEIAQGYVLACSSHIESDLDVSLH

SEQ ID NO: 25850 - protein, 406 aa, Vibrio vulnificus YJ016
MSVTASQVHGAVQTLTQSSDTLFLLLGAIMVFLMHAGFAFLEVGTVRHKNQVNALVKILADFGISTLAYFFIGYWVAYGAHFFADAETLAQGNGYELVKFFFLLTFAAAIPAIVSGGIAERARFYPVLIATFFTVGIVYPLFEGIIWNGNFGVQAWFEATFGVGFHDFAGSVVVHGVGGWIALVAVIFLGMRRGRVRAGKHTNFAPSNIPFLALGAWILCVGWFGFNVMSAQTLNGISGLVAMNSLMAMAGGIVAALIAGKNDPGFIHNGPLAGLVAVCAGSDLMHPLGALVTGSVAGVLFVYLFTYLQNKTKIDDVLGVWPLHGVCGAWGGIAAGIFGQSSLGGLGGVSFTVQLLGTLLGISVALIGAGIVYGAINRFSGLRLSQEDEFNGADLAIHKISSVNAE

SEQ ID NO: 25851 - protein, 208 aa, Vibrio vulnificus YJ016
MTGRGNTLFELNKNQLLQSFQFNLPRGYHAESTARVAHLKGSKLRDAAVLIGFVEREQGLNVILTKRASHLKHHPGQISFPGGKYEESDRSLQATALRETREEIGIAPDAISIFGQMPELVTVSRFKVTPILAFVEPNYQIVIDKNEVDEVFEVPANHLLDTQKLKSAQFRVNQSHHRVFAIPYQHHFIWGMTAQIIQAMQQQIMKRG

SEQ ID NO: 25852 - protein, 525 aa, Vibrio vulnificus YJ016
MRMTKGIDKYSIDSTDYTVGQDNVQRWGFDVHNPVFGISAGLVGLFLVAALVLDAHTMKTALDGIKWQIIGAFDWLFIWSGNIFVIFCLALIVSPLGKIRLGGRDAVADYSFLSWIAMLFAAGMGIGLMFWSVAEPVAYFTGWYETPLNVTPNSPEAAKLAMGATMFHWGLHPWAIYGVVALSLAFFTYNKGLPLSMRSIFYPLLGDRAWGWAGHLVDILAVVATLFGLATSLGLGAQQAASGIHHVFGVEAGLGLQIAVITVVTLLAVVSVVRGIDGGVKVISNINMLVAFALLALVGLIGWAVSVGSVSTTLSAYIENIIPLSNPIGREDEAWFQGWTVFYWAWWISWSPFVGMFIARVSKGRTVREFMTAVLIVPTVVTLLWMSVFGGMAIDQVINGIGELGAKGLTDVPLAMFQMFDQLPYGTLLSVIAVVLVLVFFITSSDSGSLVIDSITAGGKVDAPVLQRVFWAFMEGAIAVALLWVGGTEAIQALQAGAISTALPFTFILLAMCVSLLMGMRTEKQ

SEQ ID NO: 25853 - protein, 714 aa, Vibrio vulnificus YJ016
MSRTIMLIPASAGVGLTSVSMGVLRAMERKGVKVSFYKPIAQPRSGGDLPDLTTTIVGANSDMKIGEPLLMSVAENLIGNDNMDELLETVVERYNQINKDADVTLIEGLVPTRKHPFANQVNAEIAATLGAEIVLVATPGTDNPAQLKERIEVACSNFGGTKNKNISGVIINKLNAPVDEAGRTRPDLSEIFDDADSAKQNQLEVMQIFNSSPIRVLGCVPWSINLIATRAIDMAKHLKAEVINEGDINTRRIKSITFCARSLPHMIEHFKPGSLLVTSADRPDVIVAASLAAMNGVEIGAVLLTGGYDIPTEIENLCKPAFESGLPIFKAQGNTWQTSLNLQSFSLEVPADDKERIEFINDHVAGHIDGNWIESMTEGTERSRRLSPPAFRYQLTELARKAGKRIVLPEGDEPRTVKAAAICAERGIAECVLLGNPEEIKRVAAQQGVELGAGVKIIDADAIRENYVARLVELRGSKGMTEVVAREKLQDSVFLGTMMLENDEVDGLVSGAVHTTANTIVPPFQIIKTAPNASIVSSVFFMLLPDQVLVYGDCAINPDPTAEQLAEIAIQSADSAAAFGIDPRVAMISYSTGESGKGADVDKVREATKLAQEKRPDLIIDGPLQYDAAIMENVAASKAPNSPVAGKATVFVFPDLNTGNTTYKAVQRSADLVSIGPMLQGMRKPVNDLSRGALVDDIVYTIALTAIQATQDQK

SEQ ID NO: 25854 - protein, 587 aa, Vibrio vulnificus YJ016
MAKIILSQWFPGLVQLQHYQKEWLADDVRAAFSVVAVALPVAIAYAQLTGVSAIVGLYSCVLPMLVYALMGTSRQLIVGPDAATCAVIAAVVTPLAAGDATKHWQLVMTMTAMTGMWCVLASRLKLGILADFLSRPILLGLLNGVALTIIVGQFAKVVGWKYEQRYLLERLWEAPQRLADLHWPTLALSVATVVVYLITKRFRPSWPAAMLAILITTASVWLLRLQEVGVSVVGLTQGGFPNFQTPEFELGVTRELVVPALNLAMVSFVSMMLTARSFAAKNGYDIDADKEFRALGFANIASAFSQGFAISGADSRTAVNDANGGKSQLVSIIAAITIAVIAVFIYQPLQFIPIASLGVVLIIASLSLLDLKGIWILRKRDKDAFYLASITFVSVLVIGVIPGITLAVLLGLFQFLRIVMRPSDQLLGLDEEGTIRTVDGTGKATPIPGMVIYRFNSPLTYFNAPYFKRRLLEHAEHTKDVGCVVVDAVSSFTHLDLSVMATLADVHETLKKRGIRLILAGRKRRLRQWCELTGISTSEGGILLRADMYLAIKLSGCYLSAVGEGQVPTVQKEPDLEEPPKAIPEVA

SEQ ID NO: 25855 - protein, 591 aa, Vibrio vulnificus YJ016
MKKKNHSFMSINTDESTWRTFKRLWTFIRLYKSGLAVAVVALIINAVSDTYMVSLLKPLLDEGFGSAESDFLRTLPLLVFGLMFIRGISSFVSTYCLSWVSGNVVMQVRRMVFNHYMQMPVSYFDKEKSGSLLSRITYDSEQVSAATSQALVSIVREGTSIIGLLVLMFYNSWQLSLVLILVAPVVAWAIGFVSKRFRKISKNMQTTMGIVTSSAEQMLKGHKVVLSYGGQEVEKSRFDVVSNQMRQQSMKLITAQAAANPIIQMIASIAIVVVLYLASVDTIKDQLTPGTFTVVFSAMFGLMRPLKALTNVTSQFQRGMAAAQTLFALVDLEPEKNTGTYSVERAKGEVNVKDISFTYEGAEKPALSHVSFDIPRGKTVALVGRSGSGKSTIANLFTRFYDVDSGEIQLDGVDVRDYELKNLRTQFALVSQNVHLFNDTIANNIAYAAGDKYSREDIERAAELAHAMEFISKMENGLDTVVGENGASLSGGQRQRVAIARALLRDAPVLILDEATSALDTESERAIQSALDELQKNKTVLVIAHRLSTIEKADQILVIDDGAVVERGSHSELIEKDGAYAQLHRIQFGEG

SEQ ID NO: 25856 - protein, 414 aa, Vibrio vulnificus YJ016
MERYIMELTTTVSELRYALDTFFFLISGALVMWMAAGFAMLEAGLVRSKNTTEILTKNFCLYAIACTTYLVVGYNIMYVDNSEGGWLPSIGALIGSQAEGADHSLESDFFFQVVFVATAMSVVSGAVAERMKLWSFLLFSAILTAFIYPVEGYWTWGGGFLSAAGFSDFAGSGIVHMAGASAALAGVLLLGARKGKYGKNGEVYPIPGSNMPLATLGTFILWFGWFGFNGGSQLMVSDFENATAVGQIFLNTNAAAAAGAITALFVCKTTWGKADLTMILNGALAGLVAITADPLSPSPLYSVAIGAVAGALVVFSIVGLDKLKIDDPVGAISVHGVCGFFGLMVVPISNGDASFLSQLFGAVVIFAWVFGASLAVWAVLKATIGIRVSEEEEMEGMDMHDCGVGAYPEFVTVK

SEQ ID NO: 25857 - protein, 409 aa, Vibrio vulnificus YJ016
MAKVSLEKEKIKILLLEGLHPSSVEVLQAAGYTNIEYHKGSLSDADLLEAVKDAHFIGIRSRTNLTEEVINAAQKLVAIGCFCIGTNQVDLNAAAKRGIPVFNAPFSNTRSVAELVLGQILLLLRGIPEKNALAHRGIWKKSADNSYEARGKRLGIIGYGHIGTQLGIIAENLGMRVYFYDIENKLSLGNATQIPTMSELLNKCDVISLHVPETPDTKNMMGAEEFARMKPGAIFINAARGTVVDIEALCHSLESGHIAGAAIDVFPVEPATNADPFESPLQKFDNVILTPHVGGSTQEAQENIGVEVAGKLAKYSDNGSTLSSVNFPEVSLPEHRSCSRLLHIHQNRPGILTQINTIFAEEGINIAGQYLQTSADIGYVVIDVETERSEEALVKLKEIEGTIRARILH

SEQ ID NO: 25858 - protein, 320 aa, Vibrio vulnificus YJ016
MSLPVVVFLDRATIPAHITLPTLAFEHRWVEYDFTSPEQVIERLQAADIVITNKVLLDQAVLAQLPNLRMIAVAATGFNNVDVDFCAEKGIAVANVRGYATRSVPEHVIAMLFALRRNLFGYHQDIAAGVWQQDKQFCFFSHPIGDVAGSTLGIIGSGTLGQATAQLAQALGVKVLFAERKGQSDCRQGYHRFEEVLSQADAISLHCPLSAQTHHLIGAAELASMKSNAILLNTGRGGLVDEQALVEALKKGDIAAAGVDVFSAEPADESNPLLANMHLPNLLLTPHVAWGSDSAITQLCEILLENINAYWRGETLNRLV

SEQ ID NO: 25859 - protein, 275 aa, Vibrio vulnificus YJ016
MKKQRAFLKWAGGKYGLVEDIQKHLPPARKLVEPFVGAGSVFLNTDYEHYLLADINPDLINLYNLLKEQPELYIREAKRWFTQENNRKDAYLSIRSEFNKTDDVMFRSLAFLYMNRFGFNGLCRYNKKGGFNVPFGSYKKPYFPEAELEFFAEKAQKATFVCEGYQETFRRARKGCVVYCDPPYAPLSNTANFTSYAGNGFTLDDQAALADIAEKTASERGIPVLISNHDTKLTRRLYHGAELNVVKVKRTISRNGGGRNKVDELMALFHKPDIS

SEQ ID NO: 25860 - protein, 418 aa, Vibrio vulnificus YJ016
MALTAECRPDKWRMEMSKLNVNKVVVAYSGGLDTSVIIPWLKENYDCEVVAFVADVGQGEEELVGIEEKAKASGASECYVVDLKEELVADYIYPTLKTGAYYEGKYLLGTSMARPVIAKAQVEIARKVGADALCHGCTGKGNDQVRFEGAFAALAPDLKVIAPWREWDLVSREQCLDYLAERNIPCAASLTKIYSRDANAWHISTEGGVLESTWNAPNEDCWVWTVDPEQAPNEAEYVTLQVEKGEVVAVDGEQMTPYNALVYLNEKGAKHGVGRIDIVENRLVGMKSRGCYETPGGTIMMEALRAVEQLVLDKTSFEFREELGLKASHLVYDGRWFTPLRKSIMAAADELAQDVNGEVVVKLYKGMATVTQKRSENSLYSEAFATFGEDEVYDQSHAGGFIRLYSLSSRIRALNSQK

SEQ ID NO: 25861 - protein, 803 aa, Vibrio vulnificus YJ016
MSQVRQLHKFGGSSLADPDCYRRVVNILKEYSGDNDLVVVSAAGKTTNRLIEFSEALEKDGRLAHEALQALRQYQTGLVEALIASNQRSELLDQLADEFSTLAELSAPLTTAQKAAILGHGEVWSSRLLAALLNQHDLAAVAQDARAFLRAETGTQPEVDRARSYPLIKEVLAQHSHRRVVITGFMAQNQAGETVLLGRNGSDYSATVIGALAEVAKVTIWSDVAGVYSADPRLVSDACLLPLLRLDEASELARLAAPVLHSRTLQPVAQSATELNLRCSYTPESGSTRIERVLASGRGAKIITSLDDVMLVQLNFSAGHDFDRQQQEVLSALKRAQLEPLAFEAQKDQFTLRLAYTTEIAGGALAHLQELGLAAEIKLKEGFSLVAAVGAGVTNNASHCFGFYQQLKHSPVEFISEAESGLSLVAVMRRVDIPVLVKAIHTQLFQAQKRVALALCGKGNIGSSWLSLFAQQKSELEKRHGMNFELVAVVDSQTYLFNEQGLDAAAVHAHFDDDSVPNDGANWLQRLSSIQDYDEVVVLDVTASRELAAQYLDIAHQGMHLISANKIAGSASSDYYYQVQDAFSKIGRHWLYNATVGAGLPINHTVRDLRESGDEIVALSGIFSGTLSWLFQQFDGSVPFAELVDLAWQQGLTEPDPRSDLDGSDVMRKLVILARESGLDIEPENVKVESLVPEELKELSLDDFFDQAHLLSERLQERLTKAQRQDQVLRYVARLEKNGKARVSVEALQREHALANLLPCDNIFAIESKWYRDNPLVIRGPGAGREVTAGAIQSDLNRLAGLF

SEQ ID NO: 25862 - protein, 394 aa, Vibrio vulnificus YJ016
MLSENTINIVKSTAPLLAETGPKLTAHFYQRMFEHNPELKDIFNMSNQRNGDQREALFNAICAYASNIDNLPALLGAVEKIAHKHSSFLITADQYQIVGSHLLATIDELFSPGQAVLDAWAEAYGVLANVFIQREEQIYQANQSQTGGWRGLREFELVEKQYESAHICSFVFKPVDGGSVVSFKPGQYLGIYINDEQFENQEIRQYSLSSSVRPDCYRISVKREEGGRVSNYLHDHLDVGSKVKLAAPAGDFFLDAAPTAPVVLISAGVGLTPTLSMLESLTEHQAPVTWIHATENGQQHAFKQHVKQLVETHPHFNSLVWYNQPNSDDKIGDDFQFSGWVNLHEIETVLKQADVQVYFCGPVGFMQFIAKQLLEMGVPEQQFHYECFGPHKVV

SEQ ID NO: 25863 - protein, 102 aa, Nicotiana tabacum
PNSYVFVVDMPGLKSGDINVQVEDDNVLLISGERKREEEKEGAKYIRMERRVGKFMRKFTLLENANTDAISAVCQDGVLTVTVQKLPPPEPKKPKTIEVKIA

SEQ ID NO: 25864 - protein, 106 aa, Nicotiana tabacum
PNCYIFIVDMPGTKANEIKVQVEDDNVLVVSGERKRDKEKKDEKESVKYLRMERRVGKFMRKFVLPENANIDSITAVCQDGVLKVTVEKLPPPERKKPKTIDVKLA

SEQ ID NO: 25865 - protein, 159 aa, Campylobacter jejuni
ATLVMGDALAAALMKVRNFKPDDFALFHPGGSLGRKLLTKVKDLMVSSNLPIVHPDTEFNDLVDVMTSGKLGLCVVLENEKLIGIITDGDLRRALKASDKPRFDFKAKEIMSTNPKVVDADAMASEAEEIMLKHKIKEIVVSKEDKVVGIIQLYAIGNV

SEQ ID NO: 25866 - protein, 162 aa, Campylobacter jejuni
STTATLVMGDALAAALMKVRNFKPDDFALFHPGGSLGRKLLTKVKDLMVSSNLPIVHPDTEFNDLVDVMTSGKLGLCVVLENEKLIGIITDGDLRRALKTSDKPRFDFKAKEIMSTNPKVVDADAMASEAEEIMLKHKIKEIVVSKEDKVVGIIQLYAIGNV

SEQ ID NO: 25867 - protein, 322 aa, Pichia angusta
TSVVCCVRFSKDGKFLATGCNKLTQVFSVETGDLVARLSDESSASSNGSYDTDTGDLYIRSVCFSPDGKFLATGAEDKIIRIWDLATRTIVKYLYGLVQDIYSLDFFPDGSKLVSGSGDRTVRIWDVFTGQCSLTLSIEDGVTTVAASPDGKLIAAGSLDRTVRVWDANQGFLVERLDSANESGNGHMDSVYSVAFTHDGKEIASGSLDRTVKLWSLKDLQKQQGSSKSNCEVTYVGHKDFVLSVCCTPDDEFILSGSKDRGVIMWEKATGEPYIMLQGHRNSVISVNVSPVMTQKRGVNGGYFATGSGDCKARIWRWEKVS

SEQ ID NO: 25868 - protein, 1118 aa, Cyrtosia septentrionalis
  misc_feature (1003)..(1003): Xaa can be any naturally occurring amino acid
  unsure (1)..(1118): unsure at all Xaa locations
MSFSRPSQSSSASSRSRQSARIIAQTTVDAKLDAEFDAMGTCFDYSQSIRAPPDEQRSEKVTAYLQHIQRGKLIQPFGCLLALDEKTFKVLAFSENAPEMLTMVSFTVPSVGDHPTIVIGTDVRNLFTSPSTAALQKALGFAEVSLLNPILVHCKSSGRPFYAIVHRVTGCLIVDFEPVKPNDVPMTAAGALQSYKLAAKAISKLQSLPSGSMEKLCNTVIEEVFELTGYDRVMVYKFHEDDHGEVFAEITKPGLESYFGLHYPATDIPQAARFLFMKNKVRMICDCHAKHVKVYQDKKLPFDISFCGSTLRAPHSCHLQYMENMNSIASLVMAVVVNEGEEDGGNEAEENSPPHRRKRLWGLVVCHNESPRFVPFPLRYACEFLMQVFAIHVNKEFELENLVKEKKIMRTQTMLCDMLLREFVPLGIITQTPNIMDLVKCDGAAFLYQDKIWRLGVTPSEPQIYDIVHWLSACHMDSTGLSTDNLHEAGYPGISSLGDVVCGMAVARITSKDMLFWFRSPAAASIRWGGAKHDAADKDDGRRMHPRSSFKAFLEVAKVRSLPWGDHEMNAIHSLQLILRDTLNGIENKAIIDPQLNELKLEGMVEVVTNEMVRLIETATVPILAVDADGLINGWNMKIAQLTGLSDDEARGKHLLTIVEDSSIDVVKRMLLLALQGIEEQNVQFQVKTSGVRRDDGPLILVVNACVSRDIHSNVVGACFVAQDVTGQKFILDKFTKIEGDYKAIVQNPCPLIPPIFGTDEFGWCSEWNLAMTKLSGWKRDEVMDKMLLGEVFGINTSCCRMKSQDALVNFSILISNAFSGQETEKSPFSFMNRSGKHVDCLLSVSRKVDVEGNLTGIFCFVLATGHELQQSQPLVQQETVKRMKALAYIRNEIRNPLSGIMYTRKMLVGTNLDEEQSLLLSTGAKCHNQLNRILEDLNLEDIMNSCLELEMNEFNLKDVVLTAVSQVMLPSEGKGVNVVYDLPDGLLSEYVYGDSLRLQQIXADFLLVCVKYSPDGAQVEITANLKKNTLGKSLQLIHVEIRITHAGNGVAEELLSEMFGSKEETSEEGMSLMVCRKLLRLMNGDVCYLREANKSVFILSAELACASKQPKDVKAAV

SEQ ID NO: 25869 - protein, 154 aa, Staphylococcus epidermidis RP62A
KNVKIVLPEGEDERVLIAATQLQKTDYVSPIVLGNEDNIKSLASKHALDLTQIEIIDPATSELKDELVDAFVERRKGKATKEQAVELLDNVNYFGTMLVYTGKAEGLVSGAAHSTGDTVRPALQIIKTKPGVSRTSGIFFMIKGDEQYIFGDCA

SEQ ID NO: 25870 - protein, 154 aa, Staphylococcus epidermidis
KNVKIVLPEGEDERVLIAATQLQKTDYVSPIVLGNEDNIKSLASKHALDLTQIEIIDPATSELKDELVDAFVERRKGKATKEQAIELLDNVNYFGTMLVYTGKAEGLVSGAAHSTGDTVRPALQIIKTKPGVSRTSGIFFMIKGDEQYIFGDCA

SEQ ID NO: 25871 - protein, 65 aa, Streptomyces sp. AA8321
MASGTVKWFNAEKGFGFIAQDGGGPDVFVHYSAINASGFRSLEENQQVTFDVTQGPKGPQAENIT

SEQ ID NO: 25872 - protein, 65 aa, Streptomyces sp. AA8321
MACGTVKWLNAEKGFGFIAQDGGGPDVFVHYSAINASGFRSLEENQQVTFDVTQGPKGPQAENIT

SEQ ID NO: 25873 - protein, 65 aa, Streptomyces sp. AA8321
MASGTVKWFNAEKGFGFIEQDTGGPDVFAHYSNIRASGFRSLEEAQRVEFNVTQGQKGPQAENVS

SEQ ID NO: 25874 - protein, 398 aa, Mycoplasma hominis
MSKILIINAGSSSIKWTLYSKDLNIIAKGIAQRIKIKNSSIILNYNNKKEEVSIELPSFLETVKQLVNLWINKNIISDFNEIKYVAFRIVNGGIHLQDTSEVTPQTIAYLEDAIELAPVHNPGALEAVKAFKEILPFAKMTFHFDTSFHKTLPKEAYTYAIDANITDELNVRKYGFHGLNHHFITLKLQEILNKDKVNFVNLHIGNGASLAAIQDSKSIDTSMGFTPLAGVMMGTRSGDVDCSIIPYIMKHKNWDIERTIKMLNEESGLLGVSKISSDIRDVEEAKKTNERAKFAIDLYVRKIADYLINYMNKIEGKIDAIVFTAGVGENDEYIRQAVIDKIHLVKLEIDSELNKGRDFDSYKLISTKNSSIPIYIIRADEELYIAKEVKQFFDDNIR

SEQ ID NO: 25875 - protein, 619 aa, Arabidopsis thaliana
MVFKRKLDCLSVGFDFPNIPRAPRSCRRKVLNKRIDHDDDNTQICAIDLLALAGKILQESESSSASSNAFEEIKQEKVENCKTIKSESSDQGNSVSKPTYDISTEKCVVNSCFSFPDSDGVLERTPMSDYKKIHGLMDVGCENKNVNNGFEQGEATDRVGDGGLVTDTCNLEDATALGLQFPKSVCVGGDLKSPSTLDMTPNGSYARHGNHTNLGRKDDDEKFYSYHKLSNKFKSYRSPTIRRIRKSMSSKYWKQVPKDFGYSRADVGVKTLYRKRKSCYGYNAWQREIIYKRRRSPDRSSVVTSDGGLSSGSVSKLPKKGDTVKLSIKSFRIPELFIEVPETATVGSLKRTVMEAVSVLLSGGIRVGVLMHGKKVRDERKTLSQTGISCDENLDNLGFTLGPSPSKVPLPLCSEDPAVPTDPTSLSERSAASPMLDSGIPHADDVIDSRNIVDSNLELVPYQGDISVDEPSSDSKELVPLPELEVKALAIVPLNQKPKRTELAQRRTRRPFSVTEVEALVQAVEELGAGRWRDVKLRAFEDADHRTYVDLKDKWKTLVHTASISPQQRRGEPVPQELLDRVLRAYGYWSQHQGKHQARGASKDPDMNRGGAFESGVSV

SEQ ID NO: 25876 - protein, 589 aa, Chlamydomonas reinhardtii
MQSRQCLNRKASGARPCANSRSLTARVLATAAPVAPSATPASAPLPLPDGVGEHSGLKHLPEAARTRALDKKANKFEKVKVEKCGSRAWNDVFELSSLLKEGKTKWEDLNLDDVDIRLKWAGLFHRGKRTPGKFMMRLKVPNGELTAAQLRFLASSIAPYGADGCADITTRANIQLRGVTMEDSETVIKGLWDVGLTSFQSGMDSVRNLTGNPIAGVDPHELVDTRPLLRDMEAMLFNNGKGREEFANLPRKLNICISSTRDDFPHTHINDVGYEAVAKPNGEVVYNVVVGGYFSIKRNIMSIPLGCSITQDQLMPFTEALLRVFRDHGPRGDRQQTRLMWLVEAVGVDKFRQLLSEYMGGATFGEPVHVHHDQPWERRNLLGVHRQRQAGLNWVGACVPAGRLHAADFEEIAAVAEKYGDGTVRITCEENVIFTNVPDAKLEAMKAEPLFQRFPIFPGVLLSGMVSCTGNQFCGFGLAETKAKAVKVVEALDAQLELSRPVRIQFTGCPNSCGQAQVGDIGLMGAPAKHEGKAVEGYKIFLGGKIGENPALATEFAQGVPAIESVLVPRLKEILISEFGAKERATATA

SEQ ID NO: 25877 - protein, 877 aa, Phaeosphaeria nodorum
MSAAIDNEDLEELSISMPHPRRGGPSTTKAVDFTTPPVAPPTVMQASKSRDSKASQRLGQYTIVKTLGEGSFGKVKLATHQVSGQKVALKIINRKRLVTRDMAGRIEREIQYLQLLRHPHIIKLYTVITTPTEIIMVLEYAGGELFDYIVNNGRLQEDKARKFFQQIVCAVEYCHRHKIVHRDLKPENLLLDDQYNVKIADFGLSNIMTDGNFLKTSCGSPNYAAPEVISGKLYAGPEVDVWSCGVILYVLLVGRLPFDDEYIPTLFKKIAAGNYSIPSYLSPGAVSLIKKMLMVNPVHRITIGEIRMDPWFTKDIAPYLEPPVQEFFDSGVDPHKAIDPTAIAPAIPAPVVQKLHDTVVTKLGKTMGYAEHDVQEALARDEPSAIKDAYLIVRENQMMKVNPLMTQESQLAPFLAQSPPTHHESYLGSSIPQILNSSSPPKGIPSQAQDQHERARHGSNASSQLASVRSPVSTVAILPSSLTEYHKAYMKGHPRPPFKPEHDGLPPTPDQTEEQRQISARRLKPNFRALPDTTRNRPEPMTSLPAKKPRPTKWQFGIRSRNQPAEAMLAIFKALKAMGADWEVPKIRKAGGKGGSRSPTGSHASQERSRSRSRSRSRSPGSSVSSHDSGDEKKTGSDSPTHEPLTVRNADSGEQRGRQRKHYNHTNDWGYHIPEDPWVINARFRKDGMFPPGVAHPSSTHSSRVDLANDPSGLRRRSSTNTSTTSLSHHIDSMTITDRPNSISGEDHPEADEAVYIYVSIQLYSIDREFFVVDFKCAGYERLVSNLVREVKAASSSSPQHQHEDGWDDEAGVWRRLDEGEPLPDDLAKELRDGGKGVLRERTEEVGAGRKEGEKVVTSPFPFLDVASTLILQLSGE

SEQ ID NO: 25878 - protein, 359 aa, Catharanthus roseus
MDLQTAEFREAQAKIWSQAFSFANCAALKCAVKLGIADAIDNHDKKALTLSELTEELSIKPSKSPFLQRLMRQLVNAGFFTEAKQLRDDNKDGRTTTAYALTPVSRLLLKNEQWNLRGIVLTMLDPAELKAWSVLNDWFKNDDPTAFQTAHEKNYWDYTAENTQHCQIFEDAMANDSVLVSKLLVTEYKFLFEGLTSLIDLGGSTGTIAKALAKSFPNLKCTVFDLPHVVANLESTKNLEFVGGDMFEKLPPSNAILLKWILHDWNDEDCVKILKNCKKAIQEKGNGGKVIIIDTVVYSQKNEKELVDLQISMDMAMVINFAAKERTEEEWEHLIREAGFSGHKIFPMYDFRSIIEVYP

SEQ ID NO: 25879 - protein, 354 aa, Catharanthus roseus
MEVQSAEFRKAQVHIWSQSFSFITCASLKCALQLGIADAIENHGKPMALSDLTNTLQINPSKSQYLPRLMRLLVNSGFFSEQQLGDAGGGENVYGLTPSMRLLLKNEPLNLRGIVLPMLDPLQIKAWNSLGNWFKNEDGTAFETAHGKSYWDCVTEDPKDVEIFTETMASDSLLVAKFVITEHKSLFEGLDSIIDVGGSTGTFARAIAESFPSLKCTVLDLPETVANIEPTNNLEFVGGNMFEKIPPAHVVFLKMVLHDWNDEDCVKILKNCRKAIPEKEKGGKVILIETVVQGQMHDSESVKTQIAMDMDMLVSFGTKERTEKEWEILFKEAGFSSYKIFPIVDIRSLIEVYP

SEQ ID NO: 25880 - protein, 430 aa, Lotus japonicus
MAQILAPSTQWQTRITKTSPNASPITSNMWSSLLWKQNKKVARASKFRVLAIKSDGSTINRLEGLLNLDVTPYTDKFIAEYIWIRGTGVDVRSKSRTISKPVSHPSELPKWNYDGSSTGQAPGDDSEVILYPQAIFRDPFRGGNNILVICDAYTPQGEPIPTNKRHRAAEIFSNPKVQAEIPWYGIEQEYTLLQTDVKWPLGWPVGGYPGPQGPYYCAAGADKSFGRDISDAHYKACLYAGINISGTNGEVMPGQWEYQVGPSVGIEAGDHIWASRYLLERITEQAGVVLTLDPKPIEGDWNGAGAHTNYSTKSMREEGGFEVIKKAILNLSLRHQDHIRAYGEGNERRLTGKHETADINTFSWGVANRGCSIRVGRDTEKEGKGYLEDRRPASNMDPYVVTALLAETTLLWEPTLEAEALAAQKIQLKV

SEQ ID NO: 25881 - protein, 430 aa, Lotus japonicus
MAQILAPSTQWQTRITKTSPNASPITSNMWSSLLWKQNKKVARASKFRVLAIKSDGSTINRLEGLLNLDVTPYTDKFIAEYIWIGGTGVDVRSKSRTISKPVSHPSELPKWNYDGSSTGQAPGDDSEVILYPQAIFRDPFRGGNNILVICDAYTPQGEPIPTNKRHRAAEIFSNPKVQAEIPWYGIEQEYTLLQTDVKWPLGWPVGGYPGPQGPYYCAAGADKSFGRDISDAHYKACLYAGINISGTNGEVMPGQWEYQVGPSVGIEAGDHIWASRYHLERITEQAGVVLTLDPKPIEGDWNGAGAHTNYSTKSMREEGGFEVIKKAILNLSLRHQDHIRAYGEGNERRLTGKHETADINTFSWGVANRGCSIRVGRDTEKEGKGYLEDRRPASNMDPYVVTALLAETTLLWEPTLEAEALAAQKIQLKV

SEQ ID NO: 25882 - protein, 935 aa, Stellaria longipes
MASPAQSQNSTNSGRSKHSARIIAQTIQDAKLHAEFEESSNEFDYSSSVRGSTSGVNQLPKSDKVTSSYLLQIQKGKFIQPFGCLLALDDKTFRVIAFSENAPEMLTMVSHAVPSVGDLPVIGIGTDIRTIFTGPSASALQKALGFTDVSLLNPILVHCKNPGKPFYAIVHRVTRSLVIDFEPVKPYEVPMTAAGALQSYKLAAKAITRLQSLPSGNMDRLVDTMVQEVFELTGYDRVMAYKFHDDDHGEVVSEVTKPNLDSYLGLHYPATDIPQAARFLFMKNKVRLICDCRAKNVRVVQDEKLSVDLTLCGSTLRAPHGCHAQYMENMNSIGSLVMAVVVNDEDDEDGGSAPAQPHKRKRLWGLVVCHHTSPRFVPFPLRYACEFLAQVFAIHVNKELELENQFLEKKILRTQTLLCDMLMRDAPLGIVTQSPNIMDLVKCDGAALLYNNKVWRLGITPTDYQLQEIGGWLSRDHMDSTGLSTDSLYDAGYPAALELGDSVCGMAAVRITVNDMLFWFRSHTAAEIKWGGAKHEAGEKDDGSKMHPRSSFKAFLEVVKRRSVPWKDYEMDAIHSLQLILRNAFKDGEAADLNTSVIHSKISDLQISGLKELEAVTSEMVRLIETATVPIFAVDSDGLVNGWNTKIYELTGIPVEEAVGKHIAALVEDSSIDNVKQMLQSALQLASHDLQHALHIQRLAEQAATKRANVLAYMKRRIKNPLAGIIFSGKILDGTNVDEKQRLVLQTSARCQGQLNKILDDSDLDSIIDGYCELEMVEFAVQDILVASISQVMAKSSEKGIQMSNNCTEHGFKETLYGDSLRLQQILADFLSISVNFTSPGGHIGVTVRLTKDKIGESVQLANLEFRITHTGGGISEELLSEMFESRGNASEDGISLLISRKLVKLMNGDIQYLRSAGTSTFIISVELAVAGNSS

SEQ ID NO: 25883 - protein, 1123 aa, Stellaria longipes
MASPAQSQSSTNSGRSKHSARIIAQTIQDAKLHAEFEESSNEFDYSSSVRGSTSGVNQLPQSDKVTSSYLLQIQKGKFIQPFGCLLALDDKTFRVIAFSENAPEMLTMVSHAVPSVGDLPVIGIGTDIRTIFTDPSASALQKALGFTDVSLLNPILVHCKNSGKPFYAIVHRVTRSLVIDFEPVKPYEVPMTAAGALQSYKLAAKAITRLQSLPSGNMDRLVDTMVQEVFELTGYDRVMAYKFHDDDHGEVVSEVTKPNLDSYLGLHYPATDIPQAARFLFMKNKVRLICDCRAKNVRVVQDEKLSVDLTLCGSTLRAPHGCHAQYMENMNSIGSLVMAVVVNDEDDEDGGSAPAQPHKRKRLWGLVVCHHTSPRFVPFPLRYACEFLAQVFAIHVNKELELESQFLEKKILRTQTLLCDMLMRDAPLGIVTQNPNVMDLVKCDGAALLYNNKIWKLGISPTDYQLRDIAGWLSRDHTDSTGLSTDSLHDAGYPGARSLGDTVCGMAAVRITLNNMLFWFRSHTAAEVKWGGAKHETGEKDDGSKMHPRTSFKAFLEVVKRRSVPWKDYEMDAIHSLQLILRNAFKDVEASDLNTSVIHSKISDLQINGLRELEAVTSEMVRLIETATVPILAVDADGLVNGWNTKIFELTGVPVAEAVGKHIASLAEESSIDNVKRMLQLALQGEEKKNVQFEIKRHQSNPDSSPISLVVNACASKDVNGNVVGVCLITQDITGQKTVMDKFTRIEGDYKAIIQSPNPLIPPIFGTDEFGWCSEWNPAMAKLTGWSREEVIDKMLLGEVFGTQKSCCRLKNQEAFVNFGIILNGAMSGQNTDKLPIEFFTRFGKYIECLLCVNKKLDGDGAVTGVFCFLQLASHDLQHALHIQRLAEQAATKRAKALAYMKRQIKNPLSGIMFSGKILDGTEMGEDQRQVLQTSIRCQGQLNKILDDSDLDSIIDGYCELEMVEFTVQDILVASTCQVMAKSNEKGIQIANDSTTEHGLKETLYGDSLRLQQILADFLWISVNFTPAGGNVGIKVRLTKDKIGESIQHANLEFRISHTGGGISEELLSQMFENQGEVSEEGISLLVSRKIVKLMNGDVQYLRSAGSSTFIISVELAIAGNSL

SEQ ID NO: 25884 - protein, 1122 aa, Stellaria longipes
MASPAQSQSSTNSGRSKHSARIIAQTIQDAKLHAEFEESSNEFDYSSSVRGSTSGVNQLPKSDKVTSSYLLQIQKGKFIQLFGCLLALDDKTFRVIAFSENAPEMLTMVSHAVPSVGDLPVIGIGTNIRTIFTGPSASALQKALGFTDVSLLNPILVHCKNSGKPFYAIVHRVTRSLVIDFEPVKPYEVPMTAAGALQSYKLAAKAITRLQSLPSGNMDRLVDTMVQEVFELTGYDRVMAYKFHDDDHGEVVSEVTKPNLDSYLGLHYPATDIPQAARFLFMKNKVRLICDCRAKNVRVVQDEKLSVDLTLCGSTLRAPHGCHAQYMENMNSIGSLVMAVVVNDEDDEDGGSAPAQPHKRKRLWGLVVCHHTSPRFVPFPLRYACEFLAQVFAIHVNKELELENQFLEKKILRTQTLLCDMLMRDAPLGIVTQNPNVMDLVKCDGAALLYNNKIWKLGITPTDYQLRDIAGWLSRDHTDSTGLSTDSLHDAGYPGARSLGDTVCGMAAVRITPNDMLFWFRSHTAAEVKWGGAKHETGEKDDGSKMHPRTSFKAFLEVVKRRSVPWKDYEMDAIHSLQLILRNAFKDVEASDLNTSVIHSKISDLQINGLRELEAVTSEMVRLIETATVPILAVDADGLVNGWNTKISELTGVPVAEAVGKHIASLAEESSIDNVKRMLQLALQGEEKKNVQFEIKRHQSNPDSGPISLVVNACASKDVNGNVVGVCLIAQDITGQKTVMDKFTRIEGDYKAIIQSPNPLIPPIFGTDEFGWCSEWNPAMAKLTGWSREEVIDKMLLGEVFGTHKSCCRLKNQEAFVNFGIILNGAMSGQNTDKLPIEFFTRFGKYIECLLCVNKKLDGDGAVTGVFCFLQLASHDLQHALHIQRLAEQAATKRAKALAYMKRQIKNPLSGIMFSGKILDGTEMGEDQRQVLQTSIRCQGQLNKILDDSDLDSIIDGYCELEMVEFTVQDILVASISQVMAKSSEKGIQMSNNCTEHGFKETLYGDSLRLQQILADFLSISVNFTSPGGHIGVTVRLTKDKIGESVQLANLEFRIMHTGGGISEELLSEMFESRGNASEDGISLLISRKLVKLMNGDIQYLRSAGTCTFIIYVELAVADNSS

SEQ ID NO: 25885 - protein, 356 aa, Ipomoea batatas
MASFVTRLSLALSFIALALAGFSIYQNTHTAMKGQLKLTPKWLLDNTLESSVADVLSLRLGISSGKLSDEDCIFSAVKEVVDAAIDAETRMGASLIRLFFHDWFVDGCDAGLLLNDTPTFTREQTAGGNNNSVTGFEVIQQAKENVITKCPYIQVSCADILSIAARDSFQRFTGETYTVTLGRLDARTANLTGANTQLVGPNEELASQVEKFAAKGFSETELVALLGVHTVGFSRCPLLCVPIFINPARASTLQCNCPVSPDDTGLVGLDPTPLTWDQSFYSDVANGQGLLFSDNELMNSNTTSAAVRRYRDEMDAFLADFAAAMVKMSLLPPSPGVELEIREVCSEVNANTVASM

SEQ ID NO: 25886 - protein, 353 aa, Ipomoea batatas
MASFATKLSLALSLLALVLAGYSIYQNTYSAINGTELQLIPTWLDETLESANILRALGLGKSSSGMLSDEACVFSAVKEIVEAAITNETRMGASLIRLFFHDCFVDGCDGGILLNATNGEQSAPANANSVRGFEVIERAKQNAKSKCSDTPVSCADVLAIAARDSVVKLGGQTYTVNLGRRDARSFNLTGANNQLPAPFDDLATQTRKFADKGFNQTEMVALAGAHTVGFARCAVLCSSNNLNQARNSTLQCTCPVAAGDAGLVGLDPTPSTMDTRYFRDIVDGQGLLFSDQVLLNGTTTTAAVRRYRDGTGAFLSDFAAAMVKMGNLAPSAGVQLEIRDVCSIVNPTSVAAM

SEQ ID NO: 25887 - protein, 320 aa, Ipomoea batatas
MAVSVKALTAVLLCVLVLVGGCSAQLSPGFYSKSCPKLFQTVNSVVRSAIQKEARMGASLLRLFFHDCFVNGCDGSILLDDTSSFTGEKRAAPNFQSARGFEVIDQIKSAVEKVCPGVVSCADILAIASRDSTVTLGGPSWNVKLGRRDARTASQAAANNSIPAPTSNLNRLISSFSAVGLSTNDMVVLSGSHTIGQARCTNFRARIYNESNIDSSFAQSRKGNCPRASGSGDNNLAPLDLQTPIKFDNNYYVNLVNKKGLLHSDQQLFNGVSTDSTVRGYSTNPSKFKSDFAAAMIKMGDIKPLTGNNGEIRKNCRRRN

SEQ ID NO: 25888 - protein, 504 aa, Cryptococcus neoformans var. grubii
MDAKKATIAIIALAAAATAYKVMSTTQEKKNTEGVCPATGQKRAGSTGCPFSSGLPLPDPGHRCDPNSIQEEYKVPEVPPLTEAQKDIIKSTAPILEQHGVTITTHFYKNMIRAHPELRDVFSESAQKLGHQPAALAAAVYAYACNIHDLTPILPVVERIAHKHTSLHITANQYGIVGKHLIQAIVDILGDAVTPEVGDAWYNGYWNLAHVFIKRERQLYDSAIEAGGWEGWRQFKVAKRVKESNEITSFYLKPVEGSGAPLPKFRPGQYTAVQIDIPGLGYKQARQYSLSDAPNGEYFRISVKREDGVPVPTLSNPEVPFHPGWMSNVLHKDYQEGSIVNVASPFGDFYYAPSDSSPTAPLVLLSAGVGQTPVMAMLNAQLAKNNEPNSPIKPITYVTVARSPKVRAFKDHVKKLSDVHENVKSRIFYSRPTDDVVEGQDYDFKGRMDLEKIKEDLYLGDKTAEYYICGPSKFMLNTRDKLQSLGVDPSRIHYELFEAGNLSA

SEQ ID NO: 25889 - protein, 335 aa, Pseudomonas sp. K82
MKLAHSLTVTAVSPQGSDAILLSLGVDGGQRQHFSFQSGQYLTLAVPVQGDEHWRCYSITSAPEDGQAISVLVRRVAGGRVSNWLCDHARAGQRLQVLPPAGRFTLARHGQPVLLYAGGSGIAPIFALAREALLQGAPQVRLFYACRDRATAMLLAELQALQAGSGQRLEIRHWYDAEQGLPTQALLEAQTQGLEAADAYLCGPEAFMHSVLAALAAAGIEPSRVYREDFGAALEGAVETGAEGPDAELTVQLKGQTHTVSVRGGQFLLGAMLDARAGRPHACRVGECASCMCRLVDGEVLRLDSSVLDEDDAAEGWLLACRTRAASAQVRLRFS

SEQ ID NO: 25890 - protein, 564 aa, Solanum tuberosum
MGSCFSSSKVSGSNSNTPSTNNTATNTNTTVNVHPNRRETSKAPSTTVVNSRNQEGSNYNRGKGNINQKNQQKQPRNSQQNVKPSSRRQGGVIPCGKRTDFGYDKDFEKRYTIGKLLGHGQFGYTYVATDKSSGDRVAVKRIEKNKMVLPIAVEDVKREVKILKALGRHENVVQFYNSFEDHNYVYIVMELCEGGELLDDCQKTVGIREDAAIVVPQMLKVAAECHLHGLVHRDMKPENFLFKSTKEDSPLKATDFGSSDFIRPGKVQDIVGSAYYVAPEVLKRRSGPESDVWSIGVITYILLCGRRPFWDKTEDGIFKEVLRNKPDFRRKPWSNISNSAKDFVKKLLVKDPRARLTAAQALSHPWVREGGDASEIPLDISVLSNMRQFVRYSHLKQFALRALRSTLDEEEIADLRDQFSAIDVDKNGVISLEEMRQALAKDLPWKMKESRVLEILQAIDSNTDGLVDFPEFVAATLHVHQLEEHNSAKWQQRSQAAFEKFDVDRDGFITPEELKMHTGLRGSIDPLLEEADIDKDGKISISEFRRLLRTASMTSPTVRDSRGM

SEQ ID NO: 25891 - protein, 292 aa, Lolium multiflorum
IELGLLEILVAAGGKSLTPTEVAAKLPSAANPEAPDMVDRMLRLLASYNVVSCLVEEGKDGRLSRSYGAAPVCKFLTPNEDGVSMAALALMNQDKVLMESWYYLKDAVLDGGIPFNKAYGMSAFEYHGTDPRFNRVFNEGMKNHSIIITKKLLELYHGFQGLGTLVDVGGGVGATVAAITAHYPAIKGVNFDLPHVISEAPPFPGVTHVGGDMFKEVLSGDAILMKWILHDWSDQHCATLLKNCYDALPAHGKVVLVECILPVNPEAKPSSQGVFHVDMIMLAHNPGGSQRY

SEQ ID NO: 25892 - protein, 162 aa, Arabidopsis thaliana
MNRLPSSEDGDDEEFSHDDGSAPPRKKLRLTREQSRLLEDSFRQNHTLNPKQKEVLAKHLMLRPRQIEVWFQNRRARSKLKQTEMECEYLKRWFGSLTEENHRLHREVEELRAMKVGPTTVNSASSLTMCPRCERVTPAASPSRAVVPVPAKKTFPPQERDR

SEQ ID NO: 25893 - protein, 434 aa, Mesembryanthemum crystallinum
MYSNFKEQAIEYVKQAVQEDNAGNYSKAFPLYMNALEYFKTHLKYEKNPKIREAITQKFTEYLRRAEEIRAVLDEGGGAGPAANGGDAAVAARPKGKPKDGGGDGEDAEQAKLRSGLNSAIIREKPNVKWNDVAGLESAKQALQEAVILPVKFPQFFTGKRRPWRAFLLYGPPGTGKSYLAKAVATEADSTFFSVSSSDLVSKWMGESEKLVSNLFQMARESAPSIIFVDEIDSLCGQRGEGNESEASRRIKTELLVQMQGVGHNDEKVLVLAATNTPYALDQAIRRRFDKRIYIPLPDLKARQHMFKVHLGDTPHNLTESDFEFLARKTEGFSGSDIAVCVKDVLFEPVRKTQDAMFFYKTSDDVWVPCGPRQPGAVQITMQDLAAKGLAAKIVPPPIARTDFEKVLARQRPTVSKSDLEVHERFTQEFGEEG

SEQ ID NO: 25894 - protein, 156 aa, Hevea brasiliensis
MCLSNLPASSEGVICVVVMNTALSISIFKGIVRSVLHIVDNRLAPFSSSSSSILFPDYSDTESFEFPLHSSDDCVRELRSRRPAKRFDAVSSCKQPQHDCPVCLIQFKPDSEINCLSCGHVFHKACLEKWLDYRKVTCPLCKSPVMPEEEDTSSSW

SEQ ID NO: 25895 - protein, 158 aa, Malus x domestica
MEGKVFTEEQETLVVKSWGVMKKNAAELGLKFFLKIFEIAPSAQKLFSFLRDSDIPLEKNPKLKPHAMSVFVMTCESAVQLRKAGKVTVRESTLKRLGGVHFKSGVVDEHYEVTKFALLETIKEALPEMWSPEMKNAWGEAYDQLVAAIKSEMKPPLN

SEQ ID NO: 25896 - protein, 158 aa, Pyrus communis
MEGKVFTEEQETLVVKSWGVMKQNAADLGLKFFLKIFEIAPSAQKLFSFLRDSNIPLEKNPKLKPHAMSVFVMTCESAVQLRKAGKVTVRESTLKRLGGVHFKSGVVDEHYEVTKFALLETIKEAVPEMWSPEMKNAWGEAYDQLVTAIKLEMKPPLN

SEQ ID NO: 25897 - protein, 309 aa, uncultured marine proteobacterium ANT8C10
MLGLPMTGKITKNIKKNKSMNKIGFIGLGVMGYPMAGHLSKEFSNICIFNRSQEKVTKWLNQYSGTAFDTPEELSSQCNVIALCVGRDEDVREMMSGEKGILNSVNPGTIIIDHTTTSATLSKEMNELALQKDVIFLDAPISGGQAGAESGQLSVMVGGDKASYESVKPILDNYSKFTKYMGPSGSGQLTKMVNQICIAGLVQALSEGVNFSEKVGLNTSDVMEVITKGAAQSWQMENRWETMLKDEYDHGFAVDWMRKDLDIVSEQAGQVGANIEITEMVNKFYKDIQDLDGGRWDTSSLLKRIKDST

SEQ ID NO: 25898 - protein, 309 aa, uncultured marine proteobacterium ANT32C12
MLELPMTGKITKNIKKNKSMNKIGFIGLGVMGYPMAGHLSKEFSNICIFNRSQEKVTKWLNQYSGTAFDTPEELSSQCNVIALCVGRDEDVREMMSGKKGILNSVNPGTIIIDHTTTSATLSKEMNELALQKDVIFLDAPISGGQAGAESGQLSVMVGGDKASYESVKPILDNYSKFTKYMGPSGSGQLTKMVNQICIAGLVQALAEGVNFSEKVGLNTSDVMEVITKGAAQSWQMENRWETMLKDEYDHGFAVDWMRKDLDIVSEQAGQVGANIEITEMVNKFYKDIQDLDGGRWDTSSLLKRIKDST

SEQ ID NO: 25899 - protein, 185 aa, uncultured marine gamma proteobacterium EB000-45B06
MNFIDEAFLEVRAGNGGAGASSFRREKYIPFGGPDGGDGGKGADVVFRVNLNKNTLIDFQNKRVFIAKNGRPGSGKNKTGSAAEDLVIDIPKGTVIYDDISGDELLDCCDDDIEYVLAKGGDGGQGNARFKSSTNQAPRKFTLGFEGEVRFIRLELKSLADVGLVGFPNAGKSTFLNKVSSASLR

SEQ ID NO: 25900 - protein, 304 aa, Anabaena sp.
MTQAKAKHADVPVNLYRPNAPFIGKVISNEPLVKEGGIGIVQHIKFDLTGGNLKYIEGQSIGIIPPGVDKNGKPEKLRLYSIASTRHGDDVDDKTISLCVRQLEYKHPESGETVYGVCSTYLTHIEPGSEVKITGPVGKEMLLPDDPEANVIMLAGGTGITPMRTYLWRMFKDAERAANPEYQFKGFSWLVFGVPTTPNILYKEELEEIQQKYPDNFRLTYAISREQKNPQGGRMYIQDRVAEHADQLWQLIKNQKTHTYICGPRGMEEGIDAALSAAAAKEGVTWSDYQKDLKKAGRWHVETY

SEQ ID NO: 25901 - protein, 1131 aa, Zea mays
MSSLRPAQSSSSSSRTRQSSQARILAQTTLDAELNAEYEESGDSFDYSKLVEAQRSTPPEQQGRSGKVIAYLQHIQRGKLIQPFGCLLALDEKSFRVIAFSENAPEMLTTVSHAVPNVDDPPKLGIGTNVRSLFTDPGATALQKALGFADVSLLNPILVQCKTSGKPFYAIVHRATGCLVVDFEPVKPTEFPATAAGALQSYKLAAKAISKIQSLPGGSMQALCNTVVKEVFDLTGYDRVMAYKFHEDEHGEVFAEITKPGIEPYLGLHYPATDIPQAARFLFMKNKVRMICDCRARSVKIIEDEALSIDISLCGSTLRAPHSCHLQYMENMNSIASLVMAVVVNENEDDDEPESEQPPQQQKRKKLWGLIVCHHESPRYVPFPLRYACEFLAQVFAVHVNKEFELEKQIREKSILRMQTMLSDMLFKESSPLSIVSGSPNIMDLVKCDGAALLYGDKVWRLQTAPTESQIRDIAFWLSEVHGDSTGLSTDSLQDAGYPGAASLGDMICGMAVAKITSKDILFWFRSHTAAEIKWGGAKHDPSDEDDSRRMHPRLSFKAFLEVVKMKSLPWSDYEMDAIHSLQLILRGTLNDALKPAQSSGLDNQIGDLKLDGLAELQAVTSEMVRLMETATVPILAVDGNGLVNGWNQKVADLSGLRVDEAIGRHILTLVEDSSVPIVQRMLYLALQGREEKEVRFELKTHGSKRDDGPVILVVNACASRDMHDHVVGVCFVAQDMTVHKLVMDKFTRVEGDYRAIIHNPNPLIPPIFGADQFGWCSEWNAAMTKLTGWHRDEVIDRMLLGEVFDSSNASCLLKSKDAFVRLCIIINSALAGEEAEKAPIGFFDRDGKYIECLLSVNRKVNADGVVTGVFCFIHVPSDDLQHALHVQQASEQTALRRLKAFSYMRHAIDKPLSGMLYSRETLKGTDLDEEQMRQVRVADNCHRQLNKILADLDQDNITDKSSCLDLDMAEFVLQDVVVSAVSQVLIGCQGKGIRVACNLPERSMKQKVYGDGIRLQQILSDFLFVSVKFSPAGGSVDISSKLTKNSIGENLHLIDFELRIKHQGAGVPAEILSQMYGEDNREQSEEGLSLLVSRNLLRLMNGDIRHLREAGMSTFILTAELAAAPSAAGH

SEQ ID NO: 25902 - protein, 1161 aa, Zea mays
MASGSRATPTRSPSSARPEAPRHAHHHHHSQSSGGSTSRAGGGAAATESVSKAVAQYTLDARLHAVFEQSGASGRSFDYSQSLRAPPTPSSEQQIAAYLSRIQRGGHIQPFGCTLAVADDSSFRLLAFSENSPDLLDLSPHHSVPSLDSSAPPHVSLGADARLLFSPSSAVLLERAFAAREISLLNPIWIHSRVSSKPFYAILHRIDVGVVIDLEPARTEDPALSIAGAVQSQKLAVRAISRLQALPGGDVKLLCDTVVEHVRELTGYDRVMVYRFHEDEHGEVVAESRRDNLEPYLGLHYPATDIPQASRFLFRQNRVRMIADCHATPVRVIQDPGLSQPLCLVGSTLRAPHGCHAQYMANMGSIASLVMAVIISSGGDDEQTGRGGISSAMKLWGLVVCHHTSPRCIPFPLRYACEFLMQAFGLQLNMELQLAHQLSEKHILRTQTLLCDMLLRDSPTGIVTQSPSIMDLVKCDGAALYYHGKYYPLGVTPTESQIKDIIEWLTVFHGDSTGLSTDSLADAGYLGAAALGEAVCGMAVAYITPSDYLFWFRSHTAKEIKWGGAKHHPEDKDDGQRMHPRSSFKAFLEVVKSRSLPWENAEMDAIHSLQLILRDSFRDAAEGTNNSKAIVNGQVQLRELELRGINELSSVAREMVRLIETATVPIFAVDTDGCINGWNAKIAELTGLSVEEAMGKSLVNDLIFKESEATVEKLLSRALRGEEDKNVEIKLKTFGSEQSKGPIFVVVNACSSRDYTQNIVGVCFVGQDVTGQKVVMDKFVNIQGDYKAIVHNPNPLIPPIFASDENTSCSEWNTAMEKLTGWSRGEVVGKFLIGEVFGNCCRLKGPDALTKFMVIIHNAIGGQDYEKFPFSFFDKNGKYVQALLTANTRSKMDGKSIGAFCFLQIASTEIQQAFEIQRQQEKKCYARMKELAYICQEIKNPLSGIRFTNSLLQMTDLNDDQRQFLETSSACEKQMSKIVKDASLQSIEDGSLVLEQSEFSLGDVMNAVVSQAMLLLRERDLQLIRDIPDEIKDASAYGDQCRIQQVLADFLLSMVRSAPSENGWVEIQVRPNVKQNSDGTNTELFIFRFACPGEGLPADVVQDMFSNSQWSTQEGVGLSTCRKILKLMGGEVQYIRESERSFFLIVLEQPQPRPAAGREIV

SEQ ID NO: 25903 - protein, 1166 aa, Zea mays
MASDSRPPKRSPSARRVAPRHAHHHHSQSSGGSTSRAGAGGGGGGAAATESVSKAVAQYNLDARLHAVFEQSGASGRSFDYSQSLRAPPTPSSEQQIAAYLSRIQRGGHIQPLGCTLAVADDSSFRLLAFSENAADLLDLSPHHSVPSLDSVALPPVSLGADARLYFSPSSAVLLERAFAAREISLLNPLWIHSRASSKPFYAILHRIDVGVVIDLEPARTEDPALSIAGAVQSQKLAVRAISRLQALPGGDVKLLCDTVVEHVRELTGYDRVMVYKFHEDEHGEVVAESRRDNLEPYLGLHYPATDIPQASRFLFQQNRVRMIADCHAIPVRVIQDPGLSQQLCLVGSTLRAPHGCHAQYMANMGSIASLVMAVIISSGGDDERTGRGAISSSMKLWGLVVCHHTSPRCIPFPLRYACEFLMQAFGLQLNMELQLAHQLSEKHILRTQTLLCDMLLRDSPAGIITQSPSVMDLVKCDGAALYYRGKYYPLGVTPTESQIKDIIEWLTVCHGDSTGLSTDSLADAGYLGAVALGDAVCGMAVAYITPSDYLFWFRSHTAKEIKWGGAKHHPEDKDDGQRMHPRSSFKAFLEVVKSRSLSWENAEMDAIHSLQLILRDSFRDAAEGTSNSKAIVNGQRQLGELELRGINELSSVAREMVRLIETATVPIFAVDTDGCINGWNAKIAELTGLSVEEAMGKSLVNDLIFKECDDIVEKLLSRALRGEEDKNVEIKLKTFGSEQSKGAIFVIVNACSSRDYTQNIVGVCFVGQDVTGQKVVMDKFINIQGDYKAIVHNPNPLLPPIFASDENTSCSEWNTAMEKLTGWSREEVVGKFLIGEVFGNCCRLKGPDALTKFMVVIHNAIEGHDSEKFPFSFFDKNGKYVQALLTANTRSKMDGKSIGAFCFLQIASAEIQQAFEIQRQQEKKCYARMKELAYICQEIKNPLSGIRFTNSLLQMTDLNDDQRQFLETSSACEKQMSKIVKDASLKSIEDGSLVLEKSEFSLGDVMNAVVSQTMSLLRERDLQLIRDIPDEIKDASAYGDQFRIQQVLADFLLSMAQSAPSENGWVEIQVRPNVKQNYDGTDTELFIFRFACPGEGLPADIVQDMFSNSQWSTQEGVGLSTCRKILKLMGGEVQYIRESERSFFLIVLELPQPRLAAGRENQLIC

SEQ ID NO: 25904 - protein, 1135 aa, Zea mays
MSLPSNNRRTCSRSSSARSKHSARVVAQTPVDAQLHAEFEGSQRHFDYSSSVGAANRPSASTSTVSTYLQNMQRGRYIQPFGCLLAVHPDTFALLAYSENAPEMLDLTPHAVPTIDQRDALGIGVDVRTLFRSQSSVALHKAAAFGEVNLLNPILVHARTSGKPFYAILHRIDVGLVIDLEPVNPADVPVTAAGALKSYKLAAKAISRLQSLPSGNLSLLCDVLVREVSELTGYDRVMAYKFYEDEHGEVISECRRSDLEPYLGLHYPATDIPQASRFLFMKNKVRMICDCCATPVKVIQDDSLAQPLSLCGSTLRASHGCHAQYMANMGSVASLAMSVTINEDEEEDGDTGSDQQPKGRKLWGLVVCHHTSPRFVPFPLRYACEFLLQVFGIQLNKEVELAAQAKERHILRTQTLLCDMLLRDAPVGIFTRSPNVMDLVKCDGAALYYQNQLLVLGSTPSESEIKSIATWLQDNHDGSTGLSTDSLVEAGYPGAVALREVVCGMAAIKISSKDFIFWFRSHTTKEIKWGGAKHEPVDADDDGRRMHPRSSFKAFLEVVKWRSVPWEDVEMDAIHSLQLILRGSLPDEDANRNNVRSIVKAPSDDMKKIQGLLELRTVTNEMVRLIETATAPVLAVDIAGNINGWNNKAAELTGLPVMEAIGRPLIDLVVTDSIEVVKQILDSALQGIEEQNMEIKLKTFHEHECNGPVILKVNSCCSRDLSEKVIGVCFVAQDLTRQKMIMDKYTRIQGDYVAIVKNPTELIPPIFMINDLGSCLEWNKAMQKITGIKREDAINKLLIGEVFTLHDYGCRVKDHATLTKLSILMNAVISGQDPEKLFFGFFDTDGKYIESLLTVNKRTDAEGKITGALCFLHVASPELQHALQVQKMSEQAATNSFKELTYIRQELRNPLNGMQFTCNLLKPSELTEEQRQLLSSNVLCQDQLKKILHDTDLESIEQCYMEMNTVEFNLEQALNTVLMQGIPLGKEKQISIERNWPVEVSCMYLYGDNLRLQQILADYLACALQFTQTAEGPIVLQVMSKKENIGSGMQIAHLEFRIVHPAPGVPEALIQEMFQHNPGVSREGLGLYISQKLVKTMSGTVQYLREADTSSFIILMEFPVAQLSSKRSKPSTSKF

SEQ ID NO: 25905 - protein, 303 aa, Nostoc sp. PCC 7119
TQAKAKHADVPVNLYRPNAPFIGKVISNEPLVKEGGIGIVQHIKFDLTGGNLKYIEGQSIGIIPPGVDKNGKPEKLRLYSIASTRHGDDVDDKTISLCVRQLEYKHPESGETVYGVCSTYLTHIEPGSEVKITGPVGKEMLLPDDPEANVIMLAGGTGITPMRTYLWRMFKDAERAANPEYQFKGFSWLVFGVPTTPNILYKEELEEIQQKYPDNFRLTYAISREQKNPQGGRMYIQDRVAEHADQLWQLIKNQKTHTYICGLRGMEEGIDAALSAAAAKEGVTWSDYQKDLKKAGRWHVETY

SEQ ID NO: 25906 - protein, 303 aa, Anabaena sp.
TQAKAKHADVPVNLYRPNAPFIGKVISNEPLVKEGGIGIVQHIKFDLTGGNLKYIEGQSIGIIPPGVDKNGKPEKLRLYSIASTRHGDDVDDKTISLCVRQLEYKHPESGETVYGVCSTYLTHIEPGSEVKITGPVGKEMLLPDDPEANVIMLATGTGIAPMRTYLWRMFKDAERAANPEYQFKGFSWLVFGVPTTPNILYKEELEEIQQKYPDNFRLTYAISREQKNPQGGRMYIQDRVAEHADQLWQLIKNQKTHTYICGPRGMEEGIDAALSAAAAKEGVTWSDYQKDLKKAGRWHVETY

SEQ ID NO: 25907 - protein, 381 aa, Rhodospirillum rubrum
MKIAIPKERRPGEDRVAISPEVVKKLVGLGFEVIVEQGAGVGASITDDALTAAGATIASTAAQALSQADVVWKVQRPMTAEEGTDEVALIKEGAVLMCHLGALTNRPVVEALTKRKITAYAMELMPRISRAQSMDILSSQSNLAGYRAVIDGAYEFARAFPMMMTAAGTVPPARVLVFGVGVAGLQAIATAKRLGAVVMATDVRAATKEQVESLGGKFITVDDEAMKTAETAGGYAKEMGEEFRKKQAEAVLKELVKTDIAITTALIPGKPAPVLITEEMVTKMKPGSVIIDLAVEAGGNCPLSEPGKIVVKHGVKIVGHTNVPSRVAADASPLFAKNLLNFLTPHVDKDTKTLVMKLEDETVSGTCVTRDGAIVHPALTG

SEQ ID NO: 25908 - protein, 481 aa, Capsicum annuum
MDSITIDTINPKVLKCEYAVRGEIVTIAQKLQQDLKDNPGSHPFDEILYCNIGNPQSLAQQPITFFREVLALCDHPSILDKSETQGLFSADAIERAFQILDQIPGRATGAYSHSQGIKGLRDTIASGIEARDGFPADPNDLFLTDGASPAVHMMMQLLIRSQNDGILCPIPQYPLYSASIALHGGTLVPYYLDEQTGWGLEISELEHQLNTAKSNGIDVRALVVINPGNPTGQVLGEANQREIVEFCKKEGLVLLADEVYQENVYVPDKKFHSFKKITRSMGYGEKDISLVSFQSVSKGFYGECGKRGGYMEITGFSPEVREQIYKLASVNLCSNISGQILASLVMSPPKVGDESYESFSAEKEAVLSSLARRAQALQDALNSLEGVTCNRAEGAMYLFPRINLPDKAIKAAEVAKTAPDAFYAKLLLNATGIVVVPGSGFRQVPGTWHFRCTILPQEEKIPAIVSRLTEFHKKFMDEFCG

SEQ ID NO: 25909 - protein, 966 aa, Arabidopsis thaliana
MKEKMQRMVLSLAMVGFMVFGVASAMNNEGKALMAIKGSFSNLVNMLLDWDDVHNSDLCSWRGVFCDNVSYSVVSLNLSSLNLGGEISPAIGDLRNLQSIDLQGNKLAGQIPDEIGNCASLVYLDLSENLLYGDIPFSISKLKQLETLNLKNNQLTGPVPATLTQIPNLKRLDLAGNHLTGEISRLLYWNEVLQYLGLRGNMLTGTLSSDMCQLTGLWYFDVRGNNLTGTIPESIGNCTSFQILDISYNQITGEIPYNIGFLQVATLSLQGNRLTGRIPEVIGLMQALAVLDLSDNELVGPIPPILGNLSFTGKLYLHGNMLTGPIPSELGNMSRLSYLQLNDNKLVGTIPPELGKLEQLFELNLANSRLVGPIPSNISSCAALNQFNVHGNLLSGSIPLAFRNLGSLTYLNLSSNNFKGKIPVELGHIINLDKLDLSGNNFSGSIPLTLGDLEHLLILNLSRNHLSGQLPAEFGNLRSIQMIDVSFNLLSGVIPTELGQLQNLNSLILNNNKLHGKIPDQLTNCFTLVNLNVSFNNLSGIVPPMKNFSRFAPASFVGNPYLCGNWVGSICGPLPKSRVFSRGALICIVLGVITLLCMIFLAVYKSMQQKKILQGSSKQAEGLTKLVILHMDMAIHTFDDIMRVTENLNEKFIIGYGASSTVYKCALKSSRPIAIKRLYNQYPHNLREFETELETIGSIRHRNIVSLHGYALSPTGNLLFYDYMENGSLWDLLHGSLKKVKLGWETRLKIAVGAAQGLAYLHHDCTPRIIHRDIKSSNILLDENFEAHLSDFGIAKSIPASKTHASTYVLGTIGYIDPEYARTSRINEKSDIYSFGIVLLELLTGKKAVDNEANLHQLILSKADDNTVMEAVDPEVTVTCMDLGHIRKTFQLALLCTKRNPLERPTMLEVSRVLLSLVPSLQVAKKLPSLDHSTKKLQQENEVRNPDAEASQWFVQFREVISKSSI

SEQ ID NO: 25910 - protein, 647 aa, uncultured bacterium
MGKIIGIDLGTTNSCVSVMEGNTPKVIENSEGARTTPSIIAYQEDGEVLVGASAKRQAVTNPKNTLYAVKRLIGRKFTEKEVQKDIELMPYTISAADNGDAWVEVRGKKMAPPQISADILRKMKKTAEDYLGEAVTEAVITVPAYFNDAQRQATKDAGRIAGLDVKRIINEPTAAALAFGLDKTSTGDRKIAVYDLGGGTFDVSIIEIADVDGEKQFEVLSTNGDTFLGGEDFDQRIIDFIVAEFKKEQGVDLTKDVLALQRLKEAAEKAKIELSNSSQTDVNLPYITADATGPKHLNVKLTRAKLESLVEELIERTIAPCRMAIKDAGVNVADIQDVILVGGMTRMPKVQEKVKEFFGKDPRKDVNPDEAVAVGAAIQGQVLGGERTDVLLLDVSPLSLGIETMGGVMTKMIAKNTTIPTKFAQTFSTAEDNQPAVTIKVFQGERELASGNKMLGEFNLEGIPPAPRGTPQIEVSFDIDANGILHVGAKDKGTGKENKITIKANSGLSEDEIQKMVKDAELNAADDKKKVEVVQAKNQGDAMVHSVRKSLTEYGDKLDAGEKEKIEAAIKDVEEAIKGDDKDDIEAKTNTLMTASQKLGEKMYADMQAAQGAAGGAAGGPEGTAQAEAKPADDNVVDAEFKEVKKD

SEQ ID NO: 25911 - protein, 665 aa, Camelina microcarpa
MAAATTTSSSSIPFSTKPSSSKSPLPISRFTLPFSLNPNKSSSRRRGIKSTSLSISAVLNTTTNVSTTTPPSKPTKPEKKKFVSRFAPDQPRKGADILVEALERQGVETVFAYPGGASMEIHQALTRSSSIRNVLPRHEQGGVFAAEGYARSTGKPGICIATSGPGATNLVSGLADALLDSVPLVAITGQVPRRMIGTDAFQETPIVEVTRSITKHNYLVMDVEDIPRIVEEAFFLATSGRPGPVLVDVPKDIQQQLAIPNWEQSMRLPGYMSRMPKPPEDSHLEQIVRLISESKKPVLYVGGGCLNSSEELGRFVELTGIPVASTLMGLGAYPCDDELSLHMLGMHGTVYANYSVEHSDLLLAFGVRFDDRVTGKLEAFASRAKIVHIDIDSAEIGKNKTPHVSVCGDVKLALQGMNKVLENRGEELKLDFGVWRSELNEQKQKFPLSFKTFGEAIPPQYAIQVLDELTDGKAIISTGVGQHQMWAAQFYKYKKPRQWLSSAGLGAMGFGLPAAIGASVANPDAVVVDIDGDGSFIMNVQELATIRVENLPVKILILNNQHLGMVMQWEDRFYKANRAHTYLGNPATEDEIFPNMLQFASACGIPSARVTKKAELREAIQKMLDTPGPYLLDVICPHQEHVLPMIPSGGTFNDVITEGDGRTKY

SEQ ID NO: 25912 - protein, 204 aa, Chloranthus spicatus
LCDAEVALIVFSNRGKLYEFCSSSSMLKTLERYQKCNYGAPDTTVSTREMQSSQQEYLKLKARVEALQRSQRNFLGEDLGPLSGKELEQLERQLDMSLKQIRSTRTQYMLDQLTDLQRREQMLCETNKALKRRLDEVTPANPHQGWDPNPHGVSYGRQAAQQQGDGFFHPLECEPTLQIGYQHDQITIAAPGPSVSNYMPGWLA

SEQ ID NO: 25913 - protein, 463 aa, Bifidobacterium longum
MDEGDEDLISGRGFTEGARKAGPKPVGVLAVVGRPNVGKSSLVNRILGRRAAVVEDTPGVTRDRVSYDAEWAGTDFKLVDTGGWEADVEGIESAIASQAQVAVTLADAVVFVVDGQVGMTTTDERIVKMLRAAGKPVVLAVNKIDDQASEYLAAEFWKLGLGEPYSISAMHGRGVGDLLDVALDKLKQAEKTSGYLTPSGLRRVALVGRPNVGKSSLLNQLAREERAVVNDLAGTTRDPVDEIVNIDGEDWLFIDTAGIKRRQHKLTGAEYYSSLRTQAAIERCELALILFDASQPVSDQDLKVMSTAVDAGRAIVLVFNKWDAMDEFDKQRLERLWNTEFDRVMWAERVNLSAKTGWHTNRLTRAMDKALESWDQRIPTGKLNAFLGKIQAAHPHPLRGGKQPRILFATQASTRPPRFVIFATGFLEHGYRRYIERSLREEFGFEGTPIQISVNIREKKKRK

SEQ ID NO: 25914 - protein, 668 aa, Camelina microcarpa
MAAATTTSSSSIPFSTKHSSSKSPLPISRFTLPFSLNPNKSSSSSSRRRGIKSTALSISAVLNTTTNVSTTTPQSKPTKPEKKKFVSRFAPDQPRKGADILVEALERQGVETAFAYPGGASMEIHQALTRSSSIRNVLPRHEQGGVFAAEGYARSTGKPGICIATSGPGATNLVSGLADALLDSVPLVAITGQVPRRMIGTDAFQETPIVEVTRSITKHNYLVMDVEDIPRIVEEAFFLATSGRPGPVLVDVPKDIQQQLAIPNWEQSMRLPGYMSRMPKPPEDSHLEQIVRLISESKKPVLYVGGGCLNSSEELGRFVELTGIPVASTLMGLGAYPCDDELSLHMLGMHGTVYANYSVEHSDLLLAFGVRFDDRVTGKLEAFASRAKIVHIDIDSAEIGKNKTPHVSVCGDVKLALQGMNKVLENRAEELKLDFGVWRSELNEQKQKFPLSFKTFGEAIPPQYAIQVLDELTDGRAIISTGVGQHQMWAAQFYKYKKPRQWLSSAGLGAMGFGLPAAIGASVANPDSIVVDIDGDGSFIMNVQELATIRVENLPVKILILNNQHLGMVMQLEDRFYKANRAHTYLGNPAEEDEIFPNMLQFASACGIPAARVTKIAELREAIQKMLDTPGPYLLDVICPHQEHVLPMIPSGGTFNDVITEGDGRTKY

SEQ ID NO: 25915 - protein, 668 aa, Camelina microcarpa
MAAATTTSSSSIPFSTKHSSSKSPLPISRFTLPFSLNPNKSSSSSSRRRGIKSTALSISAVLNTTTNVSTTTPQSKPTKPEKKKFVSRFAPGQPRKGADILVEALERQGVETVFAYPGGASMEIHQALTRSSSIRNVLPRHEQGGVFAAEGYARSTGKPGICIATSGPGATNLVSGLADALLDSVPLVAITGQVPRRMIGTDAFQETPIVEVTRSITKHNYLVMDVEDIPRIVEEAFFLATSGRPGPVLVDVPKDIQQQLAIPNWEQSMRLPGYMSRMPKPPEDSHLEQTVRLISESKKPVLYVGGGCLNSSEELGRFVELTGIPVASTLMGLGAYPCDDELSLHMLGMHGTVYANYSVEHSDLLLAFGVRFDDRVTGKLEAFASRAKIVHIDIDSAEIGKNKTPHVSVCGDVKLALQGMNKVLENRAEELKLDFGVWRSELNEQKQKFPLSFKTFGEAIPPQYAIQVLDELTDGRAIISTGVGQHQMWAAQFYKYKKPRQWLSSAGLGAMGFGLPAAIGASVANPDSIVVDIDGDGSFIMNVQELATIRVENLPVKILILNNQHLGMVMQWEDRFYKANRAHTYLGNPAEEDEIFPNMLQFASACGIPAARVTKIAELREAIQKMLDTPGPYLLDVICPHQEHVLPMIPSGGTFNDVITEGDGRTKY

SEQ ID NO: 25916 - protein, 1119 aa, Cuscuta pentagona
MSSSRPSQSSSNSARSKHSARIIAQTSIDAKLHAEFEESGDSFDYSSSIRVTSVNTGEQKPRSDKVTTAYLHQIQKAKFIQPFGCLLALDEKTFRVIAFSENAPDMLTMVSHAVPSVGDLPVLGIGTDIRTIFTAPSGAALQKALGFGEVSLLNPILVHCKTSGKPFYAIVHRVTGSLIVDFEPVKPYEAPMTAAGALQSYKLAAKAIARLQSLPSGSLERFCDTIVQEVFELTGYDRVMAYKFHDDDHGEVVSEITKPGLEPYLGLHYPATDIPQAARFLFMKNKVRMICDCQAKHVKVVQDEKLLFDLTLCGSTLRAPHTCHLQYMENMNSIASLVMAIVVNDGDDEEEEERSGSGKRKRLWGLVVCHNTTPRFVPFPLRYACEFLAQVFAIHVNKELELENQIVEKNILRTQTLLCDILLRDAVLGIVSQSQSPNMMDLVKCDGAVLLYKSKIHRLGITPTDFQLQDIVYRLNEHHMDSTGLSTDSLYDAGFPGALSLGLCGMASVRISEKDWLFWFRSHTASEVRWGGVKHEPDDGRKMHPRSSFKAFLEVVETRSLPWKDYEMDGIHSLQLIMRNAFFNEADTVATNVIHAKLNDLRIDGLQELEAVTSEMVRLIETAMVPIIAVGVDGLVNGWNTKIAELTGLSVDEAIGNHLLTLVEDSSVHTVKKMLNLALQGEEEKNVQFEIMTHGIRSECGPISLVVNACASRDVQESVVGVCFIAQDITGQKTVMDKFTRIEGDYRAIIQNPNPLIPPIFGTDEFGWCSEWNSAMTKLSGWRRDEVIDKMVLGEVFGTQKACCRLKSHEAFVTLGVVLNNAITGHESDKTVFGFCTRNGKYVECLLSVTKRLNQDGAVIGLFCFLQLASQELQQALHFQKLSEQTATKRLKVLAYLRKQVKNPLSGIMFSRKMLEGTELGNDQQNILHTSAQCQQQLSKVLDDTDLDCIIEGYLDLEMVEFKLDEVLLASISQVMTKSNGKSLRVINDVAENVLCETLYGDSLRLQQVLAEFLSVAVNFTPSGGQLAVSSSLTKDHLGQSVQLAHLEFRVTHSGGGVPEELLTQMFGSDVDALEEGISLLVSRNLVKLMNGDVQYHREAGRSAFIISVELAVATKPRA

SEQ ID NO: 25917 - protein, 1123 aa, Orobanche minor
MASSQPGRSSTNSAQSRQSARIIAQTSIDAKLDADFEESGSSFDYSTSVRVTNYPAGLSEPRSDKVTTAYLHQIQKGKLIQQFGCLLALDEKTFRVIAYSENAPEMLTMVSHAVPSVGDHPLLGIGSDIRTIFTAPSAAALQKALGFGEVSLLNPILVHCKTSGKPFYAIIHRVTGSLIIDFEPVKPHEVPMTAAGALQSYKLAAKAIACLQALPGGSIERLCDTMVQQVFELTGYDRVMIYKFHEDDHGEVFTEITKPGLEPYVGLHYPATDIPQAARFLFMKNKVRMICDCRANHVKVVQDDNLPFDLTLCGSTLRAPHGCHSQYMENMNSIASLVMSVVVNEGDEDGPDSSSGPYKRKRLWGLVVCHNTCPRFIPFPLRYACEFLVQVFSIHVNKELELENQMLEKNILRTQTLLCDLLLRDVPLGIVSQSPNVMDLVKCDGAILLHKRTKYRLGLTPTDFQIRDIVSWLDEYHQDSTGLSTDSLYDAGFPGALALGNALCGMAAVKITDEDWLFWFRSHTAAEIRWGGAKHELEAKDDGRKMHPRSSFRAFLEVVKTRSLPWKDYEMDGIHSLQLILRNAYKESEEKDLESREIHARLNELQIDGVKEIEAVTSEMVRLIETATVPIFSVGVDGLVNGWNTKISDLTGLSVVEAIGMHFLALVEDSSADTVSKMLGLALQGKEEHDVQFEIKTHGQRSESGPISLIVNACASKDVKENVVGVCFIAQDITTQKSMMDKFTRIEGDYRSIIQNPNPLIPPIFGTDEFGWCSEWNAAMIKLSGWGREAVIDKMLLGEVFGLNKACCRLKNQEAYVNLGVVLNNTVTGQESGKVSFGFFSRSGKYVACLLCVSKKVDSEGSVTGLFCFLQLASPELQQALHIQRISEQTASKRLRVLAYIRREIRSPLSGIIFSRKLMEGTDLNDEQKNIVRTSLHCQSQMNKILEDTDLDHIIEGYLDLEMVEFKLHEVLIASISQVISKSNGKGIKIVDNLAPNLSNETLYGDSLRLQQVLAAFLLIAVDSTPSGGQLGVAATLAKDSIGEFVQLGRLECRITHGGGVPQEILNQMFGDEPTDASEDGISLFISRKLVKLMKGDIQYLREAGRSTFIISVEIAISNKPNL

SEQ ID NO: 25918 - protein, 1130 aa, Monotropastrum globosum
MSSSRPTQSSGSSGRSKHSARIIAQTTVDAKLHADFEESGGSFDYSTSVRFTGTVGGDIQPRSDKVTTAYLHQIQRGKLIQPFGCLLAVDEKTFKVIAYSENAPEMLTMVSHAVPSVGDHPLLGIGTDVRTIFTNPSAAALQKAMGYGEVSLLNPILVHCKTSGKPFYAIVHRVTGSLIIDFEPVKPYEVPMTAAGALQSYKLAAKAITRLQSLPSGNMRILCDAMVQEVFELTGYDRVMVYKFHDDDHGEVFSELTKPGLEPYLGLHYPATDIPQAARFLFMKNKIRMICDCHAKQVKVIQDDKLPIDLTLCGSTLRAPHSCHLQYMENMNSIASLVMSVVVNEGDEEGDGGGSSVSSNQQQKIKRLWGLLVCHNTTPRFVPFPLRYACEFLAQVFTIHVNKELELENQIHEKNILRTQTLLCDMLMRDAPLGIVSQSPNVMDLVKCDGAVLLYKDKTYRMGTTPTDFQLRDIVYWLSEYHTDSTGLSTDSLYDAGYPGALAFGDGVCGMAAVKITSNDMLFWFKAQTAAEIQWGGAKHESGERDDGRKMHPRSSFKAFLEVVKTRSLPWKDYEMDAIHSLQLILRNAFKDTKAMDATTDVIHTRLHDLKIEGMEELEAVTSEMVRLIETATVPILAVDVDGLVNGWNLKIAELTGLPVDKAIGRDLLSLVEDSSTGIVKKMLDLALQGKEEQNIQFELKTDESRRDSGPISLVVNACASRDHHENVVGVCFVAQDITGHKTVMDKFTRIEGDYKAIVQNPNPLIPPILGTDEFGWCSEWNLAMEKISGWNREDVINKMLLGEVFGTHVVCCRLKNQEAFVNLGIVLNNAVTGRESEKISFGFFARNGKYVECILCASKKIDGEGAVTGVFCLLQLASPELQQALHVQRLTEQTALKRFKELAYIRRQTRASLSGIMYSWRLMEGTDLRERQKQLLHTSAQCQHQLTKILDDTDLDCIIDGYLDLEMVEFTLYEVLSASISQVTLKSNGKGIHIANPLQEEKMPATLYGDNLRLQQVIADFLSISVNFTPNGGQIVASASLTKDRLGQSVQLVHVEIRITHMGGGVPEGLLNQMFGGDTDTSEEGISLLVSRKLVKLMNGDVQYLREAGKSTFIISVELAAAANKSTCE

SEQ ID NO: 25919 - protein, 361 aa, Mentha x piperita
MALPNLEESTVEELLDAEAHVWNHIFSYINSMSLKSALQLGIPDIIHKHGNPITLSQLADALNINKAKTDGLFRLMRLLEHSKFFDKVKVEGEGEEEAYSLTRASRLLLRDEPSSLAPYIRAMLDPNFMDPFHHLSEWLGSECPSPFEFKHGRSLWEYAGIEERWNQLFNQAMANDAKLVTSILVKECRHIFQGLESLVDVGGGAGTVAKVVADAFPGLKAVVLDLPHVVADLATSENLRYVSGDMFEDIPRADAVLLKWILHNWSDEECIKILEKCKEAITPSKNNNGGKVIVIDMILKDEKQHHKGTETQLLFDVLMMTALTGKERTEKEWANLFFAAGFKTYKIHPVLRLRSVIEIFP

SEQ ID NO: 25920 - protein, 693 aa, Capsicum annuum
MATSSVCIAGNGLSTHKTQKVFKKDVYGRKILYSSNLPSSGKTSRVVVKASLQQRPDEGRRGFLKLLLGNVGLGAPALLGNGKAYADEQGVSNSRMSYSIFSEYLDKDRVQKVDLFENGTIAIVEAVSPELGNRVQRVRVQLPGLSQELLQKFREKNIDFAAHNAQEDSGSLIFNLIGNLAFPLILIGGLFLLSRRSNGGMGGPGGPGNPLAFGQSKAKFQMEPNTGVTFDDVAGVDEAKQDFMEVVEFLKKPERFTAVGARIPKGVLLVGPPGTGKTLLAKAIAGEAGVPFFSISGSEFVEMFVGVGASRVRDLFKKAKENAPCIVFVDEIDAVGRQRGTGIGGGNDEREQTLNQLLTEMDGFEGNTGIIVVAATNRADILDSALLRPGRFDRQVSVDVPDIKGRTEILKVHAGNKKFDSDVSLEVIAMRTPGFSGADLANLLSEAAILAGRRGKTAIASKEIDDSIDRIVAGMEGTVMTDGKSKSLVAYHEVGHAICGTLTPGHDPVQKVTLIPRGQAKGLTWFIPADDPTLISKQQLFARIVGGLGGRAAEEVIFGAPEVTTGAAGDLQQITSLAKQMVVTFGMSELGPWSLMDASAQSGDVIMRMMARNSMSEKLAEDIDAAVKRLSDSAYEIALSQIRSNREAIDKIVEVLLEQETMTGDEFRAILSEFVEIPAENRVPAAVPTPAAV

SEQ ID NO: 25921 - protein, 1263 aa, Leptosphaeria maculans
MAEPESEKPSSAQGGGLPSSDHPLNPILQRQIELPEIKINYFSLFRYATVKEYALLLISAFFAAVSGAMFPLLILFIGNLVQVLKDFNLGTIPQEQLSEQIRDIALYIVYLFLGQLVSVFIFTNGCLLVGEAITNAIREKYVRSLFRQNIAFFDTYGSGKITSQLTSSTATIQDAISHKIGLFVSACSCFVASYAIGFVKHWKLTFILTSTVVAITGVMIIMSGFMAKFGANSSGALAEASAKLEETFSGIRVVKALGLEKRLSDELDPQLLNIEFWGKRVRHVMGWMLAIMYGLIFLNYGLAIWQGYRFMQGGTEDVGAIITVLMCLNIGAFLFGNVGPHLQAMSLGAAAAQDIFAVIERESVTDGGAPPGSFEVEGNIEFRNVSHVYPSRPDTHVLQDFSMIFPAGKVTAIVGASGSGKSTIVSILERFYEPVSGQVFLDGHDITHLNVQWLRQQFGLVGQEPVLFNGSIFKNVAYGLKGTQYGQESREVTMKLVTEACRIANAHDFITALPHGYDQEVGIRGASLSGGQRQRIAIARAIVSGPKILLLDEATSALDVQSEEAVQLGLNMASSGRTTIVVAHSLSTIKLADNIIVMEKGRVAQQGTHAELEAQEGLYQTFVRRQQLKQATLEPPHARITPAVDTPASPQHRLSEKTGSIYGQGESEAADKSPSTKYSFVQLVKFVARFNKEDWRLMVTGIASAVISGAVWPAHSVFFAKAIVALSSPSPASLARGPNFWAAMYVMLAFVQIASQGVQGSAFAICAERLILRARRVAFKYLLRQDVEFFDDPLHSSGIMTSFVSSDVNALAGLSGVFLGTLFSATATVLGGLILSLAVGWKLTLVTMGTIPIIIVAGYVRLKLVGTLEKISRKVHEESAGRVCEEINAVRTVAASCLEDEMCEDYVRSLKSKEKTYLRATLWSSGWYALSEAVPLGCMSLGFWYGATLVMRTEYTTEQFFIVVTAVIFGASSAGLVFAFAPDFGKAGVSAERLQELVDRQPEVDTWSEEGDHIETTNGKVDVSNVVFYYNQRSKTPVLNSISLGAAPGQSIGLCGGSGSGKSTVASLLERFYNPSSGTVSLDEKDVRTININSYRAQFALVNQEPLLFSCSIRENLLYGSLGKDLTDSEIEEACKMAQVYDFVCSLPEGLDTSFGSNAVMLSGGQRQRLSIARAILRKPRVLILDEATSALDSTSERAVIEALTKTAEGRTTIMVAHRLSTIQGCDKIFYLRAGAVAEEGTHEELMAKRGSYYDSVNLQSLG

SEQ ID NO: 25922 - protein, 658 aa, Vitis vinifera
MASAVFYSSVQPSIFSRTHIPIPISKDSFEEFGHSINYKHYFRSNPCGQKKRVAQVKATLAEATPAPSAPSLPSKRVRILVAGGGIGGLVLALAAKKKGFDVVVFEKDMSAIRGEGQFRGPIQIQSNALAALEAVDMEVAEEVMRAGCITGDRINGLVDGVSGDWYVKFDTFTPAAERGLPVTRVISRMTLQQILARAVGEDIIMNGSNVVDFEDDGNKVTVILENGQRYEGDLLIGADGIWSKVRKSLFGPKEATYSGYTCYTGIADFVPADIDSVGYRVFLGHKQYFVSSDVGAGKMQWYAFYNEPAGGVDGPEGKKERLLKIFGGWCDNVIDLILATDEEAILRRDIYDRTPTFTWGRGRVTLLGDSVHAMQPNMGQGGCMAIEDSYQLAMELDKAWEQSIKSGTPIDVVSCLKSYEKARRIRVAVIHGMARMAAIMASTYKAYLGVGLGPLSFLTKLRIPHPGRVGGRFFIDIAMPLMLSWVLGGNSSKLEGRPPSCRLSDKASDQLRRWFEDDDALERAIGGEWFLLPSGESGLQPICLSKDENKPCIIGSVSHTDFPGISTVIPSPKVSKMHARISCKDGAFFLTDLQSEHGTWITDNVGRRQRVSPNFPTRFHPSEVIDFGSEKASFRVKVVRTPPDNAAKDEESKLFQAV

SEQ ID NO: 25923 - protein, 315 aa, Neisseria meningitidis
MKTNFLKLAVETLQLEANAIMEMSKRLDNEFEKAIEIILNTQGRVVVVGMGKSGIIGQKLAATMASTGTSAFFVHPGEAFHGDLGMIKPIDVALLISNSGETEEIIRILPFLKEQGNKIIAMTGNIKSTLAKHAHSLLDISVSREACSNNLAPTSSTTCTLAMGDALAMVLQSEKKFLPEDFARFHPGGSLGRRLLTRVSDVMKTKIPHCLPDASFKEIVYSINRGYMGLTLVMEHDTLHGIITDGDLRRAFDRFDNINQIKAKDIMSLSPKYVSADARFAEAEAYMHAEKIDSLVVKESNKVIGVLNIYDIDHY

SEQ ID NO: 25924 - protein, 354 aa, Glomus mosseae
MAVANKSNTQTLAKYLSLDQGGKIQAEYIWIDGDGGLRGKTTTLDFKPTDVSELKEWNFDGSSTNQAPGDNSDILLRPCAIFKDPFRGGDNILVLAECYNNDGTPNRTNYRHSCTKLMSAHSEAKPWFGIEQEYTLFDMDGQVLGWPKGGFPGPQGPYYCSVGANVAFGRDVVEAHYRACLYSGVNISGVNGEVMPGQWEYQVGPCEGIDMGDHLWVSRYLLQRVAEDFGIVVSFHPKPIKGDWNGAGCHTNYSTEAMRIEGGIKAIHDAIDRMSKRHAEHIAVYGEDNDKRLTGRHETGHISEFSFGVANRGASIRIPRHVAAQGYGYFEDRRPASNIDPYRVTEVIVESTLG

SEQ ID NO: 25925 - protein, 595 aa, Melittangium lichenicola
MESKRGPGRTPGAGKAVWRALGYLRRYRFDTMGALLSLLMASAANLAAPQFVRQVVDEGIAHGSMPAVRAAVAGLVGVALVRGVCNFLQGYLAERASQGVAFDLRDSLFERLQRLSFSYHDQAQTGQLLTRLTNDVEQVRTFVGGGAVQVVASLLMLVGCTALLFMTNPVLALAALATIAPVLWVLRHFMMKMGPLFGQVQGTLGRLNSILQESLRGARVVRAFSGEARESARYGRVNEEYLGLNLQLITIIFTHFPWVFFFASLGTLVVVGVGGWLIFHQWLSIGELLAFNSYLGFLLLPLITLGFLANQMSRAGVSAVRIFELLDTSVEVVDRPGAQVLPPLEGRVELRDVRFRYAGGERDILKGVSFVVEPGQFVAIIGTTGSGKSTVINLIPRFYEVTGGAVLIDGRDVRDVTLASLRSQVGIVLQEATLFAGTLRENIAYGRPSASLEEVQAAAEAAQAAEFIAALPQGYDTPVGERGVGLSGGQRQRVAIARALLTQPRLLILDDSTSAVDARTEAEIQHALDRLMRGSQRTAIVIAQRLSTVRDADQVIVLDEGRVVAQGRHEELLASSPLYNEILGSQLRPEQGEAV

SEQ ID NO: 25926 - protein, 304 aa, Ralstonia sp. M1
MSQDNASGAGISAASTSNFLRQIIEGDLAQGTYAGRKDAAGQPIPPVVTRFPPEPNGYLHIGHAKSIWVNFGLAKEYGGRCHLRFDDTNPVKEDTEYVDSIIDAVHWLGYSWNDAGGEHLYYASDYFEQLYGFAEVLIQRGVAYVDSQSAEQIAANRGDFTKPGTPSPFRDRSVDENLALFRDMRAGKYKDGEHVLRAKIDMAAPNIVMRDPVLYRIRHAHHHRTGDAWCIYPMYDFTHCISDALENITHSLCTLEFENNRPLYDWVLDHLRDAGVLPRTLPHQYEFARLHLTYAITSKRKLLQ

SEQ ID NO: 25927 - protein, 246 aa, Brassica oleracea
MLKSVNPMTFYDIGEQQFPTLGYIVSKPGNARAYEIDPPLPTVNDVIYSSDEFRMYAYKIKRCPRTRSHDWTECPYAHRGEKATRRDPRRYSYCAVACPAFRNGACHRGDTCEFAHGVFEYWLHPARYRTRACNAGNMCQRKVCFFAHAPEQLRQSEGKHRCRYAYRPVRTTVARGRNGDGVGIREDGEDFDTWQSPVKSGESELDINEERLLKCWSGMSIVDDHYDPSDLDLNLSHIDWISALVD

SEQ ID NO: 25928 - protein, 154 aa, Castanea sativa
MALSLFGGRRSNVFDPFSLDIWDPFEGFSAVANVPPSARETTAFATARIDWKETPEAHIFKADLPGLKKEEVKVEVEDGNVLQISGERSKEHEEKNDKWHRVERSCGKFLRRFRLPENAKVEQVKANMENGVLTVIVPKEEQKKTEVKSIEISG

SEQ ID NO: 25929 - protein, 601 aa, Heliobacillus mobilis
MSRIVKNLAIYILIVLLAISVLRVTKTPEPAQEPISYTQFYQLLVTDQIKELNAISERDRTEITGVKKDGNRFTTIGPVDIKRITDIVLDKQIPFTQKPAPEPPWWTGLFSTLLPILVLVGLFFFMMQQTQGGGSRVMQFGKSRAKLHTDDKKKVTFEDVAGADEVKEELQEVVDFLKHPKKFVELGAKIPKGVLLFGPPGTGKTLLARAVAGEAGVPFFSISGSDFVEMFVGVGASRVRDLFEQAKKNSPCIVFIDEIDAVGRQRGAGLGGGHDEREQTLNQLLVEMDGFSANEGIIIIAATNRPDILDPALLRPGRFDRQIVVDRPDIRGRKEILGVHVKGKPLDETIDLDVLARRTPGFTGADLANMVNEAALLAARRGTKKVGMHEMEDAIERVIAGPEKKARVISEFEKKLVSYHEAGHALVGGLLEHTDPVHKISIIPRGWAGGYTLLLPEEDRHYMTKSHLLDQVTMLLGGRVAEAIVLKEISTGASNDLERATDLVRKMITEYGMSEELGPLTFGHKQEQVFLGRDLARDRNYSEAVAFSIDKEARRIIEECYGKAKKILESNADKLHLIAQTLMDKETIEASEFTELMKKVS

SEQ ID NO: 25930 - protein, 666 aa, Bassia scoparia
MASTCANPTFTPFTSKPLKPRSPFHSFPFPSNPKTPSSSFRNLKITSSLSSSQPPKPPSAVKTHSPPSPLTTDEPPQGFVSRFAPDQPRKGCDVLVEALEREGVTDVFAYPGGASMEIHQALTRSDSIRNVLPRHEQGGIFAAEGYARATGRVGVCIATSGPGATNLVSGFADALLDSVPLVAITGQVPRRMIGTDAFQETPIVEVTRSITKHNYLVLDVEDIPRIVKEAFFLANSGRPGPVLIDIPKDIQQQLVVPDWDQGVRLGGYVSRLPKSVFSANDEGLLEQIVRLMSEAKKPVLYVGGGCLNSGEELRKFVELTGIPVASTLMGLGAYPCNDDLSLHMLGMHGTVYANYAVDKADLLLAFGVRFDDRVTGKLEAFASRAKIVHIDIDSAEIGKNKQPHVSICADVKYALKGMNKILESRKGKLKLNYSSWREELGEQKKKFPLSFKTFGEAIPPQYAIQMLDELTNGNAIISTGVGQHQMWAAQHYKYRNPRQWLTSGGLGAMGFGLPAAIGAAVARPDAVVVDIDGDGSFIMNVQELATIRVENLPVKIMLLNNQHLGMVVQLEDRFYKANRAHTYLGNPSKESEIFPDMLKFAEACDIPAARVTKVGDLRAAMQTMLDTPGPYLLDVIVPHQEHVLPMIPSGAAFKDIINEGDGRTSY

SEQ ID NO: 25931 - protein, 584 aa, Phaseolus vulgaris
MCGILAVLGCSDHSRAKRVRVLELSRRLKHRGPDWSGLHQHGDCFLAHQRLAIVDPASGDQPLFNEDKSVIVTVNGEIYNHEELRKQLPGHKFRTGSDCDVIAHLYEEHGEGFVDMLDGIFSFVLLDTRDNSFIVARDAIGVTSLYIGWGLDGSVWISSEMKGLNDDCEHFECFPPGHLYSSKDRGFRRWYNPPWFSEAIPSAPYDPLVLRRAFEQAVIKRLMTGVPFGVLLSGGLDSSLVASITSRYLANTKAAEQWGSKLHSFCVGLEGSPDLKAAKEVADYLGTVHHEFHFTVQDGIDAIEDVIYHVETYDVTTIRASTPMFLMSRKIKSLGVKWVISGEGSDEIFGGYLYFHKAPNKEEFHRETCRKIKALHQYDCLRANKSTFAWGLEARVPFLDKEFINAAMNIDPEHKMIKRDEGRIEKWILRRAFDDEDQPYLPKHILYRQKEQFSDGVGYSWIDGLKAHAAKHVTDKMMLNAGNIYPHNTPVTKEAYYYRMIFERFFPQNSARLTVPGGASVACSTAKAVEWDAAWSNNLDPSGRAALGVHISAYENQNNLANKGVEIEKIIPMDAAPLGVAIQS

SEQ ID NO: 25932 - protein, 50 aa, Lactococcus lactis subsp. lactis
KGFGFITTEEGNDVFAHFSAIQTDGFKTLDEGQKVTFDVEEGPRGPQAAN

SEQ ID NO: 25933 - protein, 50 aa, Lactococcus lactis subsp. lactis
KGFGFITSEDGQDVFAHFSQIQTSGFKTLDEGQKVTFDVEAGQRGPQAAN

SEQ ID NO: 25934 - protein, 50 aa, Lactococcus lactis subsp. cremoris
KGFGFITSEEGKDLFAHFSAIQSDGFKTLDEGQKVEFDVEEGQRGPQAAN

SEQ ID NO: 25935 - protein, 50 aa, Lactobacillus acidophilus
KGFGFITGEDGQDVFVHFSAINGEGYKSLDEGQAVSYDVEQSDRGPQAAN

SEQ ID NO: 25936 - protein, 50 aa, Lactobacillus helveticus
KGFGFITGSDNKDVFVHFSAIKTDGFKSLEEGQKVSYDVEQGGRGPQAAN

SEQ ID NO: 25937 - protein, 50 aa, Streptococcus thermophilus
KGFGFITSEDGQDLFAHFSSIQSDGFKSLDEDQKVEFDVEVGQRGPQAAN

SEQ ID NO: 25938 - protein, 182 aa, Asarum caudigerum
KAHEISVLCDAEVGLIVFSPRGKLYEFANSSMLKTIERYQRHSKEANVNNKATEQNIQHWKYEAEHMAKKIEFLESSKRKLLSEDLESCSTEELQQIESQLERSLSSIRGKKNQLFKEQIEQLKEKEKILIKENAILSQKCGTQPQQQSTSPSGTVPYEHIFPHSEVETDLFIGRPERGSTR

SEQ ID NO: 25939 - protein, 237 aa, Saururus chinensis
MGRGRVQLKRIENKINRQVTFSKRRTGLLKKAHEISVLCDAEVALIVFSTKGKLYDYSTNAGMARILERYERYCYAEREVAVTSPDSEGSWWLEYGKLKARIEAQQRIQRQLMGEDLDALTPKELQQLENQLESALKHVKSRKNQVIYDSMVELRRKEKLLRDENTMMEKKIQEKKKERVQQAQWEQQIQSQNSPSFLPTLNIGYHQGTATETGEKEEAHPGHNTVMLAWLLRSSNN

SEQ ID NO: 25940 - protein, 192 aa, Corynebacterium diphtheriae NCTC 13129
MSLTVAEAIAQRRAVRTYTDQPIPDDILDRVVAQALEAPTAFNAQRADVVVVRDQAVKDALFAASKQAQLRDAPAVLVIVARADAPTDLPELLGPDRAAYANGFFARLDAAALRETALKDAMLVAGFALIAAQGEGLATSPTTGWDESQVLEAVGLGGRDDRAVGLVIAMGYPAEQPLHPGREASRRVNDHY

SEQ ID NO: 25941 - protein, 421 aa, Corynebacterium diphtheriae NCTC 13129
MALVVQKYGGSSLESAERIRRVAERIVATKKQGHDVVVVCSAMGDTTDELLDLAAQVNPVPPAREMDMLLTAGERISNALVAMAIESFGAKAQSFTGSQAGVITTERHGNARIVDVTPGRVREALDEGKICLVAGFQGVNRESKDVTTLGRGGSDTTAVALAAALNADVCEIYSDVDGVYTADPRIVPNAQKLEKLCFEEMLELAASGSKILVLRSVEYARAFGVPLRVRSSYSNDPGTLVAGSMEDIPVEEAVLTGVATDNSEAKITVLGIPDSPGSASAVFRALADAEINIDTVLQNISSLEDNRTDITFTCPRADGPHAMELLRNLQAKNDWQNVLYDDQIGKVSLVGAGMKSHPGVTAEFCEALRDAGVNIELISTSEIRISVLIRESDVDVAARAIHEKFELGGETEAIVYAGTGR

SEQ ID NO: 25942 - protein, 227 aa, Corynebacterium diphtheriae NCTC 13129
MEGVQDILSRAGIFQGVDPIAVNNLIEDLESVRFPRGATIFEEGEPGDRLYIITSGKVKLARHSMDGRENLLTVMGPSDMFGELSIFDPGPRTSSAVCVTEVHAATMNSEMLRQWIAEHPEISEQLLRVLARRLRRTNNSLADLIFTDVPGRVAKTLLQLANRFGTQEGGALRVNHDLTQEEIAQLVGASRETVNKALATFAHRNWIRLEGKSVLIVDTEHLAKRAR

SEQ ID NO: 25943 - protein, 245 aa, Corynebacterium diphtheriae NCTC 13129
MDFPQPDAPGHNIDLRPEFAPRWLSPLVSDVANGVICDRLRRVLAPPQRTETTKQAAVLMLLAGDPLAHTVPNDATVLLTHRSPTMRSHSGQIAFPGGRMDPTDHNVVDCALREAWEETGVDRMNVTPLVTFPMLHIRATGYPVHPVLGYWHRPSRVGVVSPNEADAVAAIPIAELADPSNRLTVEFDRWSGPAFRINDFIIWGFTGGLLDAMLYQAGWEQPWDSHKHYDLYDTLARSRNNERLT

SEQ ID NO: 25944 - protein, 67 aa, Corynebacterium diphtheriae NCTC 13129
MAQGTVKWFNAEKGFGFIAPEDGSADVFVHYSEIQGNGFRTLEENQKVEFEVGEGAKGPQAQQVRAI

SEQ ID NO: 25945 - protein, 356 aa, Corynebacterium diphtheriae NCTC 13129
MARTSKDRLSKVRKILGRFTTPLLPDDYSVLINPRWSTRELRGTIAAVRREADVVHLDIVPGWGVPTQFEPGQFIGIGVEVDGRYIWRSYSLTCTPTTSASLLSITVRAVEHGKLSNHLVGHATPGTTVRLSAPAGSFHLPTPLPPKLALIAAGTGITPIISMLRTMAERQQFAETDVVLVYSIRDRAHGLFLEALARMSTQHPQLRVVVQETSSQGRVTPETVASIVPDITSRTVFACGPSTMLDAYESWANKNHVNLTTERFLLDRKATTAQGGTVSFGQRASVLVDGATTVLEAGEQAGVQLPFGCRMGLCHTCVRPLTHGHATNLVTGETHEPGSRIRTCVCVAAGDITIEA

SEQ ID NO: 25946 - protein, 436 aa, Corynebacterium diphtheriae NCTC 13129
MSEASVQPTFVELGVAREITDALATVGVKRTFAIQELTLPIALDGRDLIGQARTGMGKTYGFGVPLIDRVFDAADVAELDGTPRALVVVPTRELAHQVGDDLKLLSRNIPITVATIYGGRPYEEQIAQLESGVDVVVGTPGRLIDLYQRGNLALDHVAVLVLDEADEMLDLGFFPDIEKLLAALTHPHQTMLFSATMPGAVVTLARTFMHHPVHIRAEDTGAAQTHASTTQVIFQAHRMDKSAVTARILQAEGRGKTIIFARTKRTAAELADDLAQRGFRVAGVHGDLGQSAREASLDAFRTGKAHILVATDVAARGLDIDDVTHVINYQTPDDPMTYVHRIGRTGRAGHTGTAVTLVGYDELPKWQLINDELNLGQPEPPQWFSTSPELFQALNIPDTATDSVGRSRTAVGSRKFNKSRSPRSQRRPSNKSGKRS

SEQ ID NO: 25947 - protein, 550 aa, Corynebacterium diphtheriae NCTC 13129
MNIYTLAADAPGSAAGNPVLNIIVFIAFIMITMAVVLRAGKSTNEASDFYTGGGSFSGKQNGLAIAGDYLSAASFLGIVGAIALSGYDGFLYSIGFFVAWLVALLLVAEPLRNVGRFTMADVLSFRLKQKPVRVAAAFGTLFVSLFYLIAQMAGAGSLVSVLLDLHDHSAQAIVVAVVGVIMIVYVLIGGMKGTTYVQMIKAVLLVGGVTSMTILVFFAVKGGFSQLFDAAVHTHSQSDYLAKKGYEASQILEPGLKYGKSETSKLDFLSLGIALVLGTAGLPHVLMRFYTVPTAKEARRSVVWAIILIGSFYLMTLVLGFGAAALVGPDRIMKAPGTANAAAPLLALELAGPVFMALISAVAFATVLAVVAGLAITASASIAHDLYDAVLRDGKSTEEEQVRVSRITVVAIGVAAIILGILAMEQNVAFLVSLAFAIAASANLPTILYSLYWKRFNTTGAVASIYTGLISALVLIIFSPAVSGSETSMISGADFAWFPLSSPGLVSIPLAFIAGIVGTYLGRPDNLDHLQAEMEVRSLTGVGVEAPVDH

SEQ ID NO: 25948 - protein, 581 aa, Corynebacterium diphtheriae NCTC 13129
MIEGEGLIAEATAAPEKEITFEGEDDNAGVDWKVTAPAMVIVLAVVAWGILGTTSFASFAASSLGYIVDSFGWAFIFFTTVFLIFAIAIALSNFGTIKLGRNDEAPEFSTTSWIAMMFAAGMGIGLMFYGASEPLSNYLNGVPGHEPRSVGHAMSTTLLHWTLHPWAIYGIFGLAIAYSTFRLGRRQLLSSAFIPLIGEHGAKGWIGRIVDILAIIATIFGTACSLGVGATQISAGLDAAGVVKDPGMSTVLAIVSVLTLAFLLSAMSGVGKGIQYVSNANMVLAALLAIFVFVLGPTVTILNLIPGSLGAYLSNFFEMVGRTAESADGSAGEWLGSWTIFYWAWWISWSPFVGMFLARISRGRTIREFLFGVMLVPAAVSVVWFAIFGGTAIHFEQEGRSIYGDGSAEYQLFELLHALPGGKIAGVVAVILLATFFITSADSASTVMGSMSQNGQTDANKYVSAAWGLLVALIGMTMLVSGGDDVLSNLQNITIIAASPFLVVIVILMFAVLKDLRNDEIYLDYREQQRFASRLARERRIHLEHEKRKKAREKRRNAKEHKEHKVRVPRAGKGDHLRHRR

SEQ ID NO: 25949 - protein, 326 aa, Corynebacterium diphtheriae NCTC 13129
MTSHNWTANQKNLMVLTGRAHPELADAVAKELGVEITPTTARDFANGEIFVRFEESVRGCDAFVLQSHTQPLNKWLMEQLIMIDALKRGSAKRITAILPFYPYARQDKKHRGREPISARLVADLLRTAGADRIVSVDLHTDQIQGFFDGPVDHMHAMPILTDYIKGKYDLDNVVVVSPDAGRVKVAEKWANTLGDAPMAFVHKTRSVDVANQVVANRVVGDVAGKTAILLDDMIDTGGTIAGAVGVLRDAGAEDVIIACTHGVFSGPARERLSQCGAKEVITTDTLPQSTEGWDNLTVLSIAPLLAKTIHEIFENGSVTTLFEGQA

SEQ ID NO: 25950 - protein, 680 aa, Corynebacterium diphtheriae NCTC 13129
MSITDNATSGENELDIKILSESQDNSQVDEGTTINNDVVADVDDSRVANTSEATDSAQQEADSAEKDGFEALGLPDAILKAVAKVGFETPSPIQAQTIPVLMQGHDVMGLAQTGTGKTAAFALPILSRIDVKKRHPQALILAPTRELALQVADSFQSFADHLGDIHVLPIYGGQAYGIQLSGLRRGAQIIVGTPGRVIDHLEKGSLDISNLRFLVLDEADEMLNMGFQEDVERILEDTPEDKQVALFSATMPNGIRRLSRDYMKDPHEIQVKSQTRTNTNITQRYLNVAHRNKLDALTRILEVTEFEAMIMFVRTKHETEEVAEKLRARGFSAAAINGDIAQAQRERTVDQLKDGRLDILVATDVAARGLDVERITHVFNYDIPNDTESYVHRIGRTGRAGRSGEAILFVTPRERRMLRSIERATNAKLIEMDLPTVDEVNESRKAKFADSITESLEDDQVAIFRSLIKSYAEEHDVPLEDIAAALATQARAGSEFLMKEPPPEKRRERRDRDDRRGGRDRFDRDDRRGGRDRGSRFERNDDMQLYRLAVGKRQHVRPGAIVGALANEGGLSNKDFGRINIFVDHTLVELPKNMDPSVIDRLSDTRISGQLIHIEKDNGRPPRRNDDGDRGGYRGGDRFDRDDRRGGRGGRDRGGYRGGRDRNDRGDRGGYRGGRGGYRD

SEQ ID NO: 25951 - protein, 448 aa, Corynebacterium diphtheriae NCTC 13129
MNPDSQHHATFNPGKGEGSPVGIAILGYGTVGSQVLRLLTENHNDFQHRAGGPLEIKGVAASSVEKHRGSLADQLGLLTDDARSLIARDDVDIVVEVIGGIDYPRELILEALHSGKSVVTANKALVAAHSEELAAAADEAGVDLYFEAAVAAAIPVLGPLRRSLAGDQIQSVAGIVNGTTNFILDAMDSTGASYDDMLAEATRLGYAEADPTADVEGHDAASKAAILASLAFHTRVTYADVYCEGISKITADDINAAKEAGFTIKLLAICERLNVDGVEKVSARVHPTLVPRNHPLASVDKSFNAIFVEAEAAGRLMFYGNGAGGNPTASAVLGDIVGAARNKVFGGRAPGESTYADLPIAPFGEVPTRFHIDMEVEDRVGVLADLAKTFSNHGISLRTVRQAEKDGHARLIVVTHTAKESELEATVEQIKNSDSVKKINSVIRLAGE

SEQ ID NO: 25952 - protein, 378 aa, Corynebacterium diphtheriae NCTC 13129
MQTRYFDHAATTPIRETARAAWLEYAGMANPASQYASGRAARSVLDTAREQISQLLGCEPIEVIFTASGTESDNIGVHGLWKSRQGQAPNRIVTTAIEHPGVLETVKALEAHGANLDFLPVDSHGAIANVDALSTPAAVAAVMWANNETGAIQPIEKVIAAAKEVDTPVHVDAVQVVGHQHINFDVLGATTLAASAHKFGGPRGVGLLLARRSPAPQPVMFGGGQERSIRSGTVDVAGAAATAAALAEAVNEVDEETTRLRYLVNKLRDHVVATIDNTVVHTPRHSLPGHLHLSFPGAEGDSLIMLLDSLGLEASTGSACSNGVNRASHVLLAMGVSESTARSTVRFTLGATTTEEDVDTLIAQLPDVVARARLAGMA

SEQ ID NO: 25953 - protein, 652 aa, Corynebacterium diphtheriae NCTC 13129
MLQHVSPRNYHKELDVVASSTQPNQPTPATLARRAQVLKPERMTGADAIVRSLEELGIDMVFGLPGGAVLPLYDSLYASTKLRHVLVRHEQGAGHAATGYAQATGKVGVCIATSGPGATNLVTPIADAHLDSVPLVAITGQVGRSLLGSDAFQEADIRGITMPVTKHNFMVTDVNMIPQAIAEAFYLAASGRPGPVLVDIPKDIQQAEIDFHWPPTIDLPGYRPVTTPHSRPVEQAAKMISQARRPVLYVGGGVIKANASQELQAFAEHTGIPVVTTLMALGAFPGSHELNMGMPGMHGTVPAVGALQKSDLLITIGARFDDRVTGALASFAPGAKVIHADIDPAEIGKIRAVDVPIVGDAQEVLTALLNVYKDLDLPQPRHERWLRYLNGLKSNYPRGWEKSDDGMIEPQAVIRALAKTVGTDAIYAAGVGQHQMWSAQFLDFEKPRTWLNSGGLGTMGYSVPAALGAKAGCPDKEVWAIDGDGCFQMTNQELATAAVEGMPIKVALINNGNLGMVRQWQTLFYDGNYSNTKLRNQGQYMPDFVMLAESLGCAAFRVTEETDIVPTIEKARAINDRPVVIDFIVGEDAQVWPMVAAGHSNSDIEYAHGLRPLFDGESSAAETPEDIDDVIDEATLLALEAQKRHLEPKENI

SEQ ID NO: 25954 - protein, 531 aa, Corynebacterium diphtheriae NCTC 13129
MSQNGRPVVLIADKLAQSTVDALGDAVEVRWVDGPNRAELLAAVPEADALLVRSATTVDEEVLNAATNLKIVGRAGVGLDNVDIATATDKGVMVANAPTSNIHSACEHAISLLLSTARQIPAADKTLRVGEWKRSSFKGVEIFGKTVGIVGFGHIGQLFAQRLAAFEATIIAYDPYANPARAAQLGVELVDLESLMQRADFVTIHLPKTAETAGMFNAELLAKSKQGQIIINAARGGLVDEQALADAIDAGRIRGAGFDVFATEPCTDSPLFNRPEVVVTPHLGASTVEAQDRAGTDVAASVLKALAGEFVPDAVNVSGGRVGEEVALWLDLARKLGVVAGKLLDKAPVAVEVEARGELSTENIDVLGLSALRGVFSSFIEEPVTFVNAPRIAEERGVKLDVTTASESLTHRSVLEVCVIGADGSKESVIGALTGLNHVEKIVRINKRGLDLRAQGFNVYFQYTDTPGALGKVGTALGAQGFNIDAAALSQDSEGDGATLVLRVDKPIPDALVEEIAAGIGAEAFAVDFDA

SEQ ID NO: 25955 - protein, 399 aa, Corynebacterium diphtheriae NCTC 13129
MTNRVVLAYSGGLDTSVAIPYLAKMTGGEVVAVSLDLGQGGEDMESVRQRALDCGAVESIVIDAKDEFANDYCLPTIKANGMYMKQYPLVSAISRPLIVKHLVEAAKKHGGTHVSHGCTGKGNDQVRFEVGFRNLAPELQIIAPARDYAWTRDKAIAFAEEINLPIEQSKKSPFSIDQNVWGRAVETGFLEDLWNPPTKDLYSYTEDPALGNAPDEIIISFKAGVPVAIDGRPVTVLEAIEEMNRRAGAQGIGRLDMVEDRLVGIKSREVYEAPGAIALITAHQAMEDVTIERELARYKRGIDARWSEEVYDGLWYAPLKRSLDAFIENTQEHVTGDIRMVMHAGKCTVNGRRSEHSLYDFDLATYDTGDTFDQTLAKGFVELHGLSSKISNKRDREAQ

SEQ ID NO: 25956 - protein, 252 aa, Corynebacterium diphtheriae NCTC 13129
MSTLEIKNLHAQVVPADESAAPKPILKGVNLTIKSGETHAIMGPNGSGKSTLAYTLSGHPRYEVTDGEVLLDGENILDMDIDERARAGLFLAMQYPTEIPGVSMANFLRSAATAVRGEAPKLREWVKEVKQAQQDLKIDKAFNERSVNEGFSGGEKKRHEVLQLDLLQPKFAVMDETDSGLDVDALRIVSEGINRYQEKSNGGILMITHYKRILNYVQPDFVHVFANGQIITSGGPELADDLEANGYDRFLA

SEQ ID NO: 25957 - protein, 640 aa, Corynebacterium diphtheriae NCTC 13129
MCGLLGMLSSTGQASKYAAAIESALPCMHHRGPDEAGTWHDDHAVFGFNRLSIIDLEHSHQPLRWGPEGEPDRYAMTFNGEIYNYVELRKKLQDLGYTFNTSGDGETIAVGFHHWGADVVLHLRGMFGIAIWDTKEQRLFLARDQFGIKPLYFATTEAGTVFASEKKCILGMADAIGLDLGLDQRAIEHYIDLQYVPEPESLHQHIRRLESGCFAFVSVGGNVEQTRYFRPQFPAQEFPKDKEQDLFDRIAKALEDSVEKHMRADVTVGSFLSGGIDSTAIATLAKRHNPNLLTFTTGFEREGYSEVDVAAESAAAIGVEHIVKIVSPEEYANAIPQIMWYLDDPVADPSLVPLFFVAQEARKHVKVVLSGEGADELFGGYTIYKEPLSLAPFEKIPSPLRRGLGKVAEVFPDGMRGKSLLQRGSMTMEERYYGNARSFNFDQMKRVIPWAKKEWDHREVTAPIYAQSEHMDPVARMQHLDLFTWMRGDILVKADKINMAHSLELRVPFLDKEVFEVAETIPYDLKIANGTTKYALRKAMEQIVPPHVLHRKKLGFPVPMRHWLAGDELFGWAQDTINESMTDQYFDKAAVLAMLNEHKNGVSDHSRRLWTVLAFMIWHGIFVEHRIDPGIEKRDYPVYL

SEQ ID NO: 25958 - protein, 305 aa, Corynebacterium diphtheriae NCTC 13129
MSFTDTPEGFRSGFISFVGRPNTGKSTLTNALVGEKIAITANQPETTRHPIRGIVHREDAQIIVVDTPGLHKPRTLLGERLNEVVKDTYADMDLIAITVPADEKIGPGDRWILDAVKKVAPKTPLLGIVTKVDKASRDQVAVQLMELHELLGGNSEVVPVSAVTGEQRDVLLDVITRLLPEGPKFYPDDHITDDDTETRLSELIREAALSGLKDELPHSVAVQIDEILPNDEREGVLDVHAVIYVERPGQKSILIGKDGRRLGRIIHNARPEIIKILGSNVYLDLRIKVLKNWQQDPKQLGRLGF

SEQ ID NO: 25959 - protein, 608 aa, Corynebacterium diphtheriae NCTC 13129
MSDPIVAEPVSAKRPFLGLKTDPFIFLSSLGFVILFVVATILLGEKASSAFTTIAQGLLKNTGWLYVGGVSFMFIFLIAIFISRYGRLRLGDDDDEPEHGLIAWFCMLFAGGIGAVLMFWGVAEPLNHSVNVPQQDAEPMSEQAITEAFAYTFYHFGIHMWAIVALPGLALGYFIYKRKLPPRVSSVFAPILGSRIYSLPGKLIDALSIIATTFGIAVSVGLGVLQINSGLKRLWGVPEVSWVQLAIILVITVIACISVASGLEKGIKLLSNINIGLAVLLMIFVLVTGPTLTLLRFTTEAFGIYADWLPSLMFWTDSYGDNPGWQGKWTVFYWAWTICWSPYVGMFVARISRGRTVREYIGGVLALPAIFSVIWFAIFGRAGIEIELNSPGKLTGPIVHDGDVPFALFGFFHEYPLSGLVSALALLVVVIFFITSIDSAGMVNDMFSTGEEEVSPVGYRVLWVVAIGAVAGALLIISPNSGIATLQEVVIIVAFPFFITQFVMMYSLIKGMTDDSAAERRIQTRQWQKTDTAEKLEAHEAMPAPGYDLEGNELPVVALAHDEDGNIVIPGNVVIEGDLGVVGDMVEEEEEPGFKIVEQTRPKTQEDW

SEQ ID NO: 25960 - protein, 508 aa, Corynebacterium diphtheriae NCTC 13129
MARFVDRVVLHLEAGDGGNGCASVHREKFKPLGGPDGGNGGHGGDIILTVSPQAHTLLDLHYRPHLKAQRGANGAGDHRNGARGQDLVLEVPAGTVVMSESGETLADLTSPGMTFIAAKGGFGGLGNAALASAARKAPGFALKGEPGEQHDVILELKSMADIGLVGFPSAGKSSLISVMSAAKPKIGDYPFTTLQPNLGVVDMGNDAFTIADVPGLIPGASQGKGLGLDFLRHIERTAVLAHVVDAATLEPGRDPISDIEALEEELAAYQSALDEDTSLGDLRERARIVILNKADIPDALELAEFLKEDIEEKFGWPVFIISAVARKGLDPLKYAMLDLVQQSRKKRPKQKVEERIVVRPQAVDARKKNKDFEILADPQVENGYLVVGEKPERWIIQTDFENDEAVGYLADRLARMGVEDALWKKGARAGCTVTIGEVSFEWEPTTAAGVEVQMSGRGTDMRLERNTRVSAQERKRASQVRRGLIDEYDFGDDQKVTRESANRDRWQG

SEQ ID NO: 25961 - protein, 358 aa, Corynebacterium diphtheriae NCTC 13129
MPYSLHLPGYSIGDNAYEKIDAIVSTYGSSVAVIGGKTALEKSRPRLEAALAHSGIEVVDWIVYGHNCTYERVDALCGMPTVQQADMIFGVGGGRAVDTVKVVANRLGKPLFAFPTLGSNCAAATNLSVVYKDDDSLAGYDFQRGPCHHVFIDTTVIAQSPAELLWAGIADGMSKECEVKLQSRGRNLSHAPLMGRNVCSAVTPALMDFGLQALEDCRAGRSSQAIEEVALAIIMTCGYVSNMAVDPGQAYYYNSSLAHAFYNSSTAFPECVGKHLHGEIVSYGVLALLQYDGDMETKRRYVEFYKQMGFPLTLADLDLQESDIPELVSHVPATTEWKTGDFDLERFAQAIIDAQVFA

SEQ ID NO: 25962 - protein, 479 aa, Corynebacterium diphtheriae NCTC 13129
MSAIESNEGEQLFDFVVVANRLPVDLSTSADGSPRWVASPGGLVTALTPVLAGNRGCWVGWHGGTGPAPDPFRTDTNIWVHPVALSDHDFEGFYEGFSNATLWPLYHDLIVSPVYNRDWWTAYREVNLKFASAVAEVAAEGAVVWIQDYQLQLVPGILRQIRPDLTIGFFLHIPFPHSDLFRQLPWREEIVRGLLGADLVGFHLTSSANNFLDLAAALGLEAQGRAKVREVSATVTAGDGHVVSVAAYPISIDVEPLIASHSNRDEIRAEFGYPETLILGVDRLDYTKGILQRLLAFEELLESGAIDPNTTVFAQVATPSRERIEHYKQARSEVEEAVGRINGRFGSIGRSVVHYHHRHMDRSELNKLYRAADVMLVTPFKDGMNLVAKEYVSCHSDGSGAMVLSEFAGAAVELEQAFLCNPFDLESIKRQIAGAVTTLKNHPEAARDRMLAMHQQVVDHDVNVWASAFLRDLSSAHTS

SEQ ID NO: 25963 - protein, 315 aa, Corynebacterium diphtheriae NCTC 13129
MKRRALLTATAATAALCLNSCAQSVPPVELVDIPPLPLPAGATVGSPASGTIQTDNLLGSLRPNGDDVPQVRQRGYLIVGIDQSQNLLSFRDTDGELKGFEVDLAREVARDIFGEPKIDFRYVDSSSWVKALEDGQVDMVLRSISVTRERQDQVFFSTPYFSGKTRILTQKDSDIHGAADLKGTVCVTNLSTGSKRLGAIAPNSTMLAVRNSADCLLALQQNHADAVISDDAILSGMIAQDPFTHIVGDPIATEQYAVAFAKPRTGRDTAPMIRQVNSTFERIFRDGTWTRTYNHWFGAYLAPQVHPAVHYREER

SEQ ID NO: 25964 - protein, 399 aa, Corynebacterium diphtheriae NCTC 13129
MALVLVLNSGSSSIKFQLVDPTAHATDDPFASGLVEQIGEPQGRVTLKHAGEKFVVEAPIPDHSAGLALAFDLMGEHKCGPTDVEIIAVGHRVVHGGILFSQPQVITDEIMDMVRDLIPLAPLHNPANIDGIEVARKILPDVAHVAVFDTGFFHDMPPAAAIYAIDAKTAADHGVRRYGFHGTSHEYVSHKVAELLDLPEGAINQITLHLGNGASCAAIRGGKAIDTSMGMTPLSGLVMGTRSGDIDPGIVFHLHRQAGMSIDEIDELLNKKSGVKGISGVNDFRELRTMIDAGDQDAWLAYNIYIHQLRRYIGSYMIALGRVNAITFTAGVGENDVAVRADALSHLEGFGIKIDPERNALPNTGPREISTDDSAIKVFVVPTNEELAIARYAKALSGA

SEQ ID NO: 25965 - protein, 483 aa, Corynebacterium diphtheriae NCTC 13129
MLWHRSHCGHVGAAHYFFATERIHVTDHMQPSFLLTRAGRNFNGFDVDGFADHLGLPVRQLVDSTPDLAAILAAHPAATPSLFIGSGNVNFDAKAASALGVPLLLLIDAPGMHIDLAKQECEELGAVVASVFTADEAVSAEGIARIKASAVEAPVVMSAPVFESWLLEQAKSKNAHIVLPEGDDDRILQAAHQLLAQEICELTILGDPEAITARAQELGLDLSAAHLQNPETDPNAEKFAEDFAELRKSKGMTLEQARETMKDISYYATMMIHEGLADGMVSGAAHTTAHTIKPSFQIIKTKPGTSVVSSIFLMVMRGRLWAFGDCAVNPNPTADQLGEIAAVSAKTAEQFGIDPRVAILSYSTGTSGSGPDVDRAVAATKKAQELAPEYKIDGPLQFDAACDPTVAAKKAPESEVAGQANVFIFPDLEAGNIGYKTAQRTGHALAVGPILQGLNKPVNDLSRGATVADIVNTVAITAIQGGK

SEQ ID NO: 25966 - protein, 298 aa, Corynebacterium diphtheriae NCTC 13129
MSFTVTVVGMGAMGLPMATNLAKNFTVRGVDIAQPRLELAKAAGIETYTNASDAAEGADVVLLAVRNEAQLLDALFGDGDIASHMTPGAVVLLTSTVGIEAVENAAKRLKEIGLNIVDAPVSGGPVRAGEGDLLVTAGAEPTVVEKIRPVLEEMASNLVIVGDAPGKGQALKTVNQLLCGVHIAAAGEALALADRLGLDPAAALDALMSGAASSFMLGDRGQRMLEAYNDDGAEVKSRLDIFVKDMGIVTAAAKKAGIGVPLAAAAEQQYLAGLVRGQGAMDDSSIIRIVAPAKAQDA

SEQ ID NO: 25967 - protein, 849 aa, Corynebacterium diphtheriae NCTC 13129
MAGFNPTTKTQEALQEALQKASAAGNPDIRPEHLLAAILGQEDGIAIPVLRATGVDPDVVRREAEALVAKLPKAEGANLANPNFNRDALSVLNNAQELAGELGDEYVSTEVLLAAVARGTNDAAELLTKRGATYDVIKGVFPSVRGNKKVTTESPEDQFQALEKYSTDLTARAREGKIDPVIGRDQEIRRVVQVLSRRTKNNPVLIGEPGVGKTAIVEGLARRIVAGDVPESLKGKTLISLDLGSMVAGAKYRGEFEERLKAVLDEIKSAEGEIITFIDELHTIVGAGATGDSAMDAGNMIKPLLARGELRLVGATTLDEYRKYIEKDAALERRFQQVFVGEPSVEDAVGILRGLKERYEVHHGVRIQDSALVAAATLSDRYITSRFLPDKAIDLVDEAASRLRMEIDSSPQEIDELERIVRRLEIEEVALSKETDAASKDRLIKLRQELADEREKLGELVARWNNEKGAINKVREAKEELERLRSESEIAERDGDYGKVAELRYGRIPELEKQVAEAEEHTVETTMLSEEVTPDTIAEVVSAWTGIPAGKMLQGETEKLLNMEAELGKRVVGQSEAVVAVSDAVRRARAGVADPNRPTGSFLFLGPTGVGKTELAKALAEFMFDDDRAMVRIDMSEYGEKHAVARLVGAPPGYVGYDQGGQLTEAVRRRPYTVVLFDEVEKAHPDVFDILLQVLDEGRLTDGQGRTVDFRNTVLILTSNLGAGGTKDEMMDAVKRAFKPEFVNRLDDVVIFDPLSQEQLTHIVEIQIAQLAQRLAARRLTLAVSDSAKLWLAERGYEPAYGARPLRRLIQQAIGDQLAKKLLSGEVRDGSEVHVDADLDNDGLVISAS

SEQ ID NO: 25968 - protein, 741 aa, Corynebacterium diphtheriae NCTC 13129
MKEDAHTDGDASSVDASTSHGGKTQGVKEAAPKVLVGSYKAGAGGVVGESSAGGNDIPEPTTNWPVFGASAVGIIALTLWAFFAREKAATALGAVTEWISTNLGWFYILTATVVIVFVIGVAVTRTGSIRLGPDHSRPQFKLFSWSAMLFAAGIGVDLMFFSVAEPVAQYYGPPVGQGETREAAEQAVVWALFHYGMTGWALYCLMGMAFGYYAYRLNMPLAIRSALYPLIGKRIHGAVGNCVDIAAMLGTVFGIAASLGIGVVQLNYGMKVLFGVEEGLTWQIILVVVSVAVATLSAVSGVDKGIKVLSEINVLLAIALMIYVVIAGKTAFLLDGLVMNIGDYVSSLPGMTMDTYAFSDDPEHTKAWLGAWTLFFWAWWVAWAPFVGLFLARISRGRTLRQFVFGTLSIPFLFIVLWMSFFGNSALAIVRGGNDAFGHEAAANPQRGFYDLLATYPGAIFLVGLATMIGLLLYITSADSGALVMSNFTSTTHHSSQDGPVWSRIFWAVVVGALTIVMLQLDGIATVQSATVVMGLPFTIVIYLVMAGLVRCFRLEQTQKDARVVSVHAAMSGRSTIGEQQGHSISWRRRLSRANTWPSAAKAQAYITNVATPALTQVAEELCRKGINARLVTTKTQAVEGLDLIVEMGSEQNFRYQLFPVCNPVPQFTRKANASEKETYYRLEVCDLTGSLGYDIYGYTQEQLIDNVLDLYERHLEFLHMHSDLPGSSDLSDGATPPLFS

SEQ ID NO: 25969 - protein, 317 aa, Corynebacterium diphtheriae NCTC 13129
MLNFIYWPISAILWFWHKVVSFVLDPGSGLSWVLAIVLLTFTIRALLVKPMLNQMRSMRKMQELQPLMQEIRKKYPNDQQKLMEETRKLQKEMGVNPVAGCLPVLVQMPVFIGLFHVLRSFNRTGTGTGQLGLSPEVNRETANYIFSAADVQSFLDARLFGVPLSAFISMPKEMYQAFQPVDFTRTDIALVAAPLIVIIVLATHFNARLSVDRQKARRESGLQKPPANDQMQMQMDMMNRMMLWFMPLTILFTGVLWHLGLLFYMVSNNIWTFFQQRWIFDKIDAEEAAEIEAKKAAKRATAPRPGQRPQQSKKKKK

SEQ ID NO: 25970 - protein, 174 aa, Populus nigra
MPRDREPLSVGRVIGDVLDPFTRSISLRVNYNSREVNNGCELKPSHVVNQPRVDIGGEDLRTFYTLVMVDPDAPSPSNPNLREYLHWLVTDIPATTGANFGQEVVCYESPRPTAGIHRFVFVLFRQLGRQTVYAPGWRQNFNTRDFAELYNLGSPVAAVYFNCQRESGSGGRRP

SEQ ID NO: 25971 - protein, 165 aa, Cucumis melo
MELPVEEDNDDEFSPLNLIRYHLLQDSHSFSTLRDFGFKLEFEDFEYVKPSEEEEEEPPIQSPKRHPERQSPRSSSPDGGRRYRGVRRRPWGKFAAEIRDPSRKGSRVWLGTFDSDVDAARAYDSAAFKIRGRKAKLNFPLDAGKSDPPPGNGRKKKRRETNLNA

SEQ ID NO: 25972 - protein, 273 aa, Cucumis melo
MCGGAIIADLIPRRDGQRVTASDIWPNSSFFHFNKIRSDQVSTPLKRTPLPASSEASKPKKRQRKNLYRGIRQRPWGKWAAEIRDPRKGIRVWLGTFNTAEEAARAYDREARKIRGKKAKVNFPNEDDAYSIQAPIPQFHPHLYTVPENSEFPYDLNQIGDFTGTHFPVAIEEQSGSGSEDSYSPPKRFGVKEAEDQKPEQKVSVIAAAEEENEVQKLSEELMAYENYMKFYQIPYLDGQSTVTNPAEEQVVGDLWSFDDEDGLHGSVSSSEL

SEQ ID NO: 25973 - protein, 318 aa, Listeria ivanovii
MSNEYFDPKLKIFSLNSNRELAEEIAKEVGIELGKSSVTHFSDGEIQINIEESIRGCHVYVIQSTSNPVNQNLMELLIMIDALKRASAATINIVMPYYGYARQDRKARSREPITAKLVANLIETAGATRMITLDMHAPQIQGFFDIPIDHLNAVRLLSNYFGERHLGDDLVVVSPDHGGVTRARKMADRLKAPIAIIDKRRPRPNVAEVMNIVGNVEGKVCIIIDDIIDTAGTITLAAKALREAGATKVYACCSHPVLSGPAMKRIEESPIEKLVVTNSIALPEDKWIDKMEQLSVAPLLGEAIVRVHENASVSSLFE

SEQ ID NO: 25974 - protein, 246 aa, Sisymbrium irio
MLKSVNPMAFYELGEQQFPTLGYIVSKPGNAGAYEIDPPIPSVDDAIYGSDEFRMYAYKIKRCPRTRSHDWTECPYAHRGEKATRRDPRRYSYCAVACPAFRNGACHRGDTCEFAHGVFEYWLHPARYRTRACNAGNLCQRKVCFFAHAPEQLRQSEGKHRCRYAYRPVRTTAARGRNGDGVGMRLDGDDFDTWQSPVKSGKSDLDINEERVLKCWSGISIVDDHYEPSDLDLDLSHIDWISELVD

SEQ ID NO: 25975 - protein, 218 aa, Sisymbrium irio
MAAFEESTDLDAIQGHLFEDFMVSDGFMGDFDFNASFVSGLWCIEPVMNQVPKQEPDSPVLDPDSFVKEFLQVEAESSTSTGTTELNSSSQETDQSISTRKKSKRFEEQEEEEPRHYRGVRRRPWGKFAAEIRDPAKKGSRIWLGTFESDVDAARAYDCAAFKLRGRKAVLNFPLDAGKYEAPANSGRKRKRSDVQGELQRSQSNSSSSSSDGETTCE

SEQ ID NO: 25976 - protein, 247 aa, Arabidopsis arenosa
MLKSVTPMAFYDIGEQQYSTFGYIVSKPGNAGAYEIDPPIPNIDDAIYGSDEFRMYAYKIKRCPRTRSHDWTECPYAHRGEKATRRDPRRYTYCAVACPAFRNGACHRGDSCEFAHGVFEYWLHPARYRTRACNAGNLCQRKVCFFAHAPEQLRQSEGKHRCRYAYRPVRARGGGNGDGVTMRMDGEDYDTSRSPVRSGKDDLDSNEEKVLLKCWSRMSIVDDHYEPSDLDFDLDLSHFDWISELVD

SEQ ID NO: 25977 - protein, 207 aa, Arabidopsis arenosa
MASFEESSDLEAIQSHLFEDLLACDGFMGDFDFDASFVSGLWCIESQVPKQEPDSPVLDPDSFVNEFLQVEGESSSSSSPELNSSSSTYETDQSVKKAERFEEEEEARHYRGVRRRPWGKFAAEIRDPAKKGSRIWLGTFESDVDAARAYDCAAFKLRGRKAVLNFPLDAGKYEAPANSGRKRKRSDVQEELQRTQSNSSSSSCDAF

SEQ ID NO: 25978 - protein, 249 aa, Capsella rubella
MLKSVSPMAFYDIGEQQYSTLGYIVSKPAIGNGGVYDLDPPIPTIDDAIYGSDEFRMYAYKIKRCPRTRSHDWTECPYAHRGEKATRRDPRRYTYCAVACPAFRNGACHRGDSCEFAHGVFEYWLHPARYRTRACNAGNLCQRKVCFFAHAPEQLRQSEGKHRCRYAYRPVRARGGNSNGVAMRMDGEDYDTSRSPEKSGKSVGLDSNEEKVLLKCWSRMSIVDDHYEPSDFDFDLDLSHFDWISELID

SEQ ID NO: 25979 - protein, 204 aa, Capsella rubella
MATIEESSDLEAMQKHLFEDFLVSDGFLGDFDFDASFVSGLWCIEPQVPKQEPDSPVLDPDSFVNEFLQVEAKSSPELNTSSSSTYETDQCVKKAERFEEEVETRHYRGVRRRPWGKFAAEIRDPAKKGSRIWLGTFESDVDAARAYDCAAFKLRGRKAVLNFPLDAGKYEAPANSGRKRKRSDAQEELQRTHSNSSSSSCDAF

SEQ ID NO: 25980 - protein, 246 aa, Olimarabidopsis pumila
MLKSVSAMPFYEIGEQQYSTLGYIISKPGNAGLYDIDPPIPTIDDAIYGSDEFRMYAYKIKRCPRTRSHDWTECPYAHRGEKATRRDPRRYTYCAVACPAFRNGACHRGDSCEFAHGVFEYWLHPARYRTRACNAGNLCQRKVCFFAHAPEQLRQSEGKHRCRYAYRPVRTRGGNSDAMAVRMEGEDYDTSRSPEKSGKGGLDSNEEKVLFKCWSRMNIVDDHYEPSDLDLDLDLSHIDWISELVD

SEQ ID NO: 25981 - protein, 207 aa, Olimarabidopsis pumila
MATFEDGSDLEAIQKHLFEDLLVCDGFMGDFDFDASFVSGLWCIEPQVPKQEPDSPVLDPDSFVNEFLQVEAESSPSSPELNTSPLSTYETDQSVKKAERFEEEEEARHYRGVRRRPWGKFAAEIRDPAKKGSRIWLGTFESDVDAARAYDCAAFKLRGRKAVLNFPLDAGKYEAPANSGRKRKRSDVQEELQRTQSNSSSSSCDAF

SEQ ID NO: 25982 - protein, 247 aa, Arabidopsis arenosa
MLKSVSPMAFYDIGEQQYSTFGYIVSKPGNAGAYEIDPPIPNIDDAIYGSDEFRMYAYKIKRCPRTRSHDWTECPYAHRGEKATRRDPRRYTYCAVACPAFRNGACHRGDSCEFAHGVFEYWLHPARYRTRACNAGNLCQRKVCFFAHAPEQLRQSEGKHRCRYAYRPVRARGGGNGDGVAMRMDGEDYDTSRSPVRSGKDDLDSNEEKVLLKCWSRMSIMDDHYEPSDLDLDLDLSHFDWISELVD

SEQ ID NO: 25983 - protein, 207 aa, Arabidopsis arenosa
MASFQESSDLEAIQSHLFEDLLVCDGFMGDFDFDASFVSGLWCIEPQVPKQEPDSPVLDPDSFVNEFLQVEGESSSSSPELNSSSSSTYETDQSVKKAERFEEEEEARHYRGVRRRPWGKFAAEIRDPAKKGSRIWLGTFESDVDAARAYDCAAFKLRGRKAVLNFPLDAGKYEAPANSGRKRKRSDVQEELQRTQSNSSSSSCDAF

SEQ ID NO: 25984 - protein, 50 aa, Enterococcus faecalis
KGFGFISPEDGNDVFVHFSAIQGDGFKTLEEGQAVTFDVEDGHRGPQAAN

SEQ ID NO: 25985 - protein, 50 aa, Pediococcus pentosaceus
KGFGFITREDGSDVFVHFSAIQSDGFKTLEEGQSVSFDVEESDRGPQAAN

SEQ ID NO: 25986 - protein, 378 aa, Fagus sylvatica
MCGGAIISDFIAPTGSRRLTADYLWGDRKKPISGKRFSKPVVDLDDEFELDFQGFKDEEESDIDEEEVLVQDVKPFTFSAPPSSGSKPVKSVEFNGQAEKSAKRKRKNQYRGIRQRPWGKWAAEIRDPRKGVRVWLGTFNTAEKAARAYDAEARRIRGKKAKVNFPDETPRASPKRSVKANLQKPLAKANLNSVQPNLNQNFNFMNNSDQDYTMGLMEEKPFTNQYGYMDSIPANADVGLKPFASNNTTPYFNSDQGSNSFDCSDYGWGEQGSKTPEISSVLSATLEGDESQFVEDAMPTKKLKSDSGNAVFIENNTAKTLSEELSAFESQMNFQMPFLEGSWESNMEALFSGDTTQDGNSMDLWSFDDLPVMAGGVL

SEQ ID NO: 25987 - protein, 593 aa, Oryza sativa Japonica Group
MSSSQSLLLLAAPLSPPTLPRLVPPPPTSAPRLPRLAANLSRPPPLAISSPGCDGGGGGGGGGGGGGWWRQGGSGPPDPGDGWWRWLQSLHPELLLLFVLLHSGAFAAIPAALAEAIGGSGGREGASVWEVRGGARTLLVPDPTGTSYVVAGDGRRKQAEGEDAEKAGAGRAELAALRRQLELSWRRCATVAVQLLLPDGYPDSVSSDYLQYSLWRGVQGIASQISGVLSTQALLYAVGLGKGAIPTAAAVNWVLKDGLGYLSKILLSKFGRHFDVNPKGWRLFADLLENTAYGLEILTPVFPHLFVPIGAAAGAGRSAAALIQAATRSCFYAGFAVQRNFAEVIAKGEAQGMVSKFLGIMLGIALANRIGSSVSLALISFAGVTAVHMYCNLKSYQSIQLRTLNPYRASLVFSEYLLSGQVPSVKEVNDEEPLFLNLSIGTSRKESKILSPQAKDAAEIICRRLQLGSKLSEIIENKEDACALFDLYKNEQYLLTEYKGKFCVILKEGSSPEDMLKSLFHVNYLYWLEKYLGIKPSDVASACRPGGRLEASLDYTQREFSHVKLDGSNGGWVMDGLIARPLPVRIRIGDAPS

SEQ ID NO: 25988 - protein, 717 aa, Oryza sativa Japonica Group
  misc_feature (668)..(668): Xaa can be any naturally occurring amino acid
  unsure (1)..(717): unsure at all Xaa locations
MASPEREEEEAARSPPPKRPRRDGDAPPEPQPARVGLNPADCDLDFDVGGGGLRGEALHDGGFAYCWSGARATVGVRGGGKYCFGCKVVAEQAVEMEDTAADQQHLCRVGVSRGGDPVGALGETGHSFGFGGTGKFSHQGKFVEYGVKFGVGDTVVCAVDLDSKPLASIGFSRNGEWLGIAKHFDASDKGLGLVESPVSSMQWESAIFPHVLLKNVVVEMQFSKEDGLQLVDGYELWPSACVDGNAVSGPVFAEQKECEIMMMVGLPASGKSTWAEKCIKEHKEKRFILLGTNLALVQMKVPGLLRKNNYGERFERLMDRATMIFNTLLTRAAKIPRNYIIDQTNVYKNARSRKLRPFANYRKTAVVVFPSPSELKVRAAKRFKEMGKDVPADAVNEMTANFVLPLSKDMPDSKEPFDEVIFVELSRDEAQRNLDEMKRLLPKASTPSYANFSNQNVSSTYSGTIAGTMPSLSPGYHRQMDSPYGSGVQTPRALTHQQAAWGVQGFQSPAGINHHQVHLSSYPNTPYQHQQIQSNHPSTPYQHQAQSTSYPSTPYQDQIHSSYPSNPTQHQIHLNYPSTPNQYQSHSTYPNTPFPGHGNSVYDSNGGPGPYNPNPYSMNTDMQQRIQAPIGDRNQSYAVVSNEAYGRSGYEAANSVGRPINTHPAVYXSGSGNYMPYMQHSHDVHNSGSQYSAPVPRPPYGAPPPNYMNPQTSIWHI

SEQ ID NO: 25989 - protein, 652 aa, Oryza sativa Japonica Group
MAPLPSSSSTRATSLVAIPGASCPHGQAQRLLAFRPPRRGSQWRGLCVSRGRHGATVAMAMPAAQAAGRRARVLVAGGGIGGLVFALAAKRKGFEVVVLERDMSAVRGEGKYRGPIQLQSNALAVLEAVDAGAADQVMDAGCITGNRVNGIVDGVSGSWYIKFDTFTPAAERGLPVTRVISRMTLQQILARAVGDDAILNDSHVVDFIDDGNKVTAILEDGRKFEGDLLVGADGIWSKVRKVLFGQSEATYSEYTCYTGIADFVPPDIDTVGYRVFLGHKQYFVSSDVGAGKMQWYAFHKEPAGGTDPENGKNKRLLEIFNGWCDNVVDLINATDEEAILRRDIYDRPPTFNWGKGRVTLLGDSVHAMQPNLGQGGCMAIEDGYQLAVELEKSWQESAKSGTPMDIVSSLRRYEKERILRVSVIHGLARMAAIMATTYRPYLGVGLGPLSFLTKLRIPHPGRVGGRFFIKYGMPLMLSWVLGGNSTKLEGRPLSCRLSDKANDQLRRWFEDDDALEQAMGGEWYLLPTSSGDSQPIRLIRDEKKSLSIGSRSDPSNSTASLALPLPQISENHATITCKNKAFYVTDNGSEHGTWITDNEGRRYRVPPNFPVRFHPSDAIEFGSDKKAVFRVKVLSTLPYESARGGPQILQAA

SEQ ID NO: 25990 - protein, 488 aa, Oryza sativa Japonica Group
MSLADDLAAVERGGHMVPSKAAGVDGDGEPRRTGTMWTASAHIITAVIGSGVLSLAWGVAQLGWVAGPAVMLLFGAVIYCCSVLLVECYRTGDPYTGQRNRTYMDAVRANLGGTKVRLCGVLQFANFFGVCVGITIASSISMLAIKRAGCFHVRGHDQREACGGSSRPYMVVYGALQVVFSQIPNLHKMWWLSTLASAMSLSYSAIGIALGVAQIVANGGIRGTITGVFVGAGAGVTSMQKVWRSFQAFGNIAFAYGFSFILLEIHDTVKPVAPPSTETKVMRKAVAVSVATTTAVYLMCGCVGYAAFGNDSPDNLLTGFGFFEPFWLLDLANAGVVVHLVGTYQVVAQPVFAFLDGRAAAGAWPGSAALGKRRRVLRVGSLAEIEVSPFRLAWRTAFVCVTTAASTLLPFFGSMVGLIGAASFWPLTVYFPVEMYIAQRRVPRGSAQWLSLQALSAGCLVVSVAASAGSIAGVVEAFKAHNPFCWTC

SEQ ID NO: 25991 - protein, 355 aa, Oryza sativa Japonica Group
MREHEYLQSLHFNCIRLPDGAGVVNMSLPIVLAIGDREKEEIGSSPDVALHGPDGAVLAILRRVEIYPHNKEERIARTWGTTAPGLPYVDEAIAQAGNWLIGGDLEVIEPIKYNDGLDHYRLSPQQLRNEFDKRGADAVFAFQLRNPVHNGHALLMNDTRRRLLEMGFKNPILLLHPLGGFTKADDVPLPVRMEQHSKVLEDGVLDPETTIVSIFPSPMHYAGPTEVQWHAKARINAGANFYIVGRDPAGMGHPTEKRDLYNPDHGKKVLSMAPGLEKLNILPFKVAAYDTVAKKMAFFDPSRSKDFLFISGTKMRAFAKSGENPPDGFMCPGGWKVLVDYYNSLQTEEAAVATV

SEQ ID NO: 25992 - protein, 399 aa, Oryza sativa Japonica Group
MELDRSLIACEEPPSEPMDFLSSAWCSSAIQVLQTGSMDCSMALVENPVMAPDNDRRDLLPKNDRSLVVDSSGFSTTQWKYDDLKSWIWLQKAIHPELDYDLKKKWLPRKMAPWSGISLKKWVKERKQKRKEEARLHKAEVHAAVSVAGVAAALAAIAAESSTPAATMKETAVASAAALVAAQCAKVAEAAGATRDQVAAAVNAAVAATDASNVITLTAAAATSLRGAAALRGRRSSGGGGGGGSQNERMDHASSALSQDDLDFDFNYARSKAALAKGDEMFVAMPDGKWKLHTVSAATSKGGKVVMRIKKMNLVMAFSNAKESVIHDVQPCAPEKPSRDEDATYPIEVTTSKGKVELRADDYGVYKRWVTALTHMLAAPTAICKAHELPPPPPPHRRN

SEQ ID NO: 25993 - protein, 425 aa, Oryza sativa Japonica Group
MGLHKEASSSSSRLDAAPLLPHHGHGGGGAGHHLSSQPKTFANVFIAVVGSGVLGLPYTFSRTGWVAGSVLLLAVAALTFHCMMLLVACRRRLAYDHPKIASFGDLGAAVCGPAGRHVVDAMLVLSQASFCVGYLIFISNTMAHLYPVGDSSPSSPLLTAKAIFIWVMLPFQLGLNSIKTLTLLAPLSIFADVVDLGAMGVVLGQDVSTWLANKPPVFASAGPTEILYGLGVAVYAFEGIGMVLPLEAEAADKRKFGGTLALSMAFIAVMYGLFGAMGYLAFGAATRDIITTNLGTGWLSVTVQLGLCINLFFTMPVMMNPVYEVAERLLCRKRYAWWLRWLLVMVVGLMAMLVPNFADFLSLVGSSVCVLLGFVLPAAFHLKVFGAEVGWPGLAGDVAVIVVGTALAVSGTWTSLAQIFSSSDV

SEQ ID NO: 25994 - protein, 561 aa, Oryza sativa Japonica Group
MAALRDVLLSIAQTPHRLRRRALVTWTPAQETSEVRDRSGARMKRRLEWYDLVGLGVGGMLGAGVFVTTGRVARDTAGPAVFASYVIAGVSALLSSFCYAEFSVRVPAAGGAFSYLRVTFGELVGFFGGANILMEYVLSNAAVARSFTDYLASTCGITEPDAWRIQVDGIAKGYNALDFPAVALILVLTLCLCYSTKESAMLNMVITVFHLLFFVFIILAGLWNGSARNLVSPHGLAPYGVRGVLDGAAIVYFSYIGYDSASTMAEEIRDPARALPVGIAGSVLVVSALYCLMSLALCAMLPYTEIAESAPFSAVFREKAGWEWAGSVVGAGASLGIVASLLVAMLGQARYLCVIARARLVPAWLAKVHPSTGTPMNATIFLGLCTASIALFTELQVVFEMISIGTLLVFYLVANALIYHRYAKLGANRSLHVLLFLLILTLSSLGFSLSRRIHGQCRWGMALFGATSVTITAMFHCAVRRDMPEPPSEWMVPLMPWPAAASVFLNVFLMTTLKVMSFQRFGLWSFVIIVFYVCYGVHSTYSAEENEAVNAMIHHANMDIS

SEQ ID NO: 25995 - protein, 108 aa, Oryza sativa Japonica Group
MAGVWVFEDGMVRRADSEAPSRGRGVGGGGGGGKVLVHVPSSEVVTSYEVLERRLRELGWERYLNDPCLLQFHQRSTVHLISVPRDFSRLKLVHMYDVVVKTRNVFEV

SEQ ID NO: 25996 - protein, 174 aa, Populus nigra
MPRDREPLSVGRVIGDVLDPFTRSISLRVNYNSREVNNGCELKPSHVVNQPRVDIGGEDLRTFYTLVMVDPDAPSPSNPNLREYLHWLVTDIPATTGANFGQEVMCYESPRPTAGIHRFVFVLFRQLGRQTVYAPGWRQNFNTRDFAELYNLGSPVAAVYFNCQRESGSGGRRP

SEQ ID NO: 25997 - protein, 401 aa, Serratia marcescens
MILDASYTLLVACIALLIGMFVVKFTPFLQKNHIPEAVVGGFIVAIVLLIIDKTSGYSFTFDASLQSLLMLTFFSSIGLSSDFSRLIKGGKPLVLLTIAVTILIAIQNTVGMSMAVMMNESPFIGLIAGSITLTGGHGNAGAWGPILADKYGVTGAVELAMACATLGLVLGGLVGGPVARHLLKKVSIPKTTEQERDTIVEAFEQPSVKRKINANNVIETISMLIICIVVGGYISALFKDTFLQLPTFVWCLFVGIIIRNTLTHVFKHEVFEPTVDVLGSVALSLFLAMALMSLKFGQLASMAGPVLIIIAVQTVVMVLFACFITFKMMGKDYDAVVISAGHCGFGMGATPTAIANMQTVTKAFGPSHKAFLVVPMVGAFIVDISNSILIKIFIEIGTYFT

SEQ ID NO: 25998 - protein, 277 aa, Serratia marcescens
MTRHLRHMPIIKWAGGKTKLMPFISHHYPHDHSCRWVEPFIGGGAVFLNMFAQNALLADSNPDLINLYRTIQRQKTNFINQVQNLADKTFVEKDYYEMRDRFNKTCISGQPLQRAALFYSLNRLGYNGMCRYNSERIYSVPWGKHTELKLDFNKIDYLSFRLSGIELITAGFEETLAATGEGDQIYCDPPYDKTSKTSFVSYDGKPFSQSDHVLLANMLVDAHRKGAAVAISNSLTPFTLGLYEERGFVIHRLSAYRSVGSKPNTRKTETEILAVLK

SEQ ID NO: 25999 - protein, 422 aa, Chlamydomonas reinhardtii
MALQMKQSPSMGVRRASQPVLPPRPIVHRGVGSVSRRPAVVVKASLLDAASAASAVDAVHHATQLYTLAEGGPIDVLAQFFEFVLQTLDEGLESAKIPYSYGFAIIALTVLVKVATFPLTQKQVESTLSLQALQPRVKELQAKYADDPENLQLETARLYKEAGVNPLAGCFPTLATIPVFIGLYNALSNAAKEGLLTEGFFWIPSLGGPTTIGGGLEWLVPFENGAPPVGWANAAAYLVMPVLLVASQYASQKIISSQNNQDPSQQQAQAILKFLPLMIGWFSLNVPSGLTLYWFVNNLLSTGQQLYLKATVKVNIPEAIKAPATAGSSTPIVKPKEERVKKVTGKELGSRKKRRNDDGEEVEDVEVEVVSSGSSSSSGSNGASGRKGEKFRALKAREAAAKAASTVSAGAGGSEEGKDNSA

SEQ ID NO: 26000 - protein, 495 aa, Chlamydomonas reinhardtii
MSSSMCLARCSASLSAGNFPSRMFMGRLHAQRRTRTLQLRCAASLLPDQPTLAASSAISPVPSDLPEVLGDALHRLGAIYVLADASASTAAAAVMPTAVDSAAGAAPQRAGGWVAPVADALEQVLYALQEGLDKLHVPYSYGYSIILLTLIVKLLTYPLTKQQVESAMAVQALKPRIDLIKDRFGEDKDKIQKETSVLYEQAGVNPLAGCLPTLATIPIFIGLFSSLTNVANDGLLDTQGFYFVPSLAGPTTMAMRQSGLGTSWLWPLGPDGAPPIGWEDAAAYLTLPLLLVAVQYASSSVTSPPIDPKDENANTQRALLVFLPLMVGWFSLNVPAGLSLYYLANTVLSSAIQIYLKKLGGANVVMNELGPVTKPGSGRRNGVAAGEWSVWKPATVLTTAEAAKARAEAEEAVERAREAAEEAAAAAAFDNASVSLSVDDSTAAIAGTATMAVTAGAPAAAMDPSKVNRRCKRRRLTSLVQDGSTASAAVAGASA

SEQ ID NO: 26001 - protein, 442 aa, Pisum sativum
MAKTLISSPSFLGTPLPSLHRTFSPNRTRLFTKVQFSFHQLPPIQSVSHSVDLSGIFARAEGLLYTLADATVAADAAASTDVAAQKNGGWFGFISDGMEFVLKVLKDGLSSVHVPYSYGFAIILLTVIVKAATLPLTKQQVESTLAMQNLQPKIKAIQERYAGNQERIQLETSRLYTQAGVNPLAGCLPTLATIPVWIGLYQALSNVANEGLLTEGFLWIPSLGGPTSIAARQSGSGISWLFPFVDGHPLLGWYDTAAYLVLPVLLIVSQYVSMEIMKPPQTNDPNQKNTLLIFKFLPLMIGYFSLSVPSGLTIYWFTNNVLSTAQQVWLRKLGGAKPAVNENAGGIITAGQAKRSASKPEKGGERFRQLKEEEKKKKLIKALPVEEVQPLASASASNDGSDVENNKEQEVTEESNTSKVSQEVQSFSRERRSKRSKRKPVA

SEQ ID NO: 26002 - protein, 126 aa, Pseudomonas fluorescens
MHAIMLKAKLHRAEVTHAVLDYEGSCAIDGEWLDLSGIREYEQIQIYNVDNGERFTTYAIRGEEGSRMISVNGAAAHKAKVGDRVIICAYAHYSEAELVNFKPRMLYMAPGNELSRASNAIPVQLA

SEQ ID NO: 26003 - protein, 417 aa, symbiont bacterium of Paederus fuscipes
MSQSLKRALFSALLVLLVSYPILGLRLRTVGIKLQVIGADAQTLWSIAVATMAMFVWQLFRDRVLLKFGSGIKYKVDNRGLKIFLSLPSTQRWIVLALVLVAFIWPFFASRGAVDIATLILIYVMLSIGLNIVVGLAGLLDLGYVGFYAVGAYTYALLAEYAGFGFWSALPIAGIMAALFGFLLGFPVLRLRGDYLAIVTLGFGEIIRILLRNLTDITGGPNGIGSIPKPTLFGLSFERRAPGGLQTFHEFFDIDYNSNYKVILLYMIALLLVLLALFVINRLIRMPIGRAWEALREDEVACRALGLNPTLVKLSAFTIGAGFAGFAGCFFAARQGLVTPESFTFIESVMILAIVVLGGMGSQLGVILGAVVMVLLLERREFAEYRMLIFGLAMIVMMIWRPQGLLPMQRPHLELKP

SEQ ID NO: 26004 - protein, 686 aa, Magnetospirillum gryphiswaldense
MIMIVVLQPANSTLYNPAEGVCAPSGLSKGVPAIAALSQGSPPPAKLNEDDMSKVIGIDLGTTNSCVAVMDGKTARVIENAEGVRTTPSMVAFTDSGERLVGQPAKRQAVTNPTNTLFAIKRLIGRRFDDPITKKDMNLVPYHIVNGENGDAWVESGDKKHSPSQVSAYILMKMKETAESYLGEKVTQAVITVPAYFNDAQRQATKDAGRIAGLEVLRIINEPTAAALAYGMEKKGSGIVAVYDLGGGTFDVSVLEIGDGVFEVKSTNGDTFLGGEDFDARIMDYLADEFKKEQGIDLRADRLALQRLKEAAEKAKCELSSSMQTEVNLPFITADASGPKHLNIKLTRSKLEALVEDLVARTVEPCKAALRDAGLKASEIDEVILVGGMTRMPKIQEVVKEFFGREPHKGVNPDEVVAIGAAIQGGVLKGEVKDVLLLDVTPLSLGIETLGGVFTRLIDRNTTIPTRKSQVFSTAEDNQTAVTIRVFQGEREMAADNKILGQFDLMGIPPAPRGVPQVEVTFDIDANGIVNVSAKDKATNKEQQIRIQASGGLADADIERMVREAEAHAAEDKKRKETVEARNHADGLVHSTEKSLKEFGDKADASLKAEIEGAITALRAVMDGDDAEAIKTKTEALMQSSMKLGEAMYKAQEAGGGADDSAPQAGGDDKVVDADFEEVDGDKKGK

SEQ ID NO: 26005 - protein, 614 aa, 'Chlorella' ellipsoidea
ELNLDDVGYDDVGGVRKQMAQIRELVELPLRHPQLFKTIGVKPPKGILLYGPPGSGKTLIARAVANETGAFFFLINGPEIMSKLAGESESNLRKAFEEAEKNSPAIIFIDEIDSIAPKREKTQGEVERRIVSQLLTLMDGLKARSHVIVMGATNRPNSIDAALRRFGRFDREIDIGVPDEIGRLEVLRIHTKNMKLDENAELELIGRDTHGYVGADLAALCTEAALQCIREKMDVIDLEDDTIDAEILNSMAVTNDHFKTALGISNPSALRETVVEVPNVNWEDVGGLEGVKRELQEVVQYPVEHPEKFEKFGMSPSKGVLFYGPPGCGKTPLAKAIANECQANFISVKGPELLTMWFGESEANVREILDKARQSAPCVLFFDELDSIANQRGSSQGDAGGAADRVLNQMLTEMDGMNSKKTVFIIGATNRPDIIDSALLRPGRLDQLIYIPLPDDPSRNQIFKAALRKSPVAPDVDINQLVKYTNGFSGADITEICQRACKYAIRENIEKDIEREKRLADNPDSMEEDVDEVPCITRAHFEEAMKYARRSVSDADIRKYQAFAQTLQQSRGFGSDFRFPDRPGQAPATTPAGQAAAPAFASGAAADDDDDLYS

SEQ ID NO: 26006 - protein, 357 aa, Comamonas testosteroni
MSYQLTLEPLGASIEVEEGQTLLDAALRQGIYIPHACGHGLCGTCKIQVCDGDVDHGAANPFALMDMEREDGMTLACCATLQSDATIEADFEDEPDAQIIPVRDFAAAVVRIVDLTPTIKALHLRLDQPMRYQAGQYVQLRIPGLSEEQGGSRAFSIANAPGADGCAQEIELNVRLVLGGEGTGWLHKHLSEGDSLQLAGPYGRFFVRHSARQPMVFMAGGSGLSSPRAMILELLANGCEQPITLVYGQRSREELYYDDEFRALAAQHPHFTYIPAISGDDCGDWQGARGFVHEAAQAHFQGGFAGCKAYLCGPPPMVEACISTLMQGRLFERDIYTEKFLSAADAQGARSPLFKRV

SEQ ID NO: 26007 - protein, 2142 aa, Nicotiana benthamiana
MEGNEHELILACVISGILFSVLGSASFAILWVVNWRPWRIYSWIFARKWPGFLEGPQLGILCNFLSLSAWIIVISLVVVLVTWGCWLMLILGRDIVGLAVIMAGTSLLLAFYSIMLWWRTQWQSSRAVAVLLLLAVGLLCAYELCAVYVTTGVRASERYSPSGFFFGVSAISLAINMLFICRMVFNGNGLDVDEYVRRAYKFAYSDCIEVGPVACLQEPPDPNELYPRQSRRALHLGLLYVGSLVVLLVYSILYGLTAKESNWLGATTSAAVIILDWNLGACLYGFKLLKSRVVVLFVAGASRVFLICFGVHYWYFGHCISYAVVASVLLGAAVSRHLSVTDPLAARRDALQSTVIRLREGFRRKDQNSSGSSSEGCGSSVKRTSSADAGHLGNAAVPCTGDGSTWNNIEGINSDKSIDSGRPSLALRSSSCRSVVQEPEVGSSYVDRNLEHNSSLVVCSSSGLESQGGDSSTSTSANQQLLDLNLALAFQEKLIDPRITSMLKRKGRHRDRELAHLLQDKGLDPNFAVMLKENGLDPMILALLQRSSLDADREHCDNNPPATDSNGVDNVLPNQISFSEELRLQGLGRWLQHCRAMLYHIAGTPERAWLLFSLVFILETVIVAIFRPKTIKLLNATHQQFEFGIAVLLLSPVVCSILAFLRSLQAEDLSMTSKPRKYDVIAWMLSTCVGLLLSFLSKSSVLLGLSLTVPLMVACLSIAIPIWIRNGYQFWSSRAEDTGRAGSHLTLGMKEGAVLCISISLFAGSVLVLGAIVSAKPLDDLDYKGWTGSRNGVTSPYASSVYLGWAMASGIALVVTGMLPIISWFATYRFSLSSAICIGIFAAVIVTFCSVSYFEVVGSRTDQIPTKADFLASLLPLICIPAVLSLGAGLFKWKDDNWKLSRGAYMFIIIGLLLLLGAISAIIVTIKPWAIGVAFLLVLLLLVLAIGVIHYWASNNFYLTRFQMLLVCFLAFLLALAAFLVGWFQDKAFVGASVGYFSFLFLVAGRALTVLLSPPIVVYSPRVLPVYVYDAHADCGKNVSAAFLVLYGIALAIEGWGVVASLKIYPPFAGAAVSAITLVVAFGFAVSRPCLTLEMVEDAVHFLSKETMVQAIARSATKTRNALSGTYSAPQRSASSAALLVGDPTMMRDRGGNFVLPRADVMKLRDRLRNEELAAGSIFCRLRNRTLRREATSDVGHRREMCAHARILALEEAIDTEWVYMWDKFGGYLLLLLGLTAKAERVQDEVRLRLFLDSIGFSDLSAKDIKKWLPEDRRRFEIIQESYMREKEMEEEILMQRREEEGRGKERRKALLEKEERKWKEIEASLISSIPNAGNREAAAMAAAVRAVGGDSVLDDSFARERVSSIARRIRAAQLSRRALQTGLAGAVCILDDEPTTSGRQCGQIDPSVCQSQKVSCSLAVMVQPESGPLCLFGAEFQKNICWEFLVAGSEQGIEAGQVGLRLITKADKQTTVKEWSISATSIADGRWHIITMTIDAELGEATCYLDGNFDGYQTGLPLRVASCIWELGTDVWVGIRPPIDVDSFGRSDSEGAESKVHIMDVFLWGRCLTEDEIAALPAAMGSAEYSMIDLPDDNWQWADSPTRVDGWDSDPADVDLYDRDDVDWDGQYSSGRKRRSERDGVVLDVDSFTRRLRKPRVETQKEINQHMLSLEMAVKEALLARGESHFTDQEFPPSDRSLFMDPRHPPSKLQVVSEWMRPTDIVKEKHLDCHPCLFSGVANSSDVCQGRLGDCWFLSAVAVLTEVSRISEVIITPEYNQEGIYTVRFCIQGEWVPVVVDDWIPCESPGKPAFATSRKGNEMWVSLLEKAYAKLHGSYEALEGGLVQDALVDLTGGAGEEIDMRSAEAQIDLASGRLWSQLLRFKQQGFLLGAGSPSGSDVHISSSGIVQGHAYSILQVQEVDGHKLVQIRNPWANEVEWNGPWSDSSPEWTDRMKHKLKLVPQANDGIFWMSWQDFQIHFRSIYVCRVYPPEMRYSIHGQWRGYSAGGCQDYDTWHQNPQYRLRASGPDASLPIHVFITLTQGVSFSRTTAGFRNYQSSHDSMMFYIGMRILKTRGRRAAYNIYLHESVGGTDYVNSREISCEMVLDPDPKGYTIGPTSIHPGEEAPFVLSVFTKATISLEAL

SEQ ID NO: 26008 - protein, 566 aa, Klebsiella pneumoniae
MDKQYPVRQWAHGADLVVSQLEAQGVRQVFGIPGAKIDKVFDSLLDSSIRIIPVRHEANAAFMAAAVGRITGKAGVALVTSGPGCSNLITGMATANSEGDPVVALGGAVKRADKAKQVHQSMDTVAMFSPVTKYAIEVTAPDALAEVVSNAFRAAEQGRPGSAFVSLPQDVVDGPVSGKVLPASGAPQMGAAPDDAIDQVAKLIAQAKNPIFLLGLMASQPENSKALRRLLETSHIPVTSTYQAAGAVNQDNFSRFAGRVGLFNNQAGDRLLQLADLVICIGYSPVEYEPAMWNSGNATLVHIDVLPAYEERNYTPDVELVGDIAGTLNKLAQNIDHRLVLSPQAAEILRDRQHQRELLDRRGAQLNQFALHPLRIVRAMQDIVNSDVTLTVDMGSFHIWIARYLYTFRARQVMISNGQQTMGVALPWAIGAWLVNPERKVVSVSGDGGFLQSSMELETAVRLKANVLHLIWVDNGYNMVAIQEEKKYQRLSGVEFGPMDFKAYAESFGAKGFAVESAEALEPTLRAAMDVDGPAVVAIPVDYRDNPLLMGQLHLSQILEHHHHHH

SEQ ID NO: 26009 - protein, 503 aa, Pectobacterium carotovorum
MSNSFCVVYKGSDTDINNIQRDFDGKGEALSNGYLFIEQNGHYQKCEMERGTAYLIGSLYNRTFLIGLAGVWEGEAYLANDAELLALLFTRLGANALALAEGDFCFFIDEPNGELTVITESRGFSPVHVVQGKKAWMTNSLKLVTAAEGEGALWFEEEALVCQSLMRADTYTPVKNAQRLKPGAVHVLTHDSEGYSFVESRTLTTPASNQLLALPREPLLALIDRYLNAPLEDLAPRFDTVGIPLSGGLDSSLVTALASRHFKKLNTYSIGTELSNEFEFSQQVADALGTHHQMKILSETEVINGIIESIYYNEIFDGLSAEIQSGLFNVYRQAQGQVSCMLTGYGSDLLFGGILKPGAQYDNPNQLLAEQVYRTRWTGEFATHGASCYGIDIRHPFWSHSLISLCHALHPDYKIFDNEVKNILREYADSLQLLPKDIVWRKKIGIHEGSSVNQAFANVLGSTVDNYQTKSRFTYRVYQAFLRGRLSITDVTPSQLKDLIKKD

SEQ ID NO: 26010 - protein, 467 aa, Candida albicans
MDDNLYLTTYEAALAVVATAMKKARLRIDVLVINSLMGGMLFTTGGMLYDLIRAGFSGINETNPGVISLLQGICYPIGLFYVVILGVDLFNSNILFFSTALCRGAVSFLDLFISWFVSWWFNLVGNIFVCYIFCYYSDVVRTQLMVVGSVEVAVQKAESTFVETLLKATAGNFYVCLAIFLQLMAKPLHVKFLMMLLPVFTFVAMGFTHSVADMFLVTMGLINGAPISVGKAAWKVFLPGAIGNIIGGSFFGVVITWYLHIYVVERDRAALNLPQYELRDEQPELNQDSRVVRKKSPRMEDEVVHTNKFDDSEESEEIQAPEDFYPTPVYDETSIQSYRLTHRKTRDSISSLRSTRRSPKNVFPVYGMGAPLKRERTIAGEVSTPAEPMDEKLEEEAEYIGTRLRKAISNRSKVSDLEANKSPSNHGSRQPTPRSSFSRRSSNVGISKSSEGPDPTDSNIDLADIRE

SEQ ID NO: 26011 - protein, 492 aa, Candida albicans
MVALKREAEPRENGKSKKAKTSLATSSFVLHSYSKLPNINEYAKAKSTPLDVFVWGTGSMCELGLGPSAKNKEVKRPRLNPYLTEEKLGGTKIVDFAVGGMHTLALDGKNRIWSWGGNDSGVLGRDTSQAKEVLKDIDGKNGNDDDDDDDEDGDLNEAESTPALVENLPEGEIVQLAATDNLSAALLSNGDVYAWGCFRCNEGLLGFLRDEIKLQKTPLKIKELKNIVQLAAGKDHLLALDSKGIVYAWGNGQQYQLGRRILERHRYRSLEPQQFGLYNIKYIASGDFHCFAIDHSDNVYAWGLNQYGQCALTGDNGELEDGSVLMKPTLIPELSHKGIKEIAAGEHHTLALTEDGQVYAWGRYDMKEIGIPKDKLPKSTFKDQHGNPRSVPVPTKLEFAVKIKTIGVGSHHSFAVTEDGVVYAWGFAETYGPGLGPSIDDVEKPTRIVNTATKNEDILLIGAGGQFSVSGGVKIEDEEKAEVRLDKYEDLE

SEQ ID NO: 26012 - protein, 240 aa, Buchnera aphidicola (Myzus persicae)
SRTLIKSKLWVGPEIQKEMKLVAPNLDLTVDYGWLWFLSQPLFKLLTIINSIINNWGFSIILITFIMKIITYPLTKSQYVSMSKIRALQPKIKEIKEAFSDNKQRISQEMIILYKKEKINPLGGFLPVFIQMPVFLSLYYMLIGSVELRHAPFVLWIKDLSSQDPFYVLPIIMGLTMFFIQKTSSNNISDPIQKKIMNFMPVIFTVFFLWFPSGLVLYYIVSNLVTIIQQKFIFSNFKSN

SEQ ID NO: 26013 - protein, 622 aa, Treponema pallidum
MKKNMFIAVVLSVLVLVGASFLQELLYPSASSSHSAAEHTLSAVPEETRTQSAHGGAADTQETTQPAAHPSGQVLVFPESETEERVERTYVVRTPLVQVTFTNRGGDILSYQLREHYAAQRREYVEMVEQARPDHRAFSLALGDEYAPNVNALFQVKQEIGARGVHSIGFYRSVATQHADGTRTPFVLAKRYVFYPDNYMFELHVSLSADVLEEREDSRQGAKVRAVAETNAGPATTVLARANGFDFGTASYTLRTPPEIGPERNAADKYEFRTFMVGAGGKAKTYALKGDGREQVDTPVSWASVSGKYFALIVLPNDADSLKRLVLSAPQAETAVQHHIAFVRRAVAQPAVADVYRVYIGPCAEQYLSAYNVASRNPYGLERTYIDAVAVSGGILYPLEVLLKWLLRLFYTLIPNWGVAIILVTIAIKVLFFPLTKRSFIAMQKMQELQPHMQRIQERYKGNTQKIHEEMAKLYREAQYNPLSGCLPTLVQMPIIFAMYRLFNNYFEFRGAMFIPYWIPDLSLADSVWTLPFALPVTQWTQMRMLPVLYVVSQIMFSKLTQVPHTEQQKTSMTIMTYVMPLFFFFFFYDAPSGLLVYWTAMNGVTLVQQLVMKRTANKNKT

SEQ ID NO: 26014 - protein, 310 aa, Tropheryma whipplei str. Twist
MFDGLFDFLQNILLPIKWVIEQILVFFHTLLGFLGFGDKSGLSWALSIVGLVIVIRATLIPVFLKQIRAQRKMLEIAPEVRRIQEKYKGKRDVLSRQSMNQEMMEIYRVRGANPLSSCLPIVLQMPVFFGLYQVIESAQNAGTGVGPLNGPLGMDFRDSRIFGVVPLHDSFSHDFYALQAGQAFNLITMIVAGVLTAIMIAVQLFTQLKVIPKNIPENAKNTSVYKNQKVMLYLLPIMFLGMGFSFPVGILIYWTASNVWSAVQQAVAIYRNPSPGSLAFELRRKRLGVQNKKTKGQRQQPVNKRRAKRR

SEQ ID NO: 26015 - protein, 594 aa, Sinorhizobium meliloti
MENNRNYFVAIALSVLILIAWQFFYVSPKMEKDRIAAEQAQQAQQTQQQPGAQPAAPGQALPGGAIPSAGESRDQAIGKSARVAIDTPALSGSINLTGARFDDLKLKGYRETVDPKSPVITLFSPAETADGYFTEIGYIGSDATGSVPGPQTTWTLSGGDKLTPSTPVTLSYTNDKGITFARTISVDDRYMFQVVDSIKNETAAPVSLSSYGRVTRFNKPTTPSIYVLHEGFVGVAGEHGLQEVGYSKVEDDEPVEPGKSTGGWLGITDKYWAATIVPPQATPFDIRFSHFADGRPRYQSDYKSDAVTVAPGQSVELKNLVFAGAKEVPVVDNYEVAYSIPNFDKLIDWGWFYFITKPMFKMMDFFFRLFGNFGIAILITTIVVKLIFFPLANKQYASMANMKKVQPKMEELKKKFGDDRMGLQQAMMQLYKEEKINPLAGCWPILIQIPVFFALYKVIYVTIEMRHAPFFGWIQDLSAPDPTTIINLFGLLPFEGPAFLHLGIWPIIMGVTMFLQMRMNPTPPDPTQAMLFTWMPVVFTFMLASFPAGLVIYWAWNNTLSILQQGIIMKRQGVKVELFDNLKSLFSKKPKPAE

SEQ ID NO: 26016 - protein, 385 aa, Synechocystis sp. PCC 6803
MIYLDYHATTPVDPRVAEKVMAFMTTQFGNVSSVDHAVGDRARRAVDQAKQQIADLIHCRPQEIIFTSGATESINLAIQGTVLALEKQQQTPRLAISAVEHKAVLDTCRHLEKQGRIELIVLPVDAQANLNLNQIEEVCHQGLDLLCIMAANNEVGTIYPIEKIAAIAKRHAVPFFCDASQAVGKIPINFQDWDITLLALSGHKLYAPQGIGALIRKTHHPLEPLIWGGGQQQGLRPGTLNLPGIVGLGEACHLRQLEMNEDETAIARKRDYLQARLQKAIPEILVNGNQSRRLAGNLHIAIPDIPNSAIIARIREQIAISTGSACSSGTIAPSHVLRAMNLTSNFIDGALRIGIGKFTTNAEIEQAADILIKTITIVKSCLKSS

SEQ ID NO: 26017 - protein, 735 aa, Arabidopsis thaliana
MIFKIEDVTVYFPYDNIYPEQYEYMVELKRALDAKGHCLLEMPTGTGKTIALLSLITSYRLSRPDSPIKLVYCTRTVHEMEKTLGELKLLHDYQVRHLGTQAKILALGLSSRKNLCVNTKVLAAENRDSVDAACRKRTASWVRALSTENPNVELCDFFENYEKAAENALLPPGVYTLEDLRAFGKNRGWCPYFLARHMIQFANVIVYSYQYLLDPKVAGFISKELQKESVVVFDEAHNIDNVCIEALSVSVRRVTLEGANRNLNKIRQEIDSSYYIIEIVQLVGRFKATDAGRLRAEYNRLVEGLALRGDLSGGDQWLANPALPHDILKEAVPGNIRRAEHFVHVLRRLLQYLGVRLDTENVEKESPVSFVSSLNSQAGIEQKTLKFCYDRLQSLMLTLEITDTDEFLPIQTVCDFATLVGTYARGFSIIIEPYDERMPHIPDPILQLSCHDASLAIKPVFDRFQSVVITSGTLSPIDLYPRLLNFTPVVSRSFKMSMTRDCICPMVLTRGSDQLPVSTKFDMRSDPGVVRNYGKLLVEMVSIVPDGVVCFFVSYSYMDGIIATWNETGILKEIMQQKLVFIETQDVVETTLALDNYRRACDCGRGAVFFSVARGKVAEGIDFDRHYGRLVVMYGVPFQYTLSKILRARLEYLHDTFQIKEGDFLTFDALRQAAQCVGRVIRSKADYGMMIFADKRYSRHDKRSKLPGWILSHLRDAHLNLSTDMAIHIAREVNL

SEQ ID NO: 26018 - protein, 174 aa, Populus nigra
MSRDRDPLSVGRVIGDVLDPFTKSISLRVTYSSREVNNGCELKPSQVANQPRVDIGGEDLRTFYTLVMVDPDAPSPSDPSLREYLHWLVTDIPATTGASFGHETVCYENPRPTMGIHRFVFVLFRQLGRQTVYAPGWRQNFNTRDFAEVYNLGSPVAAVYFNCQRESGSGGRRR

SEQ ID NO: 26019 - protein, 501 aa, Neurospora crassa
MIRNVVVLSGNSHPKFVDSVCNYLGIPPASRVLEKFSSGETRCEIRDSIRGKDVYIIQSFGVGTNRNAANSNNNNNNNDGSSTSATAETGHVTVNDYFIELCIMISACKTGSARRVTAVLPFFPYSRQPDLPYASTGAPLVSRNHDAVTMTVTEGQGSVSYTFESVPPTPAAHIPRTAGLANGMSRLANGLSGSSITRGSDIRDMAKVMVTGPASDAGSKSLGEKQPQQQKANDKFTTHDFENPAMAMAFQQKVGFKPMMAQAGSLIADLLTCAGADRIVTCDLHESTYQGFFDIPVDHLIARPLLKRYIQHHIENYKEAVIVSPDAGGAKRAAAIADSLGLQFALIHKERRRPSKTHPNYPSMMLVGNVANRICILVDDLADTVNTITRAAKLLKREGAVQVVALITHGVFSGDAIQRINASALDRVVVTNTVAQHRHLEAFGAARAGGTKEMPDKNKNDVDPRVVCGKLEVLDIAPFFAEAIRRIVFGESISMLVRDGD

SEQ ID NO: 26020 - protein, 395 aa, Neurospora crassa
MSTGLPSVYIVSAARTPVGSFLGLSAVQLGAHAIKSAVDRVPEIKAEDVEEVFFGNVLSAGVGQAPARQCALKAGLSNKVVATTVNKVCASGMKAIILGAQTIMTGNADIVVAGGTESMSNVPHYMQNLRTGVKYGDGGLVDGIQSDGLRDAYGKELMGVQAELCAKDHELSREAQDEYAINSYQKAQAATEAGLFKEIAPIEVPGGRGKPAIKIDRDEEVKNLNIEKLKSARTVFQAKDGTVTAPNASPINDGAAAVVLVSEAKLKELGIKPIAKILGWGDAAHEPERFTTAPALAIPKAIKHAGIKEEDVDFYEINEAFSVVALANMKILGLEPEKVNVYGGSVAIGHPLGCSGARVVTTLTSVLAEKKARIGCAGICNGGGGASAIVIENLQ

SEQ ID NO: 26021 - protein, 469 aa, Neurospora crassa
MKDVEDIHRPMLNSLQSTSAKMKKIVLSVNAGSSSVKISAYSALFGQAPIQLAEAQISGLTAPPPTLRYTRHGEKVINDEEVKDQKVSTQADAFDILVKALIDDNGVPEISSKEDIAYICHRIVHGGDFVRPKLISDETYHNLEKLNDLAPLHNSTSLVIVHRCMSDMPKTTFNIACFDSQFHHTIPEHIRTYPINQDIARNNHLRKYGFHGISYAFITRATAEFLGKKVEDVNIIALHLGSGASACAIKGGKSLDNSMGLTPLAGLPGATRSGSVDPSLVFHYASDVGKLSPASTKDLHISRAEEILNKQSGWKALTGTTNFGTITAALDPSSSDTTSHLSPEEVAKMRLAFDIFVERICAYIGSYYVSLQGQVDALVFAGGIGEKSDRLRAAVIEQVSCLGFGPVDKEANETRVKEELDDSHDVIEIAPPNSKKGGKDGREHRVLVCKTDEQFEMARACAEDGEFWR

SEQ ID NO: 26022 - protein, 291 aa, uncultured crenarchaeote DeepAnt-EC39
MSFLDLHMTKSPLIMNPNDNSESVAVIFGVPFDSTHSYKPGCRFGPDAIRDAFNNIEIFQPEFGIDLETVNINDLGNTKHTVVATEMLQIVENITTELKKQNKQLIILGGEHLITLGSFSCFPKDTGYVVFDAHYDLRDQYADTKLSHAAYLRRIVEKRGSENIVHVGARAFVKEELAFLNEHNISTVSDKEIRNGNGPKLLKDIISTFDSLYLSIDLDVLDPAFAPGVGNPEAIGISSRELYDLVTTLQNKKIVAADIVELNPTYDNGATVSMAAKMISTIIAMNLSRSN

SEQ ID NO: 26023 - protein, 315 aa, uncultured crenarchaeote DeepAnt-EC39
MNEPIKNIRLLLEEITIKCDASWIAFSGGLDSSILAEIKKEQNLNAITIISKDFLATDLSYSQITAKHIDIPLEIKYVSIDQMLGAIESTIKILKNFNDIEIRNSIVPYLYMNALKEKNITNVITGDGADEIFAGYNFLLKKDHNELKNELKRIKKIMHFTSQKIANKLGMSIQMPFIDEKIIELVETLPINLLINQKNGIKFGKWVLRKAFENTLPTNVIWRKKTAMQDGSGTTNLTKLFDSIITDDIFTKKVKKIKSECNIKIRTKESLYYYELFKENFIIPECEDKKNICPDCNAEIVSNSKFCRMCGKFPI

SEQ ID NO: 26024 - protein, 578 aa, Arabidopsis thaliana
MCGILAVLGCVDNSQAKRSRIIELSRRLRHRGPDWSGLHCYEDCYLAHERLAIVDPTSGDQPLYNEDKTIAVTVNGEIYNHKDLRENLKSHQFRTGSDCEVIAHLYEEHGEEFVDMLDGMFAFVLLDTRDKSFIAARDAIGITPLYIGWGLDGSVWFASEMKALSDDCEQFMCFPPGHIYSSKQGGLRRWYNPPWFSEVVPSTPYDPLVVRNTFEKAVIKRLMTDVPLGVLLSGGLDSSLVASVALRHLEKSEAACQWGSKLHTFCIGLKGSPDLKAGREVADYLGTRHHELHFTVQDGIDAIEEVIYHVETYDVTTIRASTPMFLMSRKIKSLGVKMVLSGEGSDEIFGGYLYFHKAPNKKEFHEETCRKIKALHQYDCLRANKSTSAWGVEARVPFLDKEFINVAMSIDPEWKMIRPDLGRIEKWVLRNAFDDEKNPYLPKHILYRQKEQFSDGVGYSWIDGLKDHANKHVSDTMLMNASFVFPDNTPLTKEAYYYRTIFEKFFPKSAARATVPGGPSVACSTAKAVEWDAAWSQNLDPSGRAALGVHVSAYGEDKTEDSRPEKLQKLAEKTPAIV

SEQ ID NO: 26025 - protein, 578 aa, Arabidopsis thaliana
MCGILAVLGCIDNSQAKRSRIIELSRRLRHRGPDWSGLHCYEDCYLAHERLAIIDPTSGDQPLYNEDKTVAVTVNGEIYNHKILREKLKSHQFRTGSDCEVIAHLYEEHGEEFIDMLDGMFAFVLLDTRDKSFIAARDAIGITPLYIGWGLDGSVWFASEMKALSDDCEQFMSFPPGHIYSSKQGGLRRWYNPPWYNEQVPSTPYDPLVLRNAFEKAVIKRLMTDVPFGVLLSGGLDSSLVAAVALRHLEKSEAARQWGSQLHTFCIGLQGSPDLKAGREVADYLGTRHHEFQFTVQDGIDAIEEVIYHIETYDVTTIRASTPMFLMSRKIKSLGVKMVLSGEGSDEILGGYLYFHKAPNKKEFHEETCRKIKALHQFDCLRANKSTSAWGVEARVPFLDKEFLNVAMSIDPEWKLIKPDLGRIEKWVLRNAFDDEERPYLPKHILYRQKEQFSDGVGYSWIDGLKDHANKHVSDTMLSNASFFFPDNTPLTKEAYYYRTIFEKFFPKSAARATVPGGPSIACSTAKAVEWDATWSKNLDPSGRAALGVHVAAYEEDKAAAAAKAGSDLVDPLPKNGT

SEQ ID NO: 26026 - protein, 342 aa, Candida albicans
MTTGTSKPKVLLVGEFIYSKQKWSELEEIAEVIQSESTTREQFIQDLKTKYNDITCIARTFYSINETGRFDADLAQHMPKTLKSVSHCGAGYDQVDVEPFTRLGVQVSNVTEPVERPTADVAVFLVLACMRNFLQGRQILMNGEWPSNGDKEAAGAPLGHTPQGKVVGILGMGGIGRAIRDRLKPFGFDRIVYYNRKQLSSELEKGAEYVTMDELFKQSDVIIIGVPLNAKTRHLIDKEAIQKMKDGVVLVNIARGAIIDEKHLPELIKSGKIGAFGADVFEHEPEVSPELVNLPNVVALPHMGTHSVEALTNMEEWVVCNVETFIKTGKLKTIVPEQQGIF

SEQ ID NO: 26027 - protein, 993 aa, Delphinium 'MagicFountains dark blue'
MKSIFKKLHIGSSSRSSSSTNHDPNRSNELSSSQSLPATTSDHGTNSVQFTTAPTPLTSSYPGIPVSTPATLASDRTDYFSSEEEFQLQLALAISASSNSEFREDPDKDQIRAATLLSLDRNRNDLRRQENESAESLSRRYWDYNVLDYMEKVVDGFYDIYGLSSNPSSQGKMPSLVDIQRDHGDPNFEVVMVNRAVDPALVELEQIAHCIVLDCPSSNVGLLVQRLADLVTEHMGGPVMDANIMLARWMERISNLRTSLHTSVIPIGSVNIGLSRHRALLFKVLADNVGVPCRLVKGSHYTGIDDDAVNIIKLENQREFLVDLMAAPGTLIPADFLSTNDSSGNSYNPRLSETLTSWATQESEVGRSRGETSFGEHNGGDRKSAINYETALDRKSSFDKVPEPSVPIASSGLPFVSFGNGYSEDSKGVDSAKQLYIGSSFPYKGNQEGTSVGDVFKTFDAPPYTQDNVDSKALFADLNPFQMVGVGKDSVKSKPTESDGNNLQRQKERLNLGPGRPPLPLVWKNRSANEVPRTKQYGFVEGPFPKNNQEDRGYNTSIPLSSSGNLEKLYPNVNAAEFSGVSSVARKSIGDGSSSHHGNSTSESSANQHNRLHADRVGNTDTTQTSNQFRDENHHQRDGEILRNSIVDETKECEKNFLAEHDRRKYTHDRYMGGRVIAMDTGGNSSSVDSGRSRPDPMLDDVAELEIPWEDLSIGERIGLGSYGEVYRADWNGMEVAVKKFLDQDFYGDALDEFRSEVRIMRRLRHPNIVLFVGAVTRPPNLSIVSEFLPRGSLYRILHRPNCQIDEKRRIRMALDVAMGMNCLHTSIPTIVHRDLKSLNLLVDDNWNVKVCDFGLSRLKHNTFLSSKSTAGTPEWMAPEVLRNEPSNEKCDVYSFGVILWELATLRLPWTGMNQMQVVGAVGFQNRRLDIPKELDPLVATIIRECWQTDPNLRPSFSQLTAALQSLQRLLIPSHQDQQSFPLPQEISVSSTP

SEQ ID NO: 26028 - protein, 198 aa, Bradyrhizobium genosp. alpha bv. genistearum
PTPNLRGKTQIKEFASFPTLEQLPLWGFDGSSTQQAEGHSSDCVLKPVAVFPDGARTNGVLVMCEVMMPDGKTPHASNKRATILDDSGAWFGFEQEYFFYKDGRPLGFPTSGYPAPQGPYYTGVGFSNVGDVARKIVEEHLDLCLAAGINHEGINAEVAKGQWEFQIFGKGSKKAADEMWMARYLMLRLTEKYGIDIE

SEQ ID NO: 26029 - protein, 198 aa, Bradyrhizobium canariense bv. genistearum
PTPNLRGKTQIKEFASFPTLEQLPLWGFDGSSTQQAEGHSSDCVLKPVAVFPDGARTNGVLVMCEVMMPDGKTPHPTNKRATILDDSGAWFGFEQEYFFYKDGRPLGFPASGYPAPQGPYYTGVGFSNVGDVARKIVEEHLDLCLAAGINHEGINAEVAKGQWEFQIFGKGSKKAADEMWMARYLMLRLTEKYGIDIE

SEQ ID NO: 26030 - protein, 198 aa, Bradyrhizobium canariense bv. genistearum
PTPNLRGKTQIKEFASFPTLEQLPLWGFDGSSTQQAEGHSSDCVLKPVAVFPDGARTNGVLVMCEVMMPDGKTPHSTNKRATILDDSGAWFGFEQEYFFYKDGRPLGFPASGYPAPQGPYYTGVGFSNVGDVARKIVEEHLDLCLAAGINHEGINAEVAKGQWEFQIFGKGSKKAADEMWMARYLMLRLTEKYGIDIE

SEQ ID NO: 26031 - protein, 198 aa, Bradyrhizobium canariense bv. genistearum
PTPNLRGKTQIKEFASFPTLEQLPLWGFDGSSTQQAEGHSSDCVLKPIAVFPDGARTNGVLVMCEVMMPDGKTPHSTNKRATILDDSGAWFGFEQEYFFYKDGRPLGFPASGYPAPQGPYYTGVGFSNVGDVARKIVEEHLDLCLAAGINHEGINAEVAKGQWEFQIFGKGSKKAADEMWMARYLMLRLTEKYGIDIE

SEQ ID NO: 26032 - protein, 198 aa, Bradyrhizobium japonicum
PTPNLRGKTQIKEFASFPTLEQLPLWGFDGSSTQQAEGHSSDCVLKPVAVFPDAARTNGVLVMCEVMMPDGKTPHASNKRATILDDAGAWFGFEQEYFFYKDGRPLGFPASGYPAPQGPYYTGVGFSNVGDVARKIVEEHLDLCLAAGINHEGINAEVAKGQWEFQIFGKGSKKAADEMWMARYLMLRLTEKYGIDIE

SEQ ID NO: 26033 - protein, 198 aa, Bradyrhizobium liaoningense bv. glycinearum
PTPNLRGKTQIKEFASFPTLEQLPLWGFDGSSTQQAEGHSSDCVLKPVAVFPDAARTNGVLVMCEVMMPDGKTPHPSNKRATILDDAGAWFGFEQEYFFYKDGRPLGFPASGYPAPQGPYYTGVGYSNVGDVARKIVEEHLDLCLAAGINHEGINAEVAKGQWEFQIFGKGSKKAADEMWMARYLMLRLTEKYGIDIE

SEQ ID NO: 26034 - protein, 198 aa, Bradyrhizobium japonicum bv. glycinearum
PTPNLRGKTQIKEFASFPTLEQLPLWGFDGSSTQQAEGHSSDCVLKPVAVFPDAARTNGVLVMCEVMMPDGKTPHASNKRATILDDAGAWFGFEQEYFFYKDGRPLGFPTSGYPAPQGPYYTGVGFSNVGDVARKIVEEHLDLCLAAGINHEGINAEVAKGQWEFQIFGKGSKKAADEMWMARYLMLRLTEKYGIDIE

SEQ ID NO: 26035 - protein, 198 aa, Bradyrhizobium genosp. beta
PTPNLRGKTQIKEFASFPTLEQLPLWGFDGSSTQQAEGHSSDCVLKPVAVFPDAARTNGVLVMCEVMMPDGKTPHASNKRATILDDAGAWFGFEQEYFFYKDGRPLGFPSSGYPAPQGPYYTGVGYSNVGDVARKIVEEHLDLCLAAGINHEGINAEVAKGQWEFQIFGKGSKTAADQMWMARYLMLRLTEKYGIDIE

SEQ ID NO: 26036 - protein, 198 aa, Bradyrhizobium yuanmingense
PTPNLRGKTQIKEFASFPTLEQLPLWGFDGSSTQQAEGHSSDCVLKPVAVFPDGARTNGVLVMCEVMMPDGKTPHPSNKRATILDDSGAWFGFEQEYFFYKDGRPLGFPTAGYPAPQGPYYTGVGYSNVGDVARKIVEEHLDLCLAAGINHEGINAEVAKGQWEFQIFGKGSKTAADQMWMARYLMLRLTEKYGIDIE

SEQ ID NO: 26037 - protein, 655 aa, Burkholderia cepacia
MCGIDGFLNSVACDEETARGTLARMTASLAHRGPDGQGIWVDPEAGIALGHRRLAIVDLSVHGRQPMASACGRYVMVFNGEIYNHRELRAELERAGRAPAWRGHSDSEVLIAAIVAWGVDATLRRATGMFAFALWNRASRVLTLARDRIGEKPLYYGRIGDALVFASELKALRGYPGFDGAIDRDALCLYLRQSSVPAPHTIYRGIHKLPPGTYIQFEHARDTPRLRAYWTLEQVIEDGRAQPFEGSADDAVGQLDAVLRQAVARQMEADVPLGAFLSGGIDSSTIVALMQAQSSTPVDTFTIGFHEAGYDEAGYAKAVARHLGTRHTELYVTADHALGVVPKLPSIYDEPFSDASQIPTFLVSELTRRHVKVSLSGDGGDELFGGYTRYFLTPRLWRKLHRVPGAVRARIAAALHALRPDHADQLAAVAQGAWGGVEARESAARIGDRLHKLGHVMTAESRIGLYRLLMSSVHHPERLALSGQEPATPLDTVSAWPAHLSFAEQAMAIDTLTYLPTDILAKVDRAAMAVSLETRMPFLDHHVVEFAWRVPAHVRLPEGQSKALLRRLLDRYVPSALIDRPKQGFCAPVDHWLRGALRDWAEALLRPSRLREEGYFDADAVERLWRQHVTGRMNWQHQLWTVLMFQAWLEAQRAA

SEQ ID NO: 26038 - protein, 346 aa, Gordonia sp. TY-5
MADTHKISFEPVDIEMEVGEDETILDAAFRQESTSCTAAARPLFGCKSYMLEGDVQMDDYSTFACNDAEEAEGYVLLCRTYAYSDCEIELLNFDEDELLGGAPIQDVTTKVAAIEPMTPDIVSLKLDVVEPESVEFKSGQYFDLFIPGTEDKRSFSIATTPATPDRLEFLIKKYPGGLFAGMLTDGLSVGQEIKLNGPYGSCTLRNGHVLPIVAIGGGAGMAPLLSLLRHISETGLNRPVRFYYGARTAADLFLLDEIATLGEKIDDFSFTACLSESTDNAPEGVTVIGGNVTDIVNDNEADLARTEVYFCAPPPMVDAALALAEQHSVPHDQIFYDKFTSPAFDS

SEQ ID NO: 26039 - protein, 546 aa, Capsicum annuum
MASSGGNTNTFMNSFNSNYSFSSSQFMTSSFSDLLSDNNDDNNNNRNWGFSYQRITNSINKDEVPKFKSFPPSSLPMISSSSPASPSSYLAFPHSLSPSVLLDSPVLFNNSNTLPSPTTGSFGSLNSKEDNSRTSDFSFHSRPATSSSIFHSSAPRNSLDDLITRQQQTTEFSTAKIGVKSEVAPIQSFSQENMQNNPAPMHYRQPSQYVREQKAEDGYNWRKYGQKQVKGSENPRSYYKCTFPNCPTKKKVERNLDGHVTEIVYKGSHNHPKPQSTRRSSAQSIQNLAYSNLDITNQPNAFLENAQRDSLAVTDNSSASFGDEDVDQGSPISKSGENDENEPEAKRWKGDNENEVISSASRTVREPRIVVQTTSDIDILDDGYRWRKYGQKVVKGNPNPRSYYKCTFIGCPVRKHVERASHDLRAVITTYEGKHNHDVPAARGSGSYSMNEPPSGSNNNMPVVPRPSLLANNSNQGMNVSNTLFNTAQVEPPITLQMLQSSGSSSYSGFGTSSGSYMNQMQPTNNSKLISKEEPKDDLFFSSFLN

SEQ ID NO: 26040 - protein, 494 aa, Triticum aestivum
MSATCAADLGPLLGAAAANATDYLCNRFADTTSAVDSTYLLFSAYLVFAMQLGFAMLCAGSVRAKNTMNIMLTNVLDAAAGALFYYLFGFAFAFGTPSNGFIGKHFFGLKDMPQTGFDYSFFLFQWAFAVAAAGITSGSIAERTQFVAYLIYSAFLTGFVYPVVSHWIWSVDGWASAARTSGPLLFKSGVIDFAGSGVVHMVGGIAGFWGALIEGPRIGRFDHAGRSVALKGHSASLVVLGTFLLWFGWYGFNPGSFVTILKSYGPPGSINGQWSGVGRTAVTTTLAGSVAALTTLFGKRLQTGHWNVVDVCNGLLGGFAAITAGCSVVDPWAAVICGFVSAWVLIGLNALAGRLKYDDPLEAAQLHGGCGAWGIIFTALFAKKQYVEEIYGAGRPYGLFLGGGGRLLAAHIVQILAIAGFVSCTMGPLFLALKKLGLLRISAEDEMAGMDLTRHGGFAYVYHDDDEHDKSVGGFMLRSAQTRVEPAAAANSQV

SEQ ID NO: 26041 - protein, 308 aa, Ceratopteris richardii
  misc_feature (1)..(1): Xaa can be any naturally occurring amino acid
  misc_feature (85)..(85): Xaa can be any naturally occurring amino acid
  unsure (1)..(308): unsure at all Xaa locations
XQITDNRKHILLGVQTLRAMATAAFRTSSSPNVELSIFGCISNSISSSGNGMDNRTANRSEPSENLNLLLSSSGPKPLIESTLKXPPKQLNLLPVRSPCQKPAEGYSRWNAISDAHVNSKGIDMNQIPCSSESEDEDEAEAPSLKLRFLAGEGKRSEMAALGSGMADPGERERGLLEVSSRNSDEEESGSARKKLRLSKEQSALLEESFKEHSTLNPKQKSLLAKQLNLRPRQVEVWFQNRRARTKLKQTEVDCELLKRCCESLTEENRRLQKEVAELRALKGGSPLCYIPRLLHAFACSHINNVPLL

SEQ ID NO: 26042 - protein, 212 aa, Ceratopteris richardii
YGKPVDSFWSFTGGQSTVKREREKVGSETENTHNSASYPLCEVGSRGSDEEEGNSTRKKLRLSKEQSALLEESFKEYNTLNSKQKSALAKQLNLRPRQVEVWFQNRRARTKLKQTEVDCELLKRCCESLTEENRRLQKEVQELRALKVTAPRVIAHDYYTPIPAATLAMCPSCERLATIEPPPRPSSKQHVSAIPFASLAFNQHHPEPSAAC

SEQ ID NO: 26043 - protein, 242 aa, Ceratopteris richardii
  misc_feature (8)..(8): Xaa can be any naturally occurring amino acid
  misc_feature (11)..(11): Xaa can be any naturally occurring amino acid
  misc_feature (19)..(19): Xaa can be any naturally occurring amino acid
  unsure (1)..(242): unsure at all Xaa locations
MLNYSFDXVKXISSSDLIXPAGNYYQHVTFNEQGDLADDDGICYDIINSTGEKKRGLTVDQVKYLEMNFTMDFKLEPERKALIAKELGLRPRQVAIWFQNRRARWKNKQLEQDYETLKSSYEALLQENEDMVKRNKALDEENKLLQAEIARLTGISGNVDVPVDIDAKVASPDLDSDSDLESTVKGEKQQNLKSEIGIPAKLDAQSEILESLTLSCLKSQEAIVAFVEQPIGANDSVVACAL

SEQ ID NO: 26044 - protein, 256 aa, Ceratopteris richardii
MPFIPATMKHHAALDSTDIKGKSKNSCKDLKSRALKRSRQDVVVDSDTEEKRRGLTMEQINILEMKFKEDVELEPERKTLIAKQLGLRPRQVAIWFQNRRARWKNKQVECKYELLKAQYDAVVKEKESITMEHESILEGNRRLHSESIEKANTLGGAISPALPSCNIMSPTDSADCQSEIIMSVDVIEGAISCCHPIQEPSSRMAADVVVETEYSFYSSLDNSFSQFPMLVRQLIANGHCLQDAYDIYLGCEYFYG

SEQ ID NO: 26045 - protein, 192 aa, Ceratopteris richardii
MAWSVSVGSTSIPQDEDETKQSVITSGISKTKGHNQGHRKHPSKDVTKDIGDGDELMCGVEKKRRLTAEQVNFLETSFSMDLKLEPERKAHLAKQLGIQPRQVAIWFQNRRARWKNQQIEQDYESLKASYEAVVEEKERLLKEHDLALEANKRLQAEIARLTRSLQSYDRNGMSEPKGGTAEQWQIRGNVNQ

SEQ ID NO: 26046 - protein, 274 aa, Ceratopteris richardii
MAWSPVKEEHLPQLVSTESTIEKTLKAKDPCKRPKRRAKKRTGKGSTIDDSIDKRRGLTVEQINFLEMSFKEDNKLEPERKACIAKQLGVRPRQVAIWFQNRRVRWKNKQVEQDYETLKARYQDVVKEKDSIMMQYESTMEGNRKLQAEVARLTNLLQSTEGISAHTDMDQVLSNCNSENLNCISENISPAKSADYPSEIIVSGDPTEGDISRFIFQEPISSMPYDLLPDGDYFILSPENSTGSFPSLVQQLVSNGHCVEDAYNIYLGYEYLCC

SEQ ID NO: 26047 - protein, 227 aa, Ceratopteris richardii
RRSPPKEELDDDDLGDELSNPTEKNRRLTAEQVNFLEMSFNIDLKLEPERKALLAKKLGIRPRQVAIWFQNRRARWKNKQIEQDYESLKTKYEAVIKEREVILLQHEAAMQENKRLQAEVRRLMDLVEATGVGACDVTGVSEGKSELMSPSKSTGRSRVTCKTRVKCHSIAVSASGADVPMPRFELDYGFCRSNDMGVDLHECPTFSLWRIFLGLICPCLFVKFASK

SEQ ID NO: 26048 - protein, 239 aa, Ceratopteris richardii
  misc_feature (15)..(15): Xaa can be any naturally occurring amino acid
  misc_feature (63)..(63): Xaa can be any naturally occurring amino acid
  unsure (1)..(239): unsure at all Xaa locations
HGKREPVGIQGAPLXLFLAHQCGPASAVGNGRKRGSTMLERGADCSSFSESFDHDRTGDDGFXRGSEEEAQGRRLVVRKKLRLSKEESALLEEKFEEHSTLTPKQKNALAKQLNLQPRQVEVWFQNRRARTKLKQTEVDCELLRKCCASLTEENRRLQMEVDQLRALSTTQLHFSDFVVANTGLFLDAPLAICPQCQRHFCWICKQRQSSITTSNSCLHQAPARFNSLFSQPQPSFSQN

SEQ ID NO: 26049 - protein, 214 aa, Ceratopteris richardii
SKAYTQRERLSTTESFPLSMKRDREKMDFETNTSNFNITNNLCEVSSRASDEEDGASTRKKLRLTKEQSAFLEESFKEHSTFNPKQKSALAKQLNFRPRQVEVWFQNRRARTKLKQTEVDCELLKRCCESLTEENRRLQKEVQELRALKMGAPCVVAHDFYMPLPAATLAMCPSCERLSTLDPSSRPPPKQHMSSAPLVSLAFNSHHPQPSAAC

SEQ ID NO: 26050 - protein, 194 aa, Ceratopteris richardii
NQGHRKHPSKDVTKDIGDGDELMCGVEKKRRLTAEQVNFLETSFSMDLKLEPERKAHLAKQLGIQPRQVAIWFQNRRARWKNQQIEQDYESLKASYEAVVEEKERLLKEHDLALEANKRLQAEVCFKHAMSLLWSGYEESHVNIYSMTDSITNAYFHCLTRRHSSLILLHFSSQHTLIGFGGICDAWSPTFRYI

SEQ ID NO: 26051 - protein, 1622 aa, Arabidopsis thaliana
MAMQSLSPVPKLLSTTPSSVLSSDKNFFFVDFVGLYCKSKRTRRRLRGDSSSSSRSSSSLSRLSSVRAVIDLERVHGVSEKDLSSPSALRPQVANWEDILSERGACGVGFIANLDNIPSHGVVKDALIALGCMEHRGGCGADNDSGDGSGLMSSIPWDFFNVWAKEQSLAPFDKLHTGVGMIFLPQDDTFMQEAKQVIENIFEKEGLQVLRWREVPVNVPIVGKNARETMPNIQQVFVKIAKEDSTDDIERELYICRKLIERAVATESWGTELYFCSLSNQTIVYKGMLRSEALGLFYLDLQNELYESPFAIYHRRYSTNTSPRWPLAQPMRFLGHNGEINTIQGNLNWMQSREASLKAAVWNGRENEIRPFGNPRGSDSANLDSAAEIMIRSGRTPEEALMILVPEAYKNHPTLSVKYPEVVDFYDYYKGQMEAWDGPALLLFSDGKTVGACLDRNGLRPARYWRTSDNFVYVASEVGVVPVDEAKVTMKGRLGPGMMIAVDLVNGQVYENTEVKKRISSFNPYGKWIKENSRFLKPVNFKSSTVMENEEILRSQQAFGYSSEDVQMVIESMASQGKEPTFCMGDDIPLAGLSQRPHMLYDYFKQRFAQVTNPAIDPLREGLVMSLEVNIGKRGNILELGPENASQVILSNPVLNEGALEELMKDQYLKPKVLSTYFDIRKGVEGSLQKALYYLCEAADDAVRSGSQLLVLSDRSDRLEPTRPSIPIMLAVGAVHQHLIQNGLRMSASIVADTAQCFSTHHFACLVGYGASAVCPYLALETCRQWRLSNKTVAFMRNGKIPTVTIEQAQKNYTKAVNAGLLKILSKMGISLLSSYCGAQIFEIYGLGQDVVDLAFTGSVSKISGLTFDELARETLSFWVKAFSEDTTKRLENFGFIQFRPGGEYHSNNPEMSKLLHKAVREKSETAYAVYQQHLSNRPVNVLRDLLEFKSDRAPIPVGKVEPAVAIVQRFCTGGMSLGAISRETHEAIAIAMNRIGGKSNSGEGGEDPIRWKPLTDVVDGYSPTLPHLKGLQNGDIATSAIKQVASGRFGVTPTFLVNADQLEIKVAQGAKPGEGGQLPGKKVSAYIARLRSSKPGVPLISPPPHHDIYSIEDLAQLIFDLHQINPNAKVSVKLVAEAGIGTVASGVAKGNADIIQISGHDGGTGASPISSIKHAGGPWELGLTETHQTLIANGLRERVILRVDGGLKSGVDVLMAAAMGADEYGFGSLAMIATGCVMARICHTNNCPVGVASQREELRARFPGVPGDLVNYFLYVAEEVRGILAQLGYNSLDDIIGRTELLRPRDISLVKTQHLDLSYLLSSVGTPSLSSTEIRKQEVHTNGPVLDDDILADPLVIDAIENEKVVEKTVKICNVDRAACGRVAGVIAKKYGDTGFAGQVNLTFLGSAGQSFGCFLIPGMNIRLIGESNDYVGKGMAGGEIVVTPVEKIGFVPEEATIVGNTCLYGATGGQIFARGKAGERFAVRNSLAEAVVEGTGDHCCEYMTGGCVVVLGKVGRNVAAGMTGGLAYLLDEDDTLLPKINREIVKIQRVTAPAGELQLKSLIEAHVEKTGSSKGATILNEWKKYLPLFWQLVPPSEEDTPEASAAYVRTSTGEVTFQSA

SEQ ID NO: 26052 - protein, 200 aa, Dunaliella tertiolecta
PKWNFDGSSTGQAPADDSEVYLVPRAIYKDPFRMGDNIMVMCETYEPPREKKDGTMNPLKPRPPTRALGCAQPMEKAKPQEPWFDIEQEYTLLNSVTKWPLGWPKGGYPAGQGPYYCSVGAGRSIRRDIPEVHYRSCLHAGIQISGVNGEVLPSQWEYQVGPVEGIAMGDQMWMSRYLMYRVAELFNVEVTFDPKPITGD

SEQ ID NO: 26053 - protein, 270 aa, Oryza glaberrima
MGRRACCAKEGMKRGAWTSKEDDMLASYIKSHGEGKWREVPQRAGLRRCGKSCRLRWLNYLRPNIKRGNIDDDEEELIVRLHTLLGNRWSLIAGRLPGRTDNEIKNYWNSTLSRKIGTAATAAAGSRGGSTPDTARATDAASSSSVVPPGQQQQPASRADTDTATAAAAATTTTVWAPKAVRCTRGFFFHDRETAPLAAAAPAPAGELGDGDDADCDYYCSGSSSAATTTSSSSFPAVVEPCFSAGDDWMDDVRALASFLDTDDAWNLCA

SEQ ID NO: 26054 - protein, 518 aa, Colletotrichum lagenarium
MPTLGFLKKKRTREGNQDPQGSLPTSPVTPTSSKPFDSSISTTLSSLSNNSQATSQPSGPGQKQQEDPASSEAAKNQQMYPVTVHPAPNQQHYNQQGEPQQNLPSISNLINPTQHDASSNGHNYLAQPTQTSQPNPSPGTDPTRLQQQQAQSMLHPPTQPQQQQQQQQQQQQQQQTQQLQQQKNGMPQQAPDQQVRQTKGKYTLQDFDILRTLGTGSFGRVHLVQSKHNQRFYAVKVLKKAQVVKMKQVEHTNDERRMLGEVKHPFLITLWGTFQDSKNLYMVMDFVEGGELFSLLRKSGRFPNPVAKFYAAEVTLALEYLHSRDIIYRDLKPENLLLDRHGHLKITDFGFAKRVPDKTWTLCGTPDYLAPEVVSNKGYNKSVDWWSLGILIYEMLCGYTPFWDSGSPMKIYENILKGKVKYPAYINPDAQDMLSKLITADLTKRLGNLYGGPNDVKTHPWFQEVTWDRLARKDIDAPYTPPVKAGAGDASQFDRYPEDPERYGSSGHDEYGHLFTDF

SEQ ID NO: 26055 - protein, 410 aa, Skeletonema costatum
MKLAVTFLATIGPTGRFAPAANTVARTSALNMVQQLDLKTGQSQLDTSVVDRFSALPYPDDKVLAEYVWVDAKGECRSKTRTLPVARTEAVDKLPNWNFDGSSTDQAPGDDSEVILRPCRIFKDPFRPRAHGLDNNLVMCDTYTPAGEAIPTNTRAIAAKAFEGKEDEEVWFGLEQEFTPLQPRPTHSPRLAQEPVSQPRSGPYYSSAGPENSFGRAVTDAMYRCCLYAGLEISGTNGEVMPGQQEYQIGPCVGIDAGDQLFMSRYILQRVCEEFQVYCTLHPKPITDEDWNGAGMHTNDSTKSMREAGGLDIIKQAIYKLGAKHKEHIAIYGEGNELRLTGKFETASMDEFSFGVANRGASVRIGRDTEAEEMLGYFEDRKPQFPNADPYLVTGKRSWLPIIMEDIEVS

SEQ ID NO: 26056 - protein, 811 aa, Saccharomyces cerevisiae
MLRQATKAPIQKYLQRTQLLRRSTPRIYTIVQCKRSICSFNARPRVANKLLSDIKTNALNEVAISTCALKSSYGLPNFKRTYVQMRMDPNQQPEKPALEQFGTNLKKLARDGKLDPVIGRDEEIARAIQILSRRTKNNPCLIGRAGVGKTALIDGLAQRIVAGEVPDSLKDKDLVALDLGSLIAGAKYRGEFEERLKKVLEEIDKANGKVIVFIDEVHMLLGLGKTDGSMDASNILKPKLARGLACISATTLDEFKIIEKDPALSRRFQPILLNEPSVSDTISILRGLKERYEVHHGVRITDTALVSAAVLSNRYITDRFLPDKAIDLVDEACAVLRLQHESKPDEIQKLDRAIMKIQIELESLKKETDPVSVERREALEKDLEMKNDELNRLTKIWDAERAEIESIKNAKANLEQARIELEKCQREGVYTKASELRYSRIPDLEKKVALSEKSKDGDKVNLLHDSVTSDDISKVVAKMTGIPTETVMKGDKDRLLYMENSLKERVVGQDEAIAAISDAVRLQRAGLTSEKRPIASFMFLGPTGTGKTKLTKALAEFLFDDESNVIRFDMSEFQEKHTVSRLIGAPPGYVLSESGGQLTEAVRRKPYPVVLFDEFEKAHPDVSKLLLQVLDEGKLTDSLGHHVDFRNTIIVMTSNIGQDILLNDTKLGDDGKIDTATKNKVIEAMKRSYPPEFINRIDDILVFNRLSKKVLRSIVDIRIAEIQDRLAEKRMKIDLTDEAKDWLTDKGYDQLYGARPLNRLIHRQILNSMATFLLKGQIRNGETVRVVVKDTKLVVLPNHEEGEVVEEEAEK

SEQ ID NO: 26057 - protein, 765 aa, Agrobacterium vitis
MNGEIILLAAPRQSVLVNMMDLVDVDELRTSLFNTFLQRQITRKISTKASCQCETGLACKGPAKDGFPESSADQRAKITVAFIYINDATLQLIIDSGSLAQATTASLVAINVAPFRTNVSRALLLQSINLLRSGRCGLDDISHFIAIAISKDAFSKTLTMAPFEGSLGTELHGFPITSKGDAAFEMVAYGRNLMPKACAESFPSVDLLYDYRNFFESCRATGRIGDFPEGVSKPKVAIVGAGLSGLVVASELLHAGIDDVTLYEASDRIGGKLWSYRFDNAPNVVAEMGAMRFLPSEILLFFFLQEVMAGFHGAFPNPRKRDTTLIYDGHQYIWKAGEGPPELFRRVYHGWQAFIREGYLNDDMVLASPCAIGEALKLGHLQQAHDFWQSWLTCFGRESFSSGIEKIFLGSHPPGGEKWRFLMTGNLFKLLGIGSGGFGPVFESGFIEILRLVVNGYEDNAQLIYEGISELPRRIGAQVVHGVSIRERIRHVQVKAIEKENTKIRVRVKGGNSDLYDRVVVTSGLTNIQLRHLLTLDATFLQAEVNGAVENSHMTGSSKLFVLTEGKFWLEHQLPPCVLTTGVARAVYCFDYSRSDPRGKGLLLISYTWEDDSHKLLAVPDKRERLALLRRDIGKTLPDFAKHLVPANGNYDGNVVQHDWLTDPNAGGAFKLNRRGEGRVFSKAFFSAILTCTNSLKDKGAILGWLYCSFTGGWADGAIQTACNAAWCIIHSSGGVLAEGNPLTHPWKQYNYGVEYRSVGIRTYE

SEQ ID NO: 26058 - protein, 130 aa, Medicago sativa
GGPFSKELIPKLTILRKNLSCKLGVAIPDFNATYVRQFVATIIFLKGVGGILFVFGSTFGSFLLLSHLALTTPILYDFYNYRPTKPEYGLLLNEFIQNAALFGALLFFIGMKNSIPRKQLRKKTPKAKAV

SEQ ID NO: 26059 - protein, 150 aa, Salmonella enterica subsp. enterica serovar Typhimurium
GEIPVMAAETVHRFGIGPKVALLSHCNFGSSNSPSASKMRETLERVRERAPDLMIDGEMHGDAALVESICNDRMPDSPLKGAANILVMPNMEAARISYNLLRVSSSEGVTVGPVLMGVSKPVHVLTPIASVRRIVNMVALAVVEGQTQPL

SEQ ID NO: 26060 - protein, 302 aa, Staphylococcus aureus
MTKTKAIDIIGAPSTFGQRKLGVDLGPTAIRYAGLISRLKQLDLDVYDKGDIKVPAVNIEKFHSEQKGLRNYDEIIDVNQKLNKEVSASIENNRFPLVLGGDHSIAVGSVSAISKHYNNLGVIWYDAHGDLNIPEESPSGNIHGMPLRILTGEGPKELLELNSNVIKPENIVLIGMRDLDKGERQFIKDHNIKTFTMSDIDKLGIKEVIENTIEYLKSRNVDGVHLSLDVDALDPLETPGTGTRVLGGLSYRESHFALELLHQSHLISSMDLVEVNPLVDSNNHSAEQAVSLGGTFFGEPLL

SEQ ID NO: 26061 - protein, 894 aa, Arabidopsis thaliana
MAFSSCFLLVLLQIFSALLLCLAQDQSGFISLDCGSPRETSFREKTTNITYISDANFINTGVGGSIKQGYRTQFQQQTWNLRNFPQGIRNCYTLNLTIGDEYLIRANFLHGGYDDKPSTQFELYLGPNLWSTVTTTNETEASIFEMIHILTTDRLQICLVKTGNATPFISALELRKLMNTTYLTRQGSLQTFIRADVGATVNQGYRYGIDVFDRVWTPYNFGNWSQISTNQSVNINNDYQPPEIAMVTASVPTDPDAAMNISLVGVERTVQFYVFMHFAEIQELKSNDTREFNIMYNNKHIYGPFRPLNFTTSSVFTPTEVVADANGQYIFSLQRTGNSTLPPLLNAMEIYSVNLLPQQETDRKEVDAMMNIKSAYGVNKIDWEGDPCVPLDYKWSGVNCTYVDNETPKIISLDLSTSGLTGEILEFISDLTSLEVLDLSNNSLTGSVPEFLANMETLKLINLSGNELNGSIPATLLDKERRGSITLSIEGNTGLCSSTSCATTKKKKKNTVIAPVAASLVSVFLIGAGIVTFLILKRKKRTKLGLNPNSGTGTTPLHSRSHHGFEPPVIAKNRKLTYIDVVKITNNFERVLGRGGFGVVYYGVLNNEPVAVKMLTESTALGYKQFKAEVELLLRVHHKDLTCLVGYCEEGDKMSLIYEFMANGDLKEHLSGKRGPSILTWEGRLRIAAESAQGLEYLHNGCKPQIVHRDIKTTNILLNEKFQAKLADFGLSRSFPLGTETHVSTIVAGTPGYLDPEYYRTNWLTEKSDVFSFGVVLLELVTNQPVIDMKREKSHIAEWVGLMLSRGDINSIVDPKLQGDFDPNTIWKVVETAMTCLNPSSSRRPTMTQVVMDLKECLNMEMARNMGSRMTDSTNDSSIELSMNFTTELNPGAR

SEQ ID NO: 26062 - protein, 254 aa, Sinapis alba
MGRGRVELKRIENKINRQVTFAKRRNGLLKKAYELSVLCDAEVALIIFSNRGKLYEFCSSSSMIRTLERYQKCNYGPPEPNVPSREALAVELSSQQEYLKLKERYDALQRTQRNLLGEDLGPLSTKELELLERQLDSSLKQIRALRTQFMLDQLNDLQSKERMLNETNKTLRLRLADGYQMPLQLNPNQEDHHVDYGRHDQQQQQNSHHAFFQPLECEPILQMGYQGQQDHGMEAGPSENNYMLGWLPYDTNSI

SEQ ID NO: 26063 - protein, 250 aa, Solanum commersonii
  misc_feature (231)..(231): Xaa can be any naturally occurring amino acid
  unsure (1)..(250): unsure at all Xaa locations
MGRGRVQLKRIENKINRQVTFSKRRSGLLKKAHEISVLCDAEVGLIVFSTKGKLFEYATDSCMERLLERYERYSFAEKQLVPTDHTSPGSWTLENAKLKARLEVLQRNEKLYVGEDLESLNMKELQNLEHQLASALKHIRSRKNQLMHESISVLQKQDRALQEQNNQLSKKVKEREKEVEQQNQWDQQNHEINSSTFVLPQQLDSPHLGEASQNTNVVDNGEVEGGNSSQXQGAANNTVMPQWMVRHLNG

SEQ ID NO: 26064 - protein, 250 aa, x Aranda deborah
MGRGRVELKMIENKINRQVTFAKRRKRLLKKAYELSVLCDAEVALIIFSNRGKLYEFCSSTSMLKTLEKYQKCNFGSPESTIISRETQSSQQEYLKLKNRVEALQRSQRNLLGEDLGPLGSKELEQLERQLDSSLRQIRSTRTQFMLDQLADLQRREQMLCEANKTLKRRFEESSQANQQQVWDPSNTHAVGYGRQPAQHHGEAFYHPLECEPTLQIGYHSDITMATATASTVNNYMPPGWLGQISGSYE

SEQ ID NO: 26065 - protein, 250 aa, Solanum tuberosum
MGRGRVQLKRIENKINRQVTFSKRRSGLLKKAHEISVLCDAEVGLIVFSTKGKLFEYANDSCMERLLERYERYSFAERQLVPTDHTSPGSWTLEHAKLKARLEVLQRNQKHYVGEDLESLNMKELQNLEHQLDSALKHIRSRKNQLMHESISVLQKQDRALQEQNNQLSKKVKEREKEVAQQNQWDQQNHEINSSTFVLPQQLDSPHLGEAYQNTNVVDNGEVEGGNSSQQQGAANNTVMPQWMLRHLNG

SEQ ID NO: 26066 - protein, 242 aa, Panax ginseng
MSFYDDQSGNLSPQRKLGRGKIEIKRIENTTNRQVTFCKRRNGLLKKAYELSVLCDAEVALIVFSTRGRLYEYANNSVKGTIERYKKACTDSPNTSSVSEANAQFYQQEASKLRQEISSIQKNNRNMMGESLGSLTVRDLKGLETKLEKGISRIRSKKNELLFAEIEYMQKKEIDLHNNNQYLRAKIAENERAQQHMNLMPGSSDYELAPPQSFDGRNYIQLNGLQPNNHYSRQDQTALQLV

SEQ ID NO: 26067 - protein, 525 aa, Sandersonia aurantiaca
MCGILAVLGCSDDSQAKRVRVLELSRRLKHRGPDWSGLDHHGDCYLAHQRLAIIDPASGDQPLYNEDKTIIVTVNGEIYNHEELRKGLPGHTFRTGSDCEVIAHLYEEHGESFIHMLDGIFSFVLLDSRNNSFVAARDAIGVTPLYIGWGLDGSVWISSEMKGLNDDCEHFKFFPPGHLYSSKEGSFKRWYNPPWFSEVIPSVPFDPLALRKAFEDAVIKRLMTDVPFGVLLSGGLDSSLVASVTARYLEGTKAAELWGTQLHSFCVGLEGSPDLKAAKEVANFLGTIHHEFHFTVQDGIDAIEDVIYHVETYDVTTIRASTPMFLMSRKIKSLGVKMVISGEGSDEIFGGYLYFHKAPNKEELHLETCHKIKALHQYDCLRANKATSAWGLEARVPFLDKEFVNVAMSIDPEWKMIKPDIGRIEKWILRRAFDDEENPYLPKHILYRQKEQFSDGVGYSWIDGLKAHSALHVTDKMMLNAAHIYPHNTPTTKEAYYYRMIFERFFPQIDSPWRSKCGLQHSKSY

SEQ ID NO: 26068 - protein, 362 aa, Nicotiana tabacum
MATAVSAAVSLPSSKSTSFSSRTSIISTDKINFNKVPLYYRNVSGGSRLVSIRAQVTTEAPAKVEKISKKQDEGVIVNKFRPKEPYVGRCLLNTKITGDDAPGETWHMVFSTEGEVPYREGQSIGVIADGVDANGKPHKLRLYSTASSALGDFGDSKTVSLCVKRLVYTNDKGEEVKGVCSNFLCDLKPGAEVKITGPVGKEMLMPKDPNATVIMLATGTGIAPFRSFLWKMFFEKHEDYKFNGTAWLFLGVPTSSSLLYKEEFEKMKEKAPENFRLDFAVSREQTNEKGEKMYIQTRMAQYAEELWTLLQKDNTFIYMCGLKGMEQGIDEIMSALAERDGIVWADYKKQLKKAEQWNVEVY

SEQ ID NO: 26069 - protein, 668 aa, Spinacia oleracea
MAVAWKSRASSIAFGIVLLGSLFAFVSAKDEAPKLGTVIGIDLGTTYSCVGVYKDGKVEIIANDQGNRITPSWVAFTNDERLIGEAAKNQAAANPERTIFDVKRLIGRKFEDKEVQKDMKLVPYKIVNRDGKPYIQVKVQEGETKVFSPEEISAMILTKMKETAETFLGKKIKDAVVTVPAYFNDAQRQATKDAGVIAGLNVARIINEPTAAAIAYGLDKRGGEKNILVFDLGGGTFDVSVLTIDNGVFEVLATNGDTHLGGEDFDQRLMEYFIKLIKKKHTKDISKDNRALGKLRRECERAKRALSSQHQVRVEIESLFDGVDFSEPLTRARFEELNNDLFRKTMGPVKKAMDDAGLEKNQIDEIVLVGGSTRIPKVQQLLKEFFNGKEPSKGVNPDEAVAFGAAVQGSILSGEGGEETKEILLLDVAPLTLGIETVGGVMTKLIPRNTVIPTKKSQVFTTYQDQQTTVTIQVFEGERSLTKDCRLLGKFDLTGIAPAPRGTPQIEVTFEVDANGILNVKAEDKASGKSEKITITNDKGRLSQEEIERMVREAEEFAEEDKKVKEKIDARNSLETYIYNMKNQISDADKLADKLESDEKEKIEGAVKEALEWLDDNQSAEKEDYDEKLKEVEAVCNPIITAVYQRSGGPSGESGADSEDSEEGHDEL

SEQ ID NO: 26070 - protein, 162 aa, Hordeum vulgare
MSAAEGAVVFSEEKEALVLKSWAIMKKDSANLGLRFFLKIFEIAPSARQMFPFLRDSDVPLETNPKLKTHAVSVFVMTCEAAAQLRKAGKITVRETTLKRLGGTHLKYGVADGHFEVTRFALLETIKEALPADMWGPEMRNAWGEAYDQLVAAIKQEMKPAE

SEQ ID NO: 26071 - protein, 828 aa, Brachyspira hyodysenteriae
MFQFHLTSKAKKVIELYAQEEAKRLNHDMVTPEHILLGLLYESEALATRVLMRLKIDLDRLKLELESAMVKSSTTKVFGTLPTAPRVQKLISRSAEEARALSHNYIGTEHLLLGLLREESGTAYNVLTSMGLELTILRQEILKMLGVAGSNISSMEQTSQEDNVKKVKTPTLDQFARDLTKMARDKALDRVIGRENEVMRVVQILSRRKKNNPILLGEPGVGKTAIVEGLAEKIVAADVPDILLKKRVLTLDLSSVVAGTKYRGEFEERIKNIVLEIKKASNIIIFIDELHTLIGAGGAEGALDAANMLKPALSRGEIQCIGATTINEYKKYIEKDGALVRRFQPINVEEPSIEDTIEILNGIKGKYEEHHKVKYTDEAINAAAVLSKRYIFERHLPDKAIDLIDEAGSRARLLNMTRPQEFKDLEKKIEELNQQKKRVVESQNFEDAAKIRDEITSLQEELSKKEEKCREEREKIETFIEEDDIRHVISEITNIPIKRLLNSESKRLIGMEEELHQKVVGQKEAISSISKAIRRSRAGLKTSKRPLGSFIFLGPTGVGKTALAKVLSEFMFGDSDALIRIDMSEFMEKFAVSRLIGAPPGYVGYEEGGGLTEKVRRKPYSLILFDEIEKAHPDVTNILLQVLEEGQLTDNFGRKVDFSNTIIIITSNLGARDIVKGSSLGFNAVGSEKDANDIKNFALEELKQNFNPEFLNRIDDIIVFHTLSKEDLKDIINIMLKELNEAIKERNIVINLSEEAKNYIIDKGFDKKYGARSLRRAIQKEIEDYVSTEILFGNIEDGDTINVDRNDGSLIFSYDKSVKTENKELSKS

SEQ ID NO: 26072 - protein, 1125 aa, Populus tremuloides
MSSSRPSHSSSNSARSRHSARIIAQTTVDAKLHADFEESGSSFDYSSSVRVTDSVGGDQPPRSDKVTTAYLHHIQKGKLIQPFGCLLALDEKTFRVVAYSENAPELLTMVSHAVPSVGEHPVLGIGTDIRTIFTAPSASALQKAMGFGDVSLLNPILVHCKTSGKPFYAIVHRVTGSLIIDFEPVKPYEVPMTAAGALQSYKLAAKAITRLQSLPSGSMERLCDTMVQEVFELTGYDRAMAYKFHDDDHGEVVSEVTKPGMEPYLGLHYPATDIPQASRFLFMKNKVRMIVDCHAKHVKVLQDEKLPFDLTLCGSTLRAPHSCHLQYMENMNSIASLVMAVVVNDGDEDGDTPDSANPQKRKRLWGLVVCHNTSPRFVPFPLRYACEFLAQVFAIHVNKELELENQIVEKNILRTQTLLCDMLMRDAPLGIVTQSPNIMDLVKCDGAVLFYRNKIWRLGITPSDLQLQDIAFWLSEYHMDSTGLSTDSLYDAGYPGALALGDVVCGMAAVRITSKDMLFWFRSQTAAEIRWGGAKHEPGEKDDGRRMHPRSSFKAFLEVVKTRSLPWKDYEMDAIHSLQLILRNTFKDIETMDVDTKTIHARLSDLKIEGMQELEAVTSEMVRLIETATVPILAVDVDGLVNGWNTKISELTGLLVDKAIGKHLLTLVEDSSVDIVKRMLFLALQGKEEQNIQFEIKTHGSKSECGPICLVVNACASRDLHENVVGVCFVGQDITGQKMVMDKFTRIEGDYKAIVQNRNPLIPPIFGTDEFGWCSEWNPAMTNLTGWKREEVLDKMLLGEVFGLNMACCRLKNQEAFVNLGVVLNTAMTGQESEKVSFGFFARTGKYVECLLCVSKKLDREGAVTGVFCFLQLASQELQQALHVQRLSEQTALKRLKALAYLKKQIWNPLSGIIFSGKMMEGTELGAEQKELLHTSAQCQCQLSKILDDSDLDSIIEGYLDLEMVEFTLREYYGCYQSSHDEKHEKGIPIINDALKMAETLYGDSIRLQQVLADFCRCQLILTPSGGLLTVSASFFQRPVGAILFILVHSGKLRIRHLGAGIPEALVDQMYGEDTGASVEGISLVISRKLVKLMNGDVRYMREAGKSSFIISVELAGGHKSQKRA

SEQ ID NO: 26073 - protein, 324 aa, Pseudomonas putida
MSSSEQLDDGFTGLKVIAKTEIAQGIFRFELAHPQGMLLPAFTAGAHLRVRVPNGSIRNYSLSNDPQERERYVIAVKRDANGRGGSVSMADDIEAGDLLPVATPQNEFELIENARQFIFVAGGIGITPILSMMRHLKASTDLPFKLYYCTRNPELTAFRDELLGAEFANTVVIHHDFGNRADAYDFWPVFDKPSSGTHVYCCGPRPLMDSVLDMTGHWPPGSIHFESFGVDQSRFAENRPFSVTLGRSGIDLEIPVDRSILEVLRDNGIRAPSSCESGTCGSCRTRLIEGDVEHRDMVLREDEQHDQIMICVSRARNDVLVLDL

SEQ ID NO: 26074 - protein, 315 aa, Pseudomonas putida
MIDAVVVSRNDEAQDICSFELAAVDGSLLRFSAGAHIDVHLPEGQVRQYSLCNHPEERHRYLIGVLKDPASRGGSRSLHEQIHNGARLRISAPRNLFPLAQGARRSLLFAGGIGITPILCMAEQLAASADFELHYCARSSERAAFIERMRGAAFADRLFVHFDEQPETALDIAQVLANPQADVHLYVCGPGGFMQHVLESAKAQGWQEACLHREYFAAAPVDTQGDGSFSVQLNSTGQVFEVPADQSVVHVLEQHGIAIAMSCEQGICGTCLTRVLSGTPEASRPVFLTEQEQALNDQFTPCCSRSKTPLLVLDL

SEQ ID NO: 26075 - protein, 317 aa, Pseudomonas sp. HR199
MIEVIISAMRLVAQDIISLEFVRADGGLLPPVEAGAHVDVHLPGGLIRQYSLWNQPGAQSHYCIGVLKDPASRGGSKAVHENLRVGMRVQISEPRNLFPLEEGVERSLLFAGGIGITPILCMAQELAAREQDFELHYCARSTDRAAFVEWLKVCDFADHVRFHFDNGPDQQKLNAAALLAAEAEGTHLYVCGPGGFMGHVLDTAKEQGWADNRLHREYFAAAPNVSADDGSFEVRIHSTGQVLQVPADQTVSQVLDAAGIIVPVSCEQGICGTCITRVVDGEPDHRDFFLTDAEKAKNDQFTPCCSRAKSACLVLDL

SEQ ID NO: 26076 - protein, 794 aa, Lupinus luteus
MPAKDDTSSDKEKSLELFLKIGLDERTAKNTVANNKVTTNLTSVINDAGVTDGCSRTVGNLLYTVATKYPANALPHRPTLLQYIVNSKVKTTAQLDAALSFLSATGSENLDLNKFEEACGVGVEVSTEDIKHAVDEVVEENKATILELRYRVNVGELLGHVRKRLPWADAKVVKQLVDAKLYEILGDRTAADNEKPKKKKEKPAKVEDKAAPVATSEKPLEEDLNPYLIFPNPEDNFKVHTEVPFSDGNILRCCNTKALLEKHLKATGGKVLTRFPPEPNGYLHIGHAKAMFVDFGLAKDRNGGCYLRFDDTNPEAEKKEYIDHIEEIVQWMGWEPFKITYTSNYFQELYEFAVELIRRGHAYVDHQTADEIKEYREKKLNSPWRDRPISESLKLFEDMRRGFIEEGKATLRMKQDMQSDNYNMYDLIAYRIKFTPHPHAGDKWCIYPSYDYAHCIVDSIENVTHSLCTLEFETRRASYYWLLHALGIYQPYVWEYSRLNVSNTVMSKRKLNRLVTEKWVDGWDDPRLMTLAGLRRRGMTPTAINAFVRGMGITRSDGTLISVERLEYHVREELNKTAPRAMVVLHPLKVVITNLEAKSAIEVDAKKWPDAQADDASAFYKIPFSNVVYIERSDFRMQDSKDYYGLAPGKSVILRYAFPIKCTEVILADDNETILEIRAEYDPSKKTKPKGVLHWVSQPSPGVDPLKVEVRLFERLFLSENPAELDNWLGDLNPHSKVEISNAYGVSLLKDAKLGDRFQFERLGYFAVDQDSTPEKLVFNRTVTLKDSYGKGGK

SEQ ID NO: 26077 - protein, 328 aa, Pseudomonas putida
MKLLIQPNNRLISFSPGANLLEVLRENGVAISYSCMSGRCGTCRCRVTDGSVIDSGTGSGLPHLVDEHYVLACRSVLTNNCAIEIPEADEIVTHPARIIKGTVVAIESPTHDIRRLRVRLAKPFEFSPGQYATLQFSPEHARPYSMAGLPDDQEMEFHIRKVPGGRVTEYVFEHVREGTSIKLSGPLGTAYLRQNHTGPMLCVGGGTGLAPVLSIIRGALKLGMTNPILLYFGVRSQQDLYDAERLHNLAADHPQLTVHTVIAMGPINESQRAGLVTDAIEKDISSLAGWRAYLCGAPAMVEALCTVTKHLGISPEHIYADAFYPGEI

SEQ ID NO: 26078 - protein, 304 aa, Anabaena variabilis
MTQAKAKHADVPVNLYRPNAPFIGKVISNEPLVKEGGIGIVQHIKFDLTGGNLKYIEGQSIGIIPPGVDKNGKPEKLRLYSIASTRHGDDVDDKTISLCVRQLEYKHPESGETVYGVCSTYLTHIEPGSEVKITGPVGKEMLLPDDPEANVIMLATGTGIAPMRTYLWRMFKDAERAANPEYQFKGFSWLVFGVPTTPNILYKEELEEIQQKYPDNFRLTYAISREQKNPQGGRMYIQDRVAEHADELWQLIKNQKTHTYICGLRGMEEGIDAALSAAAAKEGVTWSDYQKDLKKAGRWHVETY

SEQ ID NO: 26079 - protein, 653 aa, Malus x domestica
QIKTQLEPHENSLLRQENNKLRAENMSIREAMRNPICSNCGGPAIIGDISLEEQHLRIENARLKDDLDRVCALAGKFLGRPISSLGASMGPPLPSSTLELGVGSNGFGGMSNVATSMSMGNDFGGGIGSAMSVVSHGRPSVTGLDRSMERSIFLELALAAMDELVKMAQTDEPLWLRSLEGGREVLNHEEYMRNFTPCIGLKPNGFVSEASRESGTVIINSLTLVETLMDSNRWLEMFPGVLARTSTTDVISSGMGGTRNGALQLMHAELQVLSPLVPVREVNFLRFCKQHAEGVWAVVDVSVDAIRDTTGVPTFMNCRTLPSGCVVQDMPNGYSKVTWVEHAEYDESQVHHLYRPLLSSGMGFGAQRWVSTLQRQSECQAILMSSCVTSRDHTAITASGRRSMLKLAQRMTDNFCAGVCASTVHKWTKLNAGNVDEDVRVMTRESLYHPGEPPGVVLSAATSVWLPFSPQRLFDFLRDERLRSEWDILSNGGPMQEMAHIAKGQDPGNCVSLLRARANANQGSMLILQETCIDAAGSLVVYAPVDIPAMHVVMNGGDSAYVALLPSGFAIVPDGPGSRGPMFGKGGSHGSGNSGGGVDDGGHRVSGSLLTMTFQILVNSLPTAKLTVESVETVNHLISCTVQKIKAALHCES

SEQ ID NO: 26080 - protein, 142 aa, Thermotoga maritima
MLLGRREDIFRPFRELQREIDRLFDDFFRTEVRPAPDMDVFETDDEVVIEVEIPGIDRKDVQITVEENILKISGEKKLEREQKGKNYYYVERSAGKFERAIRLPDYVDVEKIKAEYKNGVLTIRVPKKEERKKKVIEVEVQE

SEQ ID NO: 26081 - protein, 179 aa, Dendrobium grex Madame Thong-In
LTLTKCCMQRGSHFRSRSGSQEARSGSSMSRCNSMDTKFCYYNNYNVNQPRHFCKNCQRYWTAGGSMRNVPVGAGRRKNKHTGSVYRHTVITPDSLASLQVDGPDLVDHKPLSPFKVNGTILKFGPDAPLCESMASILNLGEQNLSSQLDFTAGAENREETSCSSACKPVKKKDITQHN

SEQ ID NO: 26082 - protein, 1025 aa, Yarrowia lipolytica
MPSISHKPITAKLVAAPDATKLELSSYLYQQLFSDKPAEPYVAFEAPGIKWALYPASEDRSLPQYTCKADIRHVAGSLKKFMPVVLKRVNPVTIEHAIVTVPASQYETLNTPEQVLKALEPQLDKDRPVIRQGDVLLNGCRVRLCEPVNQGKVVKGTTKLTVAKEQETIQPADEAADVAFDIAEFLDFDTSVAKTRESTNLQVAPLEGAIPTPLSDRFDDCESRGFVKSETMSKLGVFSGDIVSIKTKNGAERVLRLFAYPEPNTVKYDVVYVSPILYHNIGDKEIEVTPNGETHKSVGEALDSVLEAAEEVKLARVLGPTTTDRTFQTAYHAGLQAYFKPVKRAVRVGDLIPIPFDSILARTIGEDPEMSHIPLEALAVKPDSVAWFQVTSLNGSEDPASKQYLVDSSQTKLIEGGTTSSAVIPTSVPWREYLGLDTLPKFGSEFAYADKIRNLVQISTSALSHAKLNTSVLLHSAKRGVGKSTVLRSVAAQCGISVFEISCFGLIGDNEAQTLGTLRAKLDRAYGCSPCVVVLQHLESIAKKSDQDGKDEGIVSKLVDVLADYSGHGVLLAATSNDPDKISEAIRSRFQFEIEIGVPSEPQRRQIFSHLTKSGPGGDSIRNAPISLRSDVSVENLALQSAGLTPPDLTAIVQTTRLRAIDRLNKLTKERPIATLDDLLTLSHGTLQLTPSDFDDAIADARQKYSDSIGAPRIPNVGWDDVGGMEGVKKDILDTIETPLKYPHWFSDGVKKRSGILFYGPPGTGKTLLAKAIATTFSLNFFSVKGPELLNMYIGESEANVRRVFQKARDAKPCVVFFDELDSVAPQRRNQGDSGGVMDRIVSQLLAELDGMSTAGGEGVFVVGATNRPDLLDEALLRPGRFDKMLYLGISDTHEKQQTIMEALTRKFRLAADVSLEAISKRCPFTFTGADFYALCSDAMLNAMTRTANEVDAKIKLLNKNREEAGEEPVSIRWWFDHEATKSDIEVEVAQQDFEKAKDELSPSVSAEELQHYLKLRQQFEGGKK

SEQ ID NO: 26083 - protein, 212 aa, Arabidopsis thaliana
MEGSSKGLRKGAWTTEEDSLLRQCINKYGEGKWHQVPVRAGLNRCRKSCRLRWLNYLKPSIKRGKLSSDEVDLLLRLHRLLGNRWSLIAGRLPGRTANDVKNYWNTHLSKKHEPCCKIKMKKRDITPIPTTPALKNNVYKPRPRSFTVNNDCNHLNAPPKVDVNPPCLGLNINNVCDNSIIYNKDKKKDQLVNNLIDGDNMWLEKFLRKAKR

SEQ ID NO: 26084 - protein, 329 aa, Bradyrhizobium japonicum
MTKYKLEYIWLDGYTPTPNLRGKTQIKEFASFPTLEHVPLWGFDGSSTQQAEGHSSDCVLKPVAVFPDAARTNGVLVMCEVMMPDGKTPHASNKRATILDDAGAWFGFEQEYFFYKDGRPLGFPTSGYPAPQGPYYTGVGFSNVGDVARKIVEEHLDLCLAAGINHEGINAEVAKGQWEFQIFGKGSKKAADEMWMARYLMLRLTEKYGIDIEFHCKPLGDTDWNGSGMHANFSTEYMRTVGGKEYFEALMAAFDKNLMDHIAVYGPDNDKRLTGKHETAPWNKFSYGVADRGASIRVPHSFVNNGYKGYLEDRRPNSQGDPYQIVRRS

SEQ ID NO: 26085 - protein, 351 aa, Streptomyces clavuligerus
VSTAVSPRYAQPATFMRLRHRPDPIGHDVVVVGAPYDGGTSYRPGARFAPRAIRHESSLIHGVGIDRGPGVFDRIDVVDGGDIDLSPFSMDLAMDTATVALTRLLERNDAFLMLGGDHSLSLAALRAVHARHGRVAVLHLDAHSDTNPPVYGGTYHHGTPFRWAIEEGLVDPERLVQVGIRGHNPRPDSLDYARGHGVSIVTAADFTRRSPRGIAEQIRRTVGGLPLYVSVDIDVVDPAYAPGTGTPAPGGLSSREVLTLLDVVGQLRPVGFDVVEVSPAYDPSGITSLLAAEIGAELLYQYARATTSPASAPVDSPLPPGAAADDAENAENAVDAVDAESAVDFAGQRWG

SEQ ID NO: 26086 - protein, 321 aa, Salmonella typhimurium LT2
MSDALLNAGRQTLMLELQEASRLPERLGDDFVRAANIIIHCEGKVIVSGIGKSGHIGKKIAATLASTGTPAFFVHPAEALHGDLGMIESRDVMLFISYSGGAKELDLIIPRLEDKSVALLAMTGKLHSPLGRAAKAVLDISVEREACPMHLAPTSSTVNTLMMGDALAMAVMQARGFNEEDFARSHPAGALGARLLNNVHHLMRQGDAIPQVMLATSVMDAMLELSRTGLGLVAVCDEQHVVKGVFTDGDLRRWLVGGGALTTPVSEAMTPNGITLQAQSRAIDAKELLMKRKITAAPVVDENGKLTGAINLQDFYQAGII

SEQ ID NO: 26087 - protein, 447 aa, Salmonella typhimurium LT2
MTTILKHLPAGQRIGIAFSGGLDTSAALLWMRQKGAVPYAYTANLGQPDEDDYDAIPRRAMEYGAENARLIDCRKQLVAEGIAAIQCGAFHNTTGGLTYFNTTPLGRAVTGTMLVAAMKEDGVNIWGDGSTYKGNDIERFYRYGLLTNAELQIYKPWLDTDFIDELGGRHEMSEFMIACGFDYKMSVEKAYSTDSNMLGATHEAKDLEFLNSSVKIVNPIMGVKFWDESVKIPAEVVTVRFEQGHPVALNGKTFSDDVEMMLEANRIGGRHGLGMSDQIENRIIEAKSRGIYEAPGMALLHIAYERLLTGIHNEDTIEQYHSHGRQLGKLLYQGRWFDSQALMLRDGLQRWVASQITGEVTLELRRGNDYSILNTVSDNLTYKAERLTMEKGESVFSPDDRIGQLTMRNLDITDTREKLFGYAKAGLLTASSATGLPQVENLENKGK

SEQ ID NO: 26088 - protein, 512 aa, Catharanthus roseus
MALEKLVLFDFLAAISILILVQKFIQIVFLRSSSRIRLPPGPKGWPIIGALPYLGTMPHSILANMAKKYGPIMYLKLGTNGMVVASTPDAVKAFLRTLDMNFSNRPIDAGATHLAYNAQDMVFAHYGPKWKLLRKLSNLHMLGGKALENWSNVRATELGYMLQAMYESSRKGETVVVPEMLTYAMANMIGQVILSRRVFVTKSLESNEFKDMVVELMTTAGYFNIGDFIPSIAWMDLQGIERGMKRLHKKFDALLTKMLEEHKSSSHKRKEKPDFLDYVLANRDNSEGERLTTTNIKALLLNLFTAGTDTSSSVIEWAISEMLKNPTILKRAQEEMDQVIGRNRRLMESDIPKLPYLQAICKETFRKHPSTPLNLPRIAQKDCQVNGYYIPKGTRLSVNIWAIGRDPNVWENPLEFNPDRFLSGKMAKIEPRGNDFELIPFGAGRRICAGTRMGIVLVEYILGTLVHSFDWKLPFDDINELNMDESFGLALQKAVPLVAMVSPRLPINAYSP

SEQ ID NO: 26089 - protein, 354 aa, Bdellovibrio bacteriovorus HD100
MAPFLLYRQSVMKFIDEVSISLASGRGGPGCVSFRRESMQARGGPDGGNGGKGGDVIIRTSRHINSLVDIRQNKRYAAQSGRMGEGRQKSGMDGEDLILIVPQGTVFRNMDGEIIIDMTGISEHTLLKGGRGGKGNEFFKNSVNQAPEHAQPGEEGQEIEVRLELKLIADVGIVGFPNAGKSTLISRISAARPKIADYPFTTLTPNLGVVKAGDYSSFVVADIPGLVKGAHAGVGLGIQFLKHIERTRLFIHLVDASGMSGRDPLEDYTDINNELKMYDENNQDKEGFFPLSTRPQLVVLNKIDTLSESQLTKLKKQFKEASGSEPFAISAVTGKNIKEFVQELARQILKEEEE

SEQ ID NO: 26090 - protein, 439 aa, Pichia angusta
MSSASEFLDKGVDLVKKAIEADSTSKYDEAYRLYYNGLDYLMLALKYEKNPKSKETIRSKFTEYLSRAEQLKEYLDKKQQQDQTGEASATSGSVKAKKTSGGEDDDNDSDTKKLRGALASSILSERPNVQWSDIAGLELAKEALKEAVILPVKFPHLFRGKRKPVSGILLYGPPGTGKSYLAKAVATEANSTFFSVSSSDLVSKWMGESERLVKQLFTMAREQKPAIIFIDEVDALCGPRGEGESEASRRIKTELLVQMNGVGNDSDGVLVLGATNIPWQLDAAIRRRFERRIYIPLPDQEARVEMFKLNIGDTPCSLTTQDYHTLAQMTDGYSGHDVSVVVKDALMQPIRKIQMATHFKKVVSTDEEGRELVQYTPCSPGDSEAIEMSWLDLDGEQLKEPELGIKDFIKAIKTNKPTVNQKDLEKFIEFTNDFGSEGN

SEQ ID NO: 26091 - protein, 602 aa, Pichia angusta
MSYQRAVPSSSNHTMPERDRLDELLDAVKKEFDNLTRETTIYKDHHHDYELKINQQHQELTNIRNTVYELEQAHRTMKEAYEKEILRLKQDLENRDRLFQQQSLQQAQAQAQAQAQVKAQVQSQQHPLLDRPQGAFPQTPQQLPPPNLSGSPSDYRGAGFNGALPQINAQASGAKPEISQSTQLPPPPPVSTQEQQAASQTQTSPEQPPTAVQTSVVKTEADAGYVMRSQHNKPIPTFLKDFDSYSTLPYKKQHSEYYIVYNPKVPKKVDTSLVHSFDHTSVVCCVRFSKDGKFLATGCNKLTQVFSVETGDLVARLSDESSASSNGSYDTDTGDLYIRSVCFSPDGKFLATGAEDKIIRIWDLATRTIVKYLKGHEQDIYSLDFFPDGSKLVSGSGDRTVRIWDVFTGQCSLTLSIEDGVTTVAASPDGKLIAAGSLDRTVRVWDANQGFLVERLDSANESGNGHMDSVYSVAFTHDGKEIASGSLDRTVKLWSLKDLQKQQGSSKSNCEVTYVGHKDFVLSVCCTPDDEFILSGSKDRGVIMWEKATGEPYIMLQGHRNSVISVNVSPVMTQKRGVNGGYFATGSGDCKARIWRWEKVSS

SEQ ID NO: 26092 - protein, 392 aa, Asarum canadense
DLEPVNPSDVPVTAAGALKSYKLAAKAISKLQSLPSGNISLLCDVVVREVSDLTGYDRVMAYKFHEDEHGEVIAECKISDLEPYHGLHFPATDIPQASRFLFMKNKVRMICDCSAPPVKVIQDKRLAQPISLGGSTLRAPHGCHAQYMANMGSIASLVLSVTISEDDDETCDKQKGRKLWGLVVCHHTSPRFIPFPLRYACEFLIQVFGIQLNKEVELAAQMRETHILRTQIMLCDMLLRDAPMTIVTQSPNVMDLVRCDGAALYYRKESWLLGVTPTKAQIQDLAEWLLKYHNGTTGLSTDSLVEAGYPRAHNLGDMVCGMAAVRITSQDFLFWFRSHTGKEVKWGGAKHDPADKDDDRGKMHPRSSFKAFMEVMKRRSLPWEDMEMDAIQ

SEQ ID NO: 26093 - protein, 392 aa, Buxus sempervirens
DLEPVNPLDPPVTATGALKSYKLAAKAISRLQSLPNGNISLLCDVLVREVSELTGYDRVMVYKFHEDEHGEVVAETHRTNLEPYLGLHFPATDIPQASRFLFMKNKVRMICDCLAPPVRVVQDKRLERPLSLCSSTLRAPHGCHAQYMKNMGSIASLVMSVTINEDDDEMDSDQQKGRKLWGLVVCHHTSPRFVPFPLRYACEFLIQVFSIQLNKEVELAAQVREKHILRNQSMLCGMLLRESPVGIITQSPNVMDLVKCDGAALYYKDKFWLLGVTPTEAQISDIAGWLLEYHNGSTGLSADSLLEAGYPGASVLGDAVCGMAAIKLTSKDFLFWFRSRTGKEIKWGGAKHEPFDKDEGRKMHPRSSFKAFLEVVKWRSLPWEDIEMDAIQ

SEQ ID NO: 26094 - protein, 394 aa, Carludovica palmata
ELEPVNPADVPVSAAGALKSYKLAAKAISRLQSMPSGNTSLLCDVLVKEVSELTGYDRVMAYKFHEDQSGEVISECRRPELEPYLGLHYPATDIPQASRFLFMKNKVRMICDCSAPPVKVIQDKRLAQPLSLCGSTLRAPHGCHAQYMANMGSIASLVMSVTINEDDDETGRDQQQKGRKLWGLVVCHHTSPRFVPFPLRYACEFLMQVFGIQLNKEVELAAQAKAKHILRTQTLLCDMLLRDAPIGIFTRSPNVMDLVKCDGAALFYRNQFWLLGTTPTEAQIRDIVAWLQEYHDGTTGLSTDSLAEAGYPGASELGDAVCGMAAINVTNKDFILWFRSHMAKEIKWGGAKRDSFNRNDEGRQMHPRSSFKAFLEVVKRRSLPWEDMEMDAIQ

SEQ ID NO: 26095 - protein, 460 aa, Euptelea polyandra
SGKPFYAIIHRIDVGLVIDLEPVSPAEVPVAAAGILKSYKLSAKAISRLQSLPSGNISLLCDVLVQEVSDLTGYDRVMVYKFHEDEHGEVVAECLRSNLEPYLGFHYPATDIPQASRFLFMRNKVRMICDCSARPVKVIQDKSLAQPLSLCGSTLRAPHGCHAQYMANMGSIASLVMSVTIDENDDEIQTDQQKGRVLWGLVVCHHTSPRFVPYPLRHACEFLIQVFGIQLNKEVELATQLREKHILQTQTVLCDMLLRDAPVGIVTQSPNVMDLVRCDGAALYYKNQFWLLGLTPTEAQIRDIAGWILEHHDGSTGVSIDSLMEAGYPGSSVLGDVVSGMAAIKITSKDFLFWFRSHTAKEIKWGGAKHDHVDKDDGRKMHPRSSFKAFLEVVKRRCLPWEDVEMDAIHSLQLILRGSLKDETVNDSKTIVNALMVDARIQGVDELCNVTNEMVRLMEK

SEQ ID NO: 26096 - protein, 395 aa, Joinvillea ascendens
DLEPVNPADVPVTAAGALKSYKLAAKAISRLQSLPSGNLSLLCDVLVREVSELTGYDRVMAYKFHEDEHGEVIAECRRSDLEPYLGLHYPATDIPQASRFLFMKNKVRMICECSAPPVKVVQDDRLAQPLSLCGSTLRAPHGCHAQYMANMGSIASLVMSVTINEDDDDDTGSEQQQKGRKLWGLVVCHHTSPRFVPFPLRYACEFLLQVFGIQLNKEVELAAQAKERHILCTQTLLCDMLLRDAPVGIFNQSPNVMDLVKCDGAALYYQNHFWLLGSTPSEAQIKNIAEWLLEYHDGSTGLSTDSLTEAGYPGAAALGEVVCGMAAIKISSKDFIFWFRSHTAKEITWGGAKHEPVDRDDGGRKMHPRSSFKAFLEVVRWRSVPWEDIEMDAIQ

SEQ ID NO: 26097 - protein, 392 aa, Knema latericia
DLEPVNPSDVPITAAGALKSYKLAAKAISRLQSLPSGNISLLCDVLIREVSELTGYDRVMAYKFHEDDHGEVIAECRRSDLEPYLGLHYPATDIPQASRFLFMKNKVRMICDCFAQPVKVIQDERLEQPLSLCGSTLRAPHGCHAQYMANMGSIASLAMSVTINEDGDDASGQQQQRGKKLWGLVVCHHTSSRFVPFPLRYACEFLIQVFGIQLNKEVELAAQRREKHILQTQTVLCDMLLRDTPVGIVTQSPNVMDLVKCNGAALYYRNQFWLLGTTPTETQIRDIAGWLLEYHDATTGLSTDSLTEAGYPGAPDLGDDVCGMAAIKITSKDFLFWFRSHTAKEIKWGGAKHDPVDKDDDGRKMHPRSSFKAFLEVVKQRSLPWEDVEMDA

SEQ ID NO: 26098 - protein, 394 aa, Liriodendron tulipifera
DLEPVNPADVPVTAAGALKSYKLAAKAISRLQSLPSGNISLLCDVLVREVSELTGYDRVMAYKFHEVEHGEVIAECRRSELEPYLGLHYPATDIPQASRFLFMKNKVRMICDCLALPVRVIQDKKLAQPLSLCGSTLRAPHGCHSQYMASMGSIASLVMSVTINEDDDDTSSEQQQKGRKLWGLVVCHHTSPRFVPFPLRYACEFLVQVFGIQLNKEVELAAQMRERHILRMQTVLCDMLLRDAPVGIITQSPNVMDLVKCDGAALYYRNQFWLLGTTPMEAQIRDIAGWLLEYHDSTTGLSTDSLTEAGYPGAADLGDDVCGMAAIKITSKDFLFWFRSHTAKEIKWGGAKHDPVDKDDDGRKMHPRASFKAFLEVVKRRSLPWEDVEMDAIQ

SEQ ID NO: 26099 - protein, 396 aa, Meliosma squamulata
ELEPVNPDDVPVTAAGALKSYKLAAKAISRLQSLPSGNITLLCEVLVREVRDLTGYDRVMVYKFHEDEHGEVIAECRRSDLEPYLGLHYPATDIPQASRFLFMKNKIRMICDCSSQPVKIIQDKRLAQPLSLGGSTLRAPHGCHAQYMANMGSIASLVMSVTINDDDDDDDDTSESDKKKGRKLWGFVVCHHTSPRFVPFPLRYACEFLSQVFGIQLNKEVELAAQLKEKHILKTQTMLCDMLLRDAPMGIITQSPNVMDLVKCNGATLYYNNKFWLLGITPTEEQIRDIIGWLFENHDQSTGLSTDSLVEAGYPGALFLGNAVCGMAAIKITSKDFLFWFRSHTAKEIKWGGAKHDPIDKDDGRKMHPRSSFRAFLEVVKWRSIPWEDIEMDAIQ

SEQ ID NO: 26100 - protein, 389 aa, Platanus occidentalis
DLEPVNPDDVPVTAAGALKSYKLAAKAISKLQSLPSRNISLLCDVMVREVSDLTGYDRIMVYKSHEDEHGEVVAECRRPDLEPYLGLHYPATDIPQLSRFIFLKNKVRMICDCSAPPVKVVQDKKLAQPLSLGGSTLRAPHGCHAQYMANMGSIASLVMSVTINEDDDEGDQQNGRKLWGLVVCHHTSPRFVPFPLRYACEFLIQVFGIQLNKEVELAAQSREKHILRIQTMLCDMLLRDAPVGIVTQSPNVMDLVKCDGAALYYRNKFWLLGITPTEAQIKDIAGWFLEYHDQSTGLSTDSLMEAGYPGALVLGDAVCGMAAIKITSKDFLFWFRSHTAKEIKWGGAKHDPVDKDDGRKMNPRSSFKAFLEVVKRRSLPWEDVEMDAI

SEQ ID NO: 26101 - protein, 393 aa, Sabia swinhoei
DLEPVNPDDVPVTAAGALKSYKLAAKAISRLQSLPSGNISLLCDVLVREVSDLTGYDRVMVYKFHEDEHGEVIAECRRSDLEPYLGLHYPATDIPQASRFLFMKNKVRMICDCSARPVKVVQDKRLARPLSLCGSTLRAPHGCHAQYMANMGSIASLVMSVTINEDDDDEMESDQKKGRKLWGFVVCHHTSPRFVPFPLRYACEFLIQVFGIQVNKESELAAQLREKHILQTQTMLCDMLLRDAPVGIVSQSPNVMDLVKCSGAALYYKNKFWLLGVTPTEEQIRDIIGWFVENHGQSTGLSTDSLMEAGYPGASVLGDAVCGMAAIKITSKDFLFWFRSHTAKEIKWGGAKHDPVDKDDGRKMHPRSSFKAFLEVVKRRSLPWEDIEMDAIQ

SEQ ID NO: 26102 - protein, 394 aa, Tofieldia calyculata
DLEPVNPADVPVTAAGALKSYKLAAKAISKLQSLPSGDISLLCDVLVREVSDLTGYDRVMVYKFHEDEHGEVLAEFKRSDLEPYLGLHYPATDIPQASRFLFMKNKVRMICDCAAIPVKVIQDERLAQCLSLCGSTLRAPHGCHAQYMANMGSIASLVMSVTISEDDNETDSDQQEKGRKLWGLVVCHHTNPRFVPFPLRYACEFLIQVFGIQLNKEVELAAQTREKHILQTQAVLCDMLLRDFPIGIFTQSPNVMDLVKCDGAALYYRNQFWLLGITPTEKQIRDIAGWLLEYHGCSTGLSTDSLLEAGYPGASVLGDAVCGMTASRINSKEFVFWFRSHTAKEIKWGGAKHDPVDKGDDGRKMHPRSSFEAFLEVVKRRSLPWEDVEMDAIQ

SEQ ID NO: 26103 - protein, 689 aa, Petroselinum crispum
MVLKKSQEYGFRGYQVPAIPRGPRSLRRRASFKKPVDDGEICAFELLATVAGKLLQESESSTSSNVAELKDQIRIHKDGIKKELPEGSGVRSECLDQGSCIESVLVPDFAALERNSKATVEVPHIESVYVPERVSAVPSSEFLVKGRYNVKPEKRTSDDAAGSLASKLKGTFSSDGPLYESNIEKEPRRQIEVVKKQRGHLDMVKTSASKNPTEFYVNNTHMLINSENSVDLPLYRAQEPDAPSPRHRSDVKIVNRDDDENYFRSNVLNTKTRAFRPQARMNYRRMRKLQTARYWKAYPKMKDYELSNISRGARAFYHKRKTVYAEERYQYDVQTKRRRLFGHRSDQEASSESISNCPDKAVKGHKSGTPSIWHKVSGVSSSGTGHKSSMHSKDPRVNFSIKSFEVPELYIEVPETATIGSLKRTVMDAVTSILGGGIRVGVVLQGKKVKDDSRTLQQSGISQNEDLESLGFTLEPSFVEAASPLSQEGSPLLLPCDVNQELSRTPAPILDSGFSKSFDQTPLAKLDNHVESNPAPSVTDVSTEETAMDSKALVAIPPINAEALAMVPMSQKTKRSDLSQRRTRRPFSVSEVEALVEAVETLGTGRWRDVKMRSFDDANHRTYVDLKDKWKTLVHTASIAPQQRRGEPVPQDLLDRVLAAHAYWSQHQSKQHGKHHQMEPLKLAGEVVV

SEQ ID NO: 26104 - protein, 356 aa, Datisca glomerata
MSLLSDLVNLNLSDSTEKVIAEYIWIGGSGLDIRSKARTLPGPVSDPSKLPKWNYDGSSTGQAPGKDSEVILYPQAIFRDPFRRGNNILVMCDAYTPAGEPIPTNKRCAAAKIFSHPNVVAEVPWYGIEQEYTLLQKDVKWPIGWPVGGFPGPQGPYYCGVGADKAFARDVVDAHYKACLYAGVNISGINGEVMPGQWEFQVGPSVGISAGDELWVARYILERITEIAGVVLSFDPKPIQGDWNGAGAHTNYSTKSMREKGGYEVIKKAIEKLGLRHKEHIAAYGEGNERRLTGRHETADINTSLWGVANRGASIRVGRDTEKEGKGYFEDRRPASNMDPYVVTSMIAETTLLWKP

SEQ ID NO: 26105 - protein, 289 aa, Datisca glomerata
DGSSTGQAPGEDSEVILYPQAIFKDPFRRGNNILVICDAYTPAGEPIPTNKRHAAAKTFSHPDVVAEVPWYGIEQEYTLLQKDIKWPIGWPVGGYPGPQGPYYCGAGADKAFGRDIVDAHYKACLYAGINISGINGEVMPGQWEFQVGPAVGISAGDELWVARYILETITEIAGVVVSFDPKPIQGDWNGAGAHTNYSTKSMREDGGYEKIKAAIEKLGKRHKEHIPAYGEGNERRLTGKHETADINTFLWGVANRGASIRVGRDTEKAGKGYFEDRRPASNMDPYVVL

SEQ ID NO: 26106 - protein, 126 aa, Escherichia coli
  misc_feature (78)..(78): Xaa can be any naturally occurring amino acid
  unsure (1)..(126): unsure at all Xaa locations
MIRTMLQGKLHRVKVTHADLHYEGSCAIDQDFLDAAGILENEAIDIWNVTNGKRFSTYAIAAERGSRIISVNGAAAHXASVGDIVIIASFVTMPDEEARTWRPNVAYFEGDNEMKRTAKAIPVQVA

SEQ ID NO: 26107 - protein, 126 aa, Escherichia coli
MIRTMLQGKLHRVKVTHADLHYEGACAIDQDFLDAAGILENEAIDIWNVTNGKRFSTYAIAAERGSRIISVNGAAAHCASVGDIVIIASFVTMPDEEARTWRPNVAYFEGDNEMKRTAKAIPVQVA

SEQ ID NO: 26108 - protein, 143 aa, Escherichia coli
  misc_feature (95)..(95): Xaa can be any naturally occurring amino acid
  unsure (1)..(143): unsure at all Xaa locations
MRGSHHHHHHGLVPRGSMIRTMLQGKLHRVKVTHADLHYESSCAIDQDFLDAAGILENEAIDIWNVTNGKRFSTYAIAAERGSRIISVNGAAAHXASVGDIVIIASFVTMPDEEARTWRPNVAYFEGDNEMKRTAKAIPVQVA

SEQ ID NO: 26109 - protein, 143 aa, Escherichia coli
  misc_feature (95)..(95): Xaa can be any naturally occurring amino acid
  unsure (1)..(143): unsure at all Xaa locations
MRGSHHHHHHGLVPRGSMIRTMLQGKLHRVKVTHADLHYEGTCAIDQDFLDAAGILENEAIDIWNVTNGKRFSTYAIAAERGSRIISVNGAAAHXASVGDIVIIASFVTMPDEEARTWRPNVAYFEGDNEMKRTAKAIPVQVA

SEQ ID NO: 26110 - protein, 144 aa, Escherichia coli
MRGSHHHHHHGLVPRGSMIRTMLQGKLHRVKVTHADLHYEGSACAIDQDFLDAAGILENEAIDIWNVTNGKRFSTYAIAAERGSRIISVNGAAAHCASVGDIVIIASFVTMPDEEARTWRPNVAYFEGDNEMKRTAKAIPVQVA

SEQ ID NO: 26111 - protein, 143 aa, Escherichia coli
MRGSHHHHHHGLVPRGSMIRTMLQGKLARVKVTHADLHYEGSCAIDQDFLDAAGILENEAIDIWNVTNGKRFSTYAIAAERGSRIISVNGAAAHCASVGDIVIIASFVTMPDEEARTWRPNVAYFEGDNEMKRTAKAIPVQVA

SEQ ID NO: 26112 - protein, 144 aa, Escherichia coli
MRGSHHHHHHGLVPRGSMIRTMLQGKLHRVKVTHADLHYEAGSCAIDQDFLDAAGILENEAIDIWNVTNGKRFSTYAIAAERGSRIISVNGAAAHCASVGDIVIIASFVTMPDEEARTWRPNVAYFEGDNEMKRTAKAIPVQVA

SEQ ID NO: 26113 - protein, 357 aa, Pinus sylvestris
MSSVLTDLLNLDLSDVTEKVIAEYIWIGGSGMDMRSKARSLSGPVSSVKELPKWNYDGSSTGQAQGHDSEVILYPQAIFRDPFRRGKHILVICDAYSPNGTAIPSNKRAAAAKIFNEKAVSDEETWYGLEQEYTLLQKDVKWPLGWPIGGYPGPQGPYYCGVGADKAWGRDIVDAHYKACLYAGINISGINGEVMPGQWEFQVGPSVGISAADELWCARFIMERITEKAGVVLSFDPKPIEGDWNGAGCHTNYSTKSMRKEGGFEVIKKAIEKLKLRHKEHISAYGEGNERRLTGRHETADMNTFSRGVANRGASVRVGRDTEKEGKGYFEDRRPASNMDPYIVTSMIAETTILWKP

SEQ ID NO: 26114 - protein, 573 aa, Streptomyces clavuligerus
  misc_feature (1)..(1): Xaa can be any naturally occurring amino acid
  misc_feature (85)..(85): Xaa can be any naturally occurring amino acid
  misc_feature (132)..(132): Xaa can be any naturally occurring amino acid
  misc_feature (157)..(157): Xaa can be any naturally occurring amino acid
  misc_feature (272)..(272): Xaa can be any naturally occurring amino acid
  misc_feature (284)..(284): Xaa can be any naturally occurring amino acid
  misc_feature (306)..(306): Xaa can be any naturally occurring amino acid
  misc_feature (382)..(382): Xaa can be any naturally occurring amino acid
  misc_feature (391)..(391): Xaa can be any naturally occurring amino acid
  misc_feature (395)..(395): Xaa can be any naturally occurring amino acid
  misc_feature (450)..(450): Xaa can be any naturally occurring amino acid
  unsure (1)..(573): unsure at all Xaa locations
XSRVSTAPSGKPTAAHALLSRLRDHGVGKVFGVVGREAASILFDEVEGIDFVLTRHEFTAGVAADVLARITGRPQACWATLGPGXTNLSTGIATSVLDRSPVIALAAQSESHDIFPNDTHQCLDSVAIVAPXSKYAVELQRPHEITDLVDSAVNAAXTEPVGPSFISLPVDLLGSSEGIDTTVPNPPANTPAKPVGVVADGWQKAADQAAALLAEAKHPVLVVGAAAIRSGAVPAIRALAERLNIPVITTYIAKGVLPVGHELNYGAVTGYXDGILNFPALQTXFAPVDLVLTVGYDYAEDLRPSXWQKGIEKKTVRISPTVNPIPRVYRPDVDVVTDVLAFVEHFETATASFGAKQRHDIEPLRARIAEFLADPETYEDGXRVHQVIDSXNTVXEEAAEPGEGTIVSDIGFFRHYGVLFARADQPFGFLTSAGCSSFGYGIPAAIGAQXARPDQPTFLIAGDGGFHSNSSDLETIARLNLPIVTVVVNNDTNGLIELYQNIGHHRSHDPAVKFGGVDFVALAEANGVDATRATNREELLAALRKGAELGRPFLIEVPVNYDFQPGGFGALSI

SEQ ID NO: 26115 - protein, 482 aa, Escherichia coli
MSRLVVVSNRIAPPDEHAASAGGLAVGILGALKAAGGLWFGWSGETGNEDQPLKKVKKGNITWASFNLSEQDLDEYYNQFSNAVLWPAFHYRLDLVQFQRPAWDGYLRVNALLADKLLPLLQDDDIIWIHDYHLLPFAHELRKRGVNNRIGFFLHIPFPTPEIFNALPTYDTLLEQLCDYDLLGFQTENDRLAFLDCLSNLTRVTTRSAKSHTAWGKAFRTEVYPIGIEPKEIAKQAAGPLPPKLAQLKAELKNVQNIFSVERLDYSKGLPERFLAYEALLEKYPQHHGKIRYTQIAPTSRGDVQAYQDIRHQLENEAGRINGKYGQLGWTPLYYLNQHFDRKLLMKIFRYSDVGLVTPLRDGMNLVAKEYVAAQDPANPGVLVLSQFAGAANELTSALIVNPYDRDEVAAALDRALTMSLAERISRHAEMLDVIVKNDINHWQECFISDLKQIVPRSAESQQRDKVATFPKLALEHHHHHH

SEQ ID NO: 26116 - protein, 1943 aa, Cochliobolus heterostrophus
MADDKKPTTLAPPAVTALKHEATTSPGHRHGMERTVSQDMRNERADLKEAAEHSLNIIMDLDLEGKIRYVSPSWTDVIGTLPAQVTGKPVLDLICSGADGFAQAIESVRKDDSRSHIARFTIQLGPHSILRQRRPRHSVAQGQESTPRSPTNVPDDEEQFLNVEAQGIMVYDRTTGAESHTMWMVRPSVIREVTIDLPEVLVEALGVGAEVLAHYLTGLAEQSATDPGNCAPPLPVLCRICERQITPWWFEKHSELCLQEHRAEMDVQMAQETLAEHRNAIVKVLDTLESHSQRSRPASIDSVQPLQPAEYKGLIIHSTSTPSSGSPSSTPSGRNSPASPPSRSRERSERPSGFGHHRARSFAVRRPLARIVELVLDLCDTALEINTPAVKDNTRGQSVAEIRTQSPQSENRISQVLQWQSPTTGSADHTEGLKLLCEDTSKLARAKVDAVTRHRRVLEYSERLRIEFDILVQECIEAAILKAARIAAGEDSSSEEDERQEEVQSDANDTDTATDIAPGEEGIFPCSYDPPSSMAHALRSTSDASLPARVGRRESSVAGSNRSSSPRGGCQTPRSHVGAISIATHNKRQSMHFESDTGAESDTSMRSSVLSGPRRADSPATSDVGLGRVASSRERKRKSLILPSVMSSRQQSPARTMVPPPSSPLRTTKPRLPSGVEGIHSPITSPVLQTTEFSSPAMMHTIQHHRRQSSTAGSDGPRPISPRLIASTQPQPRAVPPSIKDFEIIKPISKGAFGSVYLAKKKSTGEYYAIKVLKKADMVAKNQVTNVKAERAIMMWQGESDFVAKLYWTFSSKDYLYLVMEYLNGGDCASLIKVLGALPEDWAKKYLAEVVLGVEHLHSRGIVHRDLKPDNLLIDGKGHLKLTDFGLSRMGMIGRQKRALKSVEPAPDLLKTGPFHRATSVGSSRSASFDLNHSPSQTPAMTPALTGDIGQPSYFSLNRETSQQSRERSRRPSGTRSDSQDSDALQAMFRRFSIVDDSFSHPRGRSPIEEEALSDDGSPDPYAVPVSMSHSGLAQNSVLGPTSTMPPPPMTLFDPEDSDRRFVGTPDYLAPETIAGNGQDEVSDWWSLGCILFESLYGYPPFHADTPDEVFQNILARKIDWPADDDELYDISDEAKDLMNRLMCSDPTERLGANKDEKFASGGEEIRSHPWFADINWDTLRDDEASFIPAPENPEDTEYFDSRGAAMANFNPEFEDQATTPAGTPSTDYPDRPHDALSRVRSQVTVSTMKRGLIPLHIPAHVREGRTRRLSEPMAADDFGNFSYKNLPVLEKANKDVIQKLRAEAMLPQNKPTPPLQSPNVTSPSPSLENSPMLPGSLKRTLSTNRAPGRPSSPSVSGPHSSPSRGSQPSSPLLVQFSTGQHHDRRKTSSSSSTLSHSTSNPSTLQPGVSGMRPSPEGISPIKLPKTPSSTGTSQDKTAAGQRQTFTGSAIADSPRARSQTIGSQEEDLVHNLLPGHYKRRSQVLDVSPSSSDTEDSRAKALLRVQRRRQSSRRLSQISFGDGPFFRPLDVLICEDHPVSRLVMEKLLEKLRCRTLTVTNGSEAIRYAMGEVKFDVIMMEFRLPQVNGADVARMIRDTKNANTHTPIVAVTGYLKELQAPHYFDALIEKPPTVAKLTDTLSRLCQWKAPPPGWTPSQSFPSIMPASGLRQESSRQEDSPSSHSSGFPAVPSASYRGSSREDSISSSFFGDNDSRAGEDIPVRIHNADDWRERDMARAMGGLAIGDDAANADTKNAPSNRGGPPDLPHGDSTQPSLEEATIRRQRSTEQVGAKRRVLETRKHESAESGDDEDDELGHAPIRTRSPKSRPKSTSKLGIEMMRTNSRGSVISVEDPGQPDTTLPSSPPPMITEDRAAEEYEGNLPASGFAPSLLTPPVIFPEQPGDDVEEFVMETPKAQKETASPDPDPTPKAKNTLPKPNNASDD

SEQ ID NO: 26117 - protein, 111 aa, Onion yellows phytoplasma OY-M
MQFLQGGKKMFAIIKTGGKQFRVFEGQEIYVEKLNVEPETTYQFQEVLAVGGSNPVLGTPFVKDAKVTAQVIKHDRAKKIIVFKYKKRKKYRCKQGHRQSYTKLLITKITV

SEQ ID NO: 26118 - protein, 604 aa, Onion yellows phytoplasma OY-M
METKTKIPKQIFSQTKPPKKPKPQINQIKRKRTYKMQKQSNFIKTIIQKDLQSGKCSQIITRFPPEPNGFLHLGHARAIIINFELAHFFEGKTLLRYDDTNPSKEKQIYVNAILNDIKWLGYTPYKITFASDYFPQMYQMALFLIKQGKAYVDDQTAEQIAQSRGNLTQKGTNSPYRNRSIEENILLFEQMKKGKFVEGSKVLRAKIDMQSPNLNLRDPILYRILSAFTLKQKHWHIFPTYDYAHPLEDSFENITHSLCSLEFEDHRPLYDWIIKETKAKHTPRQIEFGRLNLTQTLMSKRHLNNLVEKNLVTGWDDPRMPTLSGIRKKGYTPEAIKNFVLETGLSKVNSQVKQEMLESFVRDDLKGKSLPRMAVINPLKLTITNFPENQIENLKAPWTNNFHTCKCCNTSQTQGKTPEQNQEQTKGKEQTQEREIYFSRHLYIEKDDFALQKPDKNYKRLTLGEEVRLFHAYFVKAYDVVKNNKGEITEILATYDPQTKSGSGFKDRKPNGTIHFVEAKTACKATFNFFAPLLCTNGNFNYKSWHIKKGFVESSLQKSCCCKNHLQFLRQGYFAADKITKDTNGKTQELNFNEVVSLKSNPQK

SEQ ID NO: 26119 - protein, 613 aa, Kluyveromyces marxianus
MAEGVFPGAIGIDLGTTYSCVATYENSVEIIANEQGNRVTPSFVAFTPEERLIGDAAKNQAALNPKNTVFDAKRLIGRRFDEESVQSDMKTWPFKVIDSNGAPLIEVEYLGETKTFSPQEISSMVLTKMKEIAEAKIGKKVEKAVVTVPAYFNDAQRQATKDAGAIAGLNVLRIINEPTAAAIAYGLGAGKSEKERHVLIFDLGGGTFDVSLLHIAGGVYTVKSTSGNTHLGGQDFDTNLLEHFKAEFKKKTGADISGDARALRRLRTAAERAKRTLSSVAQTTVEVDSLFDGEDFEATITRARFEDINAALFKSTLEPVEQVLKDAKISKSQIDEVVLVGGSTRIPKVQKLLSDFFDGKQLEKSINPDEAVAYGAAVQGAILTGQSTSDETKDLLLLDVAPLSLGVGMAGDVFGVVVPRNTTVPTIKRRTFTTVADHQTTVTFPVYQGERVNCKENTLLGEFDLKGVPPMPAGEPVLEAIFEVDANGILKVTAVEKSTGKSANITISNAIGRLSSEEIEQMVNQAEEFKAADEAFAKKHEARQRLESYISSVEQTVTDPVLSAKIKRNAKAKVEAALADAFSTLQIEDASADDLRKAEVGLKRAVTKAMSTR

SEQ ID NO: 26120 - protein, 255 aa, Eucalyptus gunnii
  misc_feature (214)..(214): Xaa can be any naturally occurring amino acid
  unsure (1)..(255): unsure at all Xaa locations
MGRSPCCEKAHTNKGAWTKEEDDKLIAYIRAHGEGCWRSLPKAAGLLRCGKSCRLRWINYLRPDLKRGNFTEEEDEIIIKLHSLLGNKWSLIAGRLPGRTDNEIKNYWNTHIRRKLLNRGIDPATHRLINEPAQDHHDEPTISFAANSKEIKEMKNNAELNFMCNLEESADVASSARERCPDLNLELGISPPSHQLHQPEPLLRFTGRKSDLCXECNLGLKNSQNCRCSVGVIESETSVGYDFLGLKASVLDYRS

SEQ ID NO: 26121 - protein, 556 aa, Streptomyces parvulus
MTGNTTSAAFLRRTQNALAMQRKICAQPEETAERVFSDILSVSRDTGFGREHGLAGVRTRQEWRRAVPIRTYDELAPYVERQFSGERRVLTTDDPRAFLRTSGSTGRAKLVPTTDHWRRVYRGPALYAQWGLYFEQIGTHRLTGDEVLDLSWEPGPIRHRLRGFPVYSITERPVSDDPDDWNPPWRHARWFTRDAGAATMADLLYGKLLRLAAHDLRLIVSVNPSKIVLLAETLKENAERLIQDLHDGHGTDRAARPDFLRRLTAAFDRTGGRPLLTDLWPGLRLLVCWNSASAALYGPWLSRLATGVAALPFSTTGTEGIVTLPVDDHLSAGPLAVDQGHFEFVPWQDLDDGSPLPEDTPTLGYDELELGADYRLVMSQANGLYRYDVGDVYRVVGAVGATPRLEFLGRAGFQSSFTGEKLTESDVHTAVMRVLGSERTDHPHFSGIPVWDTPPHYLVAIEWADAHGTLNVQDTARRIDATLQEVNVEYADKRRSGRLRPLQILPLVPGAFGQIAERRFRQGTAGAQIKHHWLQKDSAFLDTLRDLDLVRARPGT

SEQ ID NO: 26122 - protein, 291 aa, Moraxella sp. A1
MSQAINSPFRYAGGKFYARKLILEHVPDHTCYIEPFVGGGSIFFAKDKVETNILNDADPDLINTYLIIRDRVDELVAALDGEQALKERHTWYKNEFKPTNELERAVRWYYLNRTSYSGIMNPKNCYWGYGDKYSMRPENWGRSLIKTSAKLQGVEFTNLDFEDVIDNAPDGAFLFVDPPYFNADQDKFYTFSFKKEDHYRLEQCLLRNKGRLSFLITYDNSPEIRELYSWANALLDKEWNYTISRTDDQTKNKSQAPEKASRYKGKEVFITNYQVKEPEISENLELTFDEV

SEQ ID NO: 26123 - protein, 1916 aa, Gibberella moniliformis
MVSPSGAILAPPAVASLRAQQTTAMERSLSQDIREEREELREAAEQTLNTIVDLNLDGTIKWVSPSWTDVVGTQFETVSGLPISDLIVSDNKNVFTEVVESMKKDDSRSHRVRFAVNIGPLSKLLPIDDLENDPENEQSHAVDLEAQGIMVYDSVSGGESHTMWMIRPWIAPREIKIDLPNVIVDSLGSGAEVLASYLTQLAESGLDDPEQQEPPPPVLCRICERQIPRWWFEKHTDLCLQEHRAEMDVQMAQESLTEHRHSIVKVLDALEARKSRSLAGDQTPVPVAEYKGLPIGPPPSTQSSPGSSLPRSRERSGGLGHTRARSFAIRRPQARIVELLMDLCDTAIEISTPAIKESSTQQSGDFRTQSPQSESRISQVLQWQSPSTNTLEQEQGLALLCADTEKVARNKVDAVFRHRKIIEYAERIRIELACLVQDCIDEALRKAARIANGELTDSTEEERLNSEYEQCDTCDEGTGDDDIPPEPLVSEPQHLLQRGSESFTEPLSNPSVLATALRQMNLSENKDRSRPTSFVASTRSSSPKECPTPRSHFGGQSSLGVQARDTRRDSVYLEGDFLDSEGSFRSSSVASRNAPRTESPISEFGDLRRAASTRRRHRRSLILPGTSSPHRQESPSRPGQPSSPLRIKARGFPMSQEGVVSPEASPMLPGSDFSSPATHSHRHHRRQSSAAISDFVMKPPPSPRLGANQAPPQPRPTQPSIKDFEIIKPISKGAFGSVYLSKKKSTGEYFAIKVLKKADMVAKNQVGNVKAERAIMMWQGESDFVAKLYWTFSSKDYLYLVMEYLNGGDCASLIKVLGGLPEEWVKKYLGEVVLGVEHLHSRGIIHRDLKPDNLLIDQKGHLKLTDFGLSRLGLVGRQKRALNSENSDGTPDLLKQGPFARSASIASSRSASLDLHGHTHSPGQTPQMTPEVGSLAQPSYFSLGQETRRVSGTHRSDSGGSETLARMVTNFSLHDAEIASQSNSVRSPLDEEAVAQGSPDLPMSVSSRMSMDSHVRNSLPLSNMMPPPMALFNPEDTNRRFVGTPDYLAPETIKGDKQDETSDWWSVGCILFEFLYGIPPFHAGEAEEVFENILARKIQWPDENECEPISEEAKDLINKLLCMEPHQRLGSNRDDKFASGGEEIRHHPWFQDVNWETLLEDEAQFVPQPENPEDTEYFDARGAVLQSFAEEMEDQASPQSSAAGSEYAERPHDALSRVRSQVNSINRKLMPLHIPPHVRDLKSRRLSEPVAMDDFGSFSFKNLPVLEKANKDVIQKLRAEALATQSKGTSVSPGAPSNVISPGPSLEGSPVLSNPVSRTISNAKATNRAQSPSGFGHTSASPNRASQPSSPLLVSFVAGPGADGRRKASSNSSSLSHQSTAASLQPGSAFEIPKVPPSLQKAATTVAASSPVQSRSAAPPPLSLSPQKTISTPRQSSNSSAGRSRSLTVGSQSQDGSPVASDIMHHHRNRRSQVFDMSPSSSDNEGEKHNALLRVQRRRQSSRRLSQIAFDGGPTFRPLDVLICEDHPVSRMVMEKLLEKLRCRTISVPNGSEAVRYSMSEIKFDVIFLEYQLPQINGADVARMIRETKNANSHTPIVAITAYLKELQAPHYFDSLIEKPISSSKLTEVLRGLCQWRPESPGQSSSMPRPIPMGIRKANSRLEDSPTSGSSIFASRLGNAMMSSREDSITSSLFGDSESVTTDELPVVVSRKPTNEWDEGGLNITDNNDASDPLRKGVPSLVAQQSAPAQMEHRPRSNDKLRGRREGPEHRTLEGTESADDEDEELGSGREKHHGRNSQQILSKAGLPSSKLGIEMMRANSHDSLTVGSESTPEAVTQVVTTPSKEMETGVLDGEVVAEPTARTPPDAGLKAEGVTPNKEKDGTDSVDATPRPLTVVKGDDDGGNDGEATPRPTEK

SEQ ID NO: 26124 - protein, 391 aa, Acalypha californica
REFTSDSADVPITAAGALKSYKLAAKAISRLQSLPSGNMSLLCDVLVKEVSDLTGYDRVMVYKFHEDEHGEVIAECHRPDMEPYLGLHYPATDIPQASRFLFIKNKVRMICDCLAPPVKVIQDSSLTQPVSLCGSTLRSPHGCHAQYMTNMGTLASLVMSATINEDADEIDDDQQKGRKLWGLVVCHHNSSRFVPFPLRYACEFLIQVFGVQINKELELAAQMREKNMLQTQTVLCDMLLRDAPEAIITQSPNVMNLVKCDGAALYYRKKFWLLGVTPTEAQIKDIADWLLEYHGESTGLSTDSLMEAGYPGASILGDAVCGMAAIRISSKDFLFWFRSHTAKEIKWSGAKHDPEDKDDGRKMHPRSSFKAFLEVVKWRGLPWEDMEMDAI

SEQ ID NO: 26125 - protein, 391 aa, Atuna racemosa
DLEPVNPADVPVTAAGALKSYKLAAKAISRLQSLPSGNISLLCDVLVKEVSDLTGYDRVMVYRFHEDEHGEVVAECCRPDLEPYLGLHYPATDIPQASRFLFMKNKVRMICDCLAPPVKVIQDKRLAQPLSLCGSTLRAPHGCHSQYMANMGAIASLVMSVTINDDEEEMEADQRKARKLWGLVVCHHTSPRFVPFPLRYACEFLIQVFGIQINKEVELAAQTREKHILRTQTVLCDMLLRDAPVAIITQSPNVMDLVKCDGAALYYRKKFWLLGITPTEAQIKDIVEWLLHYHGESTGLSTDSLMEAGYPGASVLGGAVCGMAAVKITSKDFLFWFRSHTAKEIKWGGAKHDPNDKDDGRKMHPRSSFKAFLEVVKRRSLPWEDVEMDAI

SEQ ID NO: 26126 - protein, 391 aa, Austrobuxus megacarpus
DLEPVNPADVPVTAAGALKSYKLAAKAISRLQSLPSGNISLLCDVLVKEVSDLTGYDRVMVYRFHEDEHGEVVAECCRPDLEPYLGLHYPATDIPQASRFLFMKNKVRMICDCMALPVEVVQDERLSQPLSLCGSTLRSPHGCHAQYMANMGSVASLVMSVTINEDDDEMDSGQQTGRKLWGLVVCHHTCSRFVPFPLRYACEFLIQVFGVQISKEVELAAQMREKHILRTQTVLCDMLLRDAPVAIISQSPNVMDLVKCDGAALYYRKKFWSLGVTPTEAEIRDIAEWLLECHNGSTGLSTDSLMEAGYPGASILGDAVCGMAAVRITSKDFLFWFRSHTAKEIKWGGAKHDPDDKDDGRKMHPRSSFKAFLEVVKRRSLPWEDVEMDAI

SEQ ID NO: 26127 - protein, 391 aa, Balanops vieillardii
DLEPVNPADVPVTAAGALKSYKLATKAISRLQSLPSGNISVLCDVLVKEVSDLTGYDRVMVYRFHEDEHGEVVAECRRPDLEPYLGLHYPATDIPQASRFLFMKNKIRMICDCLAPPVKVIQDKRLAQPLSLCGSTMRAPHRCHVQYMANMGSIASLVMSVTINEDDDETESDQQNGRKLWGLVVCHHSSPRFVPFPLRYACEFLIQVFSIQINKEVELAAQMREKHILQTQTVLCDMLLRDAPEAIITQSPNVMDLVKCDGAALYYRKKVWLIGVTPTEAQIRDIAEWLLEYHRESTGLSTDNLVEAGYPGASVLGVAVCGMAAVRITSKDFLFWFRSHTAKEIKWGGAKHDPDDKDDGRKMHPRSSFKAFLEMVKRRSLPWEDVEMDAI

SEQ ID NO: 26128 - protein, 390 aa, Bergia texana
DLEPVNPADVPVTAAGALKSYKLAAKAISRLQSLPSGNISLCDVLVKEVSDLTGYDRVMVYKFHEDEHGEVIAECHRPDLEPYLGLHYPATDIPQASRFLFMKNKVRMICDCMAPPVKVIQDKRLTQPLSLCRSTLRSPHGCHAEYMANMGSIASLVLSVTINDEVDKIEGDKLLGRKLWGLVVCHHASPRFIPFPLRYACEFLIQVFGVQINKEVALAAQTREKHILRTQSVLCDMLLRDAPVAIITQSPNVMDLVKCDGAALYYRKKFWLLGVTPSEAQIRDIADWLLECHSGSTGLSTDSLMEAGFPGASVLGDAVCGMAAVKITSKDFLFWFRSHTAKEIKWGGAKHDPDDKDDGRKMHPRSSLRAFLEVVRWRSLPWEDVEMDAI

SEQ ID NO: 26129 - protein, 390 aa, Bergia texana
DLEPVNPADVPVTAAGALKSYKLAAKAISRLQSLPSGNISLCDVLVKEVSDLTGYDRVMVYKFHEDEHGEVIAECHRPDLEPYLGLHYPATDIPQASRFLFMKNKVRMICDCMAPPVKVIQDKRLTQPLSLCGSTLRSPHGCHAEYMANMGSIASLVLSVTINDEDDKIEGDQLLGRKLWGLVVCHHASPRFIPFPLRYACEFLIQVFGVQISKEVALAAQTREKHILRTQSVLCDMLLRDAPVAIITQSPNVMDLVKCDGAALYYRKKFWLLGVTPSEAQIRGIADWLLECHSGSTGLSTDSLMEAGFPGASVLGDAVCGMAAVKITSKDFLFWFRSHTAKEIKWGGAKHDPDDKDDGRKMHPRSSLRAFLEVVKWRSLPWEDVEMDAI

SEQ ID NO: 26130 - protein, 391 aa, Calophyllum soulattri
DLEPVNPADVPVTAAGALKSYKLAAKAISKLQSLPSGNISLLCDVLVKEVCELTGYDRVMVYKFHEDDHGEVVAECHRPDLEPYLGLHYPATDIPQASRFLFMKNKVRMICDCLAPPVKVIQDNGLSQALKSRWIYLESSPWLHSQYMANMGSIASLVMSVIINEDGDEMESDQQKGRKLWGLVVCHHTGPRFVPFPLRYACEFLIQVFGIQINKEVELAAQMREKHILETQTVLCDMLLRDAPMAIVTQSPNVMDLVKCDGAALYFKEKFWLLGITPTEAQIRDIAEWLLDYHNGSTGLSTDSLMEAGYPGASILGDAVCGMAAIRINSKDFLFWFRSDTAKEIKWGGAKHDPGDKDESRKMHPRSSFKAFLEVVKWRSLQWEDVEMDAI

SEQ ID NO: 26131 - protein, 392 aa, Cespedesia bonplandii
DLEPVNPADVPVTAAVALKSYKLAAKAISGLQSLSSGNISMLCNVLVKEVCDLTGYDRVMVYKFHEDEHGEVIAEYHRPDLEPYIGLHYPATDIPQASRFLFMKNKVRMICDCMAPAVKVVQEKKLAQPLSLGGSTLRAPHGCHSQYMANMGSIASLVMSVMINDDDYNEMESDRQKPRKLWGLVVCHHTSPRLVPFPLRYACEFLIQVFGVQINKEVELTAQMKEKQILQTQTVLCDMLLRDTPVAIVTQSPNVMDLVKCDGAALFYKNKFWLIGITPPEDQIRDIACWLNEYHDGSTGLSTDSLMEAGYHGASILSGAVCGMAAIRVSLKDFLFWFRSQAAKEIKWGGAKHDPNEKDNGRNMHPRSSFNAFLEVVKWRSLPWEDMEMDAI

SEQ ID NO: 26132 - protein, 392 aa, Clusia gundlachii
DLEPVNPADVPVTAAGALKSYKLAGKAISKLQSLPSGNILLLCDVLVKEVRELTSYDRVMMYKFHEDDHGEVIAECRRPDLEPYLGLHYPATDIPQASRFLFMKNKVRMICDCMAPPVNVIQDNGLSQPLSLGGSTLRAPHGCHAQYMANMGSIASLVMAVTINEDDDGDREGDQRKQRRLWGLVVCHHTGPRFVPYPLRYACEFLIQVFGIQINKEVELGAQMREKHILETQTVLCDMLLRDSPVAIVTQSPSVMDLVKCDEAALYYKKKFWLLGITPTETQIRDIAEWLLEYHSGSTGLSTDSLMEAGYADASLLGDAVCGMAAIKINSRDFIFWFRSHTAKEIKWGGAKHDPDDKDEGMKMHPRSSFKAFLEVVKWRSLPWEDIEMDAI

SEQ ID NO: 26133 - protein, 391 aa, Croton alabamensis
DLEPVNPADVPITAAGAMKSYKLAAKAISKLQSLPSGNMSLLHDILVKEISDLTGYDRVMVYKFHEDDHGEVVAECRRNDLEPYLGLHFPATDIPQASRFLFMQNKVRMICDCSAPPVKVIQDKSLAQPLSLCGSILRSPHGCHAQYMGNMGTIASLVMSVTINEDDDEMETDRQKGKKLWGLVVCHHTSPSFVPFPLRYACEFLIQVFGVQIIKEVKLAAQKREKHILQTQPLLCDMLLRDDPVAIVTQTPNIMDLVNCDGAALYYKKKIWLLGAAPSEERVRDIAEWPLEYHSESTGLSTDSLMEAGYPGASILGDATCGMAAIRISSRDFIFWFRSHTAKEIKWGGAKHDPGAKDDVRKMHPRSSFKAFLEVVKWRSLPWEDVEMDAI

SEQ ID NO: 26134 - protein, 396 aa, Denhamia celastroides
  misc_feature (75)..(78): Xaa can be any naturally occurring amino acid
  misc_feature (170)..(173): Xaa can be any naturally occurring amino acid
  unsure (1)..(396): unsure at all Xaa locations
YLEPVNPADVPITAAGALKSYKPAAKAISRLQSLPSGNMSLLCDVLVKEVNELTGYNRVMVYRFHDDDHGEVVAXXXXELIWNLIQACNYPATDIPQASRFLFMKSKVRMICDCLAPPVRVLQDKRLAQPFSLGGSTLRSPYGCHAQYMANMGSIASLVMSVTINEDDDXXXXETNSDQQKARRLWGLVVCHHTTPRFVPFPLRYACEFLIQVFGVQINKEVELATQLKEKHILQTQTVLCDMLLRDSPVGILIQSPNVMDLVKCDGAALYYRDKFWLLGLTPTETQIKYIAEWLLEYHSESTGFSTDSLMEAGYPNASILSEAVCGMAAVKITSKDFLFWFQSHTAKEMKWGGAKYDPDYKDDGKRMHPRSSFKAFLELVKQHSLPTEDVEMDAI

SEQ ID NO: 26135 - protein, 391 aa, Dichapetalum macrocarpum
DLEPVNPADVPVTAAGALKSYKLAAKAISKLQSLPSGNISLLCDVLVKEVRDLTGYDRVMVYKFHDDEHGEVVSECHRPHLEPYLGLHYPATDIPRASRFLFMKNKVRMICDCLAAPVKVIQDNRLTQPLSLCGSTLRAPHGCHAQYMENMGSIASLVMSVMINEDDDEDRNCQQKGRKLWGLVVCHHTSPRFVPFPLRYACEFLIQVFGIQINKEVELSAQMREKHVLRIQTVLCDMLLRDAPVAIITQSPNVMDLVRCDGAALYYRKKFWLLGITPTEGQISDIAEWLLEYHRESTGLSTDSLMEAGYPGASDLGDAVCGMAAVRIASKDFLFWFRSHTAKEIKWGGAKHDPDVKDDGRKMHPRSSFKAFLEVVKWRSLPWEDIEMDAI

SEQ ID NO: 26136 - protein, 391 aa, Dillenia philippinensis
DLEPVNPTDVPVTAAGALKSYKLAAKAISRLQSLPSGNMSLLCDALVQEVSDLTGYDRVMVYKFHEDDHGEVVAECRRPDLEPYLGLHYPATDIPQASRFLFMKNKIRMICDCLAPPVQVIQDKCLAQPLSLCGSTLRSPHGLHAQYMANMGSIASLVMSVTINEDDDEVESDKQKGRKLWGLVVCHHTSPKVVPFPLRYACEFLIQVFGVQVNKEVELAAQLKEKHILKTQTVLCDMLLRDAPVGIVTQSPNVMDLVKCDGAALYYRNKFWLLGITPTEAQIRELAGWLLDCHNGSTGLSTDSLMEAGYPGASILGDALCGMAAIKITSKDFLFWFRSHTAKEIKWGGAKHDPVDKDDGKKMHPRSSFKAFLDVVKRRSFPWEDVEMDAI

SEQ ID NO: 26137 - protein, 391 aa, Dissiliaria muelleri
DLEPVNPADVPVTAAGALKSYKLAAKAISRLQSLPSGNISLLCDVLVKEVSDLTGYDRVMVYRFHEDEHGEVVAECRQPDLEPYLGLHYPATDIPQSSRFLFMKNKVRMICDCMAPPVEVVQDERLSQPLSLCGSTLRSPHGCHAQYMANMGSVASLVMSVTINEDDDEMDGDQQTGRKLWGLVVCHHTCPRFVPFPLRYACEFLVQVFGVQINKEVELAAQMREKHILRTQTVLCDMLLRDAPVGIITQSPNVMDLVKCDGAALYYRKKFWLLGVTPTEAEIRDIAEWLLECHSGSTGLSTDSLMEAGYPGASILGDAVCGMAAVRITSKDFLFWFRSHTAKEIKWGGAKHDPGDKDDGRKMHPRSSFKAFLEVVKRRSLPWEDVEMDAI

SEQ ID NO: 26138 - protein, 391 aa, Dovyalis rhamnoides
DLEPVNPADVPVTAAGALKSYKLAAKAISRLQSLPSGNISLLCDVLVKEVSALTGYDRVMAYKFHEDQHGEVVAECCRPDLEPYLGLHYPATDIPQASRFLFMKNKVRMICDCLAPPVKVVEHKRLAQPLNLCGSTLRSPHGCHVQYMENMGSIASLVMSVTINEDDDEMDSDQQKGRKLWGLVVCHHTSPRFVPFPLRYACEFLLQVFGVQINKEVELAAQMREKHILETQTVLCDMLLRDAPAAIITQSPNVMDLVKCGGAALYFRKKFWLLGVTPTEAQIRDLSEWLLQYHSESTGLSTDSLLEAGYPGASALGDAVCGMAAIKISSKDFLFWFRSYTAKEIKWGGAKHDPDDKDDGRKMHPRSSFKAFLEVVKRRSLPWEDVEMDAI

SEQ ID NO: 26139 - protein, 391 aa, Drypetes roxburghii
DLEPVNPSDVPVTAAGALKSYKLASKAISRLQSLPVANISLLCDVLVKEVRDLTGYDRVMVYRFHKDEHGEVVAECCRPDLEPYLGLHYPATDIPQASRFLFVKNKVRMICDCMAPAVKVIQDKRVARPLSLCGSTLRAPHGCHTQYMVNMGSIASLVMSVTINEDDDEMDSDQEQGRRLWGLVVCHHTSHRFVPFPLRYACEFLIQVFGVQIDKEVELARQMRKNIFCKLKLVLCDMLLRDAPMAIITQSPNVMDLVNCDGAALYYRKKIWLLGVTPTEAQIRDITEWLLEYPSGSTGLTTDSLMEAGYPGASILGGSVCGMAAIRITSNDFLFWFRSHTAKEIKWGGAKHDPGDKDDGRQMHPRSSFKAFLGVVKWRSLPWEDIEMDAI

SEQ ID NO: 26140 - protein, 392 aa, Elaeodendron orientale
DLEPVNPADVPITAAGALKSYKLAAKAISRLQSLPSGNISLLCDVLVKEVNELMGYDRVMVYRFHDDDHGEVVAEYCRPDLEPYLGLHYPATDIPQASRFLFMKNKVRMICDCLAPPVKVLQDKILAQPLSLSGSSLRSPHGCHAQYMANMGSIASLVMSVTINDDDDDETNNDQQKGRKLWGLVVCHHTTPRFVPFPLRYACEFLIQVFGVQINKEVELATQLKEKHILRTQTVLCDMILRDAPVGILTQSPNVMDLVKCDGAALYYRNKVWLLGVTPTETQIKEIVEWLLEYHSESTGLSTDSLMEAGYPDASILGEAVCGMAAVKITSKDFLFWFRSHTAKEMKWGGAKHDPDDKDDGKRMHPRSSFKAFLEVVKIRSLPWEDVEMDNH

SEQ ID NO: 26141 - protein, 391 aa, Elatine triandra
DLEPVNPADVPVTAAGALKSYKLAAKAISRLQSFPSGNIPLLCDVLVKEVSDLTGYDRVMVYKFHEDEHGEVIAECRKPDLEPYLGLHYPATDIPQASRFLFMKNKVRMICNCMVTPVKVIQDKRLPQPLSLSGSTLRSPHGCHAQYMANMGSIASLVLSVTINEEDDKIDGDQLLGRKLWGLVVCHHTNPRFVPFPLRYACEFLIQVFGVQINKEVELATQVKEKHILRTQSVLCDMLLRDAPVAIVTQSPNVMDLVNCDGAALYYKKKFWLLGVTPSEAQIRDIGDWILECHSSNTSLSTDSLMEAGFPGASVLGEAVCGMAAIKITSKDFLFWFRSHTAKEIKWGGAKHDPDDKDDGRKMHPRSSFRAFLEVVKWRSLPWEDVEMDAI

SEQ ID NO: 26142 - protein, 391 aa, Elatine triandra
DLEPVNPADVPVTAAGALKSYKLAAKAISRLQSLPSGNIPLLCDILVKEVRDLTGYDRVMVYKFHEDEHGEVIAECRKHDLEPYLGLHYPATDIPQASRFLFMKNKVRMICDCMATPVKVIQDKRLPQPLSLSGSTLRSPHGCHAQYMANMGSIASLVLSVTINEEDDKIDGDQLLGRKLWGLVVCHHTNPRFVPFPLRYACEFLIQVFGVQINKEVELATQVKEKHILRTQSVLCDMLLRDAPVAIITQSPNVMDLVNCDGAALYYKKKFWLLGVTPSEAQIRDISDWLLECHSGNTGLSTDSLMEAGFPGASVLGEAVCGMAAIKITSKDFLFWFRSHTAKEIKWGGAKHDPDDNDDGRKMHPRSSFRAFLEVVKWRSLPWEDVEMDAI

SEQ ID NO: 26143 - protein, 391 aa, Endospermum moluccanum
DLEPVNPVDVPTTAAGALKSYKLAAKAISKLQSLPSGNISMLCDVLVTEVRDLTGYDRVMVYKFHEDEHGEVIAECHKPDLEPYLGLHYPATDIPQASRFLFMKNKVRMIYDCFASPVKVIQDKSLSQPLSLCGSTLRSPHGCHAQYMANMGSIASLVMSVTINVDGDEMDNDQQKGIKLWGLVVCHHTSTRFVPFPLRYACEFLIQVFGVQIHKEVGLAKQMREKHILQTQTLLCDMLLRDAPVAIITQSPNLMDLVKCDGAALYFENKFWLLGVTPTEEQIRDIAEWLLKYHSENTGLSIDSLVEAGYPGASVLGDAICGMAAIRIASKDFLFWFRSHTAKEIKWGGAKHDPEEKDDGRKMHPRSSFKAFLEVVKWRSSPWEDVEMDAI

SEQ ID NO: 26144 - protein, 391 aa, Galearia filiformis
DLEPVNPADVPVTAAGQLKSYKLAAKAISRLQSLPSGNISLMCDVLVKEVSDLTGYDRVMVYRFHEDEHGEVVAECCRPDLEPYLGLHYPATDIPQASRFLFMKNKVRMICDCQAPAVKVIQDKRLVQPLSLCGSTLRSPHGCHAQYMANMGSVASLVMSVTINGDDDEMHSDQQKRRKLWGLVVCHHTSPRFVPFPLRYACEFLIQVFGVQINKEVELAAQMREKHILQIQTMLCDMLLRDSPLAIITQSPNVMDLVKCDGAALYYKKKFQLLGVTPTEAQIKDIADWLLEYHSGSTGLSTDSLMEAGYQGASILGDAVCGMAAVRITSNDFLFWFRSHTAKEIKWGGAKHDPNDKDDGRKMHPRSSFKAFLEVVKWRSLPWEDVEMDAI

SEQ ID NO: 26145 - protein, 391 aa, Goupia glabra
DLEPVNPADVPVTAAGALKSYKLAAKAISRLQSLPSGNISLLCDVLVKEVSDLTGYDRVMAYRFHDDEHGEVVAERRRPDLEPYLGLHYPATDIPQASRFLFMKNKVRLICDCLAPPVKVIQDKRLAQPLSPCGSTLRSPHGCHAQYMANMGSIASLVMSVTINDDDDEMNSDQQKGRKLWGLVVCHHTSPRFVPFPLRYACEFLIQVFGVHISKEVELAAQMRKSIFCEFKLVLCDMLLRDAPVAIITQSPNVMDLVKCDGAALYYKKKFWLLGVTPTEAQIRDIAEWLLEYHNESTGLSTDSLMEAGYPGASILGDAICGMAAARITSKDFLFWFRSHTAKEIKWGGAEHDPGDQDDGRNMHPRSSFKAFLEVVKQRSLPWEDVEMDAI

SEQ ID NO: 26146 - protein, 391 aa, Hirtella bicornis
DLEPVNPADVPVTAAGALKSYKLAAKAISRLQSLPSGNISLLCDVLVKEVSDLTGYDRVMVYRFHEDEHGEVIAECCMPDLEPYLGLHYPATDIPQASRFLFMKNKVRMICDCLAPPVKVIQDKRLAQPLSLCGSTLRAPHGCHSQYMANMGAIASLVMSVTINEDDEEMETGQQKARKLWGLVVCHHSSPRFIPFPLRYACEFLIQVFGIQINKEVELAAQTREKHILRTQTVLCDMLLRDAPVAIITQSPNIMNLVKCDGAALYYRKKFWLLGITPTDTQIKDIVEWLLQYHGESTGLSTDSLMEAGYPGASVLGDAVCGMAAVKITSKDFLFWFRSHTAKEIKWGGAKHDPDDKDDGRKMHPRSSFKAFLEVVKRRSLHWEDVEMDAI

SEQ ID NO: 26147 - protein, 391 aa, Homalanthus populneus
DLEPVNPADVPITAAGALKSYKLVAKAISKLQSLPSGNISRLCDVLVKEVSDLTDYDRVMVYRFHNDEHGEVIAENCRPDLDPYHGLHYPATDIPQASRFLFMKNKVRMICDCLAPPVKVIQDQSLGQSINLCGSALRSPHGCHAQYMENMGSIASLVISVTINEDGSEMDDDQQKARKLWGLVVCHHTSPMFIPFPLRYACEFLIQVFGVQINKEVEMAAQMREKRILQTQTVLCDMLLRDAPVAIITQSPNVMDLVKCDGAALFYRKKFWLLGVTPTEAQVEDIVEWLLEFHSESTGLSTDSLMEAGYPGASTLGHAICGMAAVRISSKDFLFWFRSHTAKEIKWGGAKHDPEDKDDGRKMHPRSSFNAFLEVVKWRSLPWDDVEMDAI

SEQ ID NO: 26148 - protein, 391 aa, Hugonia platysepala
DLEPVNLADVPMTATGALTSYKIAAKAISRLQTVPSGSINLLCDVLVKELRELTGYDRVMVYRFHEDDHGEVVAECRSSDLESYLGLHYPATDIPQASRFLFMKNKVRMICDCLASSVKVMQDKSLAEPVSLSGSILRSPHGCHAQYMANMGSIASLVMSVTINEDCNEMESDQQRGRKLWGLVVCHHTSPRFVPFPLRYACEFLIQVFSIQISKEVELEAQRREKHIMQTQTVLCDMLLRDAPLAIMTQSPNVMDLVKCDGAALCCRKNCWLLGLTPTEQQIADIAEWLLEYHGESTGLTTDSLMEAGYPGASVLGNAICGMAAIRITSKDFLFWFRSHTAKEIMWGGAKHDPGDKDGGRKMHPRSSFKAFLEVVKWRSLTWEDVEMDAI

SEQ ID NO: 26149 - protein, 391 aa, Hymenanthera alpina
DLEPVNPADVPVTAAGALKSYKLAATAISRLQSLPSGNISLLCDTLVKEVSDLITYDRVMVYRFHDDEHGEVIAESCKPGLEPYLGLHYPATDIPQASRFLFMKNKIRMICDCLAPPVKVVQDKRLEQPLSLCGSTLRSPHGCHSQYMANMGSIASLVMSVTINEDDDEMDSDQQKGRKLWGLVVCHHSSPRFVPFPLRYACEFLIQVFSVQISKEVEVAAQMKEKHIFKTQTVLCDMLLRDAPEAIITHSPNVMDLVKCDGAALYYRKKVCLLGVTPTEAQIRDIAEWLLEYHSGSTGLSTDSLMEAGYPNASILGDLVCGMAAVRITSKDFLFWFRSQTDKEVKWGGAKHDATDKDDLRKMHPRSSFKAFLEVVKWRSLPWEDVEMDAI

SEQ ID NO: 26150 - protein, 392 aa, Hypericum empetrifolium
DLEPVNPADVPVTAAGALKSYKLAAKAISKLQSLPSANISLLCDVLVKEVSDLTGYDRVMVYKFHEDDHGEVVAECHRPDLEPFLGLHYPATDIPQASRFLFLKNKVRMICDCYAQPVKVVQYSGLSQSLSLCGSSLRAPHGCHAQYMVNMGSIASLVMAVTINDDDDDEAEADRRKGRKLWGLVVCHHRAPRFVPFPLRYACEFLIQVFGIQINKKVKLEAQMREKHILETQTVLCDMLLRESPVAIVTQSPTVMNLVKCDGAALCYQNTFWLLGVSPTEAQVRDITEWLLEYHAGSTGLSTDSLMEAGYPGASVLGDAVCGMAAIRINSKDFLFWFRSHAAKEIKWGGAKHDPDDKDEGRKMHPRSSFKAFLEVVKWRSLPWEDVEMDAI

SEQ ID NO: 26151 - protein, 391 aa, Lachnostylis bilocularis
DLEPVNPADVPVTTAGALKSYKLAAKAISRLQSLPSGNISLLCDVLVKEISDLTGYDRVMVYRFHDDEHGEVIAECRRPDLEPYLGLHYPAIDIPQASRFLFMKNKVRMICDCLAPPVKVIQDKRLSQQLSLGGSTLRSPHGCHAQYMANMGSIASLVMSVTINEDDDEMDSDRERGIRLWGLVVCHHTSPRFVPYPLRYACEFLIQVFGVQVSKEVQLAAQMREKHILQTQTVLCDMLLRDAPVAIITQSPNVMDLVKCDGAALYYRKKFWLLGVTPTEAQIKDIAEWLLECHGGSTGLSTDSLMEAGYPGAAVLDDAVCGMAAVRITSKDFLFWFRSHTAKEIKWGGAKHDPEDKDDGRKMHPVSSFKAFLDVVKQRSLPWEDIEMDAI

SEQ ID NO: 26152 - protein, 391 aa, Leonia glycycarpa
DLEPVNPIDVPVTAAGALKSYKLAAKAISRLQSLPSGNISLLCDVLVKEVSELTGYDRVMVYRFHEDEHGEVIAESCKPGLEPYLGLHYPATDIPQASRFLFMKNKIRMICDCLAPPVKVVQDKRLDQPLSLCGSALRSPHGCHSQYMTNMGSIASLVMSVTINEDDDEMDSDQQKGRKLWGLVVCHHTSLRFVPFPLRYACEFLIQVFGVQINKEVKLAAQMKEKHILQTQTVLCDMLLRDAPVAIITQSPNVMDLVKCDGAALYYGKKFWLLGVTPTEAQIRDIAEWLLEYHSGSTGLSTDSLMEAGYPNASILGDPVCGMAAVRITSKDFLFWFRSHTAKEVKWGGAKHDPDDKDDGRKMHPRSSFKAFLEVVKQRSLPWEDVEMDAI

SEQ ID NO: 26153 - protein, 391 aa, Gymnosporia arbutifolia
DLEPVNPADVPITAAGALKSYKLAAKAISRLQSLPSGNMSLLCDVLVKEVSELTGYDRVMVYRFHDDDHGEVVGECCRPDLEPYLGLHYPATDIPQASRFLFMKNKVRMICDCLAPPVKVLQDKRLAQPLSLGGSTLRSPHGCHAQYMSNMGSIASLVMSVTINEDDDETTSDQQKGRKLWGLVVCHHSTPRFVPFPLRYACEFLIQVFGVQINKEVELATQLKEKHILRTQTVLCDMLLRDAPVGILTQSPNVMDLVKCDGAALYYRNKFWLLGVTPTETQITDIAEWLLEYHSESTGLSTDSLMEAGYPDASILGEAVCGMAAIKITSKDFLFWFRSHTAKEMKWGGAKHNPDDKDDGKRMHPRSSFKAFLVVVKRRSLPWEDIEMDAI

SEQ ID NO: 26154 - protein, 392 aa, Gymnosporia senegalensis
DLEPVNPADVPITAAGALKSYKLAAKAISRLQSLPSGNMSLLCDVLVKEVSELTGYDRVMVYRFHDDDHGEVVAECCCRPDLEPYLGLHYPATDIPQASRFLFMKNKVRMICDCLAPPVKVLQDKRLAQPLSLGGSTLRSPHGCHAQYMTNMGSIASLVMSVTINEDEDETNSDQQKGRKLWGLVVCHHSTPRFVPFPLRYACEFLIQVFGVQINKEVELATQLKEKHILRTQTVLCDMLLRDAPVGILTQSPNVMDLVKCDGAALYYRNKFWLLGVTPTETQVKDIAEWLLEYHSESTGLSTDSLMEAGYLDASILGEAVCGMAAIKITSKDFLFWFRSHTAKEMKWGGAKHDPDDKDDGKRMHPRSSFKAFLVVVKRRSLPWEDVEMDAI

SEQ ID NO: 26155 - protein, 391 aa, Mesua sp. Coode 7884
DLEPVNPADVPVTAAGALKSYKLAAKAISKLQSLPSGNISLLCDVLVKEVCELTGYDRVMVYKFHEDDHGEVVAECRRPDLEPYLGLHYPATDIPQASRFLFMKDKVRMICDCLAPPAKVIQDNGLTQALSLCGSTLRAPHGCHAQYMENMGSIASLVMSVTINDDDDEMASDRQKGRKLWGLVVCHHTGPRFVPFPLRYACEFLIQVFGIQITKEAELAAQIREKHILETQTVLCDMLLRDSPMAIVIQSPNVMDLVKCDGAALYFKEKFWLLGITPTEAQIRDISEWLLDYHNGSTGLSTDSLMEAGYPGASILGDAVCGMAAIRVNSKDFLFWFRSHTAKEIKWGGAKHDPGDKDEGRKMHPRSSFKAFLEVVKWRSLPWEDMEMDAI

SEQ ID NO: 26156 - protein, 391 aa, Micrantheum hexandrum
DLEPVNPADVPVTAAGALKSYKLAAKAISRLQSLPSGNISLLCDVLVKEVSELTGYDRVMVYRFHEDEHGEVIAECCQPDLEPYLGLHYPATDIPQASRFLFMKNKVRMICDCMALPVKVLQDERLSQPLSLSGSTLRSPHGCHAQYMANMGSVASLVMSVTINDDDDGLDSDQQAGRKLWGLVVCHHTCPRFVPFPLRYACEFLIQVFGVQINKEVELAVQMREKHILQIQTVLCDMLLRDAPVAIITQSPNVMDLVKCDGAALYYRKKIWLLRVTPTEAQIRDIAEWLLESHSGSTGLSTDSLMEAGYPGASVLGDAVCGMAAVRITSKDFLFWFRSHAAKEIKWGGAKHDPDDKDDGRKMHPRSSFKAFLEVVKRRSLPWEDIEMDAI

SEQ ID NO: 26157 - protein, 391 aa, Microdesmis puberula
DLEPVNPADVPVTAAGALKSYKLAAKAISRLQSLPSRNISLLCDVLVKEVSDLTGYDRVMVYRFHEDEHGEVVAECCRTELEPYLGLHYPATDIPQASRFLFMKNKVRMICDCQAPPVKVLQDRRLAQPLSLCGSTLRSPHGCHAQYMANMGSVASLVMSVTINEDDDEMHSDQQKGRKLWGLVVCHHTSPRFVPFPLRYACEFLIQVFGVQINKEVELAAQMREKHILRIQTLLCDMLLRDSPVAIITQSPNVMDLVKCDGAALYYNNKFWLLGVTPTEAQIRDISEWLLEYHSGSTGLSTDSLMEAGYHRASILGDAVCGVAAVRITSNDFLFWFRSHTAKEMKWGGAKHDPVDKDDGKKMHPRSSFKAFLEVVKWRSLPWEDVEMDAI

SEQ ID NO: 26158 - protein, 391 aa, Neoscortechinia kingii
DLEPVNPADVPVTAAGALKSYKLAAKAISRLHSLPSGNISLLCDVLVKEVSDLTGYDRVMVYKFHEDEHGEVVAEFRRPDLEPYLGLHYPATDIPQASRFLFMKNKVRMICDCLAPPVKVIQDKSLAEPLSLWGSTLRSPHGCHAQYMANMGSIASLVMSVTINEDDDRMDSDQQKGRKLWGLVVCHHTCPRFVSFPLRYACEFLIQVFGIQINKEVQLAAQMREKHILQIQTMLCDMLLRDAPVAIITQSPNVMDLVKCDGAALYYKKKFWLLGVTPTEAQIRDIVEWLLDVHSESTGLSTDSLMEAGYLGASILGDAVCGMAAIRISSKDFLFWFRSHTAKEIMWGGAKHDPDDKDHVRKMHPGSSFKAFLEVVKWRSLPWEDMEMDAI

SEQ ID NO: 26159 - protein, 392 aa, Ochna multiflora
DLEPVNPADVPVTAAGALKSYKLAAKAISRLQSLPSGKISMLCDVLVKEVHDLTGYDRVMVYKFHEDEHGEVVAECHRPDLEPYIGLHYPATDIPQASRFLFMKNKVRMICDCMESPVKVIQDKKLAQPLSLSGSILRAPHGCHSQYMANMGSIASLVMSIMINDDDDNEMESNHQKPRKLWGLVVCHHTSPKVCPFPLRYACEFLIQVFGVQINKEVEVPAQVKEKHILRTQNVLCDMLLRDTPVAIVTQSPNVMDLVKCDGAALFYKNKFWLLGITPTADQIRDIASWLNEYHNGSTGLSTDSLMEAGYHGASILGGAVCGMAAIRISSKDFLFWFRSQTAKEIKWGGAKHDPNEKDDGRKMHPRSSFNAFLEVVKWCSLPWEDMEMDAI

SEQ ID NO: 26160 - protein, 392 aa, Ochna sp. Davis 31-01
DLEPVNPADVPVTASGALKSYKLAAKAISRLQSLSSGNISMLCDVLVKEVHDLTGYDRVMVYKFHEDEHGEVVAEYHRPGLEPYIGLHYPATDIPQASRFLFMKNKVRMICNCMEPAVKVIQDKKLAQPLSLAGSTLRAPHGCHSQYMANMGSVASLVMSVMINDDDDNEMESNHQKPRKLWGLVVCHHTSPRFVPFPLRYACEFLIQVFGVQINKEVELTAQLKEKHILRTQSVLCDMLLRDTPVAIVTQSPNVMDLVKCDGAALFYKNKFWLLGITPTEDQIRHIASWLNEYHNGSTGLSTDSLMEAGYHGASILGGAVCGMAAIRISSKDFLFWFRSQTAKEIKWGGAKHDPSEKDDGGKMHPRSSFNAFLEVVKWCSLPWEDMEMDAI

SEQ ID NO: 26161 - protein, 391 aa, Pera bicolor
DLEPVNPSDVPVTAAGALKSYKLAAKAISKLQSLPSGNISLLCDVLVKEVGDLTGYDRVMVYRFHEDEHGEVVAECRRPDLEPYLGLHYPATDIPQASRFLFMKNKVRMICDCLAPPVKVIQDSSLCQPVKSLWIYTEIPSWLHAQYMANMGSVASLVMSVTINEDDDEIDTDQRKGRKLWGLVGCHHTSPRFVPFPLKDACEFLIQVFGVQINKEVELAAQMREKHILRTQTMLCDMLLRDDPAAIVTQSPNVMDLVKCDGAALYYRKKFWFLGVTPTEAQTRDIAEWLLEYHSDSIGLISDSLMEAGYPGASVLGNAICGMAAVRITSKDLLFWFRFHTAKEIKWGGAKHDPGDKDDGRKMHPRSSFKAFLETVKWRSLPWEDVEMDAI

SEQ ID NO: 26162 - protein, 391 aa, Peridiscus lucidus
DLEPVNPADVPVTAAGALKSYKLAAKAISRLQSLPSGNISLLCDVLVKEVSDLTGYDRVMVYKFHEDEHGEVVAECCRPDLEPYLGLHYPATDIPQASRFLFMKNKVRMICDCLALPVKVIQDKRLAQPLSLCGSTLRSPHGCHAQYMANMGSIASLVISVTINEEDEEMESSQQRGRKLWGLVVCHHASPRFVPFPLRYACEFLIQVFGVQINKEVELAAQLKEKHILQTQTVLCDMLLRDAPVGILTQSPNVMDLVKCDGAALYYREKFWLLGVTPTEVQIKTIAEWLLEYHSGSTGLSTDSLTEAGYPGASILGDAVCGMAAVKITSKDFLFWFRSHTAKEIKWGGAKHDPSDKDDGRKMHPRSSFKAFLEVVKRRSLPWEDMEMDAI

SEQ ID NO: 26163 - protein, 391 aa, Petalostigma pubescens
DLEPVNPADVPVTAAGALKSYKLAAKAISRLQSLPSGNISLLCDVLVKEVSELTGYDRVMVYRFHEDEHGEVVAECCRPDLEPYLGLHYPATDIPQASRFLFMKNKVRMICDCMAPPVEVVQDERLSQPLSLCGSTLRSPHGCHAQYMANMGLIASLVMSVTINEDNDEMDGDQQTGRKLWGLVVCHHTSPRFVPFPLRYACEFLIQVFGVQINKEVELAVQMREKHILRTQTVLCDMLLRDAPVAIITQSPNVMDLVKCDGAALYYRKKFWLLGVTPTEAQVRDIAEWLLECHSGSTGLSTDSLMEAGYPGASILGDAVCGMAAVRITSKDFLFWFRSHTAKEIKWGGAKHDPGDKDDGRKIHPRSSFNAFLEVVKRRSLPWEDVEMDAI

SEQ ID NO: 26164 - protein, 391 aa, Phyllanthus epiphyllanthus
DLEPVNPDDVPVTAAGALKSYKLAAKAISKLQSLPSGNISLLCDVLVKEVSELTGYDRVMVYKFHQDEHGEVVAESCRPDLEPYLGLHYPATDIPQASRFLFMKNKVRMICDCQAPPVKVVQDKQIAQLLSLCGSTLRSPHGCHAQYMANMGTIASLVMSVTINEDDEETDNDQQIGRKLWGLVVCHHTNPKFVPFPLRYACEFLIQVLGVQVHREVELAAQTTEKHILQTQTVLCDMLLRDAPVAIVTQSPNVMDLVKCNGAALFYRKKFWMLGVTPTEAQIKDITEWLLEYHGESTGLSTDSLMEAGYPGAAILRYAVCGMAAIKITSKDFLFWFRSHSAKEIKWGGAKHDPGDKDDGRKMHPRSSFKAFLEVVKWRSIAWEDVEMDAI

SEQ ID NO: 26165 - protein, 391 aa, Pimelodendron zoanthogyne
DLEPVNPADVPVTAAGALKSYKLAAKAISKSQSLPSGNISLLCDVLVKEVSDLTGYDRVMVYKFHEDEHGEVIAEYHRPDLEPYLGLHYPATDIPQASRFLFMKNKVRMICDCLAPPVKVIQDRSLAQSLSLCGSTLRSPHGCHAMYMTNMGSIASLVMSVAINEDGSEMDDDQQKGRKLWGLVVCHHTSPRFIPFPLGYACEFLIQVFGVQINKEVEMAAQMREKHILQTQTVLCDMLLRDSPMAIITRSPNVMDLVKCDGAALYYRKKFWLLGVTPTETQIKDIAEWLLECHRESTGLSTDSLIEAGYPGASIIGKAICGMAAVRINSKDFLFWFRSHTAKEIKWGGAKHDPDDKDDGRRMHPRSSFEAFLDVVKWRSLPWEDVEMDAI

SEQ ID NO: 26166 - protein, 391 aa, Podostemum ceratophyllum
DLEPVNPSDVPASAAGALKSYKLAAKAISKLQSLPSGNIGLLCDVLVKEVTDLTGYDRVMIYKFHEDDHGEVVSEWHAPELEPYLGLHFPATDIPQASRFLFMKNKIRMICDCMAAPVNVVQDAGLTQALNLSGSTLRAPHGCHAQYMANMGSIASLIMSVTINEDDEELEQQQQAGDELWGLVVCHHTVPRFRAVPAAVRCEFLIQVFGIQINKEVEMAAQMHEKRVLETQAVLCDMLLRDSPVAIMTRTPNVMDLVKCDGAALYHEKRFWLLGITPKETQIRHLMTWLNENHRETTGLSTASLLEAGFPDAMALGDAVCGMVAIRVNSKDFLFWFRSHTAKEIKWGGAKHDADEKDEERKMHPRSSFKAFLEVVKWQSLPWEDMEMDAI

SEQ ID NO: 26167 - protein, 395 aa, Quiina pteridophylla
DFEPVKPYEVPMTAAGALQSYKLAAKAITRLQALPSGSMERLCDTMVQEVFELTGYDRVMTYKFHDDDHGEVISEITKPGLEPYLGLHYPATDIPQAARFLFMKNKVRMIVDCRAKHVKVLQDDKLPFDLTLCGSTLRAPHSCHLQYMENMDSIASLVMAVVVNEGNEDSDGPDPVHPQKRKRLWGLVVCHNTTPRFVPFPLRYACEFLAQVFAIHVNKELELENQIVEKNILRTQTLLCDMLMRDAPLGIVTQSPNIMDLVKCDGAALLYKSKIWRLGVTPTDLQLQEIALWLSDYHMDSTGLSTDSLYDAGYPGALALGDVVCGMAAVRITSKDLLFWFRSQTAAEVRWGGAKHEPGEKDDGRRMHPRSSFKAFLEVVKTRSLPWKDVEMDAI

SEQ ID NO: 26168 - protein, 360 aa, Stackhousia minima
DLEPVNPADVPITAAGALKSYKLAAKAITRLQSLPSGNISLLCDVLVKEVSELTGYDRVMVYRFHDDDHGEVVAECCRPDLEPYLGLHYPATEIPQASRFLFMKNKVRMICDCLAPPVKVLQDKRLTQPLSLGGSTLRSPHGCHAQYMVNMGSIASLVISVTINDDEDEANSEQHRGRKLWGLVVCHHTTPRSVPFPLRYACEFLIQIFGVQINKEVELSAQKKEKHILRIQTVLCDMLLRNAPEGILAQSPNVMDLVKCDGAALYYRNDVRLVGITPTEKQIRDIAEWLLEHHSESTGLTTDSLMEAGYADASILGEAVCGMAAVKITSKDFLFWFRSHTAKEMKWGGAKHDPDDKDGG

SEQ ID NO: 26169 - protein, 1131 aa, Sorghum bicolor
MSSSRPAHSSSSSSRTRQSSQARILAQTTLDAELNAEYEESGDSFDYSKLVEAQRSTPSEQQGRSGKVIAYLQHIQRGKLIQPFGCLLALDEKSFRVIAFSENAPEMLTTVSHAVPNVDDPPKLGIGTNVRSLFTDPGATALQKALGFADVSLLNPILVQCKTSGKPFYAIVHRATGCLVVDFEPVKPTEFPATAAGALQSYKLAAKAISKIQSLPGGSMEALCNTVVKEVFELTGYDRVMAYKFHEDEHGEVFAEITKPGIEPYLGLHYPATDIPQAARFLFMKNKVRMICDCRAKSVKIIEDEALSIDISLCGSTLRAPHSCHLQYMENMNSIASLVMAVVVNENEEDDEPGPEQPPQQQKKKRLWGLIVCHHESPRYVPFPLRYACEFLAQVFAVHVNKEFELEKQIREKSILRMQTMLSDMLFKEASPLSIVSGSPNIMDLVKCDGAALLYGDKVWRLQTAPTESQIRDIAFWLSEVHGDSTGLSTDSLQDAGYPGAASLGDMICGMAVAKITSKDILFWFRSHTAAEIKWGGAKHDPSDKDDNRRMHPRLSFKAFLEVVKMKSLPWSDYEMDAIHSLQLILRGTLNDALKPVQASGLDNQIGDLKLDGLAELQAVTSEMVRLMETATVPILAVDGNGLVNGWNQKVAELSGLRVDEAIGRHILTLVEDSSVSIVQRMLYLALQGKEEKEVRFELKTHGSKRDDGPVILVVNACASRDLHDHVVGVCFVAQDMTVHKLVMDKFTRVEGDYKAIIHNPNPLIPPIFGADQFGWCSEWNVAMTKLTGWHRDEVIDKMLLGEVFDSSNASCLLKSKDDFVRLCIIINSALAGEEAEKAPFGLFDRNGKYIECLLSVNRKVNADGVVTGVFCFIHVPSDDLQHALHVQQASEQTAQRRLKAFSYMRHAINKPLSGMLYSRETLKSTGLNEEQMRQVHVADSCHRQLNKILADLDQDNITDKSSCLDLDMAEFVLEDVVVSAVSQVLIGCQGKGIRVACNLPERFMKQKVYGDGIRLQQILSDFLFVSVKFSPVGGSVDISSKLTKNSIGENLHLIDFELRIKHQGAGVPAEILSQMYEEDNKEPSEEGLSLLVSRNLLRLMNGNIRHIREAGMSTFILTAELAAAPSAVGQ

SEQ ID NO: 26170 - protein, 1131 aa, Sorghum bicolor
MSSSRPAHSSSSSSRTRQSSQARILAQTTLDAELNAEYEESGDSFDYSKLVEAQRSTPSEQQGRSGKVIAYLQHIQRGKLIQPFGCLLALDEKSFRVIAFSENAPEMLTTVSHAVPNVDDPPKLGIGTNVRSLFTDPGATALQKALGFADVSLLNPILVQCKTSGKPFYAIVHRATGCLVVDFEPVKPTEFPATAAGALQSYKLAAKAISKIQSLPGGSMEALCNTVVKEVFELTGYDRVMAYKFHEDEHGEVFAEITKPGIEPYLGLHYPATDIPQAARFLFMKNKVRMICDCRAKSVKIIEDEALSIDISLCGSTLRAPHSCHLQYMENMNSIASLVMAVVVNENEEDDEPGPEQPPQQQKKKRLWGLIVCHHESPRYVPFPLRYACEFLAQVFAVHVNKEFELEKQIREKSILRMQTMLSDMLFKEASPLSIVSGSPNIMDLVKCDGAALLYGDKVWRLQTAPTESQIRDIAFWLSEVHGDSTGLSTDSLQDAGYPGAASLGDMICGMAVAKITSKDILFWFRSHTAAEIKWGGAKHDPSDKDDNRRMHPRLSFKAFLEVVKMKSLPWSDYEMDAIHSLQLILRGTLNDALKPVQASGLDNQIGDLKLDGLAELQAVTSEMVRLMETATVPILAVDGNGLVNGWNQKVAELSGLRVDEAIGRHILTLVEDSSVSIVQRMLYLALQGKEEKEVRFELKTHGSKRDDGPVILVVNACASRDLHDHVVGVCFVAQDMTVHKLVMDKFTRVEGDYKAIIHNPNPLIPPIFGADQFGWCSEWNVAMTKLTGWHRDEVIDKMLLGEVFDSSNASCLLKSKDDFVRLCIIINSALAGEEAENAPFGLFDRNGKYIECLLSVNRKVNADGVVTGVFCFIHVPSDDLQHALHVQQASEQTAQRRLKAFSYMRHAINKPLSGMLYSRETLKSTGLNEEQMRQVHVADSCHRQLNKILADLDQDNITDKSSCLDLDMAEFVLEDVVVSAVSQVLIGCQGKGIRVACNLPERFMKQKVYGDGIRLQQILSDFLFVSVKFSPVGGSVDISSKLTKNSIGENLHLIDFELRIKHQGAGVPAEILSQMYEEDNKEPSEEGLSLLVSRNLLRLMNGNIRHLREAGMSTFILTAELAAAPSAVGQ

SEQ ID NO: 26171 - protein, 1131 aa, Sorghum bicolor
MSSSRPAHSSSSSSRTRQSSRARILAQTTLDAELNAEYEESGDSFDYSKLVEAQRSTPSEQQGRSGKVIAYLQHIQRGKLIQPFGCLLALDEKSFRVIAFSENAPEMLTTVSHAVPNVDDPPKLGIGTNVRSLFTDPGATALQKALGFADVSLLNPILVQCKTSGKPFYAIVHRATGCLVVDFEPVKPTEFPATAAGALQSYKLAAKAISKIQSLPGGSMEALCNTVVKEVFELTGYDRVMAYKFHEDEHGEVFAEITKPGIEPYLGLHYPATDIPQAARFLFMKNKVRMICDCRAKSVKIIEDEALSIDISLCGSTLRAPHSCHLQYMENMNSIASLVMAVVVNENEEDDEPGPEQPPQQQKKKRLWGLIVCHHESPRYVPFPLRYACEFLAQVFAVHVNKEFELEKQIREKSILRMQTMLSDMLFKEASPLSIVSGSPNIMDLVKCDGAALLYGDKVWRLQTAPTESQIRDIAFWLSEVHGDSTGLSTDSLQDAGYPGAASLGDMICGMAVAKITSKDILFWFRSHTAAEIKWGGAKHDPSDKDDNRRMHPRLSFKAFLEVVKMKSLPWSDYEMDAIHSLQLILRGTLNDALKPVQASGLDNQIGDLKLDGLAELQAVTSEMVRLMETATVPILAVDGNGLVNGWNQKVAELSGLRVDEAIGRHILTLVEDSSVSIVQRMLYLALQGKEEKEVRFELKTHGSKRDDGPVILVVNACASRDLHDHVVGVCFVAQDMTVHKLVMDKFTRVEGDYKAIIHNPNPLIPPIFGADQFGWCSEWNVAMTKLTGWHRDEVIDKMLLGEVFDSSNASCLLKSKDDFVRLCIIINSALAGEEAEKAPFGLFDRNGKYIECLLSVNRKVNADGVVTGVFCFIHVPSDDLQHALHVQQASEQTAQRRLKAFSYMRHAINKPLSGMLYSRETLKSTGLNEEQMRQVHVADSCHRQLNKILADLDQDNITDKSSCLDLDMAEFVLEDVVVSAVSQVLIGCQGKGIRVACNLPERFMKQKVYGDGIRLQQILSDFLFVSVKFSPVGGSVDISSKLTKNSIGENLHLIDFELRIKHQGAGVPAEILSQMYEEDNKEPSEEGLSLLVSRNLLRLMNGNIRHLREAGMSTFILTAELAAAPSAVGQ

SEQ ID NO: 26172 - protein, 1131 aa, Sorghum bicolor
MSSSRPAHSSSSSSRTRQSSRARILAQTTLDAELNAEYEESGDSFDYSKLVEAQRSTPSEQQGRSGKVIAYLQHIQRGKLIQPFGCLLALDEKSFRVIAFSENAPEMLTTVSHAVPNVDDPPKLGIGTNVRSLFTDPGATALQKALGFADVSLLNPILVQCKTSGKPFYAIVHRATGCLVVDFEPVKPTEFPATAAGALQSYKLAAKAISKIQSLPGGSMEALCNTVVKEVFELTGYDRVMAYKFHEDEHGEVFAEITKPGIEPYLGLHYPATDIPQAARFLFMKNKVRMICDCRAKSVKIIEDEALSIDISLCGSTLRAPHSCHLQYMENMNSIASLVMAVVVNENEEDDEPGPEQPPQQQKKKRLWGLIVCHHESPRYVPFPLRYACEFLAQVFAVHVNKEFELEKQIREKSILRMQTMLSDMLFKEASPLSIVSGSPNIMDLVKCDGAALLYGDKVWRLQTAPTESQIRDIAFWLSEVHGDSTGLSTDSLQDAGYPGAASLGDMICGMAVAKITSKDILFWFRSHTAAEIKWGGAKHDPSDKDDNRRMHPRLSFKAFLEVVKMKSLPWSDYEMDAIHSLQLILRGTLNDALKPVQASGLDNQIGDLKLDGLAELQAVTSEMVRLMETATVPILAVDGNGLVNGWNQKVAELSGLRVDEAIGRHILTLVEDSSVSIVQRMLYLALQGKEEKEVRFELKTHGSKRDDGPVILVVNACASRDLHDHVVGVCFVAQDMTVHKLVMDKFTRVEGDYKAIIHNPNPLIPPIFGADQFGWCSEWNVAMTKLTGWHRDEVIDKMLLGEVFDSSNASCLLKSKDDFVRLCIIINSALAGEEAEKAPFGLFDRNGKYIECLLSVNRKVNADGVVTGVFCFIHVPSDDLQHALHVQQASEQTAQRRLKAFSYMRHAINKPLSGMLYSRETLKSTGLNEEQMRQVHVADSCHRQLNKILADLDQDNITDKSSCLDLDMAEFVLEDVVVSAVSQVLIGCQGKGIRVACNLPERFMKQKVYGDGIRLQQILSDFLFVSVKFSPVGGSVDISSKLTKNSIGENLHLIDFELRIKHQGAGVPAEILSQMYEEDNKEQSEEGLSLLVSRNLLRLMNGNIRHLREAGMSTFILTAELAAAPSAVGQ

SEQ ID NO: 26173 - protein, 1131 aa, Sorghum bicolor
MSSSRPAHSSSSSSRTRQSSQARILAQTTLDAELNAEYEESGDSFDYSKLVEAQRSTPSEQQGRSGKVIAYLQHIQRGKLIQPFGCLLALDEKSFRVIAFSENAPEMLTTVSHAVPNVDDPPKLGIGTNVRSLFTDPGATALQKALGFADVSLLNPILVQCKTSGKPFYAIVHRATGCLVVDFEPVKPTEFPATAAGALQSYKLAAKAISKIQSLPGGSMEALCNTVVKEVFELTGYDRVMAYKFHEDEHGEVFAEITKPGIEPYLGLHYPATDIPQAARFLFMKNKVRMICDCRAKSVKIIEDEALSIDISLCGSTLRAPHSCHLQYMENMNSIASLVMAVVVNENEEDDEPGPEQPPQQQKKKRLWGLIVCHHESPRYVPFPLRYACEFLAQVFAVHVNKEFELEKQIREKSILRMQTMLSDMLFKEASPLSIVSGSPNIMDLVKCDGAALLYGDKVWRLQTAPTESQIRDIAFWLSEVHGDSTGLSTDSLQDAGYPGAASLGDMICGMAVAKITSKDILFWFRSHTAAEIKWGGAKHDPSDKDDNRRMHPRLSFKAFLEVVKMKSLPWSDYEMDAIHSLQLILRGTLNDALKPVQASGLDNQIGDLKLDGLAELQAVTSEMVRLMETATVPILAVDGNGLVNGWNQKVAELSGLRVDEAIGRHILTLVEDSSVSIVQRMLYLALQGKEEKEVRFELKTHGSKRDDGPVILVVNACASRDLHDHVVGVCFVAQDMTVHKLVMDKFTRVEGDYKAIIHNPNPLIPPIFGADQFGWCSEWNVAMTKLTGWHRDEVIDKMLLGEVFDSSNASCLLKSKDDFVRLCIIINSALAGEEAEKAPFGLFDRNGKYIECLLSVNRKVNADGVVTGVFCFIHVPSDDLQHALHVQQASEQTAQRRLKAFSYMRHAINKPLSGMLYSRETLKSTGLNEEQMRQVHVADSCHRQLNKILADLDQDNITDKSSCLDLDMAEFVLEDVVVSAVSQVLIGCQGKGIRVACNLPERFMKQKVYGDGIRLQQILSDFLFVSVKFSPVGGSVDISSKLTKNSIGENLHLIDFELRIKHQGAGVPAEILSQMYEEDNKEQSEEGLSLLVSRNLLRLMNGNIRHLREAGMSTFILTAELAAAPSAVGQ

SEQ ID NO: 26174 - protein, 1131 aa, Sorghum arundinaceum
MSSSRPAHSSSSSSRTRQSSRARILAQTTLDAELNAEYEESGDSFDYSKLVEAQRSTPSEQQGRSGKVIAYLQHIQRGKLIQPFGCLLALDEKSFRVIAFSENAPEMLTTVSHAVPNVDDPPKLGIGTNVRSLFTDPGATALQKALGFADVSLLNPILVQCKTSGKPFYAIVHRATGCLVVDFEPVKPTEFPATAAGALQSYKLAAKAISKIQSLPGGSMEALCNTVVKEVFELTGYDRVMAYKFHEDEHGEVFAEITKPGIEPYLGLHYPATDIPQAARFLFMKNKVRMICDCRAKSVKIIEDEALSIDISLCGSTLRAPHSCHLQYMENMNSIASLVMAVVVNENEEDDEPGPEQPPQQQKKKRLWGLIVCHHESPRYVPFPLRYACEFLAQVFAVHVNKEFELEKQIREKSILRMQTMLSDMLFKEASPLSIVSGSPNIMDLVKCDGAALLYGDKVWRLQTAPTESQIRDIAFWLSEVHGDSTGLSTDSLQDAGYPGAASLGDMICGMAVAKITSKDILFWFRSHTAAEIKWGGAKHDPSDKDDNRRMHPRLSFKAFLEVVKMKSLPWSDYEMDAIHSLQLILRGTLNDALKPVQASGLDNQIGDLKLDGLAELQAVTSEMVRLMETATVPILAVDGNGLVNGWNQKVAELSGLRVDEAIGRHILTLVEDSSVSIVQRMLYLALQGKEEKEVRFELKTHGSKRDDGPVILVVNACASRDLHDHVVGVCFVAQDMTVHKLVMDKFTRVEGDYKAIIHNPNPLIPPIFGADQFGWCSEWNVAMTKLTGWHRDEVIDKMLLGEVFDSSNASCLLKSKDDFVRLCIIINSALAGEEAEKAPFGLFDRNGKYIECLLSVNRKVNADGVVTGVFCFIHVPSDDLQHALHVQQASEQTAQRRLKAFSYMRHAINKPLSGMLYSRETLKSTGLNEEQMRQVHVADSCHRQLNKILADLDQDNITDKSSCLDLDMAEFVLEDVVVSAVSQVLIGCQGKGIRVACNLPERFMKQKVYGDGIRLQQILSDFLFVSVKFSPVGGSVDISSKLTKNSIGENLHLIDFELRIKHQGAGVPAEILSQMYEEDNKEQSEEGLSLLVSRNLLRLMNGNIRHIREAGMSTFILTAELAAAPSAVGQ

SEQ ID NO: 26175 - protein, 1131 aa, Sorghum arundinaceum
MSSSRPAHSSSSSSRTRQSSQARILAQTTLDAELNAEYEESGDSFDYSKLVEAQRSTPSEQQGRSGKVIAYLQHIQRGKLIQPFGCLLALDEKSFRVIAFSENAPEMLTTVSHAVPNVDDPPKLGIGTNVRSLFTDPGATALQKALGFADVSLLNPILVQCKTSGKPFYAIVHRATGCLVVDFEPVKPTEFPATAAGALQSYKLAAKAISKIQSLPGGSMEALCNTVVKEVFELTGYDRVMAYKFHEDEHGEVFAEITKPGIEPYLGLHYPATDIPQAARFLFMKNKVRMICDCRAKSVKIIEDEALSIDISLCGSTLRAPHSCHLQYMENMNSIASLVMAVVVNENEEDDEPGPEQPPQQQKKKRLWGLIVCHHESPRYVPFPLRYACEFLAQVFAVHVNKEFELEKQIREKSILRMQTMLSDMLFKEASPLSIVSGSPNIMDLVKCDGAALLYGDKVWRLQTAPTESQIRDIAFWLSEVHGDSTGLSTDSLQDAGYPGAASLGDMICGMAVAKITSKDILFWFRSHTAAEIKWGGAKHDPSDKDDNRRMHPRLSFKAFLEVVKMKSLPWSDYEMDAIHSLQLILRGTLNDALKPVQASGLDNQIGDLKLDGLAELQAVTSEMVRLMETATVPILAVDGNGLVNGWNQKVAELSGLRVDEAIGRHILTLVEDSSVSIVQRMLYLALQGKEEKEVRFELKTHGSKRDDGPVILVVNACASRDLHDHVVGVCFVAQDMTVHKLVMDKFTRVEGDYKAIIHNPNPLIPPIFGADQFGWCSEWNVAMTKLTGWHRDEVIDKMLLGEVFDSSNASCLLKSKDDFVRLCIIINSALAGEEAEKAPFGLFDRNGKYIECLLSVNRKVNADGVVTGVFCFIHVPSDDLQHALHVQQASEQTAQRRLKAFSYMRHAINKPLSGMLYSRETLKSTGLNEEQMRQVHVADSCHRQLNKILADLDQDNITDKSSCLDLDMAEFVLEDVVVSAVSQVLIGCQGKGIRVACNLPERFMKQKVYGDGIRLQQILSDFLFVSVKFSPVGGSVDISSKLTKNSIGENLHLIDFELRIKHQGAGVPAEILSQMYEEDNKEQSEEGLSLLVSRNLLRLMNGNIRHIREAGMSTFILTAELAAAPSAVGQ

SEQ ID NO: 26176 - protein, 1131 aa, Sorghum arundinaceum
MSSSRPAHSSSSSSRTRQSSRARILAQTTLDAELNAEYEESGDSFDYSKLVEAQRSTPSEQQGRSGKVIAYLQHIQRGKLIQPFGCLLALDEKSFRVIAFSENAPEMLTTVSHAVPNVDDPPKLGIGTNVRSLFTDPGATALQKALGFADVSLLNPILVQCKTSGKPFYAIVHRATGCLVVDFEPVKPTEFPATAAGALQSYKLAAKAISKIQSLPGGSMEALCNTVVKEVFELTGYDRVMAYKFHEDEHGEVFAEITKPGIEPYLGLHYPATDIPQAARFLFMKNKVRMICDCRAKSVKIIEDEALSIDISLCGSTLRAPHSCHLQYMENMNSIASLVMAVVVNENEEDDEPGPEQPPQQQKKKRLWGLIVCHHESPRYVPFPLRYACEFLAQVFAVHVNKEFELEKQIREKSILRMQTMLSDMLFKEASPLSIVSGSPNIMDLVKCDGAALLYGDKVWRLQTAPTESQIRDIAFWLSEVHGDSTGLSTDSLQDAGYPGAASLGDMICGMAVAKITSKDILFWFRSHTAAEIKWGGAKHDPSDKDDNRRMHPRLSFKAFLEVVKMKSLPWSDYEMDAIHSLQLILRGTLNDALKPVQASGLDNQIGDLKLDGLAELQAVTSEMVRLMETATVPILAVDGNGLVNGWNQKVAELSGLRVDEAIGRHILTLVEDSSVSIVQRMLYLALQGKEEKEVRFELKTHGSKRDDGPVILVVNACASRDLHDHVVGVCFVAQDMTVHKLVMDKFTRVEGDYKAIIHNPNPLIPPIFGADQFGWCSEWNVAMTKLTGWHRDEVIDKMLLGEVFDSSNASCLLKSKDDFVRLCIIINSALAGEEAEKAPFGLFDRNGKYIECLLSVNRKVNADGVVTGVFCFIHVPSDDLQHALHVQQASEQTAQRRLKAFSYMRHAINKPLSGMLYSRETLKSTGLNEEQMRQVHVADSCHRQLNKILADLDQDNITDKSSCLDLDMAEFVLEDVVVSAVSQVLIGCQGKGIRVACNLPERFMKQKVYGDGIRLQQILSDFLFVSVKFSPVGGSVDISSKLTKNSIGENLHLIDFELRIKHQGAGVPAEILSQMYEEDNKEQSEEGLSLLVSRNLLRLMNGDIRHLREAGMSTFILTAELAAAPSAVGQ

SEQ ID NO: 26177 - protein, 1131 aa, Sorghum arundinaceum
MSSSRPAHSSSSSSRTRQSSRARILAQTTLDAELNAEYEESGDSFDYSKLVEAQRSTPSEQQGRSGKVIAYLQHIQRGKLIQPFGCLLALDEKSFRVIAFSENAPEMLTTVSHAVPNVDDPPKLGIGTNVRSLFTDPGATALQKALGFADVSLLNPILVQCKTSGKPFYAIVHRATGCLVVDFEPVKPTEFPATAAGALQSYKLAAKAISKIQSLPGGSMEALCNTVVKEVFELTGYDRVMAYKFHEDEHGEVFAEITKPGIEPYLGLHYPATDIPQAARFLFMKNKVRMICDCRAKSVKIIEDEALSIDISLCGSTLRAPHSCHLQYMENMNSIASLVMAVVVNENEEDDEPGPEQPPQQQKKKRLWGLIVCHHESPRYVPFPLRYACEFLAQVFAVHVNKEFELEKQIREKSILRMQTMLSDMLFKEASPLSIVSGSPNIMDLVKCDGAALLYGDKVWRLQTAPTESQIRDIAFWLSEVHGDSTGLSTDSLQDAGYPGAASLGDMICGMAVAKITSKDILFWFRSHTAAEIKWGGAKHDPSDKDDNRRMHPRLSFKAFLEVVKMKSLPWSDYEMDAIHSLQLILRGTLNDALKPVQASGLDNQIGDLKLDGLAELQAVTSEMVRLMETATVPILAVDGNGLVNGWNQKVAELSGLRVDEAIGRHILTLVEDSSVSIVQRMLYLALQGKEEKEVRFELKTHGSKRDDGPVILVVNACASRDLHDHVVGVCFVAQDMTVHKLVMDKFTRVEGDYKAIIHNPNPLIPPIFGADQFGWCSEWNVAMTKLTGWHRDEVIDKMLLGEVFDSSNASCLLKSKDDFVRLCIIINSALAGEEAEKAPFGLFDRNGKYIECLLSVNRKVNADGVVTGVFCFIHVPSDDLQHALHVQQASEQTAQRRLKAFSYMRHAINKPLSGMLYSRETLKSTGLNEEQMRQVHVADSCHRQLNKILADLDQDNITDKSSCLDLDMAEFVLEDVVVSAVSQVLIGCQGKGIRVACNLPERFMKQKVYGDGIRLQQILSDFLFVSVKFSPVGGSVDISSKLTKNSIGENLHLIDFELRIKHQGAGVPAEILSQMYEEDNKEQSEEGLSLLVSRNLLRLMNGDIRHIREAGMSTFILTAELAAAPSAVGQ

SEQ ID NO: 26178 - protein, 1131 aa, Sorghum propinquum
MSSSRPAHSSSSSSRTRQSSRARILAQTTLDAELNAEYEESGDSFDYSKLVEAQRSTPSEQQGRSGKVIAYLQHIQRGKLIQPFGCLLAFDEKSFRVIAFSENAPEMLTTVSHAVPNVDDPPKLGIGTNVRSLFTDPGATALQKALGFADVSLLNPILVQCKTSGKPFYAIVHRATGCLVVDFEPVKPTEFPATAAGALQSYKLAAKAISKIQSLPGGSMEALCNTVVKEVFELTGYDRVMAYKFHEDEHGEVFAEITKPGIEPYLGLHYPATDIPQAARFLFMKNKVRMICDCRAKSVKIIEDEALSIDISLCGSTLRAPHSCHLQYMENMNSIASLVMAVVVNENEEDDEPGPEQPPQQQKKKRLWGLIVCHHESPRYVPFPLRYACEFLAQVFAVHVNKEFELEKQIREKSILRMQTMLSDMLFKEASPLSIVSGSPNIMDLVKCDGAALLYGDKVWRLQTAPTESQIRDIAFWLSEVHGDSTGLSTDSLQDARYPGAASLGDMICGMAVAKITSKDILFWFRSHTAAEIKWGGAKHDPSDKDDNRRMHPRLSFKAFLEVVKMKSLPWSDYEMDAIHSLQLILRGTLNDALKPVQASGLDNQIGDLKLDGLAELQAVTSEMVRLMETATVPILAVDGNGLVNGWNQKVAELSGLRVDEAIGRHILTLVEDSSVSIVQRMLYLALQGREEKEVRFELKTHGSKRDDGPVILVVNACASRDLHDHVVGVCFVAQDMTVHKLVMDKFTRVEGDYKAIIHNPNPLIPPIFGADQFGWCSEWNVAMTKLTGWHRDEVIDKMLLGEVFDSSNASCLLKSKDDFVRLCIIINSALAGEEAEKAQFGLFDRNGKYIECLLSVNRKVNADGVVTGVFCFIHVPSDDLQHALHVQQASEQTAQRRLKAFSYMRHAINKPLSGMLYSRETLKSTGLNEEQMRQVHVADSCHRQLNKILADLDQDNITDKSSCLDLDMAEFVLEDVVVSAVSQVLIGCQGKGIRVACNLPERFMKQKVYGDGIRLQQILSDFLFVSVKFSPVGGSVDISSKLTKNSIGENLHLIDFELRIKHQGAGVPAEILSQMYEEDNKEQSEEGLSLLVSRNLLRLMNGDIRHLREAGMSTFILTAELAAAPSAVGQ

SEQ ID NO: 26179 - protein, 1178 aa, Sorghum bicolor
MASGSRATPTRSPSSARPEAPRHAHHHHHHHSQSSGGSTSRAGGGGGGGGGGGGTAATATATATESVSKAVAQYTLDARLHAVFEQSGASGRSFDYSQSLRAPPTPSSEQQIAAYLSRIQRGGHIQPFGCTLAVADDSSFRLLAFSENAADLLDLSPHHSVPSLDSAAPPPVSLGADARLLFSPSSAVLLERAFAAREISLLNPLWIHSRVSSKPFYAILHRIDVGVVIDLEPARTEDPALSIAGAVQSQKLAVRAISRLQALPGGDIKLLCDTVVEHVRELTGYDRVMVYRFHEDEHGEVVAESRRDNLEPYLGLHYPATDIPQASRFLFRQNRVRMIADCHATPVRVIQDPGMSQPLCLVGSTLRAPHGCHAQYMANMGSIASLVMAVIISSGGDDEQTGRGGISSAMKLWGLVVCHHTSPRCIPFPLRYACEFLMQAFGLQLNMELQLAHQLSEKHILRTQTLLCDMLLRDSPTGIVTQSPSIMDLVKCDGAALYYHGKYYPLGVTPTESQIKDIIEWLTVCHGDSTGLSTDSLADAGYLGAAALGDAVCGMAVAYITPSDYLFWFRSHTAKEIKWGGAKHHPEDKDDGQRMHPRSSFKAFLEVVKSRSLPWENAEMDAIHSLQLILRDSFRDAAEGTSNSKAIVNGQVQLGELELRGINELSSVAREMVRLIETATVPIFAVDTDGCINGWNAKIAELTGLSVEEAMGKSLVNDLIFKESEEIVEKLLSRALRGEEDKNVEIKLKTFGSEQSNGAIFVIVNACSSRDYTQNIVGVCFVGQDVTGQKVVMDKFINIQGDYKAIVHNPNPLIPPIFASDENTSCSEWNTAMEKLTGWSRGEVVGKFLIGEVFGSFCRLKGPDALTKFMVVIHNAIGGQDYEKFPFSFFDKNGKYVQALLTANTRSKMDGKSIGAFCFLQIASAEIQQAFEIQRQQEKKCYARMKELAYICQEIKNPLSGIRFTNSLLQMTDLNDDQRQFLETCSACEKQMSKIVKDTTLQSIEDGSLVLEKSEFSFGDVMNAVVSQAMLLLRERDLQLIRDIPDEIKDASAYGDQFRIQQVLADFLLSMVRSAPSENGWVEIQVRPNVKQNSDGTDTELFIFRFACPGEGLPADIVQDMFSNSQWSTQEGVGLSTCRKILKLMGGEVQYIRESERSFFLIVLELPQPRPAADREIS

SEQ ID NO: 26180 - protein, 1178 aa, Sorghum bicolor
MASGSRATPTRSPSSARPEAPRHAHHHHHHHSQSSGGSTSRAGGGGGGGGGGGGTAATATATATESVSKAVAQYTLDARLHAVFEQSGASGRSFDYSQSLRAPPTPSSEQQIAAYLSRIQRGGHIQPFGCTLAVADDSSFRLLAFSENAADLLDLSPHHSVPSLDSAAPPPVSLGADARLLFSPSSAVLLERAFAAREISLLNPLWIHSRVSSKPFYAILHRIDVGVVIDLEPARTEDPALSIAGAVQSQKLAVRAISRLQALPGGDIKLLCDTVVEHVRELTGYDRVMVYRFHEDEHGEVVAESRRDNLEPYLGLHYPATDIPQASRFLFRQNRVRMIADCHATPVRVIQDPGMSQPLCLVGSTLRAPHGCHAQYMANMGSIASLVMAVIISSGGDDEQTGRGGISSAMKLWGLVVCHHTSPRCIPFPLRYACEFLMQAFGLQLNMELQLAHQLSEKHILRTQTLLCDMLLRDSPTGIVTQSPSIMDLVKCDGAALYYHGKYYPLGVTPTESQIKDIIEWLTVCHGDSTGLSTDSLADAGYLGAAALGDAVCGMAVAYITPSDYLFWFRSHTAKEIKWGGAKHHPEDKDDGQRMHPRSSFKAFLEVVKSRSLPWENAEMDAIHSLQLILRDSFRDAAEGTSNSKAIVNGQAQLGELELRGINELSSVPREMVRLIETATVPIFAVDTDGCINGWNAKIAELTGLSVEEAMGKSLVNDLIFKESEEIVEKLLSRALRGEEDKNVEIKLKTFGSEQSNGAIFVIVNACSSRDYTQNIVGVCFVGQDVTGQKVVMDKFINIQGDYKAIVHNPNPLIPPIFASDENTSCSEWNTAMEKLTGWSRGEVVGKFLIGEVFGSFCRLKGPDALTKFMVVIHNAIGGQDYEKFPFSFFDKNGKYVQALLTANTRSKMDGKSIGAFCFLQIASAEIQQAFEIQRQQEKKCYARMKELAYICQEIKNPLSGIRFTNSLLQMTDLNDDQRQFLETCSACEKQMSKIVKDATLQSIEDGSLVLEKSEFSFGDVMNAVVSQAMLLLRERDLQLIRDIPDEIKDASAYGDQFRIQQVLADFLLSMVRSAPSENGWVEIQVRPNVKQNSDGTDTELFIFRFACPGEGLPADIVQDMFSNSQWSTQEGVGLSTCRKILKLMGGEVQYIRESERSFFLIVLELPQPRPAADREIS

SEQ ID NO: 26181 - protein, 1178 aa, Sorghum arundinaceum
MASGSRATPTRSPSSARPEAPRHAHHHHHNHSQSSGGSTSRAGGGGGGGGGGGGTAATATATATESVSKAVAQYTLDARLHAVFEQSGASGRSFDYSQSLRAPPTPSSEQQIAAYLSRIQRGGHIQPFGCTLAVADDSSFRLLAFSENAADLLDLSPHHSVPSLDSAAPPPVSLGADARLLFSPSSAVLLERAFAAREISLLNPLWIHSRVSSKPFYAILHRIDVGVVIDLEPARTEDPALSIAGAVQSQKLAVRAISRLQALPGGDIKLLCDTVVEHVRELTGYDRVMVYRFHEDEHGEVVAESRRDNLEPYLGLHYPATDIPQASRFLFRQNRVRMIADCHATPVRVIQDPGMSQPLCLVGSTLRAPHGCHAQYMANMGSIASLVMAVIISSGGDDEQTGRGGISSAMKLWGLVVCHHTSPRCIPFPLRYACEFLMQAFGLQLNMELQLAHQLSEKHILRTQTLLCDMLLRDSPTGIVTQSPSIMDLVKCDGAALYYHGKYYPLGVTPTESQIKDIIEWLTVCHGDSTGLSTDSLADAGYLGAAALGDAVCGMAVAYITPSDYLFWFRSHTAKEIKWGGAKHHPEDKDDGQRMHPRSSFKAFLEVVKSRSLPWENAEMDAIHSLQLILRDSFRDAAEGTSNSKAIVNGQVQLGELELRGINELSSVAREMVRLIETATVPIFAVDTDGCINGWNAKIAELTGLSVEEAMGKSLVNDLIFKESEEIVEKLLSRALRGEEDKNVEIKLKTFGSEQSNGAIFVIVNACSSRDYTQNIVGVCFVGQDVTGQKVVMDKFINIQGDYKAIVHNPNPLIPPIFASDENTSCSEWNTAMEKLTGWSRGEVVGKFLIGEVFGSFCRLKGPDALTKFMVVIHNAIGGQDYEKFPFSFFDKNGKYVQALLTANTRSKMDGKSIGAFCFLQIASAEIQQAFEIQRQQEKKCYARMKELAYICQEIKNPLSGIRFTNSLLQMTDLNDDQRQFLETCSACEKQMSKIVKDATLQSIEDGSLVLEKSEFSFGDVMNAVVSQAMLLLRERDLQLIRDIPDEIKDASAYGDQFRIQQVLADFLLSMVRSAPSENGWVEIQVRPNVKQNSDGTDTELFIFRFACPGEGLPADIVQDMFSNSQWSTQEGVGLSTCRKILKLMGGEVQYIRESERSFFLIVLELPQPRPAADREIS

SEQ ID NO: 26182 - protein, 1177 aa, Sorghum x drummondii
MASGSRATPTRSPSSARPEAPRHAHHHHHHSQSSGGSTSRAGGGGGGGGGGGGTAATATATATESVSKAVAQYTLDARLHAVFEQSGASGRSFDYSQSLRAPPTPSSEQQIAAYLSRIQRGGHIQPFGCTLAVADDSSFRLLAFSENAADLLDLSPHHSVPSLDSAAPPPVSLGADARLLFSPSSAVLLERAFAAREISLLNPLWIHSRVSSKPFYAILHRIDVGVVIDLEPARTEDPALSIAGAVQSQKLAVRAISRLQALPGGDIKLLCDTVVEHVRELTGYDRVMVYRFHEDEHGEVVAESRRDNLEPYLGLHYPATDIPQASRFLFRQNRVRMIADCHATPVRVIQDPGMSQPLCLVGSTLRAPHGCHAQYMANMGSIASLVMAVIISSGGDDEQTGRGGISSAMKLWGLVVCHHTSPRCIPFPLRYACEFLMQAFGLQLNMELQLAHQLSEKHILRTQTLLCDMLLRDSPTGIVTQSPSIMDLVKCDGAALYYHGKYYPLGVTPTESQIKDIIEWLTVCHGDSTGLSTDSLADAGYLGAAALGDAVCGMAVAYITPSDYLFWFRSHTAKEIKWGGAKHHPEDKDDGQRMHPRSSFKAFLEVVKSRSLPWENAEMDAIHSLQLILRDSFRDAAEGTSNSKAIVNGQVQLGELELRGINELSSVAREMVRLIETATVPIFAVDTDGCINGWNAKIAELTGLSVEEAMGKSLVNDLIFKESEEIVEKLLSRALRGEEDKNVEIKLKTFGSEQSNGAIFVIVNACSSRDYTQNIVGVCFVGQDVTGQKVVMDKFINIQGDYKAIVHNPNPLIPPIFASDENTSCSEWNTAMEKLTGWSRGEVVGKFLIGEVFGSFCRLKGPDALTKFMVVIHNAIGGQDYEKFPFSFFDKNGKYVQALLTANTRSKMDGKSIGAFCFLQIASAEIQQAFEIQRQQEKKCYARMKELAYICQEIKNPLSGIRFTNSLLQMTDLNDDQRQFLETCSACEKQMSKIVKDATLQSIEDGSLVLEKSEFSFGDVMNAVVSQAMLLLRERDLQLIRDIPDEIKDASAYGDQFRIQQVLADFLLSMVRSAPSENGWVEIQVRPNVKQNSDGTDTELFIFRFACPGEGLPADIVQDMFSNSQWSTQEGVGLSTCRKILKLMGGEVQYIRESERSFFLIVLELPQPRPAADREIS

SEQ ID NO: 26183 - protein, 1177 aa, Sorghum propinquum
MASGSRATPTRSPSSARPEAPRHAHHHHHHSQSSGGSTSRAGGGGGGGGGGGGTAATATATATESVSKAVAQYTLDARLHAVFEQSGASGRSFDYSQSLRAPPTPSSEQQIAAYLSRIQRGGHIQPFGCTLAVADDSSFRLLAFSENAADLLDLSPHHSVPSLDSAAPPHVSLGADARLLFSPSSAVLLERAFAAREISLLNPLWIHSRVSSNPFYAILHRIDVGVVIDLEPARTEDPALSIAGAVQSQKLAVRAISRLQALPGGDIKLLCDTVVEHVRELTGYDRVMVYRFHEDEHGEVVAESRRDNLEPYLGLHYPATDIPQASRFLFRQNRVRMIADCHATPVRVIQDPGMSQPLCLVGSTLRAPHGCHAQYMANMGSIASLVMAVIISSGGDDEQTGRGGISSAMKLWGLVVCHHTSPRCIPFPLRYACEFLMQAFGLQLNMELQLAHQLSEKHILRTQTLLCDMLLRDSPTGIVTQSPSIMDLVKCDGAALYYHGKYYPLGVTPTESQIKDIIEWLTVCHGDSTGLSTDSLADAGYLGAAALGDAVCGMAVAYITPSDYLFWFRSHTAKEIKWGGAKHHPEDKDDGQRMHPRSSFKAFLEVVKSRSLPWENAEMDAIHSLQLILRDSFRDAAEGTSNSKAIVNGQVQLGELELRGINELSSVAREMVRLIETATVPIFAVDTDGCINGWNAKIAELTGLSVEEAMGKSLVNDLIFKESEEIVEKLLSRALRGEEDKNVEIKLKTFGSEQSNGAIFVIVNACSSRDYTQNIVGVCFVGQDVTGQKVVMDKFINIQGDYKAIVHNPNPLIPPIFASDENTSCSEWNTAMEKLTGWSRGEVVGKFLIGEVFGSFCRLKGPDALTKFMVVIHNAIGGQDYEKFPFSFFDKNGKYVQALLTANTRSKMDGKSIGAFCFLQIASAEIQQAFEIQRQQEKKCYARMKELAYICQEIKNPLSGIRFTNSLLQMTDLNDDQRQFLETCSACEKQMSKIVKDATLQSIEDGSLVLEKSEFSFGDVMNAVVSQAMLLLRERDLQLIRDIPDEIKDASAYGDQFRIQQVLADFLLSMVRSAPSENGWVEIQVRPNVKQNSDGTDTELFIFRFACPGEGLPADIVQDMFSNSQWSTQEGVGLSTCRKILKLMGGEVQYIRESERSFFLIVLELPQPRPAADREIS

SEQ ID NO: 26184 - protein, 330 aa, Quercus suber
MAARSTSHSASSFLLIVSLAVLVIFSGNSSAKLSTNFYYKSCPKVFSTVQSVVHSAISKQPRQGASLLRLHFHDCFVNGCDGSVLLDDTPTFTGEKTAGPNKGSIRGFEFVDEIKSKVEKECPGVVSCADILAIAARDSVKILGGPKWDVKLGRRDSKTASLKAANSGVIPPPTSTLSNLINRFKAKGLSTKDMVALSGAHTIGQARCTVFRDRIYKDKNIDSSFAKTRQNTCPKTTGLPGDNKIAPLDLQTPTAFDNYYYKNLIKQKGLLRSDQQLFNGGSTDSLVKKYSQDTKSFYSDFVNAMIKMGDIQPLTGSSGEIRKNCRKVNH

SEQ ID NO: 26185 - protein, 330 aa, Quercus suber
MAAHSTSHSASSFLLIVSLAVLVIFTGNSSAKLSTNFYSKSCPKVFSTVQSVVHSAVSKQPRQGASLLRLHFHDCFVNGCDGSILLDDTPTFTGEKTARPNNGSIRAFEVVDEIKSKVEKECPGVVSCADILAIAARDSVKILGGPKWDVKLGRRDSKTASFSAANSGVIPPPTSTLGNLINRFKAKGLSTKDMVALSGAHTVGQARCTVFRDRIYKDKNIDSSFAKTRQNKCPKTTGLPGDNKIAPLDLQTPTAFDNYYYKNLIKEKGLLRSDQQLFNGGSTDSLVKKYSQDTKTFYSDFVNAMIKMGDIQPLTGSSGEIRKNCRKVNN

SEQ ID NO: 26186 - protein, 392 aa, Azohydromonas lata
MTDIVIVAAARTAVGKFGGTLAKTPAPELGAVVIKALLEKTGVKPDQIGEVIMGQVLAAGAGQNPARQAMMKAGIAKETPALTINAVCGSGLKAVMLAAQAIAWGDSDIVIAGGQENMSASPHVLMGSRDGQRMGDWKMVDTMINDGLWDVYNKYHMGITAENVAKEHDISRDQQDALALASQQKATAAQEAGRFKDEIVPVSIPQRKGDPVLFDTDEFINKKTTAEALAGLRPAFDKAGSVTAGNASGINDGAAAVMVMSAAKAKELGLTPMARIKSFGTSGLDPATMGMGPVPASRKALERAGWQVGDVDLFELNEAFAAQACAVNKELGVDPAKVNVNGGAIAIGHPIGASGCRVLVTLLHEMQRRDAKKGLAALCIGGGMGVSLTVER

SEQ ID NO: 26187 - protein, 581 aa, Ipomoea batatas
MFRAHHFRRSLRSLLAHSHSHPHSNPHINPRLLCSLSSQPPSSDAEVRKYIGYTVLVLGCAAATYYSFPFPADAKHKKAQLFRYAPLPDDLHTVTNWSGTHEVQTRTFLQPESLQELEAAVKDSNEKKQKIRPVGSGLSPNGIGLTRAGMVNLGLMDKVLEVDKEKKRVTVQAGIRVQQLVDSIKEYGLTLQNFASIREQQVGGIVQVGAHGTGARLPPIDEQVISMKLVTPAKGTIEISKEKDPDLFYLARCGLGGLGVVAEVTLQCVERQELVEHTYISNMKDIKKNHKKLLSENKHVKYLHIPYTDAVVVVTCNPISKWKGPPKYKPKYSPEEAVGHVQDLYRESLKKYRSTENESEINELSFTELRDKLLALDPLNTDHVKKTNQAEAEFWRKSEGYRVGWSDEILGFDCGGHQWVSETCFPAGTLSKPSMKDLEFIEQLMQLIEKESIPAPAPIEQRWTACSKSLMSPAYSSVDDDIFSWVGIIMYLPTMDARERKHITEEFFHYRHLTQAHLWDHYSAYEHWAKIEVPKDKEELQALQARLRKKFPVDAYNRARQELDPNRILSNNMLEKLFPSS

SEQ ID NO: 26188 - protein, 594 aa, [Brevibacterium] flavum
MTGAQAIVRSLEELNADIVFGIPGGAVLPVYDPLYSSTKVRHVLVRHEQGAGHAATGYAQVTGRVGVCIATSGPGATNLVTPIADANLDSVPMVAITGQVGSGLLGTDAFQEADIRGITMPVTKHNFMVTDPNDIPQALAEAFHLAITGRPGPVLVDIPKDVQNAELDFVWPPKIDLPGYRPVSTPHARQIEQAVKLIGEAKKPVLYVGGGVIKADAHEELRAFAEYTGIPVVTTLMALGTFPESHELHMGMPGMHGTVSAVGALQRSDLLIAIGSRFDDRVTGDVDTFAPDAKIIHADIDPAEIGKIKQVEVPIVGDAREVLARLLETTKASKAETEDISEWVDYLKGLKARFPRGYDEQPGDLLAPQFVIETLSKEVGPDAIYCAGVGQHQMWAAQFVDFEKPRTWLNSGGLGTMGYAVPAALGAKAGAPDKEVWAIDGDGCFQMTNQELTTAAVEGFPIKIALINNGNLGMVRQWQTLFYEGRYSNTKLRNQGEYMPDFVALSEGLGCVAIRVTKAEEVLPAIQKAREINDRPVVIDFIVGEDAQVWPMVSAGSSNSDIQYALGLRPFFDGDESAAEDPADIHASVDSTEA

SEQ ID NO: 26189 - protein, 251 aa, Antithamnion sp.
MNNRILLNIKNLDVTIGETQILNSLNLSIKPGEIHAIMGKNGSGKSTLAKVIAGHPSYKITNGQILFENQDVTEIEPEDRSHLGIFLAFQYPVEIPGVTNADFLRIAYNAKRAFDNKEELDPLSFFSFIENKISNIDLNSTFLSRNVNEGFSGGEKKKNEILQMSLLNSKLAILDETDSGLDIDALKTIAKQINSLKTQENSIILITHYQRLLDYIKPDYIHVMQKGEIIYTGGSDTAMKLEKYGYDYLNK

SEQ ID NO: 26190 - protein, 339 aa, Parachlorella kessleri
MLSSALYQQAGLSGLLRASAMGPQTPFIASPKETQADPMAFVKDLLAGGTAGAISKTAVAPIERVKLLLQTQDSNPMIKSGQVPRYTGIVNCFVRVSSEQGVASFWRGNLANVVRYFPTQAFNFAFKDTIKGLFPKYSPKTDFWRFFVVNLASGGLAGAGSLLIVYPLDFARTRLAADVGSGKSREFTGLVDCLSKVVKRGGPMALYQGFGVSVQGIIVYRGAYFGLYDTAKGVLFKDERTANFFAKWAVAQAVTAGAGVLSYPFDTVRRRLMMQSGGERQYNGTIDCWRKVAQQEGMKAFFKGAWSNVLRGAGGAFVLVLYDEIKKFINPNAVSSASE

SEQ ID NO: 26191 - protein, 590 aa, Asparagus officinalis
MCGILAVLGCSDDSQAKRVRVLELSRRLKHRGPDWSGLCQHGDCFLSHQRLAIIDPASGDQPLYNEDKSIVVTVNGEIYNHEELRRRLPDHKYRTGSDCEVIAHLYEEHGEDFVDMLDGMFSFVLLDTRNNCFVAARDAVGITPLYIGWGLDGSVWLSSEMKGLNDDCEHFEVFPPGNLYSSRSGSFRRWYNPQWYNETIPSAPYDPLVLRKAFEDAVIKRLMTDVPFGVLLSGGLDSSLVAAVTARHLAGSKAAEQWGTQLHSFCVGLEGSPDLKAAKEVAEYLGTVHHEFHFTVQDGIDAIEDVIFHIETYDVTTIRASTPMFLMARKIKSLGVKMVISGEGSDEIFGGYLYFHKAPNKEEFHHETCRKIKALHQYDCLRANKATSAWGLEARVPFLDKEFMDVAMSIDPESKMIKPDLGRIEKWVLRKAFDDEENPYLPKHILYRQKEQFSDGVGYSWIDGLKAHAAKHVTDRMMLNAARIYPHNTPTTKEAYYYRMIFERFFPQNSARFTVPGGPSIACSTAKAIEWDARWSNNLDPSGRAALGVHDSAYDPPLPSSISAGKGAAMITNKKPRIVDVATPGVVIST

SEQ ID NO: 26192 - protein, 860 aa, Dichelobacter nodosus
MEFMQMSKKFTARFQEALSAAQSLAVGKDHAYIEPLHIFSALLDQEGSSIIAIAQRAGGQIGAVRQAVMQALERLPRVKNPTGDVNISPESMRLLNLCDKYAQQNGDEYISSELFLRAVYDAKGDLEQLLRANGLEKAAVVAAIDAVRGGEAVTDEYAEDKRGALKKYTLDVTQRPLDGKIDPVIGRDEEIRRAMQILQRRSKNNPVLIGEPGVGKTAIVEGLAQRIADRAVPESLKGKRLLSLDLAALLAGTKYRGEFEERLKAVLDEITKADGQIILFIDEIHTMVGAGKSEGSLDAGNMLKPALARGDLHCIGATTLDEYRQYMEKDAALERRFQKVIVDEPSVEDTIAILRNLQERYEVHHGINITDPALVAAAQLSHRYISGRKLPDKAIDLMDEAAAQIRMELDSKPEVMDKIDRRLIQLQIERMALEKETDAASKRRLSDLEAEIAAQEKEYADLEEIWLAEKAGNAGAAEIKEQLDKLRVELEAAKRRGDFARASEIQYGLIPAKEKQLLENEQQTEQRPHRLMRNKVTAEEIAEIVSRWTGIPVAKMMEGEKERLLHLETVLNERVVGQKTAVEAVANAIRRNRAGLSDPKRPIGSFLFLGPTGVGKTELCRTLAQFLFDSEENMVRIDMSEFMEKHSVARLIGAPPGYVGYDQGGYLTEAVRRKPYSVVLFDEVEKAHSDVFNTLLQVLDEGRLTDGQGRTVDFRHTVIIMTSNLGSDMIQLLAEKSYEEMKSAVMEIVMAHFRPEFINRIDEAIVFHGLAKTHMYRIAQIQLERLRQRLQTRELLLSVEEDAINQLVELGYDPLFGARPLKRAIQNYIENPLAQALLAGQYLPQSTITIGFDGTNFTFH

SEQ ID NO: 26193 - protein, 367 aa, Bacillus cereus ATCC 14579
MSVNRILVINPGSTSTKIGVFDNERPVLEETIRHDVEQIGKYKRIIDQYEFRKETILEVLHSHGINISKLNAVCGRGGLLRPIEGGTYTVNDAMLEDLKNGFSGHHASNLGGILAYEIASGLNIPAFIVDPVVVDEMEPVARISGIAGMERKSIFHALNQKAVARKVAEQLNHKYEDLNLLVTHMGGGITVGAHKKGRVIDVNNGLNGEGPFSPERAGTVPVGQLVEMCFSGEYYRDEMIKKLVGQGGLVSLIGTNDAIKVEQMVEKGDPEATLIYKAMAYQVAKEIGGASAVLHGKIDAIVLTGGLAYSKILVDEIKERVDWIADVIVHPGEDELEALAEGALRVLREEEAPKEYVVREKETVARG

SEQ ID NO: 26194 - protein, 645 aa, Pirellula sp.
MAQGEKIIGIDLGTTNSVVAIMEGSEPKVIPNPEGNRLTPSVVAFTDKQETIVGEPARRQAVTNPKRTVYSAKRFMGRRHNEVQSEEKMVPYGITGGPGDYVKIQVGDSEYTPQEISAKVLRKLKESAESYLGHKVNKAVITVPAYFNDAQRQATKDAGQIAGLEVARIINEPTAAALAYGLDKKKDESIIVFDLGGGTFDVSVLEVADSGDEEQESRVFQVVSTSGDTHLGGDDFDEALINYVASEFQKDNGIDLRNDAMALQRLQEACEKAKKELSTLPETDINLPFITMDASGPKHLTMKITRSKFEELIDALVERCRGPVLQALKDAGMDPKDIDEVVLVGGSTRVPKVREVVKSIFGKDPHQGVNPDEVVAVGAAIQGSVLAGDRNDVLLLDVTPLTLGIETEGGVMTALVERNTTIPAEKKNVFSTAADNQTAVTVRVFQGERKMANANRLLAEFNLEDIPAAPRGVPQIEVKFDIDQNGILSVSAKELKTGKEANVEIKDSGALSDSDIEQMQKDAEANAEEDKRQFELVEARNKVNQQVYQLEKLMGENDDKLSDDDKAPMNAAIEKVKKAAEGDDLAEIKAASDELEAASQAFSKVLYEKTDAAGEAGADAAGAAGATAGGGDDDDAIDAEFEVKE

SEQ ID NO: 26195 - protein, 126 aa, Rhodopseudomonas palustris CGA009
MFAVIKTGGRQYRVVPEDVLEVGKIDGDVGSIIQLGEVLVLGGDTPVLGAPTVAGATVAAEVLDHKRGPKVIAFKKRRRKHSKRKRGYRDEITVLRITEILADGKKPSVGPRAKRTKAAPAAEAAE

SEQ ID NO: 26196 - protein, 353 aa, Rhodopseudomonas palustris CGA009
MKFLDEAKVYIRSGDGGNGCVAFRREKFIEFGGPNGGNGGRGGDIIVEAADGLNTLIDYRYQQHFKAQKGGNGMGSDRHGAGGKDIVMKVPVGTQIFDEDKETLIHDFTKVGERFVLAKGGNGGFGNAHFKSSTNRAPRHANPGLPGEERWIWLRLKLIADAGLVGLPNAGKSTFLSKVSAAKPKIADYPFTTLHPQLGVVNSDGREFVLADIPGLIEGAHEGAGLGDRFLGHIERCRVLLHLIDATCEHAGKAYKTVRGELEAYAETLVDKIEIVALNKIDAVEPDELKKQKDRLKRAAKKTPLLLSGVTGQGVPEALRALVAVIGEAPVSDKAIGTADNPAEAKPWAPQDA

SEQ ID NO: 26197 - protein, 631 aa, Rhodopseudomonas palustris CGA009
MGKVIGIDLGTTNSCVAVMDGKSAKVIENAEGMRTTPSIVAITDDGERLVGQPAKRQAVTNPERTFFAVKRLIGRRYDDPMVEKDKGLVPYKIVKASNGDAWVEADGKTYSPSQVSAFILQKMKETAEAHLGQKVDQAVITVPAYFNDAQRQATKDAGKIAGLEVLRIINEPTAAALAYGLDKAKTGTIAVYDLGGGTFDVSILEIGDGVFEVKSTNGDTFLGGEDFDMRLVNYLADEFQKEQGIDLRKDKLALQRLKEAAEKAKIELSSTTQTEINLPFITADQSGPKHLTMKLTRAKFEALVDDLVQKTIEPCRKALKDAGLTAGEISEVVLVGGMTRMPKVQEVVKQLFGKEPHKGVNPDEVVAIGAAIQAGVLQGDVKDVLLLDVTPLSLGIETLGGVFTRIIDRNTTIPTKKSQVFSTAEDNQNAVTIRVFQGEREMAADNKMLGQFDLMGIPPAPRGMPQIEVTFDIDANGIVNVSAKDKATGKEQQIRIQASGGLSDSEIDKMVKDAEANAAEDKKRREAVDAKNHADALVHSTEKALAEHGSKVDESERRSIEDALSDLREALKGDDAEAIKAKSNTLAQASMKLGEAMYKQAEAAGGAQQAGKDDVVDAEFTEVDDDKKKSA

SEQ ID NO: 26198 - protein, 445 aa, Rhodopseudomonas palustris CGA009
MTTILKSLPKGENVGIAFSGGLDTSAALLWMKQKGAKVFAYTANLGQPDEADYDAIPRKAMEFGAEKARLVDCRTQLVHEGIAAIQAGAFHVSTGGIAYFNTTPLGRAVTGTMLVSAMKEDGVNIWGDGSTYKGNDIERFYRYGLLTNPALRIYKPWLDQQFIDELGGRAEMSAFMTSHGFAYKMSAEKAYSTDSNLLGATHEAKDLEHLDSGIKIVNPIMGVPFWRDDCAVKAEAVTVRFEEGQPVALNGQTFTDPVAMFYEANAIGGRHGLGMSDQIENRIIEAKSRGIYEAPGMALLHIAYERLVTGIHNEDTIEQYRINGMKLGRLLYQGRWFDSQALMLRETAQRWVARAVTGEVTLELRRGNDYSILNTVSPNLTYAPERLSMEKVEDAPFTPADRIGQLTMRNLDITDTRAKLGLYAKTGLLSSGEGTPIPQLENDKG

SEQ ID NO: 26199 - protein, 333 aa, Rhodopseudomonas palustris CGA009
MSVKKKPLVVVTRKLPDSIETRMRELFDARLNLDDVPMTAEQLAEAARTADVLVPTVTDEITAAMVNQPDCKLRLIAHFGNGIDNLDVAAAHARGITVTNTPKVLTEDTADMTMALILAVPRRMIEGAALLTDGGEWPGWSPTWMLGRRLGGKRLGIIGMGRIGQAVARRARAFGLQIHYHNRKPVAPRIADELGATYWDSLDQMLARMDIISVNCPHTPATFHLLSARRLKLVRKDAFIVNTARGEVIDEETLTKLIEAGDIAGAGLDVYEHEPAVNPKLVRLAKHGKVVLLPHMGSATIEGRVEMGEKVIINIRTFLDNHKPPDRVLPGML

SEQ ID NO: 26200 - protein, 328 aa, Rhodopseudomonas palustris CGA009
MPGETGASKPIDLLIYGPRKEVIDQGFPAGYVLHKCERADDLEKLSDEARGRIRGIAVTGLVPTGAAMLARFPKLEIVASFGVGYDHVDSAWAAQHGVIVTNTPDVLTEEVADTALGLLIATLREFIRADKYVRAGRWQTQDYPLSTGSLRDRKVGMVGMGRIGQAIARRLDASLVPVVYHSRKPAPGVAYKHYPNLIEMAKEVDTLVVITPGGPTTAKLINAEVLDALGPRGVVINVARGSVIDEAALIEALKSGKILAAGLDVFAAEPTVPEELRAMDNVVLLPHIGSASVVTRNAMNQLVVDNLKAWFSGRPPLTPVAETPVKGR

SEQ ID NO: 26201 - protein, 402 aa, Rhodopseudomonas palustris CGA009
MADVFVCDAVRTPIGRYGGSLAKVRTDDLAAVPIKALMAKHPDMDWSAVDEVFFGCANQAGEDNRNVARMAALLAGLPDSVPGQTLNRLCASGLDAVGAAGRAIRGGEIDLAITGGVESMTRAPFVQGKATEAFARSADIFDTTIGWRFINPLMKQQYGVDSMPETGENVAEEFQISRADQDAFAIRSQQRAGAAIAAGYFAEEIAPVTYAGGKAGPITVDKDEHPRPETTLEGLAKLKPIVRNPGTVTAGNASGVNDGAAALLIASEAAVKKYGLTPRAKILGLASAAVPPRIMGIGPVPATRKLMERLGLKISDFDLIELNEAFASQGIACLRQLGVADDADFVNPHGGAIALGHPLGMSGARLALTAVHGLEKRGGKLALATMCVGVGQGVAMAIEKLN

SEQ ID NO: 26202 - protein, 392 aa, Rhodopseudomonas palustris CGA009
MSDDVVIVSAARTAVGSFNGAFANTPAHELGAVAIKAALERGGIDPAQVSEVIMGQILTAGQGQNPARQASIAAGIPVDSPAWGINQLCGSGLRSVALGYQALMNGDSDIVIAGGQESMSMAPHAQYLRGGVKMGAVELVDTMLKDGLWDAFNGYHMGNTAENVARQWQITRDQQDEFAVASQQKAEAAQKAGKFKDEIVPVTIKTRKGDIVVDTDEYPRHGATLEAMAKLKPAFEKDGTVTAGSASGINDGAAAVVLMTAKQAEKLGKKPLARIVSWGQAGVDPKIMGSGPIPASRAALKKAGWSVGDLDLIEANEAFAAQACAVNKDLGWDTSKVNVNGGAIAIGHPIGASGARVLVTLLHEMQKRDSKKGLATLCIGGGMGIAMCLARD

SEQ ID NO: 26203 - protein, 493 aa, Rhodopseudomonas palustris CGA009
MAGIWTRKSLSSLQIEAAAGDSGDGEVRHLKRSLSAVNLVALGVGGIIGAGIFVLTGHAAAANAGPAVSLSFLLGAITCAFAGLCYAEMASTVPVSGSAYTYAYATIGELVAWIIGWDLILEYAVGAITVAIGWSGYFVSLLGNFGIHLPPQFTTAPLAYDAATHAWSTTGAFLNLPAIAIVVAIATLLVIGIQESARFNNVIVGIKLTVIALFLIFAAPMVTPANWVTAANPDGAFIPPAQENGIFGWSGVLRGAAVVFFAFIGFDAVSTAAQEAKNPQRDMPLGILGSLAICTVLYVSVAFVLTGIVPYDRLNVPDPIAVGIDAAGIGWLSSIVKIGVVTGLTSVILVLMLGQTRVLRAMAHDGLMPRGAAATHPRFRTPHVATIGTGVIVAGLAGVLPIGLVGELVSIGTLFAFAVVCVGVLALRIKHPEQHRPFKVPAIWLVAPAGAIVSFILMLGLPLDTWIRLAVWLAIGLAIYFLYGRHHSKPARR

SEQ ID NO: 26204 - protein, 417 aa, Rhodopseudomonas palustris CGA009
MGRLVMKFGGTSVANIERIQNVARHVKREVDAGHEVAVVVSAMSGKTNELVAWCTEASPLHDAREYDAVVASGEQVTSGLLAIALQSLGIQARSWQGWQIPILTSDAHASARIVGIDGSEIIKRFSERKEVAVIAGFQGIHAETGRITTLGRGGSDTSAVAIAAALKADRCDIYTDVDGVYTTDPRVVPKARRLDKVSFEEMLELASLGAKVLQVRSVELGMVHNMPIFVRSSFDKPEDIDPHGTPPGTLISSEENSMENHVVTGIAFSKDEAQISVRRIEDKPGVAASIFGPLADANINVDMIVQNVSEDGKTTDLTFTVPASDFARAKQTITSAQDKIGYARFDSETDVAKVSVIGSGMRSHAGVAAQAFAALAARNINIRAITTSEIKFSVLIDAAYTELAVRTLHTLYGLDQV

SEQ ID NO: 26205 - protein, 622 aa, Rhodopseudomonas palustris CGA009
MSDNRNTILAVVLSGLVLLGWQYFFNIPQMEKQRAAQQAQQQAAKQQAETQTPGAASPAAAPAAPGAPGSAPASPQQPAAAPTVSREAALAAGPRIKVETPRLSGSIALKGARIDDLALMQYRETVDPKSPPIELFSPSGSARPYYAEFGWVGAAGASVKLPDHNTLWEQEGTGALTPANPVTLKWDNGEGLTFRRQITVDDRYLFTVKDDVTNTGGAPVTLYPFALISRHGTPHVEGYYILHEGLIGYLGDQGLQEYSYSKIDEAKSVGFKATNGWLGITDKYWASALLPDTSAQLQARFSANKVGNVTTYQTDYLEDARTVPIGGTVTANARLFAGAKEARVVGINFPFAGLGGYDRQLGLNHFDLLIDWGWFYFITKPMFLALDFFFHLVGNFGVAILLVTVLVKLLFLPLANKSYASMAKMKAIQPQLAALKERHPDDKVKQQQEMMEIYRKEKINPVAGCLPILLQIPVFFSLYKVLFVTIEMRHAPFFGWIHDLSAPDPTNIFNLFGLIPYDPTAIPVLGHYLVLGAWPLVMGFTMWFQMKLNPQPPDPTQQMIFAWMPVIFTFMLAHFPAGLVIYWAWNNTLSVAQQAFIMQRNGVKVELWDNLRTSFAKKKKPT

SEQ ID NO: 26206 - protein, 337 aa, Rhodopseudomonas palustris CGA009
MALSKNHTKTPTMSEQAAAAIPSALRTLEAEASGVTALATALQSDLGVRFAATIDLIQNAKGRLIITGLGKSGHIGRKIAATFASTGTPAFFVHASEASHGDLGMITADDIILAMSWSGEQPEMKNLINYAKRFKIALVAMTSDSTSTLATAADVSLTLPKAREACPHNLAPTTSSLMMLALGDALAIALLESRGFTPGDFSVLHPGGKLGAMLKYARDLMHTGEAIPLKPLGTRMSDALVEMSAKGFGCVGIIDSNGQIAGIVTDGDLRRNMRSDLMTATVDEVMTRNPKTISPNLLAGQALELLNSSKITALLVAEGKKPLGIVHLHDLLRAGVA

SEQ ID NO: 26207 - protein, 634 aa, Rhodopseudomonas palustris CGA009
MTAPNKPQSSNSDASAISLSLDAIAATENVGPRTGTLRADADPSQVEEVAAVVKRSRLKPLLSLMPYVARYRGRATLALIALIVAAATTLVVPVAVRRLIDFGFSAEGVELINGYFSVMLGVVVVLAAASAARYYLVMTIGERIVADVRRDVFRHLTALSPAFFDSARSGELISRLTADTTQIKSAVGASVSIALRNMLLFVGAISMMVISSPRLSGFVLAAIPLIVIPLVAFGRWVRRLSRNAQDTLADASAYAAELVGAIRTVQAYTNERVANARFGGAVEESYEAARSSTGARALLTAIIIFIVFASVVAILWVGSHDVAIGAMSPGRLGQFILYAVFAASSLGQLSEVWGEVSAASGAAERLFEILRVKPEIAAPAKPKALPMPVRGDVLFDNVSFSYPTRPDFLALDGLSLSIKAGEKVAIVGPSGAGKSTLFHLLLRFYDPTSGTIALDGVAINAADPQAVRERIALVPQDSVVFAATARDNISFGRDDASELDVERAAQQAHATEFISRLPEGFDTKLGERGVTLSGGQRQRIAIARAILRDAPLLLLDEATSSLDAESEVLVQTALQQLMRDRTTLVIAHRLATVLSCDRIVVMEHGRIVEQGTHAQLVARGGLYARLAKLQFEAA

SEQ ID NO: 26208 - protein, 638 aa, Rhodopseudomonas palustris CGA009
MNANLRNFALWVIIVLLLLALFTLFQNPGQRTASQEIPFSQLLSEIDQNHVRDVVIQGQEIRGTFTNGSTFQTYAPNDPSLVTRLYNGKVSITAKPPGDNVPWFVSLLVSWLPFIALIGVWIFLSRQMQGGAGKAMGFGKSRAKMLTEAHGRVTFEDVAGVDEAKQDLQEIVEFLRDPGKFQRLGGRIPRGVLLVGPPGTGKTLIARAVAGEANVPFFTISGSDFVEMFVGVGASRVRDMFEQAKKNAPCIIFIDEIDAVGRHRGAGLGGGNDEREQTLNQLLVEMDGFEANEGVILIAATNRPDVLDPALLRPGRFDRQVVVPNPDVVGREQILKVHVRKVPLAPDINLKNIARGTPGFSGADLMNLVNEAALMAARRNKRMVTQSEFEDAKDKVMMGAERKSLVMTEEEKLLTAYHEGGHAIVGLNVPATDPIHKATIIPRGRALGMVMQLPERDKLSMSLEQMTSRLAIMMGGRVAEEMVFGREKVTSGAASDIEQATKLARMMVTRWGLSEELGTVAYGENQDEVFLGMSVSRTQNASEATIQKIDAEIKRLVEEGYNEAKRILTERRADLEALAKGLLEYETLTGDEITDLINGKKPNRESVLEPSGPRTSAVPPAGKPRPRPDPGLEPQPQA

SEQ ID NO: 26209 - protein, 86 aa, Rhodopseudomonas palustris CGA009
MRRRASESMLGGVSGMAMTGTVKFFNGERGYGFIKPDDGGRDVFVHITAVERAGLKDLTEGQRISFEVEPDKKGKGPKAVNLVISP

SEQ ID NO: 26210 - protein, 221 aa, Rhodopseudomonas palustris CGA009
MTGTQSASGSISSADFFDRAQRRLRFDVPAALTDAGVIPATGDQGNDQMLRTIAQERPIRPAAVLIPVVEHAEPTVLLTMRAAHLNDHAGQIAFPGGKIDATDNSPLDAALREAEEEIGLDRSFVEPIGYLDVYGTSFGFRILPTVARVRPGFELAINKSEVDDAFEVPLAFLMDPGNHQLHSKEFRGAQRSYYAMPFAERYIWGATAGILRALYERVCLP

SEQ ID NO: 26211 - protein, 127 aa, Rhodopseudomonas palustris CGA009
MTVRPGRWWSAGRAAKGFAMSIEQFIDNEVKANDVVLFMKGTPQFPQCGFSGQVVQILDHIGVPYKGHNVLENAELRDGIKVYSNWPTIPQLYVKGEFVGGCDIVREMFQAGELQKLFTDKGIKAAA

SEQ ID NO: 26212 - protein, 391 aa, Rhodopseudomonas palustris CGA009
MAEAYIVAAARTAGGRKGGRLAGWHPVDLAASVINALVDRSGAAPDQIEDVIMGCVGQGGEQAVNVGRNAVLASKLPESVPGTSVDRQCGSSQQALHFAAQAVMAGTMDIVIAAGVESMTRVPMGSPSILAAKAGLGNYKSPKMEERYPNIQFSQFVGAEMVANKYNLSKDELDEFAFNSHQRAIAATQGGKFKDEIIPLEITRADGSTDIHHIDEGIRFDATLDGIKGVKLINENGGKLTAATASQICDGASGVVVVNEKGLKQLGVQPLARVHHMTMRGGDPVIMLEAPLPATEYALKKAGMKIDDIDLFEVNEAFASIPAAWLKATGADPARLNVNGGAIALGHPLGGSGTKLMTTLIHALKQQNKRYGLQTMCEGGGMANVTIVERL

SEQ ID NO: 26213 - protein, 289 aa, Rhodopseudomonas palustris CGA009
MAKVAFIGLGVMGFPMAGHLVTKGGHEVTVYNRTAAKAQAWAEKFGGRAAPTPAEAAAGQDFVMACVGNDDDLRAVTTGADGAFGAMSRGAIFVDHTTASAEVARELDAAASKAGFHFIDAPVSGGQAGAENGVLTVMCGGRPEDFAKAEPVIGAYARMCKLLGPAGSGQLTKMVNQICIAGLVEGLSEGIHFAKKAGLDVNAVIDTISKGAAQSWQMENRHKTMNDGKYDFGFAVEWMRKDLSICLAEARRNGASLPVTALVDTFYAEVEKMGGRRWDTSSLLARLER

SEQ ID NO: 26214 - protein, 592 aa, Rhodopseudomonas palustris CGA009
MSDSNSHDPNQMTGAAMIVRAMKDHGVEHIFGYPGGAVLPIYDEIFQQSDVQHILVRHEQGAGHAAEGYARSTGKPGVVLVTSGPGATNMVTPLADALMDSIPLVCITGQVPTHLIGNDAFQECDTVGITRPCTKHNWLVRRIEDLAKVLHEAFYVATSGRPGPVVVDVPKDVQFATGTYHPPRKADVHVSYVPNKKGDPAQIRKAVALLANAKRPVIYSGGGVINSGPEASRLLRELVEITDFPITSTLMGLGAYPASGKNWLGMLGMHGTYEANMTMHDCDVMLCIGARFDDRITGRTDAFAPNAKKIHIDIDPSSINKNIRVDVPIIGDVATVLADLLSAFKAEAKKPDIKPWWQQVATWRARNSLAYKKNNDVIMPQYAIQRLYEATRGRDTYITTEVGQHQMWAAQFYGFEQPKRWMTSGGLGTMGYGLPAALGVQVAHRDSLVIDIAGDASVQMTIQEMATAVQYELPIKIFILNNQYMGMVRQWQQLLHGNRLSHSYTEAMPDFVKLAEAYGAVGMQVVKPSDLDGAIQDMIKVNKPVLFDCRVAALENCFPMIPSGKAHNEMLLPAEATDEATAAAFAGGKALV

SEQ ID NO: 26215 - protein, 462 aa, Rhodopseudomonas palustris CGA009
MSTFDNPFDPNRRLHTAGCSCGGHATEAEHAAEQAAALQSAVTQGEEKRFEGAVASAVMRAMFPQDASRRAFLKSVGAATALAAVSQFFPLQTATDVFASGGPLEKTDLKVGFIPITCATPIIMAHPMGFYAKYGLNVEVIKTAGWAVIRDKTLNKEYDAAHMLSPMPLAITMGVGSNPIPYTMPAVENINGQAITLAMKHKDRRNPKDWKGFKFAVPFDYSMHNYLLRYYLAEHGLDPDVDVQIRAVPPPEMVANLRADNIDGYLAPDPMNQRAVYDGVGFIHILTKEIWDGHPCCAFAASKEFVTTMPNTYGALLKSIIEATAYAHKPENRKEIAQAISPANYLNQPAIVLEQILTGTYADGLGNVVKQPNRIDFDPFPWQSFAIWIMTQMKRWGQIKGDVDYKTIAEQVYLATDTAKLMKEAGLAAPDTTSRSFSVMGKPFDGSNPDQYLASFKIKKAS

SEQ ID NO: 26216 - protein, 398 aa, Rhodopseudomonas palustris CGA009
MEIDAFYTFTIAVILLLTGKIATLNAPLLRKYSIPEPVVGGFLCTAVVALSYTLLDRQITFDLAMRDFLLLLFFAGIGLKAEVKMLLAGGRPLVILLSLAVVLMLIQNFAGMGMASLFGLEAKAGLMVGSISLTGGIGTTLAWAPTFTERLGITNAMELGVAANTVGLIAACMIGGPVAAFLMKRHNVAATDDPELAIGVSNDGRQPKLDYFCILWAVLALNLAIILGLGIHDALTRTGLNLPAFVSCLMAGILIRNLMPIAVSSRVQRLWPGVDDGLTLVSDLALGLFLTMALMGLQLWQLNGVFTFVASALVVQIILAVIFTISIVFRFMGKDYEAVVISAGFGGIALGSTATAIANMTAVTQQYGAAHRAFIVVPLVCGFFIDIVNALIISAFVG

SEQ ID NO: 26217 - protein, 395 aa, Rhodopseudomonas palustris CGA009
MTHDPIVIVGSARTPMGGFQGELKDATASQLGAAAISAAVVRAGLKPDAIDEVVFGCVLPAGQGQAPARQASLGAGLPLSAGCTTVNKMCGSGMKAAMFAHDLLIAGSATVAVAGGMESMTNAPYLLDRARGGYRMGHGRVIDHMFLDGLEDAYDKGRLMGTFAEDCAQSYQFTRETQDNFAITSLTRAQAAIKDGSFAREITPVTIKAGKSEVTVTTDEQPLKAKLEKIPTLKPAFREGGTVTAANSSSISDGAAALVLMRRSEADKRGLKPLAAIVGHSTHAHEPALFATAPIGAIRKLSERTGWNLADVDLFEVNEAFAVVALAAMHDLGLPHDKVNVHGGACALGHPIGASGARVLVTLLAALEKHDLKRGIASLCIGGGEATAVAVERLS

SEQ ID NO: 26218 - protein, 297 aa, Rhodopseudomonas palustris CGA009
MAGVPQTRVAFLGLGKMGHGMAGRLLEAGFDVAVWNRSRAKADDLIRRGARWADSPAEAARDARAILTMVADDAASQAVWLGPDGAATTALAGALAIECSTVSHRHALVMAATLRARGLVYIDCPVTGLPDAAARGELTLLIGAEPADLDQARPFLAPLSQTIRHFGPVAAGTVYKLINNLMGAIQIAGIAEGIAIAELAGLDMALVREALLGSVVASPQVLRHAPRMIARDFSNPTFTAALRHKDARYAAELAETLRLELPLSRAAVASYARATDAAPDDDEGRIVEVVSKPHPRD

SEQ ID NO: 26219 - protein, 390 aa, Rhodopseudomonas palustris CGA009
MTANRVYLDWNATTPLRPEAKAAMAAALDVVGNPSSVHAEGRAARGLLEQARAQVAAAVGAAPRDVVFTSGGTEANALALTPGLRIGSEPVECMLVSAVEHASVLSGGRFPADRVTQIQVTADGVLDLDHLRALLADGGPALVSVMLANNETGALQPIREVAEMVHEAGGVLHVDAIQALGKIPFGIKELGADLVSLSAHKIGGPKGVGALVLSPRLSGPEPLLRGGSQELGRRAGTENLIGIAGFGAAAAVAIPAMADDMARIEGLRTRLEAGLRHISPDDGMIVSAGAPRLPNTTLFAVPGLRAETAVIGFDLAGIAVSSGSACSSGKVQPSHVLEAMGFGPELARSAIRISLGWSSSESDIDRCLQAWRKLAGNLTKRDHETVLERF

SEQ ID NO: 26220 - protein, 252 aa, Rhodopseudomonas palustris CGA009
MAVLLEVKDLQVSVADREILHGLTLTVNEGEVHAIMGPNGSGKSTLSHVIAGKPGYEVTGGEILFKGENLLEMEPNERAAKGVFLAFQYPVEIPGVATMNFLRTALNSQRKSRGEDELSTPDFLKRVREVSGSLGIPQEMLKRGVNVGFSGGEKKRNEVLQMALFQPSLCILDEMDSGLDIDALRIASEGVNALRAPNRSMVVITHYQRLLDYIVPDVVHVMSKGKVVRSGGKELALELEANGYAQYQEAAA

SEQ ID NO: 26221 - protein, 472 aa, Rhodopseudomonas palustris CGA009
MSFSNLGLSEKVQAAVAAAGYVSPTPIQQQAIPHVLARKDVLGIAQTGTGKTAAFVLPMLTMLEKGRARARMPRTLILEPTRELAAQVKEQFDKYGAGQKLNVALLIGGVSFGDQDLKLTRGVDVLIATPGRLLDHTERGGLLLTGVEMLIIDEADRMLDMGFIPDIERICKLVPFTRQTLFFTATMPTEIRRITETFLHNPEKIEVSKPASTAVTVTQSQVPCGREPHEKRETLRRLIRGATDLKNAIIFCNRKREVALLAKSLQRHGFSVGALHGDMDQTARTAALEAFRKGDLPILVASDVAARGLDIPEVSHVFNFDVPHHPDDYVHRIGRTGRAGRTGTAVTIVAPSDQKSMAAVEKLIGQAISRAEVGPSVESEAANTEAEAERPSRSRRAAPEARQREPRREPREQRERKPRREPRSPASTTGTTAPPTAHASFGSPPPARDTSSEAGDHSHLPAFLLRPVRARG

SEQ ID NO: 26222 - protein, 338 aa, Rhodopseudomonas palustris CGA009
MKRVSLVAAFAAAAVFSVSSADAQTLKTVKDRGMLSCGVSQGLPGFSAPDDKGNWAGLDVDVCRAIAAAVFDDPSKVKFVPLSAKDRFTALQSGEIDVLSRNTTWTLSRDTSLGVNFAGVSYYDGQGFMAKKSLKVNSALELNGASICVQTGTTNEQNVADYFKGNNMKYEVIAFANADEAVKAYESGRCDVFTSDVSQLYAQRLKLATPADHAVLPEVISKEPLGPLVRHGDDQWFDIVKWTLFALVNAEELGVTQKNVDEMAKSDKPELKRVFGTDGNLGEQLGLTKDWVARIVKATGNYGESFERNVGSGSKLEIARGLNKLWNKGGIMYAPPIR

SEQ ID NO: 26223 - protein, 308 aa, Rhodopseudomonas palustris CGA009
MMAEHEDAATAATRCGFVALIGAPNVGKSTLVNALVGSKVTIVSRKVQTTRALIRGIVIESGSQIILVDTPGIFAPKRRLDRAMVKTAWSGAHDADIVCVLLDARAGINEQAEDILANLANVDRPKLLVLNKIDLIAREKLLALAQAANQRLAFDQTFMVSALTGDGVDDLRKALAAQVPPGPFHYPEDQMSDAPLRHLAAEITREKIFRQLHQELPYQSTVETDTWTERKDGSVKIEQTIFVERESQRKIVLGKGGATIKAIGAEARKEIGEILEQPVHLFLFVKVREDWGNDPDRYREMGLEFPKE

SEQ ID NO: 26224 - protein, 560 aa, Rhodopseudomonas palustris CGA009
MTTADTAAGEAGRDFIRDIVQADLDSGKHRTIVTRFPPEPNGYLHIGHAKSIALNFGIAQEFGGRCHLRFDDTNPTKEEQEYIDSIQADVRWLGFDWGEHMFYASDYFEQLYAWAELMIKNGDAYVDDQSQDEIRASRGTLTEPGKNSPFRDRSVEENLDLFRRMKAGEFPNGARVLRAKIDMASGNINLRDPVLYRILHAHHPRTGDKWSIYPSYDYAHGQSDAIEGITHSICTLEFEDHRPLYEWLLSKLPVPSQPRQYEFARLNITYTLLSKRVLTELVRGGHVAGWDDPRMPTIAGMRRRGVPPAALRDFVKRIGVAKANSVVDLGMLEFCIREELNRTAQRRMAVLKPLKVVIENYPEGQTEELEAINHPDDPSLGTRKIAFGREIYIEQDDFMENPPKKFFRLSPGNEVRLRYAYFIKCRDVIKNDAGEIVELRCTYDPETRGGNAPDGRKVKATMHWLPAAQSVKAEIRIYNQLFANPAPSASTFADDLNPQSLEVLTEARIEPETAASTSAEPLQFERQGYFVRDRDSTADKPVFNRTIGLRDTFAKEVAKG

SEQ ID NO: 26225 - protein, 329 aa, Rhodopseudomonas palustris CGA009
MTSNTKKLLVTESLSQRGRALIAERGDIEMIEFPNMISAEDFDALLRTEAPVHGVALGATRFGERELDAAQQMRVVARIGVGYDAIDVPALNKRKVPLMTAGTANSPSVAEQALFMMLTLAKRGAELHALVKTGAWATRLGLLPFDLFGKTVLIVGFGRIGTRTAKRCLAMEMTVLVYDPYVPAAAIEAAGCKQVSDLDAALPDADFVSLHCPKTAETTGLFDAARLSKMKPTAYLINTARGGIVVEQALYEALLAGKLAGAGLDVFEQEPPPHGHKLFDLPNVIIAPHVAGVTREALDRMGEQTARNMLSVLDGDPIRVNVVNQDVLG

SEQ ID NO: 26226 - protein, 774 aa, Rhodopseudomonas palustris CGA009
MAGERMASYSEDLQAAALGYHRRPKPGKLEIQASKPLANQRDLALAYSPGVAAACNAIAADPAQAAELTVRANLVAVVTNGTAVLGLGNIGPLAAKPVMEGKAVLFKKFAGIDVFDIEIAAETVERVVETVAALEPTFGGINLEDIKGPECFEIEAMLKDRMKIPVFHDDQHGTAIIVGAAVKNALALTGKDISKVKIVAAGAGAAALACLNLLVSLGAQRKNIFVCDLEGLVYEGRNVLMDRWKEVYAQKTDKRTLAEVIPGADIFLGLSGPNVLSQDMVKQMAERPLVMALANPTPEIMPEDVRKVRPDAMICTGRSDFPNQVNNVLCFPYIFRGALDVGATAINEAMKHAAVDAIAQLAREAPADPVSVGLDNDEAFGFGPGSLIPSPFDPRLILRIAPAVAMAAMDSGVATRPITSFDDYYAQLERFAFRSGLVMKLVFAKAKGQPVRVIYAEGEDEKVLHAVQTILEEKLARPILVGRPSVVEARIKRSGLSIRPGEDFDLVNPQDDPRYRSYVQSYIDIAGRAGVTPAAARTVVRTNSTVIAALAVARGEADAMICGLDGRYMNHLRHVRDVIGRRPGVSDYAALALLITKKGPIFIADTQVRPNPTAEELAELAALAAVHVQRFNIKPKIAFLSHSDFGSFPTDSSLKMRRATAILAEKHPEIEADGEMQGDSALSETSRQMILPHSRLTGVANVLIMPNLDTANVAYQMIKVVGEALPVGPILIGPALPAHILTPSATARGILNMTAVAVVEAQERAGRHQGTLFA

SEQ ID NO: 26227 - protein, 67 aa, Rhodopseudomonas palustris CGA009
MQKGTVKWFNPTKGYGFIRPTTGDKDVFVHISAVERAGLSTLNENQPIEYDLVENRGRTSAENLKIS

SEQ ID NO: 26228 - protein, 543 aa, Rhodopseudomonas palustris CGA009
MPTLATALLDALKDHGAREIFGIPGDFVLPFFKVIEESGTLPYFTMSHEPAVGFAADAASRYRGSIGVAVVTYGAGAFNLVNSIAGAYAERSPVVVIAGAPGARERTSGYLLHHQVRTVDSQLAVFKEVTCDQAVLSDPATAPAEIARVLRSALELSLPVYIEFPRDMVDAKVDPVPKLPRREADIGARDECAEEILDRIARAKSPVMVVDVEIRRYGVEQQVAALARKLGLPVVTTFMGRGLLEGDDDVVAGTYLGAAGDPDLSALVEGADLVLMFGVILSDTNFALSSNMTDPRRTVLATGREVQIGHHVYRDLPLADLIAGLDAHASQHPPRPRNVGKGMAYPRGLTLDASPIAPSDIATAINDLFDRHGKMPMTADIGDCLFTAMEIDNTALAAPGYYAGMGFGVPAGVGVAATGLRPLVLVGDGAFQMTGWELGNCKRYGLDPIVVLFNNCSWEMLRVFQPESKFNDLDDWHFADIAHSIGGFGERVTTRAELAAALQRAVERRGVFSLIEVMLPRGVTSHTLARFVTGFKAARERMK

SEQ ID NO: 26229 - protein, 279 aa, Rhodopseudomonas palustris CGA009
MSYLAPSEFVTKMVDAGESKIFMSTRDTVIRAYMAGAILALAAWFAITINVNTGQPLIGALLFPVGFTMLYLLGFDLLTGVFVLSPLAWLDKRPGVTIGGVLRNWGLVFIGNFAGALTVAFLMAFVTTFGFTQDPDKVGTAIGNIGEGRTLGYAAHGAAGMVTLFFRGMLCNWMVSTGVVMAMISTTVPGKVLAMWMPILVFFYMVFEHSVVNMFLFPSGLMLHAKFSILDYLIWNEIPTVLGNLVGGLAFTGLTLYTTHVRTGAKRRIEAVPASRVAA

SEQ ID NO: 26230 - protein, 320 aa, Rhodopseudomonas palustris CGA009
MRAGMADKVLVASRFGRSMLGRFAEQFELLETAGKPADQVFSATQLADVRALLTMGGQPLGRETFDMLPALGAVVCYGTGYDGVDLKAAAERGIVVGNSPAANASAVADLALALLLALMRRVLPADAYVRAGGWSGAKPSPMLKPPRGLTGAKVGVYGIGEIGRKIAARVAGFETEVAYHSRSRHDVPYRYVGDLGELVDWCDVLLVAVRAGPDTEKIIDAGMLKRLGPSGVVVNISRGSVIDQAALIAALADGTIAGAGLDVFALEPYAPDALAEFPNVVLTPHIGGHTQEAHRAMQDCVIANLAAFFAGKPLPYPVQG

SEQ ID NO: 26231 - protein, 75 aa, Rhodopseudomonas palustris CGA009
MLWRTEMTTGTVKWFNGQKGFGFIAPSDGGNDVFVHISAVERAGLTGLAEGQKVSFEVKTDKMRGKSSAENLALA

SEQ ID NO: 26232 - protein, 397 aa, Rhodopseudomonas palustris CGA009
MAVSRTIIVAGAGIGGLTAALALAAKGFRVIVLERTERLDEVGAGLQLSPNASRILVELGLQPRLDACAVVPDAVTAINARSGRAIVRMPIGNVAVRNGAPYWVVHRADLQAALAAQVAAHPSIDLRLGCAVEDVAPHANGVTVSAGGGQEPGLALISADGIWSAVRGVAFPKTQPLFSGLIAWRGTIPAEAMPDGERLRGVQLWLGPEAHLVVYPISSGRRINLVAVVNGSWNQRGWSARGEPTEIVARFAHWAGAARALIGTVENWTRWALFAMPDGGVWNQGPIAMLGDASHGMLPFAAQGAGMAIEDAAVLAAGLAASHGEGRGGTAAEVAATLQRYAALRRPRVRRVQQLARQNGVIYHLPGAAAIARDVAMRALGPDRLLARQSWIYDWRP

SEQ ID NO: 26233 - protein, 295 aa, Rhodopseudomonas palustris CGA009
MTDIAFIGLGNMGGPMAGNLAKAGRKVAGFDLVAASCEAAKAEGVTIAPTAIDAVKGAGVIVTMLPAGKHVLAVWNEILPHAAKGALIIDCSTIDVESAVQAHALATKHDIASVDAPVSGGTGGAKGATLTFMAGGSEAAFAAAKPVLEQMGKKIVHCGGAGAGQAAKICNNMILGISMIGVSEAFTLAEKLGLSHQALFDVASTSSGQCWSLTSYCPVPGPVPASPANNSYKPGFAAALMLKDLKLSQEAAKAAGASTPLGQHAAEIYAAFEQAGHGGTDFSGIINYLREQGRK

SEQ ID NO: 26234 - protein, 330 aa, Rhodopseudomonas palustris CGA009
MRFAEQWTSSTVVSTRNLTSLIREIVLEPDVAVTTCAPGSHINVAVMIDGQADKRSYSLVGPPEQGRLRIAVRLAADSRGGSQAMWALKPGQRIDITHPTSLFEIDWSRQHYALIAGGIGVTPMLGIAAALARRSTELTMHYAVKSRSDAALHDELSSLLGDRLRLHAGDEDARLDLDATFRALPEGAVAVLCGPLRMLEAARHAWHQAGRPASDLCFETFGSSGRLPTSEFRVRIAATGSEIVVPRDRSMLDALNAAGFEVISDCERGECGVCAVDVTAIEGEIDHRDVFFSEHQKHDSGKMCACVSRARGTVTIDTLYRPDQLPGAVA

SEQ ID NO: 26235 - protein, 474 aa, Rhodopseudomonas palustris CGA009
MMERTNLLTSFQEFGLADPIARALQEENYHTPTPIQAQTIPLALAGRDVVGIAQTGTGKTASFALPILHRLLQNRIKPASKTCRVLVLSPTRELSGQILDSFNAYGRHVHLSAALAIGGVPMGRQVRSLMGGVDVLVATPGRLLDLVQGNALKLTQVEFLVLDEADRMLDMGFINDIRKIVAKLPIKRQTLFFSATMPKDIADLAEQMLRDPARVAVTPVSSTVERINQRVIQLDHSAKPAALAQILKDDKVNQALVFTRTKHGADKVVKGLARAGITADAIHGNKSQNYRERVLAAFRTGELRTLVATDIAARGIDVDGVSHVVNFDLPNIPETYVHRIGRTARAGADGTAISLCAGEEMAYLRDIEKLIKVSLPKEDRRTPGAHAAPTPPPHRGPRQAPHGHSPRNGDAPTRGKNHRRRGPAAGPARQSDASRHEAAPRPQHGGNGEGLQGVAFLQRKNRPAQPTAQHRPHR

SEQ ID NO: 26236 - protein, 84 aa, Rhodopseudomonas palustris CGA009
MGIDRVYIEKGLPPVSMGTVKWFNATKGYGFIQPDDGGNDVFVHISAVERAGLGTLREGQKISYEIVADRRSGKSSADNLRAAS

SEQ ID NO: 26237 - protein, 386 aa, Rhodopseudomonas palustris CGA009
MSERLRIGFIPLVDAAALIVAADKGFCAAEGLDVELVREISWANVRDKFNIGLFDAAHLLAPLAVASSLGIGHVKVPVISGFGLGVNGNAITVSPDLHAAIVAMADGDVADPLVSGRALARVVAERRAKGQEPLTFGMTFPFSSHNYDLRFWMGAGGVDPDEDVRLVVLPPPFMVESLASKHLDGFCVGAPWNSVAIDLGIGTILHFTSELFQRAAEKMLTVRANWAAQHPEVLKALIRAHARAADYIEDVANRDEVCALLTAPGRIEVAPELIRRTLDGRLKVAADGTLRTSDRYLLVGRGAAARPDPVQGAWNYAQMVRWGQAPLSADLLAAAKAVFRPDLYDAAVGTAPALPSAPADGIGECTGAPFDPDDIAGYLARMTIRR

SEQ ID NO: 26238 - protein, 141 aa, Rhodopseudomonas palustris CGA009
MMTPQAIALVQQSFARLTPISDETATLFYERLFATAPELRPLFHGDMRRQGKKLMSTLNVVVTGLTDLTTILPATGRLARLHVAYGVSAAHYTPFGAALLWTLERELGAEWTPELAAAWRDAYAMLSETMLAAAYGDTTPS

SEQ ID NO: 26239 - protein, 590 aa, Rhodopseudomonas palustris CGA009
MGSEFSIDQKRYLEGFATGVTAARAARGSLPAGSAASPSGPDAIHHQAQDRVTASGKKLNDQEKWKREQHPFDAYARLKQQAKDNAAPKPADNFRWRYYGLFYVAPAQTSYMCRLRIPNGILTSWQMAGLAYLADTLADGYAHVTTRANLQMREIAPKDAVQLLQGIESLGLWARGSGADNIRNVTGSATAGIDPQELIDTRAYARDWHFYILNERALFGLPRKFNVAFDGGGLIPTLEDTNDIAFQAVTIGDGHGVAPGVYFRLALGGITGHKDFARDTGVIVAPDEATEVADAIVRVFIEHGDRTDRNKARLKYVLDAFGFDKYLELVEDKLGRKLIRVPAEAAAPRPAQDRAAHLGVHPQQQAGMNWIGVRLATGHLTSVQMRGLAEIARSFGDGDLRLTVWQNLLISGVPDARVTDATAAIEALGLAITASPLRAGLIACTGASGCRFAAAHTKETAEAIAQYCEPRVPLDTPINIHLTGCHNSCAQHFISDIGLIGAKVAVSDEDSVEGFHIHVGGGFGVDAAIGTEVLRDVKQDDAPRVIERMLQTYLARRASPAETFLAFVRRQDAAALQQLFAYEQSPETVA

SEQ ID NO: 26240 - protein, 395 aa, Rhodopseudomonas palustris CGA009
MTEAVIVSTARTPIGKAYRGALNATEGATLLGHAIEHAVKRAGIDPKEVEDVVMGAAMQQGATGGNIARKALLRAGLPVTTAGTTIDRQCASGLQAIALAARSVLFDGVEIAVGGGGESISLVQNDKMNTFHAVDPALEAIKGDVYMAMLDTAETVAKRYGISRERQDEYSLESQRRTAAAQQGGKFNDEIAPISTKMGVVDKATGAVSFKDITLSQDEGPRPETTAEGLAGLKAVRGEGFTITAGNASQLSDGASATVIMSDKTAAAKGLKPLGIFRGMVSYGCEPDEMGIGPVFAVPRLLKRHGLSVDDIGLWELNEAFAVQVLYCRDKLGIDPEKLNVNGGAISVGHPYGMSGARLAGHALIEGRRRKAKYAVVTMCVGGGMGSAGLFEIVH

SEQ ID NO: 26241 - protein, 362 aa, Rhodopseudomonas palustris CGA009
MNISTSIPRFHPLTIADLRREGRDAISLSFTVPPELASAYQFVPGQYLTLRTTMDGEEVRRSYSICSGPDDGELRIAVKKVDGGAFSVWATEELKAGDTIEVMTPTGRFGALHAVEETRTYVGFAAGSGITPILSLIKGVLVREAGSRFFLFYGNRTTDQILFRESLETLKDRYLDRLAVFHVLSQEEQDVPVMQGRLDRDKVRLLLTAMVPAASVDHVFICGPTGMSDDVETTCRDLGIAAERIHVERFVSGLGGKPRPKAVVEPGAPPRAIASLIIDGKRREVPVAEGEAILDAALRAGVDLPFACKGGMCSTCRAKLVEGEAKMDLNYSLEPWELAAGFVLTCQAKPTTDRVVVDYDHL

SEQ ID NO: 26242 - protein, 443 aa, Rhodopseudomonas palustris CGA009
MAKLAHAAAAPVAAATVGVGFIFKKALISALVALVLFSLMIGVRTEAGPEGGLIYWTRFGDLAGMVGGVFVGSIVVELLRMWWGPVDTSKIMPAGARKTLGLAGRVVAPALLIFTFLVPVIFYNQRYILDLGILVLTYVMLGWGLNIVVGLAGLLDLGYVAFYAVGAYSYALLATNFGLSFWICLPLAGILAAFWGVILGFPVLRLRGDYLAIVTLAFGEIIRLVIINWQTLTGGPNGISGIPRPTLFGIPLAPGPNGLAAQLGIPFSPTHRLVFLFYLILILALITNWATIRLRRLPIGRAWEALREDEVACRALGINTTTTKLTAFATGAMFGGFAGAFFATRQGFISPESFTFQESALVLAIVVLGGMGSQLGVALAAVTLIGGFELFRGLDQFRMLVFGMAMVLLMIWRPRGLIGHRAPTVYLDHKQAISSDLVKEGHG

SEQ ID NO: 26243 - protein, 245 aa, Rhodopseudomonas palustris CGA009
MPLLSNDHYRVGRSKTGLGLFALKPIKKGAKIIRYFGPLLDAHNKKHDGIENKYLFELNKRWTIDGSVRKNVARYINHACKPNAESDVNPRKKRVIIRAIKNIEPGEEINYDYGTDYFKAYLKPIGCKCVSCEKKRKKKAAEARAEKAKLKLKAERKAQAEAEKAARKAAKAAGKAKPEKPSKPEKVAKSKAPKAVKAKTTAKSKGSSKAVKTKVVTAKAGKTKAAQPAKTTSSRKTAASKSKAA

SEQ ID NO: 26244 - protein, 600 aa, Rhodopseudomonas palustris CGA009
MKLSDYVIDFLARRGVTHVFGISGGAAVHMFDSAQRHPDVTPIFPQHEQAAAMAADGYARATGRLGVAITTSGPGATNLLTGVCCAYYDSVPTLMITGQVATHRLKGKNQIRQLGFQETDVTSIFATVTKYAVQISDPTTIRYHLEKAYHLAFEGRPGSVLIDLPDDLQRAEIDPDALPGFTPEPEAASNDLDAEIAALLPLIARAKRPVLVLGGGLSTPRIGSMLDHLVDRLGMPVLTTWAATDLIAADHPLRVGPFGVYGPRLGNFTVQNADLILCLGSRLSQNVTGGILPSFAREATIVMVDASRGEMDKFDDRGIRIATRIAARLDAFVPKLLAAIEAAPPREAWLNTIGHWRSALPDDRPGPAPDNAGFVDAYDFIDKLSDAAPADELLYVDTGGNLTWTCNGFRIKRGQRLISDWNNTAMGYALAAAIGAAVQARGGVSCIIGDGGLMLSLGELALLKRHELPVRLMLFNNHGHGIQKQTLETWLDGHYVGVDAPSGLSFVDFRKVAEAMDLPVVTIGRSADIASQLRDVYARRGPVFCNVEINPAQKLYPVLKFGAPLESQLPSIDDELIKREMLIAPFVPGSAPKHSGGAGV

SEQ ID NO: 26245 - protein, 180 aa, Rhodopseudomonas palustris CGA009
MTASAPRRPAAFLDRDGVINYNDHYVGTRERLRWMPGIAAAIRQLNAAGYYVFIITNQSGVARGMFSEDDVRALHRWMLDELNTQGARIDDVRFCPHHVEGTLDAYRVACEHRKPGPGMILDLAKTWPVDMTRSFVIGDSASDVEAAKAAGIPGFRFEGEDIDVFVKQVLIEMQRAAVSN

SEQ ID NO: 26246 - protein, 237 aa, Rhodopseudomonas palustris CGA009
MMTSMTTNLGRRLTKTSDVVRAQRLFQDLAPEALDQLCRAARLVRFSRGETVFLKGDDANALFVVVEGAIRVSSGSTDGRTAMLNLIGSGEVFGEVAVLDGLPRTTDAIAHSDSVLLSIARRDLFELIDTQPQLMMKLIVLLCGRVRATSQQVEWLLLQSMSARLAGTIMRLAERDTDRAPLRLQLTQQRVSEMAGMSRESVNKLLARWASQGWIRLGPQTLEIIQPDALRAVAGEG

SEQ ID NO: 26247 - protein, 694 aa, Rhodopseudomonas palustris CGA009
MSFVTFPTSPPPLARALAERNYLQATPVQSAVLAPDTAGRDLLVSAQTGSGKTVAYGLAIAQDLLGDAEQFAPAAAPLALIVAPTRELALQVHRELSWLYRHAGGRIVSCVGGMDPRREQRELADGAHIVVGTPGRLCDHLRRNRLDVSQLKAVVLDEADEMLDLGFREDMEFILETTPETRRTLLFSATLPRGIIALAKTYQHDAMRIEVEGAEGGHADIEYRAIRIAPNDVEHAVVNVLRYVESPTAIVFCNTRSAVNHLQTALLERGFAVVALSGELTQNERTGALNALRDGRARVCVATDVAARGIDLPNLGLVIHAELPNDAEVMQHRSGRTGRAGNKGVSVLLVPPARRRRAELLLQLAGIEANWGTAPQADEIRSLDQQRMLQDPLFTEEPTAEDQALAQALLAERSPEQIAVALARVVRARMPAPEDILDPGERPARGRDERPGKTAREPRDHEARDKAPRSRSAKAGEKHAITGGVWFRAAIGKRKNAEARWLLPMICRRGGITRQDIGAIRILDTTTEFEISSAAADAFAAQIKRPDHDDNIRIEPLIGAKPIPPRDDNRPPRQDADRKPDRETRRAKRPDSWSPLSGEPLPDPREQDAPRPGKRVPHDDAPRGGKPARFKDKGFKTRGEDAFEGDFKAKPFKTDGFKAGKAKGDKPAYVSKARRADPSAKNPPFKKKAKKKFR

SEQ ID NO: 26248 - protein, 236 aa, Rhodopseudomonas palustris CGA009
MATIDTSMVAKLPLFAGLSRAELDAVLKEAQSIRVPKNGHVFEQGEDAHSFFVLLHGHVRASKVTPAGEQIVVRYVAPGETLGVAMAIGLNRYPATATAVDDSIVLAWPTAAWPRLVEQYPALATNTLRTVGGRLQETHSRVVEMSTQQVEQRVAHALLRLAKQSGRKVENGVQIDFPISRQDIAQMTGTTLHTVSRLLSGWEQKGLIESGRQKIVLREPHQLVVLADQAPDDKTS

SEQ ID NO: 26249 - protein, 375 aa, Rhodopseudomonas palustris CGA009
MKIAVAKEQDPAEPRVAATPDTVKKLKALGAEVAVEPGAGLKSGLPDADFTAAGATVSADALKDADVVFKVKRPEASELASYKRGALVLAIMDPYGHEAALKSMADAGIAAFAMELMPRITRAQVMDVLSSQANLAGYRAVIDGAETFGRAMPMMMTAAGTVPAAKVFIMGVGVAGLQAIATARRLGAIVTATDVRPATKEQVESLGAKFLAVEDEEFKNAQTAGGYAKEMSKEYQAKQAALTAEHIKKQDIVITTALIPGRPAPRLVTAEMVKSMKPGSVLVDLAVERGGNVEGAQPGQIVEIDGVKIVGYTNVAGRVAASASALYARNLLSFFETMVNKEKALAVNWDDELVKATALTRDGAVVHPNFQPKSA

SEQ ID NO: 26250 - protein, 345 aa, Rhodopseudomonas palustris CGA009
MTKYKLEYIWLDGYKPTPNLRGKTTIKEFEIYPTLEQLPLWGFDGSSTMQAEGHSSDCVLKPVAMYPDAARKNGILVLCEVMMPDGVTPHPTNTRATILDDEGAWFGFEQEYFFYKNGRPLGFPEAGYPAPQGPYYTGVGYKHVGDIARQIVEEHLDLCLAAGINHEGINAEVAKGQWEFQVFGKGSRTAADQMWMARYLMLRLTEKYGIDIEFHCKPLGDTDWNGSGMHCNFSTAYMREVGGKEYFEAMMKAFEANLDDHIAVYGPDNHMRLTGKHETAPWNKFSYGIADRGASIRVPHSFVNNGYKGYLEDRRPNSQGDPYQIASQVLKTISSVPTSKSAAAA

SEQ ID NO: 26251 - protein, 551 aa, Rhodopseudomonas palustris CGA009
MYAYDDIDRAIVHERVEEFRDQVSRRLSGELTEDEFKPLRLMNGVYLQLHAYMFRVAIPYGTLSSAQLRKLAHVARTYDRGYGHFTTRQNIQFNWIALKDLPDALADLAEVGIHAMQTSGNCTRNVTADQWAGVAPGEVEDPRVWAEILRQHTALHPEFSFLPRKFKFAITASDHDRAAIKIHDIGLKLVKNDAGETGFEVLVGGGLGRSPFIGRTIKSFVAGRDILSYIEAVLRVYNQYGRRDNIYKARIKILVHELGIEKFAAEVEQAWAEIADGPLTLDHEMIEDIRSRFIYPAYEKLPAEPDELRAAAGDARFEAWRNNSVAPHRHDGYAIVTLSLKPAGGPPGDATAEQMDAVADLADKYSFGEIRVGHEQNLVLPHVARRDLPALWAALDKLGLATPNVGLVSDIIACPGLDYCSLANARSIPIAQELSRRFASPETAALIGRLHINISGCINACGHHHVGHIGILGVEKNGEEFYQITIGGRADEGAELGELIGPAVPYGEVADVIEDIVEAYLSLRQRPDELFVDAVKRLGVEPFKERVYATR

SEQ ID NO: 26252 - protein, 196 aa, Rhodopseudomonas palustris CGA009
MSSTLPDPHLDQLFVQARTHNAWTSKPVTDDTIHALYDLLKWAPTAANSNPGRFVFVRSTDAKARLLNSVAPGNVDKVKAAPCCVIVAYDTEFHDLLPQLFPARDMRSGFVGKPELITETAKRNSALQGAYMILAARALGLDAGPMSGFDHAALDAEFFPDGRWKSNFLCNIGYGDAEKLFPRNPRLAFEDACRVL

SEQ ID NO: 26253 - protein, 529 aa, Rhodopseudomonas palustris CGA009
MTAPKVLISDALSEAAVQIFKDRGIDVDFQPNLGKDKDKLAEIIGNYDGLAIRSATKATAKILEKANRLKVIGRAGIGVDNVEIPAATAKGIIVMNTPFGNSITTAEHAITMMLSLAREIPAADASTQAGKWEKNRFMGVEITAKTLGVIGCGNIGSIVADRALGLKMKVIAFDPFLSPERAKDLGVEKVELEDIFKRADFITLHTPLTDKTKNIIDAAAIAKMKKGVRIINCARGGLVDENALAEALKSGHVAGAAFDVFSEEPATKNVLFGLPNVICTPHLGASTTEAQENVALQVAEQMSDYLLTGAITNAINFPSITAEEAPKLKPFIELAEKLGSFAGQLTETGITKVTITYEGEVAEMKIKALTSAVLSGLLRPMLGDINVVSAPVIAKERGMVVDEVVRAAESDYESLITLTVTTEKQERSVSGTVYADGKPRLVDIKGIRVDAEFGSSMIYVTNEDKPGFIGKFASLLGDAKVNIATFNLGRHTEGGDAIALVTIDGPAPTEVLEKVQALPQVKQVKALTF

SEQ ID NO: 26254 - protein, 583 aa, Rhodopseudomonas palustris CGA009
MDTSRRLVAATKPSFRELFTPKLITVLREGYGLGDFRADMIAGLTVAIVALPLSTAIAIASGVTPDRGLYAAVVGGFLVSLLGGSRFQIGGPAGAFIVLVMLSVQRHGIDGVLLATFLAGIMLVIAGFLQIGTYVKFIPYPVTVGFTAGIAVIIFASQLKDLLGIDLAHEPGPFIPKLEALAQALPTMNVYALGIAVTAIVLIVGLKKLRPNWPGLLIAVAVTAALVWGFSLPVATIGTKFGGIPESFPLPSWPVFSVSKVIEVLPDAIAFALLGAIESLLSAVVADGMTGRRHRSNCELVAQGFANMGSALFGGICVTGAIARTATNIRTGARSPIAGMLHSVFLLVFMLVAAPLASYIPLATLAAVLAIVAWNMAEKHEFATLVRSSRGDAVVVLATFLLTVFRDLTEGIVVGFALGAVLFIHRMSEVTGVEAYSGLAQEDRADESGKRRGTAADLSLVTDPDVVVYRITGAFFFGAAATVSSVLNNIADRHKVFVVDFAAVPLLDSTAANAIYRVALSAQRKHIKLIITGASPTVRRALLTHGVKPPLAHYRADIASAVDEIKGKTPAPQEATAPQPASA

SEQ ID NO: 26255 - protein, 411 aa, Rhodopseudomonas palustris CGA009
MPTHDGCKEKTMPFLATALDRVKPSATIAVTDKARELKAAGRNVIGLGSGEPDFDTPANIKLAAIHAVEAGKTKYTAVDGIPELKQAIIDKFKRENGLTYKPNQIIVGTGGKQVLYNALMATINPGDEVIIPAPYWVSYPEMVALAGGESVPVVCTAEFGFKLQPAALEAAITPKTKWIILNSPSNPTGAAYSRAELKALTDVLVKHPHVWVMTDDMYEHLVYDDFEFTTPAQIEPKLFDRTLTVNGVSKSYCMTGWRIGYAGGPAELIKAMSTIQSQSTSNPCSIAQWAAVEALNGPQDFIDAHNKVFKERRDLVVSMLNQATGIDCPRPEGAFYVYPSCAGTIGKTAPSGKKIETDQDFVTELLEAEGVAVVQGSAFGLGPAFRISYATKTSDLEDACKRIQRFCGNLR

SEQ ID NO: 26256 - protein, 317 aa, Rhodopseudomonas palustris CGA009
MSGKNGSVKLVAGNSNPALARDIAQWLNMPLTKASVRRFADNEVFVEIQENVRGSDVFIIQSTSFPANDHLMELLIITDALRRASARRITAVIPYFGYARQDRKVGSRSPISAKLVANLITHAGVDRVMTLDLHAGQIQGFFDIPTDNLYASPVMVRDIKERFDLSKVMVVSPDVGGVVRARGLAKRLNTPLAIIDKRRERAGESEVMNVIGEVAGYTCILLDDIVDSGGTLVNAAEALLANGATEVYAYITHGVLSGGACARITNSKLKELVITDSIQATEGVCKAPNIRTITIASLIAEAIGRTAAEESVSSLFD

SEQ ID NO: 26257 - protein, 398 aa, Rhodopseudomonas palustris CGA009
MSDVLLVLNAGSSSIKFALYEAHTEPTADHLICEGGIGSLGHRPHFKVVNSDGSTRYDTYLPEGTSHDDAMAVLIGWIETTFPEHRLSAVGHRVVHGGALFDGPVDVTPEVIAQLRAFDRLAPLHQPHNVSAIEALAKLHPSLPQIACFDTAFHHRLPEVATAFALPRELTEQGVRRYGFHGLSYEYIAGRLPDVAGQAVADGRVVVAHLGAGASMCAMLRCRSIATTMGFTALDGLMMGSRCGELDPGVVLYLLEEKSMTAREIEDLLYRESGLLGVSGISDDMRTLLASDDPHACEAIELFVYRIARELGSLAAALGGLDALVFTGGIGEHASEIRRRVCEQAAWLGVTLDPDANASLSGAGRISAPDSKVSAWAIPTDEDLMIARHVWRLADGGR

SEQ ID NO: 26258 - protein, 471 aa, Rhodopseudomonas palustris CGA009
MEQIQNRTFDEIEVGDTASLVRTLTYRDIEVFAVMSGDVNPMHVDAAFAKSDMFHQVVAHGMWGGALISTLLGTQLPGPGTIYLDQSLRFARPVLLGDTVTVTVTVKEKNAAKKRLLLDCRATNQRGEEVITGLAEVIAPVEKISRPRVLLPEIDLNRTAQRYERLIEMTRGLQPIRTAVVHPVDSASLLGAVEAAREGLIVPVLVGPEAKIRAAAAQAAVDLAGYEIVAVEHSAAAAEAGVAMARAGEVEAVMKGALHTDELMHAVVDRTRGLRTARRISHVYAIDAPDYPRALLVTDAAINIYPTLADKRDIIQNAIDLAHALGIAEPRVAILSAVETVTESIRSTLDAAALCKMAERGQIKGGILDGPLAFDNAVSEEAAKTKGIVSQVAGRADIFVVPDLEAGNMLAKQLEYLAHARVAGIVLGARVPIILTSRADKTLARLGSCAIALLLARHNTAAPPRVSGGAA

SEQ ID NO: 26259 - protein, 410 aa, Rhodopseudomonas palustris CGA009
MSEPADIVYLDANATTRTDPRVVEAMLPYFSLYYGNPSSKYGLGGHAALAVKRARERVQALLGAAQPHELIFTSGGTESNNAAILSALEAAPRRREVIISAVEHPAVLSLCAWLEKNKGIRVHPIPVDRQGRLDILAYREAMSDRVAIASIMWANNETGVIQPVADLAELAKEVGALFHTDAVQAVGKCPIDLQSTMIDMLSLSGHKLHGPKGVGALYVRAGIRFKPQIKGGQQERGRRAGTENVPGIVGLGIAAELAASAMADEDIRVRGLRDRLEREILARVDHCVAVGARAERLPNTSNIAFSFIDSEAIITLLDRAGIAASMGSACATGSFEPSHVLLAMKVAEDAVRGGVRFSLSRDNTDADIDRALEVVPAVVAKLRAISPFGVDDAPQAVGRSSGSAQGTTHV

SEQ ID NO: 26260 - protein, 493 aa, Rhodopseudomonas palustris CGA009
MNLVVVSNRVARASGNEPMTGGLAAALLPVVEKSGAIWVGSSGRVRDGVHREPFAEIEPLGAGALAMLDLPAAHYGGYYEGFANSALWPALHSRPDLIRVSHDDYRSYREVNAFMARALLRFRKPDTAFWIQDYHFLALGAELRQLGVQHPIGFFLHTPWPSRATIGCVPHHRELIEAMLTYDLIGFQTEEDRRNFLGYVESELGLKIDGSEVSTTHGTARCEVFAISIDADAFAQQAQKAMTHPEVSRLRKSLNGEKLVIGVDRLDYSKGLINRVKAFDKMLTDRPALQRVVSLLQIATPSRGTIEAYGNLQGDLAKLVSDVNGRLGEVDWTPIRYLNKGYRQSVLAGLYRSAHVGLVTPLQDGMNLVAKEYVAAQNPLDPGVLVLSKFAGAANELDTALQVNPHDIEGMSRVIATALAMPLTERRLRWEAMMAKLRDNSIRRWFADFLAALDQAHTANRSVGPIPLAPPPSIMMAGGRSRLAPRAAGAVLQ

SEQ ID NO: 26261 - protein, 422 aa, Onion yellows phytoplasma OY-M
MFSLHFVDEAFNEVFAGNGGHGIVAFRREKYVAFGGPAGGNGGKGGSVIFVGDKDETTLLKLKYQKHLKAPHGINGKNKGQNGANAPHLYVKVPLGTVFYTADNKFLGEILYDQQTLVIAKGGKGGKGNKALATFKNQAPSYAEKGDLGESFKIKTELKVLADIGLLGFPSVGKSSLISAISKAQPKVASYPFTTIKPHLGVVEVDGFSFVVADLPGLIANAHLGCGMGIQFLKHIERCRVLVHILSMESANPYQDFQTLNQELSQYNPQLLLKKQIIVTNKMDLPDALQKLTLLKQQIKDQPIIPLSLVSFDNLETLKYEMSSLLQNTPLEVAPNKNNDFKLYTLPDNQNTISVIKESDSVFVVSGKQVETFFHRTDFNNEEAVKRFNRILKKIGMEEQLQKQGAKPGDQVKICDRLFYFL

SEQ ID NO: 26262 - protein, 410 aa, Onion yellows phytoplasma OY-M
MKIMSVNSGSSSLKFQLLEMPQQEVIVSGLVERIGSNQAVFTMKTKDKKDKQVLEVLNHQTAVELLLDALIQKKVINTLEEIEGVGHRVVQGGEIFSDSAVLTEKTLAQIESLCDLAPLHNPANIISIKAFQKVLPQVFQVAVFDTTFHQSMPAVNFLYAAPYYWYQKYQIRKYGAHGTSYKYITEQMQQILGKKNAKIIICHAGNGVSLCAVDSGKSVDTSMGFTPLEGVPMGTRSGNIDPAVVKFIAEKENKTVACVIDDLNKKSGYLGVSGISNDTRDILANIKEGNQQAILSHDIQVKRIVDYIASYYVLLKGVDALVFTAGIGENSSFFRSEIIKRLSVLGIKLDEEKNKVQGKQELITTFDSAIKAFVVPTNEELAIAQDVLRLQQNQTNQDKDDQQECFCCCG

SEQ ID NO: 26263 - protein, 558 aa, Onion yellows phytoplasma OY-M
MCSIFGILNIKTDPQILRDQALKLSSLMRHRGPDWSRIFASQKAILAHERLSIIDVNAGAQPLYNKTKTLILAINGEIYNHLDLRKQYKDKYEFQKESDCEVILALYQEKGVNFLDELQGMFAFILYDLTKNTYLIGRDHMGIIPLYMGYYLNQNFYIASEMKALIPICQTLSIFPPGNYLYSESGKMVKYYKRNWMDYQNVYNNQTNTNQLRNFLEASVKKILMSDVPYGVLLSGGLDSSIISGITKKFAKHRIEESSKKEVCFPSLHSFAVGLKGAPDLKAAKEVDNHLGTAHHEINFTIQEGIDALKDVIYHIETYDITTIRASIPMYLMARKIKAMGIKMILSGEGADEIFGGYLYFHKAPNAQEFHKETVRKLASLHLYDCSRANKAMSAWGVEARVPFLDKNFLDVAMRLNPKDKMCGTNGKIEKHILRQTFESYLPKKIVWRQKEQFSDGVGYSWIDALKQLAQTKITDTQLKNAYVRFPYNTPTNKEGYMYREIFEILFPLPSAISLFPGGPSIACCTAKAIEWDKAFKQINDPSGRAALGVHNEAYKDK

SEQ ID NO: 26264 - protein, 295 aa, Onion yellows phytoplasma OY-M
MRTYMDFKSGFIAILGRPNVGKSTLLNALTQQKVAITSAKPQTTRHKIIGICHEPNAQYIFVDTPGINQYKHLLNQKMNNIAFQSIKDVDLILFLTDSFYHPKEETLLKMIFQTKKPVFLVINKIDRLKNKSQIDAIILSYLNHFSFQTVIPLSAIKAKNTTFLKENIYQNIKPGVAYYPQDMITDQKKELWIAEIIREKVLYYVHEEIPHASAVIIEKMEQKEHLLEIWGLILVERSSQKQILIGKAGSKLKQIGTHVRQDLNCHLQIKTHINLWVKVYPNWRNQKDLLSRFGY

SEQ ID NO: 26265 - protein, 74 aa, Onion yellows phytoplasma OY-M
MQDKKQQGTCRWFSKDKGYGFIVSVDGKDIFVHYSSIQTEVFGRKTLNENDKVEFTVKEGDRGAQAVDVVVVNE

SEQ ID NO: 26266 - protein, 552 aa, Onion yellows phytoplasma OY-M
MNTLFEQLPILEQTKKALKELNFIDATPIQALVIPEIIKGHDVIGQAQTGTGKTFAFGIPIIEKIEPKIQKTQSLILCPTRELTLQVYEELKKLLRFYQEIRIAVVYGGESYTKQFRALEAKPHLIIATPGRAIDHLERGKIDLSALKILTLDEADEMLKMGFQEALETILKKIPEERQTVLFSATLPPFIKKIASKYQKDTKILQVPVKNIAVNAIEQNYFLVKEVDKAKLLVRLLDLKKDYSAILFANTKKDVDEITAYLQDKGFLADAVHGDLKQNQRQYVMNNFRKGKIKILIATDVAARGLDISDIKMVINYDLPHEDEVYVHRIGRTGRAGKKGLAYSLISPRKVSQLKKLEYYLKEKITLLDIPSVQSIKLQNAKDLEKKLLNIIEKNNEDATPNQLAQKLLETFSSEQIIQGLLKKFLPKERNYTDILPPKMTTNNSFTRSRFGGESRFGSYGSNNSYGNKSYQRANSNFIEVVINLGKKDNINPPILLKLLKDHFQIYGKNIGNIKHLTHETIFEVASRFWNQMKSKTNIRFQNKTLILNKKD

SEQ ID NO: 26267 - protein, 1168 aa, Arabidopsis thaliana
MVSGVGGSGGGRGGKEEPSSSHTPNNRRGGEQAQSSGTKSLRPRSNTESMSKAIQQYTVDARLHAVFEQSGESGKSFDYSQSLKTTTYGSSVPEQQITAYLSRIQRGGYIQPFGCMIAVDESSFRIIGYSENAREMLGLMPQSVPTLEKPEILAMGTDVRSLFTSSSSILLERAFVAREITLLNPVWIHSKNTGKPFYAILHRIDVGVVIDLEPARTEDPALSIAGAVQSQKLAVRAISQLQALPGGDIKLLCDTVVESVRDLTGYDRVMVYKFHEDEHGEVVAESKRDDLEPYIGLHYPATDIPQASRFLFKQNRVRMIVDCNATPVLVVQDDRLTQSMCLVGSTLRAPHGCHSQYMANMGSIASLAMAVIINGNEDDGSNVASGRSSMRLWGLVVCHHTSSRCIPFPLRYACEFLMQAFGLQLNMELQLALQMSEKRVLRTQTLLCDMLLRDSPAGIVTQSPSIMDLVKCDGAAFLYHGKYYPLGVAPSEVQIKDVVEWLLANHADSTGLSTDSLGDAGYPGAAALGDAVCGMAVAYITKRDFLFWFRSHTAKEIKWGGAKHHPEDKDDGQRMHPRSSFQAFLEVVKSRSQPWETAEMDAIHSLQLILRDSFKESEAAMNSKVVDGVVQPCRDMAGEQGIDELGAVAREMVRLIETATVPIFAVDAGGCINGWNAKIAELTGLSVEEAMGKSLVSDLIYKENEATVNKLLSRALRGDEEKNVEVKLKTFSPELQGKAVFVVVNACSSKDYLNNIVGVCFVGQDVTSQKIVMDKFINIQGDYKAIVHSPNPLIPPIFAADENTCCLEWNMAMEKLTGWSRSEVIGKMIVGEVFGSCCMLKGPDALTKFMIVLHNAIGGQDTDKFPFPFFDRNGKFVQALLTANKRVSLEGKVIGAFCFLQIPSPELQQALAVQRRQDTECFTKAKELAYICQVIKNPLSGMRFANSLLEATDLNEDQKQLLETSVSCEKQISRIIGDMDLESIEDGSFVLKREEFFLGSVINAIVSQAMFLLRDRGLQLIRDIPEEIKSIEVFGDQIRIQQLLAEFLLSIIRYAPSQEWVEIHLSQVSKQMADGFAAIRTEFRMACPGEGLPPELVRDMFHSSRWTSPEGLGLSVCRKILKLMNGEVQYIRESERSYFLIILELPVPRKRPLSTASGSGDMMLMMPY

SEQ ID NO: 26268 - protein, 102 aa, Magnaporthe grisea 70-15
MSEAAKQKAQKLIDENAVMVFSKSYCPYCTATKSKLKDIGAKYNVLELDQIDDGSAIQDALQEITGQRSVPNIFIGQKHIGGNSDFQALGNSESLIKAAGAL

SEQ ID NO: 26269 - protein, 485 aa, Magnaporthe grisea 70-15
MSSSPVEYNGTLPTGGDSLTEDLNIYYSSGDFAWIMTSSALVLLMIPGVGFFYSGLARRKSALALIWLSLMSIGVASFQWFFWGYSLAFSHTGESGFIGDLANIGLKDVLGQPSVGSSKLPDLLFCLYQGMFAAITPALAIGAAADRGRMLPAMVFVFVWATIVYDPIAYWTWNPNGWSFKLGGLDFAGGTPVHISSGAAALAYSLMLGKRAGYDSNAGMPFRPHNVTHVVLGTVMLYVGWFGFNGGSALAANLRAVMALLVTNISAAVGGLTWCFLDYRLEKKWSTIGFCSGVIAGLVAITPAAGYVPAWSAVIFGVVGGAACNFATKIKFLLGIDEALDIFAEHCVGGIVGNLLTGIFAADYIAHLDGATEIPGGWLNQNYIQLAYQLADCVAGFSYSFVMTCIILFLMNLIPGLSLRVSAAEENMGLDDAQIGEFAYDYVELTRHFEDAAVTTPAVGSSQGSIKEPRTKETQEVSKTETTVV

SEQ ID NO: 26270 - protein, 393 aa, Magnaporthe grisea 70-15
MACALALIKVGFKVRVFERYDRARPAGNILNLWPPPIHALKCMGVDVEDLGAPCRASFRNASGHVRADVKLPQDVLDKYGGGFIGLLRRDLYVRMLEALPAGTVEFGRQVVAIEDLGHRVELTLQDGSVVATPLLVGADGIDSTVRRHLWGPAPKRPHNLIIIGGFTFTDAVRTELNECVIAHNPQVQGTYTTILSGGRRGHQWWLLQAWPESRPDPDKLKERALDGAAGFPHGPLRDLVAATPAENMQTWRIRDREPLARWSRGRITLAGDAAHATSPYAAYGAGMSICDGYFPAKLLRGTALDDTAAVAGALRQYDACRIPHTSEQVNLAYFLGRMFHQVPWPLTVARDLVLDWTGLLQREVGERSPGEIVKQLDEMGEGLESDGLESDGV

SEQ ID NO: 26271 - protein, 109 aa, Magnaporthe grisea 70-15
MSDRENGGSPHGDYPGAGGGAPAGGGDPAAPEHLNIKVTDNNNEVFFKIKRSTKLEKLMNAFCDRQGKSLSQVRFLFDGQRVQPTDTPDTLEMADGDTLEVHQEQVGGA

SEQ ID NO: 26272 - protein, 870 aa, Magnaporthe grisea 70-15
MSDQIKDEKSSANVADGGVLKEKQSAFSAARGSLDELPLPESVDASLLATDGDLIEARAIAARMTNDEVKSILLDVVKIHNDDPNFPFPVLEKIRGFIANPAVFENPEKHEELFAEMKLEAALITNNSPYSEVRAVVDNHDDPSLPVSTVRAWVIGMIFSVLLAFINQLFSIRQPSILVASNVAQILSYPLGKLWEKVMPDYGVNMFGSRISLNPGPFNKKEHMLITIMANVAYSTPYTNNIIWAQYLPTFFNQHYAGQFSYQILIGLSTNFIGYGIAGLTRRFLVYPSFCVWPSSLVTIALNTAFHDDNSTPVKAPFRKMISMSRYRFFLYAFSAMFIYFWFPDFIFQALSIFSWLSWIAPDNVNLNAVVGFNNGLGINPWPTFDWNTLLYNSLDPLMIPFFSTLNMTIGMAVSTITALGLWYTNAWNTGHLPINSNGVFDNTGSRFNVTRVIDSRGIFDSAKYTSYSMAYLAAGNICVYIFFFAIYPATVVYIGLYHRYEITMGFKSLWKSFKPKKKDENGNAIIEPLGSDVHNRLMSAYKEAPEWWYMSLLVISIALGIGGIAGYETFTTPGVIFYGLALCLIFVVPCGIVAAMTGAQVTLNVLAEFIGGSWVEGNALAMNFFKCYGYVTCAHALAFANDLKLAHYVKIPPRTTFIAQVVATLVSTFVCTGVLNFQMNMIPGVCTPDAPNRFTCPGINTFFTASVLWGTIGPKKVFGSGGQYTAALVGFPIGAALPFIFWALQRKYRGSRWLRQVHPVAMLYGSLSLSPYNLSYQWPAVPIAWLSWIYIKQRYLALWSKYNFVLSGAFSSGVAVAAIIIFFALQWGGDISLDWWGNQVVSQGCEASACVRLPLAKGETFGPPAGSWS

SEQ ID NO: 26273 - protein, 905 aa, Magnaporthe grisea 70-15
MSIVSPTPMGGSQFTTLGRRTSTRQALRRPPSRQQLSHRPTSDSNPIGSSRATDSNLQGGAQKYVNDNDSSDEEIPVPMKLSALTKALLDDGGPSAAAANAAQPAAIPTRNMSYLDRGLEHKDSEREVSTLRESRRNVRAGSAQLTSSPNRGVEPSSAPRKRVVRLSSTNVSVNTTPGGSSLQSKVRRSSTHKRAPSKDRTDERNKVSGPEPVVSQDSTAAADSVAGINTPVSGARRVRIVSNSSATRGRTHGSTLRSSSSAGTSRLPSSAAHSDHEQPEEPRTEHRTRTSLNNSSGANTARKPDDAAPQSLMRMKRIGQLPGSFLSGPARRGRRRQSDEEENAPADEQYPDQYMHGLREHEPESIARHQPGSGAGSSFRLSSYRDQAAASGSPVSIKDPARAALRNKTSPGSSAKTDAETNKENVPPEEAHEPAPVFQPVLPSALDQENAVSAAVARSKEVISMHEKLASRDPAPLPQVQAPVIPKQRAPSPDRKVLSHMSRNTPLRPAPPPPPKMSVLDAVTSTAGAATTAQAIKKQRVLLKVNGRAYNRLDCIGRGGSAKVYRVTAENGKMFALKRVSLENADTTAVKGFLGEIELLRRLSGVDRVIQMYDSELNQEKKLLSVLMEMGELDLGDLLKSRHSQEDYKLDTVFVRFIWKEMLECLQSVHACDIVHSDLKPANFVMVKGRLKLIDFGIAGAIQTDETVNVHRENQIGTPNYMSPESLMDSAHYSATAANNGRPDRSLNRTRVMKLGKPSDVWSLGCILYQLVYGTPPFGHIPNQLARCQAIIAWDHKISFPEKGAGGVFVPPSLVRTMKRCLIRDQQYRPTCEELLTETDPFLYPQEVDMDRVLPMTEELLARVIHSVVNRCRDRMPTDGELMTAWPNAYWASVKKSVGSKEARS

SEQ ID NO: 26274 - protein, 620 aa, Magnaporthe grisea 70-15
MRSRNAKALCTATYQLAVRSITRNTARTKPGFSLVGSCSTPAARKSIALRRLYSSHSRTRTTRPEHAPVNQQLLTSSMSVRRFSLALVSGLVGYGAWYSYRDSSTDATAATRAFTNSASNPTKAAVNGAAPTRNVLVITADELYTSTFVGEGPISKITDDERRMVVEMLNPEQSTQKLRKNEQSYIVNRGQGVVRYDLVQLPSNDPIEDDHAEKIVEVPDGSQPSSKNDWMFWGVFDGHSGWTTSAKLRQALIGSVARELNDTYRAAPSMTPTPEAIEAAMKTGFVRLDDEIVNQSVEKVLKQNNKTVAAELLAPALSGSCALLSFYDSRTGLLRVACTGDSRAVLGRRSASSDKWTATPLSTDQTGANPEEAARMRKQHPGEEHVVRNGRVLGGLEPTRAFGDASYKWTRDVSERLRRSFFGRTPSALLRTPPYVTAEPVVTTTKIEPQNGDFLVLATDGLWEMLTNEEVVGLVGKWLETQQAGGSGSSYWSKMFGGSSTKSGLPVEAVGSKDSAGGQKTPIRVQQWGLSPDGKDRFVVQDKNVATHLVRNALGGKNEEQVSALLTLPSPFSRRYRDDLTVQVIFFGNEGEKTGDVVVNEEATSMPGSSSQAAAAKAKL

SEQ ID NO: 26275 - protein, 678 aa, Magnaporthe grisea 70-15
MKEFLDSDRLNFLVWRYLLEGNYRETAAKFQKEWRVREPHRQFDFAPHVQNHALVSIVNRGLVYCALEREFAESQVPQTASGEPREAPHGVFGPLIVQPPASLKPQKTTTSAPDAATEAGGTATASPVTANANVADTTDADADADADADADGDADLDADGDVDPDADATGEEDNILPTVEGENNRKRQLQAVNGSPMKRARLGNGYENGVETGPTPMDIDEADSGNNNNHAYPSPLEVDQITTPPPRTFGPEQGTQVDKVDELTPETIFLSTSAEDASTNAGCGAVPPATPPTENTPSRSQPNPILLHCEWSPIDPSVLAAAGTDALARIWTVSRSTQAGPVPGHAIDHVSSVFGNLTEDDAAPDAVITAMAWNWDGSALALATDSGNKARISIWAADGTHLQRFDVAEPPIIKLKWHPNNTCVLAVAPDTEGTLVTVFETQVSHTVSYSLPSHDLDANPLDAAWISDTEFLLCGGRLLESFKYTETEITPVRKFPTRENDIFTQAQFDWRSKLVATASETGVIDLWDESGQRRSIPAHSGPITSLSWQPLQGNPPDEERLLASGGEDGIISVWNARVPENKPKWSMTMEPPIVALSFTPDGAFIAGATTDRILIWKVGEYSIPRASWSRTSHPGWSNSKPVNGAPASIEDTHCLCWDASGQKLAYGTNSLIAVINFR

SEQ ID NO: 26276 - protein, 573 aa, Magnaporthe grisea 70-15
MASSENDGDTVQIVINSLKAAGVKVVFGIPGAKIDSLFNALYDEESIRLVVCRHEQNAAFMAGVVGKLTNVPGVCIVTSGPGTSNLPTGLITATDEGSPMVAIVGSVKRAQSNKRTHQSLQNVELLKPVTKKTLPVVVEDQVAEIMLEAFRAAVSYPQGATAVSLPIDIMTPGKSKSAIRAFPPAAFTPPAYGLSSDASLSQAVKMIENAKFPVLFLGMRAASNAVVDQVYALLRKHPLPVVETFQAAGAISRDLAHLFFGRIGLWRNQPGDELLSHADLVITIGYDEIEYDAESWNPGEREVDIIHMDFHRATFGAHYEPRLELIGSLSDNLAVLNTRLQNVARPHETVVAKKLFSGLHAWETGPKACPSPCPDTGKVHPLHFIKVLQKKLEAFEQTPTISCDVGSVYIYFCRFFYSYVPKTFLVSNAQQTLGVALPWAIGASLAQEPPCSAKVVSISGDGGFQFSMAECATAVAVKANICHIIWNDQSYDMVGFQEQIKYGRTSGTGLGNVDFVKLAEAYGAKGFRIDNPSQLESTLEEALAWNGLSIVDVNIDYSDNQELMKQVVTDKVN

SEQ ID NO: 26277 - protein, 446 aa, Magnaporthe grisea 70-15
MKIIIAGAGMGGLGCALSLARKGFKHIEVYETASNLGFVGAGIQMAPNMVRILDRLGCWRGSGIEKEATNVKETSIRQGSTNEELAHVNMPDIAAKYGYPHCTGHRSSLAGGMYEACKKEPAITFHFGTSVVGVSNWGPAKPHVTVRSAGADEETKDVEADVVLAADGIKSVVRREMLARYGAEPEEEDTGQACYRIMLTRAEMEAIGEPELLELMDSDLVVRWIGEKRHIIAYSVAGKSIYNLSTTQPDVNFASGPTSTYTTRASKEAMLKVFEDFCPLVQKMLNMVPSGDVCEWKLRQHKTLPTWCDGPVALLGDACHPTLPHLSQGAAMAIEDGAVIAEVLSRLPPGEVDPVQVGRCLKVYEQLRKDRTSELVSLAAMSARALHLGDGKAKEERDRQFAEARAKGGAPVPDKWASPEVQKMIYSHDCVQHAAENYDGILANMS

SEQ ID NO: 26278 - protein, 415 aa, Magnaporthe grisea 70-15
MASTHSKVLIIGGGIAGCVAACLLKQKGYDPIVFERAPTQGDVGASLLICPNGLKVLAKMGGGVVEKLRANAPRLAELCDRTAAGEILGEASDVPEEFESRYGYPAIGVKRTLFAKWVVDAAVGQGIEVRSGWALERFEQDDTSVTAFFNQGRSEKGEFLIGCDGLKSKTRRWLLASKGLEDGQPSYTGLAQTGGISPTPVQFLSKPGLRNWYGVGLHLVCYPITAEHTSWALTRNESAAEEASWGLFDDERRERTKVELEKNLRDLSWDPVVAEMVGNAQRLIKYGIYDRPELKPSDWYLGRCVLMGDAVHPTAVHLGQGANQACEDCFYLTAELPDCDPATVIPTEELTRVFAKYAEIRQPRTSVLVEGARRQGEIRVSPPEKCAERDALIAKVMTDRAGLEATFDFRFILPV

SEQ ID NO: 26279 - protein, 844 aa, Magnaporthe grisea 70-15
MSTTGAKVGQGLAAALGIKLRNNEPYQDEVTRGESILSVQTADTFVETRPTTKEFFQELVPSGKDVATYTRSLFPFLDWIGKYNLQWLLGDLVAGITIGAVVVPQGMAYAVLANLEPQFGLYSSFMGVLIYWFFATSKDITIGPVAVMSTLVGGIVIEMKEKFPEVPGHVVASALSIITGAIVLFLGLTRTGFIVDLISLTSLSAFMTGSAISIVIGQIPTMMGISGVSTRDASYLVLINTLKNLKTTKLDAAMGLSALAMLYIIRSACSFGAKKWPEKQKLYFFLGTLRTVFVILLYTMISWLVNMNHRSDPKFKILKDIPGGFQNAAVPVVETRVIGAMASNLPAAVIVLLIEHIAISKSFGRVNNYSINPSQEMVAIGVTNLLAPFLGGYPSTGSFSRTAIKSKAGVRTPFAGVITAVVVLLAIYVLPPVFFYIPSASLAAVIIHAVGDLITPPNTLYQFWCVSPLEVLIFFIGVIITVFSTIENGIYATVAISAAILLGRILKARGRFLGPVRVHSVLDDRIIGDDHREYGTFGQTGTGTGGASTRNIFLPIDHGDGSNPDVEVESPYPGVFIYRFTEGFSYPNASHTLEYLTRYVFAHTRRTNLTQYARPGDRPWNDPGPSKRELKRAQRSGGNLHIAGENPDLPTLKAIILDFSSVNHVDVSSVQQLIDVRNQLDRYAAPDPVDWHIACIGNRWTKRALVAGGFGYPTPRDEGSHRWKSIFSVAEIGGSDSAAAVAEKEEEQERRHAAASDADDLEKGVNVAPVHKATDGTETPRTEASSTETERAAAASGAGLKGLRPAARAVTVHGLNRPLFHVDLTSALQSAIANIEARRGGDGL

SEQ ID NO: 26280 - protein, 709 aa, Magnaporthe grisea 70-15
MCGASVIVSLRRKHEETNGAAAAKTSDKESRLAKSLDALAHRGPDARGVWIDPTGEVGLAHTRLAIIDLSAEGNQPLHDDQDHIHAVITGEIYDHDRLRRECVEAGYRFKGHSDSEVVVALYQRYGAPGFLEHCRGEFSMVVYDDRSGEVFACRDRSGIKPLFYTIVQNELWFSSEVKGFLGMGWKPEWALESIAMGVTQVGSSTIFQGVNRIEPGFYMKVTADGDITHSKYWDFDYPDKTVVDNRSMEDMVQELREALVDAVRLRLRADVPVGIYLSGGLDSSMIAGIAKKLIDEEGATAGSQKASERMTTFTLAVNSDQDNSVYNEASIASRTAKFLGVKEKTLNADEQLLASTFEDACWHIEQPISTLSMCAKVALSKLARDSGVTVILTGEGADETFAGYPWMLPDLTAEADHSRPDAPINRDIDNLRGPIRKQLFDMWANLGSTEMPKLLQQVKPETWAKMNFVSTPVVSDGSSGVGLIHPKLRAKYNLDDRISKTQDCIGEDVLKKVREKWHPLNSSLYLNHKTLLANTIIPSNGDRTEMANSVEGRPPILDHKVLELASKLPPSVQVGYFPDGANLNSGKTVFRSNNADGELMARFREKFLLREAARPFVTDEIYSRPKHSFMASSNYHAGGPIHQVLKRLLTKENVEAVGFLDWPKIEAHLASAFDPQLAHVAGQNFAPCLQAASFVTISQKFGVARASVE

SEQ ID NO: 26281 - protein, 363 aa, Cyanophora paradoxa
MAFVASVPVFANASGLKTEAKVCQKPALKNSFFRGEEVTSRSFFASQAVSAKPATTFEVDTTIRAQAVDAKKKGDIPLNLFRPANPYIGKCIYNERIVGEGAPGETKHIIFTHEGKVPYLEGQSIGIIPPGTDKDGKPHKLRLYSIASTRHGDFGDDKTVSLSVKRLEYTDANGNLVKGVCSNYLCDLKPGDEVMITGPVGTTMLMPEDQSATIIMLATGTGIAPFRSFLRRMFEETHADYKFNGLAWLFLGVPTSSTLLYREELEKMQKANPNNFRLDYAISREQTDSKGEKMYIQNRIAEYANEFWNMIQKPNTFVYMCGLRGMEDGIQQCMEDIAKANGTTWDAVVKGLKKEKRWHVETY

SEQ ID NO: 26282 - protein, 526 aa, Magnaporthe grisea 70-15
MATVAPPPSKRQRREQAARATTQQDVTAVLAPPTGSFRARFVSGSDGSPLADAVEIPLADASEKNVSLLLNTLLGRDADESVPYRFRILLPPGKGNKEEIVIDSYPSDLGALLRQHGIEDAFETTLTLAAEPQAVFKVQAVSRLAHRIPGHGEPILCAQFSPASSARLATGSGDNTARIWDAETGTPKHTLKGHAGWVLGVSWSPDGTRLATCSMDKTVRIWDPETGKQVGSELKGHAKWVQGIAWEPLHLWRDGTPRLVSASKDFTARIWTVNTGRTEHVLSGHKGSVSCVRWGAGNGTGVVYTASHDKTVKVWDAVKGTLLHDLKSHAHWVNHLALSTDFVCRTGFFDHTKTVPATAEEKTAKAKERYEKAARVGGKIVERLVSASDDFTMYLFDPLNDGTKPIARMIGHQKQVNHVTFSPDGSMIASAGWDNATKLWNARDGKFINTLRGHVAPVYQCSFSADSRLLVTASKDTTLKVWNVRTGKLATDLPGHEDEVYGVDWSPDGQRVGSGGRDKAVRLWRN

SEQ ID NO: 26283 - protein, 349 aa, Magnaporthe grisea 70-15
MKLAIFSAKGYDKKYFSQVQAAHEKLSNIDLSFIDFPLSPDTVQLAKGAEAVCAFVNDNLSRPVLEGLSDLGVTTILLRCAGFNNVDLDCASQLGLSVANVPSYSPEAVGEFAVALLQTVNRKTHRAYNRVREGNFNLDGLLGRTLHGKTVGVVGTGRIGIAFARIMVGFGCKLLAYDVYQNEEVGKLGGSYESLDEVLSKSDFVSLHCPLMEATRHLINSTTLAKMKPDAILINTSRGGLIDTKAVIKALKARELGGLALDVYEGEGALFYNDHSADIIQDDELMRLMTFPNVVVCGHQAFFTEEALTEIAECSFRNLDDLANGRECKNSLVAAKKPLLRRESIPHRI

SEQ ID NO: 26284 - protein, 309 aa, Magnaporthe grisea 70-15
MAPQLLWIGLGNMGRGMCRNIVEKAALDGLPLLLHNRSAQRAVDLKGSLPDGKAEVVTDLAQGVAKADVIFTCVANDAAVRETLDAAIASGNIKGKLFIDCSTIHPDTTESVSKKIVDQGAEFVAAPIFGPPAAADAGTLVAVLAGPRSSVERARPYFKGVTSRAEIEMVDRTPQTALTLKVIGNTFIVNMIEQLAEGHVLAEKSGLGTEYLHQFVEHVFPGAYTAYSQRMLTGDYHKREEPLFAVDLARKDAGHALALAKKAGTKLPNVEAADAHLAQVKEHSGAKGDIAGIYGAVRKEAGLKFENDA

SEQ ID NO: 26285 - protein, 340 aa, Magnaporthe grisea 70-15
MKVSPQSLRHLRASRRAFSSTARRLDTYGFIGLGQMGYQMAKNLQSKLSTSDTVRLYDINRDVMQRLAGEMKTSSKADTTGGAAVELAESGEAASAGADTVITVLPEPIHVKTVYKAIIASQSQDGNQKPCLFIDCSTIDPSSSREVANAVAAAGSTFADAPMSGGVVGATAGTLTFMLGCEKPELVGRIEPVLLKMGRRVLNCGAQGTGLSAKLANNYLLAISNVATAEAMNLGIRWGLDPKVLAGVINASTGKCWPSETNNPVPGVVDGAPAGRDYAGGFGIALMRKDLGLAITAAQEAGAKLELADRAKKVYDAADKEERCKGRDFSVVYRHIGGKE

SEQ ID NO: 26286 - protein, 433 aa, Magnaporthe grisea 70-15
MIPKSSRSVFHTTSTLSSSLRCGTRRQFSSRGALQQEIRDAYIISASRTPTAKFNGSFTTVPAPKLGAVAIKSALEKSRVPVSNISDVYMGNVLQGSVGQSPARQAAIFAGLPSSVEAITINKVCASGLKSVVFAAQNIQLGLAEAQVAGGMENMSRVPYYLPRSSGLPAFGNVQLEDGLIKDGLTDVYDQFHMGNCAENTVKKHGITREMQDQYAIQSYERAQAAWKANAFKDEIAPVTVSSRKGDKVIDTDEGYLDIKLDKVPTLKPAFVRDGTGTVTAANSSTLNDGASALVLGSKAIAQEYGSGSRVLAKICGSADAAIDPIDFPVAPAEAVPIALKRAGITKDQVAVWEFNEAFAAVIKANEKILGLEKARVNPLGGAISLGHALGSSGSRILVTLLHQLKPGEYGVAAICNGGGAATAMVVQRIESV

SEQ ID NO: 26287 - protein, 609 aa, Magnaporthe grisea 70-15
MTKIPLARYIFQRLRQYGVDHIHGVPGDNLLHALDHIVPAGSRWVGCCNELNAAYAADGYARVRGMGAVFTTMGVGELSAANAIAGSQAERVPVVHLVGVPSREAMMGQSQYPNVMHHALQPGGGMEPFREIGRLLTQGRDEFRSSAAVYEGATAADFASKFDSMLRRSFVQRKTMYFPLRADLVDHQVDSSWLEKSLDGPDGEQGSKPPAEEWDFLKELRSAEKPVILVDRGLGMDAFKDEINELVALSGIPTFCMPSGAGMIDNRLPNYHGVHSGPFGRINSMTWVGSADLVLAIGPMFSDTNTFGWMTVPRPSAKNPNMKLMILASHTTRPKRAMPGQTTPVMLLQTNRDILRRAIEMLKKEPIKGKAIPFMKDWRVGERRWMVGDQRINQSILYQKLDKYLRPYDTILIGNATPLLGARDFVLPEGARVIASGQWFSIGHMLPAAMGAALAKRGLKGDAGRGRTILLDGDGSFQMTAQELGTIIRQRLDVTIFIFNNGGYAYERLIHGPDEEYNDIAPWKYLELPSAFGAEHARAMHGYNTQTHLVRTWDDLDRLFMDGRFNIGPGLKLVELRLGRKDVPARFRNLFREDEEEERLTRRIRSDPE

SEQ ID NO: 26288 - protein, 607 aa, Magnaporthe grisea 70-15
MSMHPGYRGGAAPPQPNGPSRLNELLEGIRAEFEASARAAENYEHQINTQINEMHMVREKVYQMEQTHVQLKAKYEEELAHLRRQLEGRGGGMPQGGIGGPSQHAGPAQPPNIGVGNNVFGAIMSGQTGQPLAPPPPPPQEQQPPQHQMAQPPPGLSGPPPPPPPPSQQPPFQQYPQPPGPGNFPSQPPQSTASPGPGKRGAIGRPPAGGPATPQINNPMPYPGPGQSPQVPNHPTPDHPRGLAQHQPPQPPPGNALGDLDIERIPSHFKKSRDDWWAIFNQAVPRVLDVDLVHTLQHESVVCCVRFSADGKYVATGCNRSAQIFDVNTGEKVCVLQDDNADTTGDLYIRSVCFSPDGKYLATGAEDKQIRVWDITTRTIRIQFAGHEQDIYSLDFARDGRTIASGSGDRTVRLWDIENGTALTVFTIEDGVTTVAISPDTKYVAAGSLDKSVRVWDLTQGCPVERLEGPDGHKDSVYSVAFSPNGRDLVTGSLDKTIKLWELATPRGNMQNQGSKGGRCVKTFEGHRDFVLSVALTPDNQWVMSGSKDRGVQFWDPRTGSTQLMLQGHKNSVISVAPSPTGGFFATGSGDMRARIWSYTRMDNRMA

SEQ ID NO: 26289 - protein, 326 aa, Rhizobium leguminosarum bv. phaseoli
MTKFKLEYIWLDGYTPVPNLRGKTQIKEFDEFPTLEQLPLWGFDGSSTMQAEGSSDCVLKPVAIYPDPARTNGALVMCEVMMPDGHAHASNARATILDDEDAWFGFEQEYFFYQNGRPLGFPEQGYPAPQPYYTGVGYSNVGDVAREIVEEHLDLCLAAGINHEGINAEVAKGQWEFQIFGKGSKKAADQIWMARYLLQRLTEKYGIDIEYHCKPLGDTDWNGSGMHCNFSTKYLREVGGKEYFEALMASSDKNLMDHIAVYGPDNDKRLTGKHETAPWNKFSYGVADRGASIRVPHSFIKNDYKGYLEDRRPNSQGDPYQIVRRF

SEQ ID NO: 26290 - protein, 926 aa, Magnaporthe grisea 70-15
MAPASATSDLDRVDSSPSPAVSDDEKRNHRNDDVSPHDKATSVVGHKEKGQDIDTTAAPVFPPAEWVERLKAEYTGRHDAGTETLPPGCDPDRMAASVLTLDVEESVQVLKNLLESQKEDFTIDQVVMARVRELVQGHEHCEMTHGDWTYDVCKRAGLYHNWSPYAEVRAVTLPYDDVEEACESFRAYLLGYFWICVCTAINSFFAPRQPGISIPGSVIQLILVPMGRAMAYILPDWGFRWRGTRYTLNPGPWTAKEQLFTTIIFNGASGIGNMTGLLVMRLPVFFNQKWATYGFNIMLALSNQVFGLGMAGILRRLSVYPIEAVWPSTLPVLALNRTLMNADNKREKINGWTMTRYRMFLWSSLFFLIYYWIPNRFWEGLRLFNWLTWIDPNNFNLATVTGSYGGMGYNPFSSFDPNVSGSGTMNAPFFAQLQQFVMRALSGIIILIMYYKNAFWSAFLPINSNSAFDNTAKPYNISMVLNSDDTLNMQKYEAYGPPYYAIANLFITGVNFIYYTFSIVYVFTKFWKPIKKAFVGIVVNTIKRRSVYSGFEDGHTRMMRVNYKEVPEWWYGLLFTFGFVISIISLEAWPTDTPWWSMLGVTAIGALLTIPWVVIESIASTGIAVNVIWQVLPGIWFPGRPMPQLIILMLGAAFEIMAGSFSHDLKYAHYAKIPPRAVFRGHVSSVMVNCFIYVAMIEVMMAYANSDNTLCQWNNKQAMVCQYANSVYSSTIFYGIFGTNNMFKLYPILPWCFLIGAVLGVLWIGGERLLPRLRPHIKARLGSERGSKFDRYIWDPAAATLACLNPAIALSGALQWAGNNNLTYATLGIYLAWYFQYYLKRRYTAWWGKYAYLIFAGLAVGVAISGLIVTLVFSFGAGKGVEMKWWGNDVSKAGIDYKLYTNEARLMEVGERGYFGLDPKDYPNGW

SEQ ID NO: 26291 - protein, 632 aa, Magnaporthe grisea 70-15
MADAITEGAAKLQLDEETGEMVSKGELKKRMQKRAKKAAQAKAKEAAQATAGDAEKKAPAKPAAKPEEVVIDADAMFKQGFLDEVFRNRPMKPVFTRFPPEPNGFLHIGHAKAIAINFGFARHHGGQCYLRYDDTNPEKEEEKYFTSIESMVRWLGFSPYKITYSSDNFDKLYELAEKLINLGKAYVCKCDDAEIKLQRGGEKGKSPRYRCAHADQTPEDNLAQFRDMRDGKYKEREAFLRMKQDITDGNPQMWDLAAYRVKKAEHHRTGDKWKIYPTYDFTHCLCDSFEGITHSLCTTEFIQSRQSYEWLNTTLGVYEPQQREYGRLGLGGTVLSKRKILKLVELGHVREWDDPRLYTLTAIKRRGVPPGAILEFVNELGVTTAATVIQIKRFEQTIRRYLERTVPRLMMVLDPLRVVIEDADDLDGKPLSIPFSSKVPEMGSHDLKFTKTVYIDRSDFREVDSKDYFRLAPGKPVGLLNVPYPIKVKSFSKDKATGEVTEVRAEFDREKKKPKAYIQWVPEGSRKVEARVYNPLFKSESPDSVEGGFLADINPESQIIYPDALLESGFEEVRRRAPWPEAAGESELGKGGPESVRFQATRVAYFAMDSDSTEDKIVLNRIVSLKEDAGKN

SEQ ID NO: 26292 - protein, 167 aa, Magnaporthe grisea 70-15
MISSRFMGGNILRQASRTACRAPAHSIAAPTLLRQLQAQQQRRLLTSEVRQAIDKAVASAPVVLFMKGTPETPQCGFSRASIQILSMQGVDPEKFAAYNVLEDQSLREGIKEYSEWPTIPQVYIDKEFVGGCDILVSMHQSGELGKMLAEKGVLVKGQEGEADNKSE

SEQ ID NO: 26293 - protein, 211 aa, Magnaporthe grisea 70-15
MSTSTPPRAPMPPVPSTTVTVTATGPSQEQRQGGKLQDLLQGPDAQQWQARFNTTMADVGGVVNSKAPESAEPFSQNLFGCFGDIGLCLQGCLIPCVVFGKTHHRTRENARMEGYQPVNTTCLLLCGLGCIGLSWIPMSMQRADIRRKYGLRGSCLGDIALACCCGCCAIVQEERESAHREPLDDTHTTTVAGDKTQYNSQPGMNYPTPPQ

SEQ ID NO: 26294 - protein, 800 aa, Magnaporthe grisea 70-15
MSSGDNNSPGGSSRPQAVSRNSTNNASGRNNHAPANPSGLRNVVDPSEDASATNNNGDAGPSEPRSPTRNAASETTSLLRGVHDDHHPHEGQCNHGTFSPRPSSPTSILSSEPSFATSESSTSRLFENFLGTITGNSNDPDWRRKLARRIRSKKMHTSQELAREHGIRDSPLMYLSYYIPCLNWMSQYKRSYLKGDLIAAVTIAGMYLPMALSLADNLAHVPPINGLYGFVFQPFVYALLGSSPQMMVGPEAAGSLLVGSVVKSTLDRTSGTPSSMGGGAENDAELQAKVCGIVGGIAAATVFIAGLTRLGFLDSVLSRPFLRGFISAIGVVIGVDQLIPELGLNKLAAATPAVGHGSSMDKLRFMFDNLDQVHKMTALVAGVSFTVIMVARETKRRLQPRYPGVAYVPDRFIVVVLSAWLAYYFEWEKHGVQILGTVKAASGRPFTFRWPFQPSHVVQIRDAMGTSFLLAMLGFFESSVAAKSLGDQTIFPDIQLSPNRELIALGAANLLGSCFMSLPAFGGYGRSKVNRQTGGKTPMSSLFVSFIALMVILFGLRLFYYLPKPVLSSLISVVAWSLIEECPHDIYFFLRIRAWQELSLMFLIVLTTIFFSLNMGIAIGIGISLLLVIRNSTRPHIQILGRIPGTNRFENAEAHPERLEFVEGCLIVKIPEPLTFANTGQLKNRLRRLELYGTNKAHPALPRLRAQVQNKNVVFDVHGVTSMDGSGTQVLEEIVRGYRDRGVRVFFSRLPSRDSSPVWKLMENSGIVEMVGGIDHFVDDVHEALRLTEGPDSGDLPAAS

SEQ ID NO: 26295 - protein, 406 aa, Magnaporthe grisea 70-15
MSFSGMLNRLHGQPESYDKKSKYRFGKTLGAGTYGIVREAEGQTGKVAIKIILKKNVKGNERMVYDELEMLQRLQHPHIVRFVDWFESRDKYYIVTELATGGELFDRICEQGKFTEKDASQTIKQVLGAVDYLHSKNVVHRDLKPENLLYLSKAPDSDLVLADFGIAKMLDSRDEVLTTMAGSFGYAAPEVMMKKGHGKPVDMWSMGVITYTLLCGYSPFRSEGLQDLIEECSNAQVTFHDRYWRDVSEDAKNFIRSLLQANPDDRATSGQALRHPWLSGENATDHNLLPEIKSFMAKARLRRGIEMVKLANRIQTLKLQEEDPDNTDMPDDAVEAADDSQGNAGSSGGSGLFKPGEKKTMSKAVKGAIFREVVLAKVREMKTQEETLKVAEEVEKEARRKSFTGS

SEQ ID NO: 26296 - protein, 449 aa, Magnaporthe grisea 70-15
MDSQPVLSVAIVGAGIAGLTAAIALQGKPGIDVHIYERTKELREVGATIALGPNGLRTLERLGINNALDDSIAFRNKSGHPMIFRHAQTNETVSVDNHVGHIEPRHHTARFFRPHLQRALLQHVDPSRLHLGKAFSSIKQTQDGSRIVLSFTDGTAAQADVVLGADGIHSAVRRAFIPETRAHWTGWVIFRSVFPRSVVAHIPDLPDEAVHYWGVDRTLFLSPLAGGGGEDLFAIVASTQRDPEAPGDEAARGEPVWNRKGSLEEVRELYQDWHPTLRAIIQANPHTRVYHNAAADGLDSWVLGAGKVTLAGDAAHAHGGAFAAGGSLAIDDAWAFAQSLLHVFAGEVGDGAKATAAFRQPKDKSDRVAAALRLYERTRKQHTDRVQKTVADKNRATLQRLRAGVVESDQELRRRMRTRQDLAWIHEHDVVSSFTKAVGSSDGELVSRL

SEQ ID NO: 26297 - protein, 656 aa, Magnaporthe grisea 70-15
MAIGLGMVFWLCLLFSPLAFVKTANAQDADSYGTVIGIDLGTTYSCVGVMQKGKVEILVNDQGNRITPSYVAFTDDERLVGDAAKNQAASNPFRTIFDVKRLIGRKFTDKDVQQDIKHFPYKVVNKGGKPVVSVDVKGETKQFTPEEVSAMILGKMKEVAEAYLGKKVTHAVVTVPAYFNDNQRQATKDAGVIAGLNVLRIVNEPTAAALAYGLDKTGEENQIIVYDLGGGTFDVSLLSIDNGVFEVLATAGDTHLGGEDFDQRIINHFVKMHNKKHNVDVTKDAKAMGKLKREAEKAKRTLSSQKSTRIEIESFFDGKDFSETMTQAKFEELNIDLFKKTLKPVEQVLKDAKLKKEDINDIVLVGGSTRIPKVQALIKEYFNGKNPSKGINPDEAVAFGAAVQAGVLSGEEGTGDVVLMDVNPLTLGIETTGGVMTKLIPRNTPIPTRKSQIFSTAADNQPVVLIQVFEGERTMTKDNNLLGKFELTGIPPAPRGQPQIEVSFELDANGILKVSAHDKGTGNTEQITITNDKGRLTPEEIDRMVTEAEKFAEEDKATRERIEARNGLENYAFSLKNQVKDEEGLGGKIDESDKEALLDAIKEATEWLEENGATAEAADFEEQKEKLSGVAYPITSKLYSGGAGGDSDEPRSHDEL

SEQ ID NO: 26298 - protein, 548 aa, Magnaporthe grisea 70-15
MRRNKSSDDGLGALSPRAAGIIREANVADGIPFRAKAGHVHRTWARTFSSLPELYLQPESEAEIEKIINLARRCRRRVTVVGCGHSPSDLTCTSGWLVNLDNYNKVLDIDRLTGVVRMQSGIRLYALAAELERVGLAMPSLGSINEQSIAGAISTGTHGSSLQHGLISDDVVELKVTLGNGTTRTCSATEDPDLFRAALLSLGALGIISEVSFRAVPRFSLSWYQTIDTDKKMMAQWDTTLWTQDHFVRVWWFPYMRKAVVWRASEPGPVLGQDYAEPEPPRLDPPASWYGGTLGYLVYHNLLSLAQVVPRILPWVEWFVFGMQYGFRNGTTIHGVQPSREALLMDCLYSQFVNEWAIPLSKGPEALMRLGSWLNKLKPGDEGYVEHGIPFSVEGLWVHSPVEVRVADTSLNREKRCRPWLDPTVEDGPTLYLNATLYRPYHRDPPSYKRYYEAFEWLMKDMGGRPHWAKNFRCQTIEELYGDNLQQWRAVRDRADPEGMFAGPWHRRLVLEAGDDKHYLLPLEEAEVERRQAEGDGLRVTGDCGGRK

SEQ ID NO: 26299 - protein, 586 aa, Magnaporthe grisea 70-15
MAPSAIVDSAPASPTINGDRPRILVPEKVSPDGLAMLTGLYDVDKRQGLSAEELVEIIPNYHGLIVRSETKVTAQVLSAAAKLRVVARAGVGVDNINVDAATKQGIIVVNSPAGNIVAAAEHTVALLLATARHVGRADSTLKQRKWERSKLVGVEVGRKTLGVIGLGKVGIRVARMATGLGMKVIALDPYASEDLAKQAQVKLVSSLEELLPAVDFLTIHTPLLASTLNLLGEAEFQKMKPTSRVLNVARGGVYNEDALIRALDEGWIAGAGIDVFTSEPPEPESSAARLAAHPKVVATPHLGASTVEAQENVSLDVCAQVLEILRGGLPTAAVNAPLILPEEYRKLQLFVRLVERMGGLYTQHFAGSKGRTTGSRRFELNYQGELASVSNTRPLFAALVKGLVSSISDSGGQDVNIVNAMLIAKDKGIAVNETHTRESSDQAYASLVTLRVSGAGDEDQHVIEGYVSGQNVYISRLGRFNANFTPEGMMLILHNYDEPGKIGNVGSVLGRHSINIRFMQVAGLALHDQQKEQVSSNRDRVGEHENEALMILGVDGEITKEVLNDLSQAEGILNLLLFPRARRYHA

SEQ ID NO: 26300 - protein, 714 aa, Magnaporthe grisea 70-15
MLVSRQCESEQNQWPFGKPAPSTRMSTHYEPPLSTQPDWPGSYPSFLPPGDNIFGQSYEHVSSSTDNAQQSASQPRSTVTENNAVGASDKSPINSNLPGLGDRRSFDPLGLRQKQPSPIQEQPEEKGDMYAHKSSQSNQQEHRGASGEHHGLRLNTDSLMSAPAGGQGQDLLTTRLGANEGHGVKEEEDDGLDDEDMLDEGDEDGGDGSSQPQTAAERTAQRRKMKRFRLTHQQTRFLMSEFAKQPHPDAAHRERLSREIPGLSPRQVQVWFQNRRAKIKRLTADDRDRMIKMRAVPDDFDNVQALHSPYGAVHTLGTPISSPVDFSGSSYAEHMMRPLMVDVRRGDAEDHLSPTGLSPAFGSIGFNASANMGNSDMLSPISSATGERYGYPGHLSSPLSAAPRTSNPFNRQDAGMQMHNHHQRQGIRSLQPLQLRETMSRSRSDSLQSPLRSSMSWKGDSIDYSTYHGPQSPHLPGRHPSIYQSSSDSIGTPSTMAGYDSSTYTGSTVHSPTHMTYPTFQSSSIQNSTQNRTNRIRSVSAAATMQPLSLDLRSSPYRPPGQGLAAQSPTAQTRTASTSHIGGTSSSYSASFPSAPLTAPVDFSLPRTSSYRSQTEYSVPQMSAPIAPPNDFSQAFQSIGGGAGRTPIRDGSSGTTLHPIGGGAGSQAVGSVCSPPNRSPDYTTSSDAALKRKQSFGGGAGAATSGSAPYGTAH

SEQ ID NO: 26301 - protein, 1118 aa, Magnaporthe grisea 70-15
MLWTVVRPAALAHGHGPGLSGLPALSVILDGASSASPVTHRAQRRQWHNTLSNKQHRATASRHSLALVAVPKRQQPIRHATVLPTVPALPATGVIKVNSAYSTKVVPPTTPYTELTVGVPKETYPNERRVALTPQNVALLKKKGFKRVLVERGAGAQADFPDEEYERAGAELVDAGTVWATSDILMKVRGPSLTEAEGMKTGQTIISFLQPAQNKDLVQKLSEKKATSFAMEMIPRISRAQVFDALSSMANIAGYKAVLEASNNFGRFLTGQVTAAGKIPPCKVLVVGAGVAGLSAIATARRMGAIVRGFDTRPATREQVQSLGAEFIEVDVQEDGSGAGGYAKEMSKEFQEAQLRLFANQAREVDIIITTALIPGKPAPKLITKAMLETMKPGSVVVDLAAEAGGNCEKTVPGELVTYKDVKIIGYTDLPSRLPTQSSTLYSNNITKLLLSMAPVEKEFGIDLSDEVVRGAIVTQKGEVLPPAPRPAPPPAPAAKPVTKEAEVVALTPFQKQSREVATVAGGMGAALALGKLTGPAFMGNMFTFGLASLIGYRAVWNVAPALHSPLMSVTNAISGMVGIGGLFVLGGGFFPHTIPQAFGALSVLLAFVNVSGGFVITKRMLDMFKRPTDPPEYPWLYGIPAVLFGGGFLAAASTGAAGLVQAGYLVSSVLCISSISSLASQATARMGNSLGILGVGSGVLASLLAVGFSPEVLTQFVGLAAMGGLAGFMIGKRITPTDLPQTVAALHSVVGLAAVLTSIGSVMADVHDISTLHLVTAYLGVLIGGITFTGSIVAFAKLAGKMSSKPILLPGRHLINAGMLSTNLATMGAFVTMAPGAPMVAAGALAANTVLSFIQGFTTTSAIGGADMPVVITVLNAYSGFALVAEGFMLDNSLLTTVGALIGVSGSILSYIMCVAMNRSLTNVLFGGISAPQQTDYKMEGSITQTNVEDTAEALVNAENVIIVVGYGMAVAKAQYAISEFTQFLRGKGINVRFAIHPVAGRMPGQCNVLLAEASVPYDIVLEMDEINDDFSETDVTLVIGANDTVNPIALEPGSPIAGMPVLHAWKSKTVIVMKRGLASGYADVPNPMFYMPGTRMLFGDAKTTCDAIKAALEARQ

SEQ ID NO: 26302 - protein, 427 aa, Magnaporthe grisea 70-15
MPTSWITHSNNGINKITSAVKFDEAGKYQQAFENYMSGCDDLMLAVKKNDAPEETRVALRRKMAEYLLRAEKLDAHLKAEKSKKEATNGESNGAIASNGQDDDSKKLRNALEGVVLQERPNVKWEDVAGLEGAKESLKEAVLLPIKFPHFFSGKRKPWKGILLYGPPGTGKSFLAKAVATEAKSTFFSVSSSDLVSKWMGESERLVKQLFAMARENKPSIIFIDEVDALCGARGEGESEASRRIKTEMLVQMDGVGKDSEGVLVLGATNIPWQLDSAIRRRFQRRVHISLPDVAARTTMFKLAVGDTPSSLTNEDYRELAKMAEGYSGSDISNVVNDALMQPVRKMQMATHFKKIIHEGAEKYTACSPGDPAAVEMTLWQLEGKDLVEPLVTKKDMERAINSTRPTVSQDDLKKNAEWTEEFGSEGA

SEQ ID NO: 26303 - protein, 583 aa, Magnaporthe grisea 70-15
MCGIFACHAHPDVQKFKPTALRLAKAIRHRGPDWSGSVTCNQTILCHERLSIVGVESGAQPLTNEDESIILAVNGEIYNHRLVRKSLKTPYHFKTTSDCEVIIPLYMEHGLDAPKYLDGMFSFVLYDKKQNRTIAARDPIGVTTFYQGWSSSEPGAVYFGSELKCLYQVCDKIEAFPPGHIYDSLTGERTRYFQPTWWDPKRVPETPLDLTKLREALEKSVRKRLMAEVPYGVLLSGGLDSSLVASIAQRETKRLKKLAIEAGLEDLPAEPTGNHDQGEGLVGIDDENKLSTMTYLPQLNSFSIGLPGSPDNKAALEVAKFLGTKHHVMTFTIEDGLNALSDVIYHLESYDVTTIRASTPMYLLSRKIKAMGIKMVLSGEGSDEAFGGYLYFHNAPDKDAFHDETVRRVKNLHLSDCLRANKSTSAWGLEARVPFLDKEFLELAMNIDPKEKMITKERIEKYIVRKAFDTSDDPNAEPYLPDNILWRQKEQFSDGVGYGWIDALKDNAEIQVTDEMMKNPKPEWGDDIPDTKEAYWYRCMFDEHFPPHCASTVERWTPTWSKQTDPSGRAIAVHAAKYDHISE

SEQ ID NO: 26304 - protein, 513 aa, Magnaporthe grisea 70-15
MSTIAASALRQASRLACRPSASTASWQAIRGGARASGAASLRKSAPARTYVSETKRDNAQVAEANIETAIHLDKKDFERIGLAMESQGGSDVAVSPMAEILKGAAVMEEGQRPIYLDMQATTPVDPRVLDAMLPLYVGVYGNPHSRTHAYGWESEKAVEDARAHVASLIGADPKEIIFTSGATESNNMSIKGVARFFGRSGKKKHIITTQTEHKCVLDSCRHLQDEGFEVTYLPVQNSGLVDLKELEAAMRPETALVSIMTVNNEIGVIQPVEEIGKMCRERKIFFHTDAAQAVGKIPMDVNAMNIDLMSISGHKIYGPKGIGACYVRRRPRVRLDPIISGGGQERGLRSGTLAPPLIVGFGEACRIAKQEMEYDSKRVKYLSDRLLKGLLSMEHTSQNGHPDHFYPGCVNVSFAYVEGESLLMALKDIALSSGSACTSASLEPSYVLRALGNSDESAHSSIRFGIGRFTTEREIDYVLKAVQERVSFLRELSPLWELVQEGVDLNTIQWSQH

SEQ ID NO: 26305 - protein, 520 aa, Magnaporthe grisea 70-15
MSYSWIGAPAEFNGTNAETGGNSATENLNQWYQSGDQAFILVSSCLVLIMIPGIAFLYSGLARRKSALSLIWVVMMSFSVVIFQWYFWGYSLAFSTSTTNGFIGDLSKFGLMNTLGKPSQGSPLIPELLYSFYQMQFCGVTAALVIGATAERGRVVPAMVFTFFWATIVYCPLAHWVWNANGWAFKYGVLDYAGGGPVEIGSGMSALAYSWVLGRRNEKMMLNFRPHNISLITLGTILLWFGWLGFNGGSAFGANLRAAMACWNTCLTAMFAAMTWTLLDFRLAKKWSLVGWCSGTISGLVAATPASGFIPPWASIVLGVVTGVCCNFGTKVKFLLRIDDSLDVFAEHYIGGVVGLFFNGFFAADYIIGLDGVNTGLVTGGFLNQNYKQLYIQIAFIVAASAYSFVVSAILAKIIDMIPGLKLRADEKAELLGMDDDQHGEFAYDYVEVRRDYLAWTPAERDPKEDGHAVVPQLGIEGHQTIHDNIINGVGSVRHTPAVPNDAHAQHDSEKPKSVDRSSE

SEQ ID NO: 26306 - protein, 397 aa, Magnaporthe grisea 70-15
MATKAMQLEECFEHLNVNDENDHGDRLVQKSKISMSTAQISHGSSRPNLFKVALQSQSANTVTSVTLPSQAAQRKMAPPPKSREPPSPSKHKKDSVSSSVDELANEEVEASAPRVPKEFHLGMFEIGRPLGKGKFGRVYLARERTTGFICALKVLYKKELESGSVEKQVRREIEIQTNLCHPNILKMYGHFHDNKRIFLILEFAGKGELYKHLRKENRFPEWKAAQYVAQMASALKYLHRKHVIHRDIKPENILVGLHGELKISDFGWSVHAPNNRRKTLCGTLDYLPPEMIKSGNKDNTYDEKVDLWSLGVLTYEFVVGEAPFEDTPVMTQRRIARADMTIPSFVSPECRDLIKKLLVLDPVKRLSLDAVQKHPWIIKHCVKGERATNREKGRGSD

SEQ ID NO: 26307 - protein, 669 aa, Magnaporthe grisea 70-15
MPPKKAAATKAAAAPAAKKAAPAKKSAGVTKTTAPAKKTAAAAKPKAAPAKAAPAKAAPVKAAPAKAAATKAAPKKRKVAEEPEPEKEEEEEVEQAQDEDSEEEEEKPAKGSRKSAPPATKKRSTPVPAPKRAASAQPKKAKAAATKKKTPAPEADKENADPEPKVTGASSPTKRKREDTVEPSHDRGAAKDESEAEDKPAPEREIKQPRPVKRVRTAAPVSKVKIGAKINNAPDAVLDVFVFGEGSSGELGLGSMKYENKKPIDVKRPRINHNLSADKVGVVQLDCGGMHAIALTKDNKVLTWGVNDQGALGRDTTWDGGLRDADAEDSDSDSEDGEDSGLNPVESNPAEIDMSDVAEGTRFVQVAASDSASFALTEDGRVYGWGTFRASDGVLGFTPTIKIQKFPTLLAEPKKVVQIAAGSNHAMALDSAGKLYTWGCPEQNQLGRRCVQRELLASALRPGGVGLKRGVKVVKISCGSYHSFAVDKEGGVYTWGLNNFGQLAIEQDAGDSDAAVLTAVKVESLMDYKIVDIAGGEHHSLACTDDGRLLVWGRIDGHQTGLPFDSFTEENAIYDDYKKPRILKTPTVIPGLPKIVSVAAGTDNSFAITEDGKVYSWGFSINYQTGQGTSDDVEAPTLIDNTAVRDRNITFAGAGGQYSMLACHAEKKA

SEQ ID NO: 26308 - protein, 306 aa, Magnaporthe grisea 70-15
MMEYAQYQQPPQNAHSNFQSSTASNNITSPTSQHVQTSPIIPQQNQQAANANQTHMYQPPYGVPQQSLHYGMPGIQAAALAATAAASGSNYPYSLPSDPSLQQTSPRMGSKKEARGNPRSPQQMDAQRRMSQVTSPGLPNAQAMMNHTGARPGVAAPTMPAQQMGPPQSPEIAAGAVEESPLYVNAKQFHRILKRRVARQKLEEQLRLTSKGRKPYLHESRHNHAMRRPRGPGGRFLTADEVLEIEKQKGLGGAESEIKHDVESSPPAKANNKRKSMSVPDTANKKAKVDTESPDVEEEEDAEDDG

SEQ ID NO: 26309 - protein, 854 aa, Magnaporthe grisea 70-15
MAAHAYTIPDWAPTQTTISDTPSNGRQVMLPTNPDDFHPLPRHDEADSESDHEPELSSSRPPPPTASIPTRRPSRLRSMSNSLGWRPRPKSAVFGTTTADDLAAPLADMVLDNARRASNGEWHAGSRSNNESAVMDVEEDGKGKGKVRGMIRRASVSLKRAVSRRSSTATSTGEEHEHAVRRFLRSAHGHLRSPSLDIHNREEHQPQQSQTRQKRGPPVSFRTPRYTSDQESARPSTSHSSTWRRLRQATSFRRSSGNLFESTDNSRNSAFFTSPVPGNGGAPPIIPRNTGGAARAAAADAAMNADVFRSMTPAEWAVNLAKGSNGLGSSNPNHPHHSLTHSNDGESGIGIAVTATESESERDKTDSRLDLAQHASGTYTMDRQRLSGGLTRAGSSTGSVQMADGIPRVDFIAHLPLELALEVLSYLDYIDLATAERVSSPWRHVTGHSYIWRKSFLRSMTSTFATGGQVKPGAGLGVPPVRPENNWKDIYRARVELDRRWKTGNASPVYLNGHTDSIYCLQFDESKIITGSRDKTIRVWDMHTLSCRYVIGPPDIVREQNVLCDANGQPTHFATTEASPRANPSFPATLTFPNHHNASILCLQYDDRILVTGSSDSTCIVHWITSGYRPIRRLQHHSAAVLDLVFDDRYIVTCSKDVSICVWDRETGELLRQLRGHAGPVNAVQMRGDTIVSCSGDFKVKLWNISTGTCIREFAGHTKGLACSQFSEDGRYVASAGNDRTIRVWDANTGECVREVAAHTNLVRSLHIDSVSGRLVSGSYDTDIMVFDMETGRQLLHFPGWHASWVLSAKSDYRRIISTGQDPKILVMDFGKGVPNIEALESCDQRDSGRVGYI

SEQ ID NO: 26310 - protein, 447 aa, Magnaporthe grisea 70-15
MSAVRDKQQPDAAPAAAAAGNKPAPSITPEQVAVVKSTAPVLKEHGVTITTVFYKNMIDAHPELHNVFSTTSQATGAQPRALASAVLAYATHIDDLARLSHAVSRIAHKHVSLHITPDQYDIVGKYLIEAIGQVLGDAATPEIVAAWIAAYGVLADVFIGVEGKMYQEHSDWLGFRKFRVLRKEAEAESITSFYLAPSDGKTPLPRFLPGQYVSVQLFVPELGYLQSRQYSLSEGYRKGGEHYRISVKREEGVEVGAPGIISNMLHDKISVGDEVEVSHPQGEFFVDPADATKAGAPLVLLSAGVGATPLLSILESVTVADGGVPAPAATRPVSWIHASRSRAQRPFETRVAEIQKTVGEERLRSRLFLGKIDAEKDVANQHFHFGGGRMDLDKLDADRDLHTSDARAEYYLCGPEAWMLDTREKLEQMGVAHERIHLELFATGDVQ

SEQ ID NO: 26311 - protein, 580 aa, Magnaporthe grisea 70-15
MSPICAKPPQLALPFLYPFLLRASTAQTPRAASPLRQYRYYITETPAADISSRLNPDPDDYSAPHFSDKAKITITAGAGGNGCISFLREAYVEEGPPNGGDGGHGGNVYIQAVHGQTSLHKLARKRSIRAAPGKHGQGSSKTGQKGDDVVIQVPVGTIVREISRLDPETEDRMLEKALYGRRRRPAAPVAPVAEASVEDAAGEELAEEEAPLDPFRHKWLLYPGMNTTERKNLDLPLRLPKRTRYYSQPAAPVLLDLSQPTRRPILLAAGGIGGLGNPHFLSRERPKPMFATKGERPMSMKLELELKLLADVGLVGLPNAGKSTLVRALSNSRARVGAWAFTTLKPNIGTVVLDNNKGKPLVRSVRRVPRHSEDMPYGAAGEDDTEVVPRTRFTVADIPGLIEGAHLDKGLGMAFLRHVERAGVLAFVLDLSAGNAVKALKALWHEVGQYAQMKEDEEKDRERDARIEWSDDGEPKDVSNISGYGSPLSADSPPAPEAVSGLHIASKPWFVVATKADLPSTKENFDELRGYLAKITAGEESHPSGIAGAWIDDCAAIPVSAIKGQGVDRVIHWTVGLLDE

SEQ ID NO: 26312 - protein, 897 aa, Magnaporthe grisea 70-15
MSPYQEFERLARQANTNSEALRNAIAAAEACFQAVDHASSPSEKARLRRKLKELLAYAEQLKKGPSPQTRPVTPGQSRRLPTSEKTIILRSSRLHGYVFPPWEAPPSANHFRLADDGTLYQDESEFCLSPRQQEIFAGWKRPSEMFSLPSRASDGGNNAAHKLPSTLMQRAATENDLVQDITTDCSVVASLCAAMKHLSCKESPLLADLMYPFDATSSTPLMSENGKYIFKMNFNGCFRHVAIDDRLPASRTSRTLFVVDRKNPQLIWPALMEKAYLKIRGGGYDFPGSNSGTDLWVLTGWIPEQIFLHEDMEPDQSWARIKDGYDRGDVVVTLGTGRLSNEEEEALGLAGEHDYAVMDVRVENGIRRMLVKNPWCDGLIWKGVGSSAVLEPKTTPNSPAGNSPASSTDGMTGTFWISFEDIIQNFESLYLNWNPSLFSHRQDHHFTWDIPDPMLANSFARNPQYSICAQADGTVWALLDRHFHDEELTITRNRLSTPPRRSTSLPDSLGFMSLFLFSNTDGNRIQLPDRPRWLQKQPFVDSPQTLLRFRARRGERYTLAVAQSSLPLPKYNFSLSFFSRSPLEVSKADPEHFHYTTITGSWTRRSAGGNGAEPTYLSNPQYSIKVTTPTAISLLLCTGNQDLPLHVDLLWSGTGVAASGTAREIVASSGEYRRGSALCAVSRSCPASTAAGGASVLQPGVYIAVLSTFEPGQLASYTLEIGSSAPDGPVIVAPAARTGAAAGRLRTALPPVPQLPPARYTATAAQCDQDPSDARGHRAPVIVSRLTRLSVAVAPRSGGVDAVRVRLEAGSNAHRRELAFSGGDTHEFVDAARGARTLEVDVDPGLAQREGGLWVVIEQMGGGKGNGAAAAYVAAPTVVEVFSDNPVQLGQWEYNDD

SEQ ID NO: 26313 - protein, 926 aa, Magnaporthe grisea 70-15
MNSKMEFTDRAKKAMEDAMDLAEQHAHSQLLPVHLAVSLLDPPPDLSKDQQNPTPGASHTLLRQVVERAQGDPQLLDRALKKTLVRLPSQDPPPENVTMSPSFNNLIRKAMELQKVQKDSFIAVDHLISALAEDVSFQNCLKEANVPKHKLIQDAVQTIRGTKRVDSKTADTEEEHENLSKFTIDMTAMAREGKIDPVIGREEEIRRVVRILSRRTKNNPVLIGEPGVGKTTVVEGLAQRIVNADVPDNLAACKLLSLDVGALVAGSKYRGEFEERMKGVLKEIEEAKEMIVLFVDEIHLLMGAGSSGEGGMDAANLLKPMLARGQLHCIGATTLAEYRKYIEKDAAFERRFQQVLVKEPTINETISILRGLKEKYEVHHGVTIADSALVASANLAARYLTTRRMPDSAVDLIDEAAAAVRVARESQPEIIDSLERKLRQLKIEIHALSREKDEASKGRLALAKQEAQNVEEELRPLREKYESERKRGKDIQEAKMKLDQLKVKMEDASRMGDHARAADLQYYAIPEQENVIKQLEKDKAAADAAISAQAQTDHGGSMITDVVGPDQINEIVSRWTGIPVTRLKTSEKEKLIQMEKALGKLVVGQKEAVQSVSNAIRLQRSGLSNPNQPPSFLFCGPSGTGKTLLTKALAEFLFDDSKAMIRLDMSEYQERHSLSRMIGAPPGYVGHDAGGQLTEALRRKPFSILLFDEVEKAAKEVLTVLLQLMDDGRITDGQGRVIDARNCIVVMTSNLGAEFLARPAGKDGKIDPTTRELVMNALRNYFLPEFLNRISSTVIFNRLTRKEIRKIVDLRISEIQKRLADNNRNIAISVSNEAKDYLGNAGYSPAYGARPLARLIEQEVLNKLAVLILRGSIQDGEVARVELIDNKIVVLSNHSSSENGDDVEMIDSEEDAVEELIRDDDDELFD

SEQ ID NO: 26314 - protein, 516 aa, Magnaporthe grisea 70-15
MADSDGEFVVDDGSDDELVAQSGGARGAAGGGRSGKGGDEGGKRRKKASKAAWEDLQRSWDVVHELDDGNLSLEGFLEAEKRRRVLRDTTPIQRGIIRHLVLVIDMSFAMAEKDLMPTRHRLTISYAIEFVREYFDQNPISQLAIVGMRDSIAVRISDLSGNPAEHIEKLRALPDLDPSGSPSLQNALEMCRGALFNTPSHGTREVVIIFGALLSLDPGDIHETIDGLMQDRIRVSVIGLAAQVYICEEICRRTNSGKAAADLGIVTDTDGSAYNVALHEVHFRELLMSATRPPVTRQSQLQQATGETASLLMMGFPSRKTDKDPALCSCHNRPVRNGFLCTRCGSRVCRLPSECPACGLTLILSTHLARSYHHLFPLKIWSEVPWNDAVRSVSCFACHAPFPDAKNKDADKGKDAEKDPGDKHLKVPSKDTNGKKKKPAAPVPKGVSESGRYMCQVCRHHFCIDCDVFSHEVLHNCPGCQSDTRGDLATTNGKGAANGSVSNGVAHDSNGAMAID

SEQ ID NO: 26315 - protein, 682 aa, Magnaporthe grisea 70-15
MLRTVGRKALRGSSKGCSRTISTLKPATATIAKPGSRTLSTPATATATAPRTKPSASFNARRDPQPLVNPRSGEADESFIGKTGGEIFHEMMLRQNVKHIFGYPGGAILPVFDAIYNSKHIDFVLPKHEQGAGHMAEGYARASGKPGVVLVTSGPGATNVITPMADALADGTPLVVFSGQVVTSAIGSDAFQEADVIGISRSCTKWNVMVKSVDELPRRINEAFEIATSGRPGPVLVDLPKDVTASVLRRAIPTETSIPSISAAARAVQEAGRKQLEHSIKRVADLVNIAKKPVIYAGQGVILSEGGVELLKALADKASIPVTTTLHGLGAFDELDEKALHMLGMHGSAYANMSMQEADLIIALGGRFDDRVTGSIPKFAPAAKLAAAEGRGGIVHFEIMPKNINKVVQATEAIEGDVASNLKLLLPKIEQRSMTDRKEWFDQIKEWKEKWPLSHYERAERSGLIKPQTLIEELSNLTADRKDMTYITTGVGQHQMWTAQHFRWRHPRSMITSGGLGTMGYGLPAAIGAKVARPDALVIDIDGDASFNMTLTELSTAAQFNIGVKVIVLNNEEQGMVTQWQNLFYEDRYSHTHQRNPDFMKLADAMDVQHRRVSKPDDVVDALTWLINTDGPALLEVMTDKKVPVLPMVPGGNGLHEFITFDASKDKQRRELMRARTNGLHG

SEQ ID NO: 26316 - protein, 1135 aa, Sorghum bicolor
MSSPLNNRGTCSRSSSARSRHSARVVAQTPVDAQLHAEFESSQRNFDYSSSVSAAIRPSVSTSTVSTYHQTMQRGLYIQPFGCLLAVHPDTFTLLAYSENAPEMLDLTPHAVPTIDQRDALAVGADVRTLFRSQSSVALHKAATFGEVNLLNPILVHARTSGKPFYAILHRIDVGLVIDLEPVNPVDVPVTAAGALKSYKLAAKAISRLQSLPSGNLSLLCDVLVREVSELTGYDRVMAYKFHEDEHGEVISECRRSDLEPYLGLHYPATDIPQASRFLFMKNKVRMICDCSATLVKIIQDDSLAQPLSLCGSTLRASHGCHAQYMANMGSVASLVMSVTISNDEEEDVDTGSDQQPKGRKLWGLVVCHHTSPRFVPFPLRYACEFLLQVFGIQLNKEVELAAQAKERHILRTQTLLWDMLLRDAPVGIFTQSPNVMDLVKCDGAALYYQNQLLLLGSTPSESEIKSIATWLQENHDGSTGLSTDSLVEAGYPGAAALREVVCGMAAIKISSKDFIFWFRSHTTKEIKWGGAKHEPVDADDNGRKMHPRSSFKAFLEVVKWRSVPWEDVEMDAIHSLQLILRGSLQDEDANRNNVRSIVKAPPDDTKKIQGLLELRTVTNEMVRLIETATAPVLAVDIAGNINGWNNKAAELTGLPVMEAIGRPLIDLVVVDSIEVVKRILDSALQGIEEQNLEIKLKAFHEQECNGPIILMVNSCCSRDLSEKVIGVCFVGQDLTTQKMIMDKYTRIQGDYVAIVKNPSELIPPIFMINDLGSCLEWNKAMQKITGIQREDVIDKLLIGEVFTLHDYGCRVKDHATLTKLSILMNAVISGQDPEKLLFGFFDTDGKYIESLLTVNKRINAEGKITGAICFLHVASPELQHALQVQKMSEQAATNSFKELTYIHQELRNPLNGMQFTCNLLEPSELTEEQRKLLSSNILCQDQLKKILHDTDLESIEQCYMEMNTVEFNLEEALNTVLMQGIPLGKEKRISIERDWPVEISRMYLYGDNLRLQQVLADYLACALQFTQPAEGPIVLQVIPKKENIGSGMQIAHLEFRIVHPAPGVPEALIQEMFRHNPEVSREGLGLYICQKLVKTMSGTVQYLREADTSSFIILIEFPVAQLSSKRSKPSTSKF

SEQ ID NO: 26317 - protein, 1135 aa, Sorghum bicolor
MSSPLNNRGTCSRSSSARSRHSARVVAQTPVDAQLHAEFESSQRNFDYSSSVSAAIRPSVSTSTVSTYHQTMQRGLYIQPFGCLLAVHPDTFTLLAYSENAPEMLDLTPHAVPTIDQRDALAVGADVRTLFRSQSSVALHKAATFGEVNLLNPILVHARTSRKPFYAILHRIDVGLVIDLEPVNPVDVPATAAGALKSYKLAAKAISRLQSLPSGNLSLLCDVLVREVSELTGYDRVMAYKFHEDEHGEVISECRRSDLEPYLGLHYPATDIPQASRFLFMKNKVRMICDCSATLVKIIQDDSLAQPLSLCGSTLRASHGCHAQYMANMGSVASLVMSVTISNDEEEDVDTGSDQQPKGRKLWGLVVCHHTSPRFVPFPLRYACEFLLQVFGIQLNKEVELAAQAKERHILRTQTLLCDMLLRDAPVGIFTQSPNVMDLVKCDGAALYYQNQLLLLGSTPSESEIKSIATWLQENHDGSTGLSTDSLVEAGYPGAAALREVVCGMAAIKISSKDFIFWFRSHTTKEIKWGGAKHEPVDADDNGRKMHPRSSFKAFLEVVKWRSVPWEDVEMDAIHSLQLILRGSLQDEDANRNNVRSIVKAPPDDTKKIQGLLELRTVTNEMVRLIETATAPVLAVDIAGNINGWNNKAAELTGLPVMEAIGRPLIDLVVVDSIEVVKRILDSALQGIEEQNLEIKLKAFHEQECNGPIILMVNSCCSRDLSEKVIGVCFVGQDLTTQKMIMDKYTRIQGDYVAIVKNPSELIPPIFMINDLGSCLEWNKAMQKITGIQREDVIDKLLIGEVFTLHDYGCRVKDHATLTKLSILMNAVISGQDPEKLLFGFFDTDGKYIESLLTVNKRINAEGKITGAICFLHVASPELQHALQVQKMSEQAATNSFKELTYIHQELRNPLNGMQFTCNLLEPSELTEEQRKLLSSNILCQDQLKKILHDTDLESIEQCYMEMNTVEFNLEEALNTVLMQGIPLGKEKRISIERDWPVEISRMYLYGDNLRLQQVLADYLACALQFTQPAEGPIVLQVIPKKENIGSGMQIAHLEFRIVHPAPGVPEALIQEMFRHNPEVSREGLGLYICQKLVKTMSGTVQYLREADTSSFIILIEFPVAQLSSKRSKPSTSKF

SEQ ID NO: 26318 - protein, 1135 aa, Sorghum arundinaceum
MSSPLNNRGTCSRSSSARSRHSARVVAQTPVDAQLHAEFESSQRNFDYSSSVSAAIRPSVSTSTVSTYHQTMQRGLYIQPFGCLLAVHPDTFTLLAYSENAPEMLDLTPHAVPTIDQRDALAVGADVRTLFRSQSSVALHKAATFGEVNLLNPILVHARTSGKPFYAILHRIDVGLVIDLEPVNPVDVPVTAAGALKSYKLAAKAISRLQSLPSGNLSLLCDVLVREVSELTGYDRVMAYKFHEDEHGEVISECRRSDLEPYLGLHYPATDIPQASRFLFMKNKVRMICDCSATLVKIIQDDSLAQPLSLCGSTLRASHGCHAQYMANMGSVASLVMSVTISNDEEEDVDTGSDQQPKGRKLWGLVICHHTSPRFVPFPLRYACEFLLQVFGIQLNKEVELAAQAKERHILRTQTLLCDMLLRDAPVGIFTQSPNVTDLVKCDGAALYYQNQLLLLGSTPSESEIKSIATWLQENHDGSTGLSTDSLVEAGYPGAAALREVVCGMAAIKISSKDFIFWFRSHTTKEIKWGGAKHEPVDADDNGRKMHPRSSFKAFLEVVKWRSVPWEDVEMDAIHSLQLILRGSLQDEDANRNNVRSIVKAPPDDTKKIQGLLELRTVTNEMVRLIETATAPVLAVDIAGNINGWNNKAAELTGLPVMEAIGRPLIDLVVVDSIEVVKRILDSALQGIEEQNLEIKLKAFHEQECNGPIILMVNSCCSRDLSEKVIGVCFVGQDLTTQKMIMDKYTRIQGDYVAIVKNPSELIPPIFMINDLGSCLEWNKAMQKITGIQREDVIDKLLIGEVFTLHDYGCRVKDHATLTKLSILMNAVISGQDPEKLLFGFFDTDGKYIESLLTVNKRINAEGKITGAICFLHVASPELQHALQVQKMSEQAATNSFKELTYIHQELRNPLNGMQFTCNLLEPSELTEEQRKLLSSNILCQDQLKKILHDTDLESIEQCYMEMNTVEFNLEEALNTVLMQGIPLGKEKRISIERDWPVEISRMYLYGDNLRLQQVLADYLACALQFTQPAEGPIVLQVIPKKENIGSGMQIAHLEFRIVHPAPGVPEALIQEMFRHNPEVSREGLGLYICQKLVKTMSGTVQYLREADTSSFIILIEFPVAQLSSKRSKPSTSKF

SEQ ID NO: 26319 - protein, 1135 aa, Sorghum arundinaceum
MSSPLNNRGTCSRSSSARSRHSARVVAQTPVDAQLHAEFESSQRNFDYSSSVSAAIRPSVSTSTVSTYHQTMQRGLYIQPFGCLLAVHPDTFTLLAYSENAPEMLDLTPHAVPTIDQRDALAVGADVRTLFRSQSSVALHKAATFGEVNLLNPILVHARTSGKPFYAILHRIDVGLVIDLEPVNPVDVPVTAAGALKSYKLAAKAISRLQSLPSGNLSLLCDVLVREVSELTGYDRVMAYKFHEDEHGEVISECRRSDLEPYLGLHYPATDIPQASRFLFMKNKVRMICDCSATLVKIIQDDSLAQPLSLCGSTLRASHGCHAQYMANMGSVASLVMSVTISNDEEEDVDTGSDQQPKGRKLWGLVVCHHTSPRFVPFPLRYACEFLLQVFGIQLNKEVELAAQAKERHILRTQTLLCDMLLRDAPVGIFTQSPNVMDLVKCDGAALYYQNQLLLLGSTPSESEIKSIATWLQENHDGSTGLSTDSLVEAGYPGAAALREVVCGMAAIKISSKDFIFWFRSHTTKEIKWGGAKHEPVDADDNGRKMHPRSSFKAFLEVVKWRSVPWEDVEMDAIHSLQLILRGSLQDEDANRNNVRSIVKAPPDDTKKIQGLLELRTVTNEMVRLIETATAPVLAVDIAGNINGWNNKAAELTGLPVMEAIGRPLIDLVVVDSIEVVKRILDSALQGIEEQNLEIKLKAFHEQECNGPIILMVNSCCSRDLSEKVIGVCFVGQDLTTQKMIMDKYTRIQGDYVAIVKNPSELIPPIFMINDLGSCLEWNKAMQKITGIQREDVIDKLLIGEVFTLHDYGCRVKDHATLTKLSILMNAVISGQDPEKLLFGFFDTDGKYIESLLTVNKRINAEGKITGAICFLHVASPELQHALQVQKMSEQAATNSFKELTYIHQELRNPLNGMQFTCNLLEPSELTEEQRKLLSSNILCQDQLKKILHDTDLESIEQCYMEMNTVEFNLEEALNTVLMQGIPLGKEKRISIERDWPVEISRMYLYGDNLRLQQVLADYLACALQFTQPAEGPIVLQVIPKKENIGSGMQIAHLEFRIVHPAPGVPEALIQEMFRHNPEVSREGLGLYICQKLVKTMSGTVQYLREADTSSFIILIEFPVAQLSSKRSKPSSSKF

SEQ ID NO: 26320 - protein, 1135 aa, Sorghum arundinaceum
MSSPLNNRGTCSRSSSARSRHSARVVAQTPVDAQLHAEFESSQRNFDYSSSVSAAIRPSVSTSTVSTYHQTMQRGLYIQPFGCLLAVHPDTFTLLAYSENAPEMLDLTPHAVPTIDQRDALAVGADVRTLFRSQSSVALHKAATFGEVNLLNPILVHARTSGKPFYAILHRIDVGLVIDLEPVNPVDVPVTAAGALKSYKLAAKAISRLQSLPSGNLSLLCDVLVREVSELTGYDRVMAYKFHEDEHGEVISECRRSDLEPYLGLHYPATDIPQASRFLFMKNKVRMICDCSATLVKIIQDDSLAQPLSLCGSTLRASHGCHAQYMANMGSVASLVMSVTISNDEEEDVDTGSDQQPKGRKLWGLVVCHHTSPRFVPFPLRYACEFLLQVFGIQLNKEVELAAQAKERHILRTQTLLCDMLLRDAPVGIFTQSPNVMDLVKCDGAALYYQNQLLLLGSTPSESEIKSIATWLQENHDGSTGLSTDSLVEAGYPGAAALREVVCGMAAIKISSKDFIFWFRSHTTKEIKWGGAKHEPVDADDNGRKMHPRSSFKAFLEVVKWRSVPWEDVEIDAIHSLQLILRGSLQDEDANRNNVRSIVKAPPDDTKKIQGLLELRTVTNEMVRLIETATAPVLAVDIAGNINGWNNKAAELTGLPVMEAIGRPLIDLVVVDSIEVVKRILDSALQGIEEQNLEIKLKAFHEQECNGPIILMVNSCCSRDLSEKVIGVCFVGQDLTTQKMIMDKYTRIQGDYVAIVKNPSELIPPIFMINDLGSCLEWNKAMQKITGIQREDVIDKLLIGEVFTLHDYGCRVKDHATLTKLSILMNAVISGQDPEKLLFGFFDTDGKYIESLLTVNKRINAEGKITGAICFLHVASPELQHALQVQKMSEQAATNSFKELTYIHQELRNPLNGMQFTCNLLEPSELTEEQRKLLSSNILCQDQLKKILHDTDLESIEQCYMEMNTVEFNLEEALNTVLMQGIPLGKEKRISIERDWPVEISRMYLYGDNLRLQQVLADYLACALQFTQPAEGPIVLQVIPKKENIGSGMQIAHLEFRIVHPAPGVPEALIQEMFRHNPEVSREGLGLYICQKLVKTMSGTVQYLREADTSSFIILIEFPVAQLSSKRSKPSTSKF

SEQ ID NO: 26321 - protein, 1135 aa, Sorghum arundinaceum
MSSPLNNRGTCSRSSSARSRHSARVVAQTPVDAQLHAEFESSQRNFDYSSSVSAAIRPSVSTSTVSTYHQTMQRGLYIQPFGCLLAVHPDTFTLLAYSENAPEMLDLTPHAVPTIDQRDALAVGADVRTLFRSQSSVALHKAATFGEVNLLNPILVHARTSGKPFYAILHRIDVGLVIDLEPVNPVDVPVTAAGALKSYKLAAKAISRLQSLPSGNLSLLCDVLVREVSELTGYDRVMAYKFHEDEHGEVISECRRSDLEPYLGLHYPATDIPQASRFLFMKNKVRMICDCSATLVKIIQDDSLAQPLSLCGSTLRASHGCHAQYMANMGSVASLVMSVTISNDEEEDVDTGSDQQPKGRKLWGLVVCHHTSPRFVPFPLRYACEFLLQVFGIQLNKEVELAAQAKERHILRTQTLLCDMLLRDAPVGIFTQSPNVTDLVKCDGAALYYQNQLLLLGSTPSESEIKSIATWLQENHDGSTGLSTDSLVEAGYPGAAALREVVCGMAAIKISSKDFIFWFRSHTTKEIKWGGAKHEPVDADDNGRKMHPRSSFKAFLEVVKWRSVPWEDVEMDAIHSLQLILRGSLQDEDANRNNVRSIVKAPPDDTKKIQGLLELRTVTNEMVRLIETATAPVLAVDIAGNINGWNNKAAELTGLPVMEAIGRPLIDLVVVDSIEVVKRILDSALQGIEEQNLEIKLKAFHEQECNGPIILMVNSCCSRDLSEKVIGVCFVGQDLTTQKMIMDKYTRIQGDYVAIVKNPSELIPPIFMINDLGSCLEWNKAMQKITGIQREDVIDKLLIGEVFTLHDYGCRVKDHATLTKLSILMNAVISGQDPEKLLFGFFDTDGKYIESLLTVNKRINAEGKITGAICFLHVASPELQHALQVQKMSEQAATNSFKELTYIHQELRNPLNGMQFTCNLLEPSELTEEQRKLLSSNILCQDQLKKILHDTDLESIEQCYMEMNTVEFNLEEALNTVLMQGIPLGKEKRISIERDWPVEISRMYLYGDNLRLQQVLADYLACALQFTQPAEGPIVLQVIPKKENIGSGMQIAHLEFRIVHPAPGVPEALIQEMFRHNPEVSREGLGLYICQKLVKTMSGTVQYLREADTSSFIILIEFPVAQLSSKRSKPSTSKF

SEQ ID NO: 26322 - protein, 1135 aa, Sorghum propinquum
MSSPLNNRGTCSRSSSARSRHSARVVAQTPVDAQLHAEFESSQRNFDYSSSVSAAIRPSVSTSTVSTYHQTMQRGLYIQPFGCLLAVHPDTFTLLAYSENAPEMLDLTPHAVPTIDQRDALAVGADVRTLFRSQSSVALHKAATFGEVNLLNPILVHARTSGKPFYAILHRIDVGLVIDLEPVNPVDVPVTAAGALKSYKLAAKAISRLQSLPSGNLSLLCDVLVREVSELTGYDRVMAYKFHEDEHGEVISECRRSDLEPYLGLHYPATDIPQASRFLFMKNKVRMICDCSATLVKIIQDDSLAQPLSLCGSTLRASHGCHAQYMANMGSVASLVMSVTISNDEEEDGDPGSDQQPKGRKLWGLVVCHHTSPRFVPFPLRYACEFLLQVFGIQLNKEVELVAQAKERHILRTQTLLCDMLLRDAPVGIFTQSPNVMDLVKCDGAALYYQNQLLLLGSTPSESEIKSIATWLQENHDGSTGLSTDSLVEAGYPGAAALREVVCGMAAIKISSKDFIFWFRSHTTKEIKWGGAKHEPVDADDNGRKMHPRSSFKAFLEVVKWRSVPWEDVEMDAIHSLQLILRGSLQDEDANRNNVRSIVKAPLDDTKKIQGLLELRTVTNEMVRLIETATAPVLAVDIAGNINGWNNKAAELTGLPVMEAIGRPLVDLVVVDSIEVVKRILDSALQGIEEQNLEIKLKAFHEQECNGPIILMVNSCCSRDLSEKVIGVCFVGQDLTTQKMIMDKYTRIQGDYVAIVKNPSELIPPIFMISDLGSCLEWNKAMQKITGIQREDVIDKLLIGEVFTLHDYGCRVKDHATLTKLSILMNAVISGQDPEKLLFGFFDTDGKYIESLLTVNKRINAEGKITGAICFLHVASPELQHALQVQKMSEQAATNSFKELTYIHQELRNPLNGMQFTCNLLEPSELTEEQRKLLSSNILCQDQLKKILHDTDLESIEQCYMEMNTVEFNLEEALNTVLMQGIPLGKEKRISIERDWPVEISRMYLYGDNLRLQQVLADYLACALQFTQPAEGPIVLQVIPKKENIGSGMQIAHLEFRIVHPAPGVPEALIQEMFRHNPEVSREGLGLYICQKLVKTMSGTVQYLREADTSSFIILIEFPVAQLSSKRSKPSTSKF

SEQ ID NO: 26323 - protein, 516 aa, Geobacter sulfurreducens PCA
MSGYKVFIVDDEADIALILKLQLEDAGYRTMRARDGIEALDALERESFDLVLLDIRMPRMDGIEVLERIRDRWPDLVVIMMTAHGSEDIAVEAMKKGAVDYISKPFSSDDMKKRVERAIQFNRTRLENERLQRVLDEERRKMGAILRGMADLLVAVDREGRIITINRAAEERFGIAADGVQNQPVELLLKTDIPGERLPCRVVLATGDPCLDVTYAVQAGGGMIPVLSSATPLKGAGGEMMGCVEIIRDISTLKALEREREDFVSMLSHDLKTPITAVVGSIDLVREGRIGPVNAEQRSYLDSAMESCAEMVDMIDTLLDVHRFEAGRMVMAARLEDLGPLMARTLGRFDSVARRAGIALVLTLPDYPLALSLDRNQFARLMGNLIANAIKFTQEGGEIEVSARLLNDPAELVGRIPRESYPDVPLPPLNPHLLITVRDTGVGIPADSLVSIFDRFVQARNRRLGKSTGTGLGLAFCRKVMDAHHGYIWAESVEGEGSSFNMLFPLTNEAYAATGG

SEQ ID NO: 26324 - protein, 636 aa, Geobacter sulfurreducens PCA
MSKVIGIDLGTTNSCVAVMEGGEPVVIANAEGSRTTPSMVAFAESGERLVGQQAKRQAVTNPENTLFAIKRLIGRKYDTEEVRKDISISPFKIVKADNGDAWVEARGKMYSAPEISAMVLQKMKQTAEDYLGETVTDAVITVPAYFNDSQRQATKDAGKIAGLNVLRIINEPTAAALAYGLDKKKDEKIAVFDLGGGTFDISILELGDGVFEVKSTNGDTFLGGEDFDQRVIDWIADEFKKDQGIDLRGDKMALQRLKEAAEKAKCELSTSMETDINLPFITADATGPKHLTMKLSRAKLEALCADLLNKLEGPCRTALKDAGLSPSEVDEVILVGGMTRMPAVQKRVQEIFGKVPNKGVNPDEVVAIGAAIQGGVLRGDVKDVLLLDVTPLSLGIETLGSVMTKLIEKNTTIPCRKSQVFSTASDNQPAVTIHVLQGEREMAIDNKTLGNFELTGIPPAPRGVPQIEVTFDIDANGIVHVSAKDLGTGKEQSIRITASSGLSKEEIDKMVKEAEAHSAEDKKKRELVEARNHADTLSYSTEKSLKEYGDKIGADEKAKIEECLANLRKAMEGSDVEVLKKATDELTQASHKLAEAVYAKAQAEGAQPGGEAAGEASAKDEKVVDADFEEVKDDKK

SEQ ID NO: 26325 - protein, 406 aa, Geobacter sulfurreducens PCA
MAKAHKDVKKIVLAYSGGLDTSIILKWLKNEYGCEVIAFSADLGQGDELAPIRDKAIATGADKVYIDDLKEEFVKDFVFPMFRANAIYEGHYLLGTSIARPLIAKRQMEIAKIEGADAVSHGATGKGNDQVRFELAYYHFDPAITVVAPWREWKLNSRQALVNYARKNGIPIPVTKKRPWSSDRNLLHISFEGGILEDTWAEPPENMYVLTKAPEKAPNKPQFVEIEFKNGNAVAVDGEKMSPAQLLAHLNYIGGEHGIGRVDLLENRSVGMKSRGVYETPGGTILREAHSAVEQITMDREVMRIRDSLIPEYARQVYAGYWFSPEREMLQTLIDDSQKCVNGVARVKLYKGHCRTVGRKSETNSLFNLDFATFEKDQVFNQADATGFIKINSLRLRIRSLMQGKK

SEQ ID NO: 26326 - protein, 66 aa, Geobacter sulfurreducens PCA
MVNGTVKWFNDSKGFGFLEQENGEDVFCHFSAISGDGFKSLTEGDRVTFEITKGPKGLQAANVTRA

SEQ ID NO: 26327 - protein, 66 aa, Geobacter sulfurreducens PCA
MVNGTVKWFNDSKGFGFLEQENGEDVFVHFSAINGNGFKSLAEGDRVTFEVTKGPKGLQAANVTRI

SEQ ID NO: 26328 - protein, 270 aa, Geobacter sulfurreducens PCA
MTDKRFLTPAEALNATVENGRRVLTQSLARTVLLSLLAGFYIAFGAQLATVVTQDAALHVGQGVARLLGGSVFSVGLMLVVICGAELFTGNSLLTVALLHGEITWVKMLENWGVVLLGNLAGSLFFAWLMVESRLWENGAVGDQAVRIAAAKCAIPFGAALIRGILCNWLVCLAVLMATAARDVGGKMLACYVPIMTFVTSGFEHSVANMYFIPTGLLVAGARGTTEPDLSWGAFMGNVVPVTIGNVIGGVIFVAIAYWFIHLKKEGKQA

SEQ ID NO: 26329 - protein, 461 aa, Geobacter sulfurreducens PCA
MQNGETMPATILIVDDERGQREILQTILEGERYETTTAAGGQEALALLDEREFDVILTDLKMQGMSGMELLERLLAADPQQCIIMMTAHGTVDSAVEAMKKGAFDYLEKPLERDTLLLTLRRAVERVRLLKENRALHKKLEETGAIPDIIGEHPKMKEVFRIVTKIAPTASTVLIQGESGTGKELVASAIHERSPRADKPFFAINCAAIPETLMESELFGHEKGAFTGASSREIGIFEAANGGTVFLDEIGEMSVAMQAKLLRAIQAKEIRRVGGKVNIPVDVRIISATNRDLEAEIRRGNFREDLFYRLNVIRISLPPLRERGSDIAALTDFFVAKYRGDTGVKGLSRAALKLLMNYSWPGNVRQLESVIERGILMAEGELVEPGDLPAEIGEGVSPGGGLPFELPADGIQFEELEKNLIIKAMERAGGVIAKAAPLLGMSYKTLQYRLEKFGITRDQGP

SEQ ID NO: 26330 - protein, 66 aa, Geobacter sulfurreducens PCA
MAKGVVKWFNDSKGYGFIEQENGEDVFVHFSSIQGDGFKTLVEGQAVTFDVVQGAKGLQAANVMKA

SEQ ID NO: 26331 - protein, 470 aa, Geobacter sulfurreducens PCA
MENIDVLVVDDEAIIREGLRRILEKEGYHVETSASGQIALERLQDENYGLVITDLKMPGMSGMEVLKAIKVLQPEVPVIIITGFSTVDTAVEAMKNGAFDYIAKPFTPDQITEKVRKALEQRAVLLENIFLKKELGEHHGFDIFVGESKEMQKVYRRIIQVAPTDSTVLITGESGTGKELVARAVHNNSHRRDNPFVAVDCTSLAENLLESELFGHIKGSFTGAIQTKTGLFKVADGGTLFLDEISNISLTTQAKLLRVLQEREITPIGGTQPIPIDIRLVAATNKNLRTLVSQGTFREDLFFRLNIIPIDLPPLRERKGDLHLLIGHFLATFSEEMGRDIRGLAPDALALLEDYAFPGNVRELENIIERAVVLAEGDLIQKEDLELRVATDSQAGVGGYVPQNVEELKETKRQIRERAVEPIEKAFVLQALKRNNWNITRAAEETGMLRPNFQALLKKLRISVRNQMTN

SEQ ID NO: 26332 - protein, 314 aa, Geobacter sulfurreducens PCA
MNQKIRVFSGNSNRSLAESICANLGLPLGKANVKTFSDGEVMVEIGENVRGRDTYVVQSTCAPTNNNLMELLIMMDALKRASAATITAVIPYYGYARQDRKVAPRTPITSKLVADLITTAGADRVVTVDLHAGQIQGFFNIPVDNLYAAPVILEHLKQRFPENSIVMVSPDAGGTERARAFAKRLGCTLAVIDKRRTGPNVAEVMHLIGDVTDKTAIILDDMIDTAGTLTQAARALKEHGAKTIYACATHGVLSGPAIERINNSDIEAVVITDTVPLGDKEQQTSKVKVLSVANLLAEAIRRIHEDESVSSLFV

SEQ ID NO: 26333 - protein, 447 aa, Geobacter sulfurreducens PCA
MDFKSFGFHPAVATGIAAAGYETPTPIQAQAIPAVMAGRDVMGLAQTGTGKTAAFALPILHRLQQGERGRVRALVIAPTRELAEQINDSFVTLGRQTRLRSVTVYGGVGVNPQVQKLKAGAEVVVACPGRLLDHIAQGTIDLSRLEVLVLDEADQMFDMGFLPDIRRVLKHLPPRRQTLLFSATMPIDIRTLAQDILVDPVTVQVGTVAPAVTVAHALYPVEQHLKTPLLLELLRHTDTESVLIFTRTKHRAKRLGEQLEKAGYRAASLQGNLSQNRRQAALDGFRDGTFQILVATDIAARGIDVSQVSHVINYDIPDTAEAYIHRIGRTGRAARSGDAFTLVTSDDGAMVRAIERSLGAPIERRTVQGFDYSVPAPKKDVEFARPPREPRQARPHANQPKKGGAAASPSASGRPSHPKDSGRRQPGQGAPASGPSRQRPGSPRRPR

SEQ ID NO: 26334 - protein, 481 aa, Geobacter sulfurreducens PCA
MLLNRILVADDEESMRWVLSKALRKKGFTVDLARDGEEALRLIQSNEYDLAILDIKMPGFTGLELLDKVRELKHDLLMVIMTAEASMKNAVEAMKRGAYDYITKPFDLDVIDAIIEKVHKAREITSQMTILREELKERYHLEKNIIGNSPAMREVYKTIGKVAPSDVTVLVQGESGTGKELIARAIHFNSKRIGKPFIALNCAAIPKDLLESELFGFEKGAFTGAVERKLGKFEQANGGTIFLDEIGDMPLDLQAKILRVLQEKEVTRTGGSQNIAVDVRIVAATNQNLEELVRKKQFREDLFYRLNVVPIQLVPLRERKEDVPLLVDYFLQNACAELEVSPKKCSPEAMALLTTHSWPGNVRELENTIKRAVILSSDPLLTPSDFPGLRARQTGSEATAADDLSLEALVDMKLRASLTNLDKMESGDIYNLVLKQIERPLIRFVLEKTRGNQVKGAEILGINRNTLRKKIQELGIELRKD

SEQ ID NO: 26335 - protein, 584 aa, Geobacter sulfurreducens PCA
MVTIPIFLIIIGATMAVVVWSAKRTKSAADFYTAGGGITGTQNGWAIAGDYMSAASFLGISGMISLYGYDGFMYSVGWLVAYITVLLIVAEPCRNAGKYTLGDILSFRTEPKVVRAVCAISVVAVSTFYLTAQMVGAGKLMQLLLGIPYKFAIIGVGILMVGYVVFGGMTATTWVQIIKAGLLMTGAGLLSVLVGLKAGMNPFTFFNDIATNPNIIEHVQKAVLKDPVAVAGFDYGQRFLEPGLFLKNPLDQISLGMALVLGTAGMPHILMRFFTVPTAQAARKSVIVAMFIIGSFYILTTLLGFGAAIHVTPQGITAVDKGGNMAAMMLAQQLGGDISPFLGDLLLAFLCAVAFATILAVVSGLVLAASAAIAHDIYVNVIKDGHADQHEQVMAARITSLCVGAMGIIIGIAAEKQNVAHLVALAFAVASSGNLPVVVMSLFWRKFNTAGVVSGLVVGTVASIALVMVSPNMTYPKVVAADAQKVVTKLEEKQAGGAVLTEKEMKDLDKAKADYAKNKDGKSMLGLDKPLIKLKNPGIISIPLGFLAAIIGCLAFPSRRSEEMFDEIYVRQNTGIGMAKAIDH

SEQ ID NO: 26336 - protein, 127 aa, Geobacter sulfurreducens PCA
MAQQIKKKILVVDDEENARIGLTKLLEREGFEVASVSNGFEALNYLQQREVNVIVTDINMPEMNGITFLRELNKSFPRSNVIMITAYGGVESYIEAMNLGAFEYINKPVKLDELKSILTKIFKESCH

SEQ ID NO: 26337 - protein, 542 aa, Geobacter sulfurreducens PCA
MKIIVTDEVAQEGLALLAQDPRVELDVKLGLKKEELLAIIGDYDVIITRSGTTVNRELLDAGKKLRLVARAGVGIDNVDVDYASSRGVIVVNAPFGNTNSAAEHAMALLLSFCRNVTRANGSLKSGEWKRAPFTGYELKGKTAGVIGLGKVGGRVATRLKAFECDVLACDPYIAVKRAHDLGVKLVSHDEIYKNCDIITVHTPLTDETRNMIGERELAMMKDGVIIVNAARGGIIEEAALLKYLESGKVAGAAVDVFSEEPPKSEYLKKLIGHERVVVTPHLGANTFEAQVNVAVDVSREILNYLDDQPLENAVNIPRFDLALMDQMRPFLNLMNTLCEFGIQLLDANISKIVFGFSGSIAHYDCTPLTVCGLASILNRMVDQDVNMVNASLIAEGMGIVVEESKTTHADAFSNLITIVVEGEGGKRRTISGTLFEGLPRIVRLRDYSMDFAPEEHMLLLHYADRPGMIGKIGTIMGQHEINIASMNLGRSEKKGEAMVILSLDSAVPPQVLEEVRAATDATFIKAIHMPGARCSRSCGCTA

SEQ ID NO: 26338 - protein, 509 aa, Geobacter sulfurreducens PCA
MLYKSVTESFNEFIVDRSDAKCIRCKVCIRQCAYEVHSYAEAIDTLTEDHTLCIGCRRCSALCPTGAITIRSNEEVFKRNESWSNGHIRNLYAQADTGGILLAAMGNPAKYPIYWDHLLLDASQVTNPSIDPLREPMELRTYLGKKPHSIEIVRDEQTGKPKLATKLTPQIRMEYPFIFSAMSYGALNLNAHRAMAMAASELGTLYNTGEGGLHKDLYRYGANVMVQVASGRFGVSEQYLNAGVAIEIKVGQGAKPGIGGHLPGEKVNDQISETRMIPVGSDAISPAPHHDIYSIEDLRQLIFALKEATNYEKPVSVKIAAVHHVAAIASGVARAGADIITIDGFRGGTGAAPQVIRDNVGLPMELALASVDARLRDEGIRNQVAIVVGGGVRSSGDAIKAIALGADAINLGTSTLLALGCTLCQRCYTGKCPWGITTNNPYLAKRLNPELGAERLVNLVHAWGHEMKEILGGMGLNALESLRGNRYKLRAVGLGEKDMNILGVMPAGE

SEQ ID NO: 26339 - protein, 399 aa, Geobacter sulfurreducens PCA
MKLADRVNKIQPSPTLSIDAKAKALKAQGIDVVGFGAGEPDFDTPANIKEAGKKAIDAGFTKYMPVGGADDLKDAIIAKMKRDHGLEYTRDEISVACGAKHTLYNISQALIQEGDEVIIPGPYWVSYPDQIVLAGGTPVFIMTDESTGFKITAEQLEKAITPRTVYVILNSPCNPTGSTYTKDELKALAAVLLKHPHVYVVSDDIYEKLLYDGLEFCNIPMACPELKDRTIIVNGVSKAYSMTGWRIGYACGPKALMAAMTKMQSQSTSNATSIAQKASVEALNGPQEPVAEMVKEFEKRRTYIVDRLNAIPGVTCFKSTGAFYAFPNFSGVYGKTTPAGKKIENSSDFAAYLLEDAKVALVPGIAFGDDRYARLSYATSLETIKKGLDRIEEAIGNLK

SEQ ID NO: 26340 - protein, 2082 aa, Geobacter sulfurreducens PCA
MNVTTLWGGWFKALLAAAFILATLGAPAAGWSAVPHVAAGGNHVLTLRSDGTLWAAGSNQFGQLGDGTGINRTSPVQVPGTWKTVAAGTTHSLGIKADGSLWAWGSNLFGQLGQPLVNGQLATNKFSPIRIGTGNDWVAVSAGELTSFGLKGDGTLWSWGNNLFGELGDGTTVSRPQPVQVVADPLSNGRYVAVAAGGEHALALQADGTLWAWGANLTGQLGTGGTGILPNPTPLKIGTDRDWTAISAGEMHSVALKADGSLWSWGQNLFGELGNGVALPGANVTTPTRVGTGSDWVAIAAGALHTVALHRNGTVSAWGNNAQGAVGDGTVANRSTPTLIVAPVTLVNNVAIAAGTGVSFSVLANGTVFGWGGNGAGQLGNGTFGAVTAPTVLSAGASAWLGVEPGGAFSLGLRSNGTLWAWGGNASGQLGDGTTTPSAIPVPVVGGAGNWRTTATGTAHSVAVRADGTLWAWGDNSSGQLGIGSTVAASTPQQITVTNPASAGNDWTAVAGGGAHSLGLKADGTLWSWGDNTFGQLGDGTGTSNRTTPVQIVTGNPGNFDRNWVAVAAGGVFSLALQADGTIWTWGDNSLLQLGTDPAMLTPATQRNVPAQLAVASPPSTAFNSSWVAIAAGQDHGLSLQADGTLWAWGANSVGQLGNGVTTATFTPVQVINAEGVPYVSLAAGTSHSLAGRSDGTLWAWGNNTSGQLGTGPHPGDADPLNPQPHTVPARILTSNPVSAADDWLVATAGGSHSAALKSNGTLWTWGQNTSGQLGNGTTTEADIPTALLEPRISVSPASLAFGPAPIGIPPSPTRTLTITNLGSAPLSAAIASNNAAFTVNPAACNNLPPAGFCEITVTFVPALPVGVKSATLTITSNDPVTPLVSVGATGTAANPFFITASVDPASPVGSGTISPAGVQAVAAGGGATYTITAASGYAIVDVIVNGVSRGPIGSYTFVNVQQDQSIIALFAASVTISASSGPGGIISPTGTVSLPLGGSQKFTITPNPGYAIAGVNVIEMVEQLDVNGNGTGIFNPVPRALGPVSSFTFFSVRANGSSISATFVPRELHEWSWQNPKPQGQAISRIATDGNGTYVAVGEFGTILTSTDSVNWTVRTFGSVNLNSVAYGGNHTFVAVGSYGRILLSTDDGATWTVQSSGVTASLRGVAHSGTVFAAVGVTENNPNFPYEPRTAILTSPDGVTWTSRFLDQPFNGTLNLFDVAYGGGRFVAVGMEGHVVISEDNGGSWTALPSDPVTRPTNLNGVAFGAGTFVAAGDFGQIVTSTDGSNWVNRPLMSVAELKGVGFGTISDPLFAGNLLQVFTVVGTDGEILTSEDAGTTWTFRTSGLAAGGAGPMLQAAMVGLNRGVTPFVPTVIVAGSEGNLLASSDTIDWTNLFTTITRYPLRSIAWGNGTFVAVGDGDPGTTLHPPISAPTVLTSTNTGLTWTRRYLSPGHNIRGIAYGNGVFVAVGASGYDLDQNASRQAIILTSTNGITWTPRNSGTFLNLNAVTFANGRFVAVSDYNATGDVADEGALILVSTNGITWNTIRKITSTAGNLRSVIAGTNGTTPALVAVGDFGTVLRSIDNGQNWTEVTSGTINFAELNGIAFNNTSNTYAAIGITSEVFTSTDNGATWSMRSLPVDDTLLVRMEGITYAYGSFVAVGNDNHILTSPDGASWTINIGAEYINSSLYGVAAGNGSYIAVGSDGTILQSNRLLDNPPIIGVDPTSLTFDITPEGTLSAGQVITISNLGINDLTIGALGFDGSDAGEFTVSEDFCSQAVIPATGSCTVVVTFAPTGAGVKSAELKIPSNDPDSNDIEVPVSGTAIPRYLLTVTNAGNGTGSIASSPAGISITNSAAGANSSALFVVDTAVTLTATPAVGSIFEGWSGAGAGACSGTTTPCTLTMSQARNVTATFTRKFIITATAGANGSISPAGQVLVNPGANQAFTITPAPGYSVFGVLVNGLSVGAVTSHTFTAVNADQTISATFTGVPPVRLTLQSGNNVFSTIGQAVAATPVNTAATIDAQAVQTADNGLTLNRGITLTFRGGYGAGFSGIVGMTTVTGPVTVTNGSLTVSDMVIK

SEQ ID NO: 26341 - protein, 460 aa, Geobacter sulfurreducens PCA
MAEERQPARVLIVDDDVSLRRVLEYNLQEEGYDVITAGSGEEGLRLFDERSPALVVTDLKMPGMGGFRLLQEIKGRSPDTAVIVITAFGAVETAVDAMKAGAYDYITKPFNRDALKLTVKKALEMLGLSRENRRLREALTEREDYRSIVGISRRMEEVFRVVDRVADTDATVLITGESGTGKELVARAVHTRSSRRAAPFVAVNCAAIPRDLLESELFGHVKGSFTGAVRDKAGKFQQAEGGTLFLDEVGELPVELQSKLLRALQEKEVQQVGGTEVRKLDVRVVAATNADLEQAIEEGRFREDLYYRLSVIPIHLPPLRERKEDIPLLVRHFAARHGGDRVAFAPETLEVMADYGWPGNVRELENTVERLLIMRCSDTITPADLPDKVRSRRAPSTECPVISLPDEGYSLEQLEREIVVEALERNNWNQSSAARFLRIPRHTLIYRMEKYQITAPERKK

SEQ ID NO: 26342 - protein, 286 aa, Geobacter sulfurreducens PCA
MTTYGFLGLGIMGGPMAANLVRAGFDVTVWNRNPAKCAPLVALGARQASSPAEVCAACDITIAMLADPAAAREVCFGANGVLEGIGGGRGYIDMSTVDDETSTAIGAAVTARGGRFLEAPVSGTKKPAEDGTLIILAAGDQSLFTDAGPAFAALGKKCLHLGEVGQGARMKLVVNMIMGQMMTALGEGMALGRNCGLDGGQLLEVLDAGAMANPMFKGKGQMLLSGEFPTSFPLKHMQKDLRLAVELGDRLGQPLHGAATANESFKRARAAGHADEDFAAVFRVLE

SEQ ID NO: 26343 - protein, 288 aa, Geobacter sulfurreducens PCA
MLRKVGFLGLGTVGRHMAANLLKGNYELAVYDSDPAAVADLAALGATGAATPREVAKGRDIVIHIRPEKERLRPDIYGPDGIFAGIDPGTILVDMGTHSLTSTMEMADEAAKHRVMFLDAPVWGTKEHAANGLLTILAGGDPSLVGRCRELFSFFGLNIIHVGSIGDATRMKFVVNLVQAELMQALAESIVFGEKLGFTADRILEVLDSGGVASPLFHSKGRSIARGDFTRNLALKYVHEQLELVLEKAEKLGLELPAAKVACATYEQGVKDGRGEEDFSSVVKVLRK

SEQ ID NO: 26344 - protein, 458 aa, Geobacter sulfurreducens PCA
MEIHVLVVDDELSMREFLAILLDREGYTVDQAASAEEALACLERKTYDLVISDVKMPGLDGITLLGRIKEMTPDTAVLLMTAFSTAEQAVEAMKLGAYDYIAKPFKVEEVKILARNALEKRDLKRENLRLRQEVQERYSFSGLIGKSKKMREVYSLIEKVAPSTANVLILGESGTGKELVARAIHYNSQRKGKPFVAVNCGAIPETLMESEFFGHKKGAFTGAVGDRAGLFEQAEGGTLFLDEIGEVPLQLQAKLLRAIQEKEFRRVGGTLDQKADVRLVAASNRDLEEQVKEGSFREDLFYRLNVVQVKMPPLRERGDDIPILVEHFYKKYVQPPYSDRIITQGALKLLMSYGFPGNVRELENLVERCSVLGNREISEECLPPQLHAGKRPECGAVTECELPEEGMDLEAYLDGIEKRILLQALERSGGVKKKAAELLKLTFRSFRYRLAKFGMDEE

SEQ ID NO: 26345 - protein, 327 aa, Geobacter sulfurreducens PCA
MIQKPNIVILDGYTINPGDNPWTPLEKLGDCTIYDRTPPELRVERAKDADIVLTSKVKLDEATLAALPKLRYISMLATGYNNVDVEAAGKRGIPVANIPAYSTESVVQTTFALLLELAVHVGIHDSAVKAREWVRSPDHSFWKTPIVELDGLTLGIVGYGTIGRAVARVGAAFGMKIMAYAPRVPADLGPVPVRFVSLDELFAGSDVVSLNCPQTAENTGFVNSRLLSLMKPSAFFLNVARGGLVNEVDLAAALHSGKLAGAGLDVVAHEPMSPDNPLLGAPNCIFTPHLAWASLAARRRLMGILAANVATFLAGEPQNVVNSRFLK

SEQ ID NO: 26346 - protein, 752 aa, Geobacter sulfurreducens PCA
MSKKQDALDYHSTGRKGKIEVIPSKPCLTQRDLSLAYSPGVAEPCLEIEKNPEDAYKYTAKGNLVAVLSNGTAVLGLGDIGALAGKPVMEGKGVLFKRFADIDVFDIEVDTKNADEIIKVCQLLEPTFGGINLEDIKAPECFYIEEKLKETMNIPVFHDDQHGTAIISGAALINALELVGKKIEDIKIVVNGAGASGIACAQMAVELGAKKENIILCDTKGVIFKGRSAGMNEYKERFAVETEDRTLEDAFKNADVAYGLSSKGAFTPEMIRDMAPNPIIFAMANPDPEITPEEVAAVRADAIMATGRSDYPNQVNNVLGFPFIFRGALDVRATTINETMKKACVFALAELAKEDCPDSVCRAYGNKKFAFGREYIIPKPFDPRALLRVAPAVAKAAMESGVARQPIADMEKYMEHLETLQGKAKETLRLIINKAKTDPKRVVLPEGENEKILRAAQVMIEEGIAYPILLGNRQEIRKKIEELNLDLNGGVTIIDPDDSPDTERYSQALFEQRQRKGITLTEARRMIRRRGRTYFGCEMVRCGDADALLSGIDAHYPDIIRPALEVIGKQEGLSSVHGLYLMVFKRGIFLLADTTVCIEPTAEELAETAILAAEKARLLDLDPRIAMLSFSNFGSVNHPQALKVKRAAEIVKQRAPELIIDGEMQADTAVVPDILESHYPFATLKGGANILIFPDLNSGNISYKLLTRLGGADAIGPILMGMKKPVHVLQRGDDVMDIVNMAAIAVVDAQSN

SEQ ID NO: 26347 - protein, 405 aa, Geobacter sulfurreducens PCA
MALVVQKYGGTSMGSIERIRNVAKRVAKTYDAGNDMVVVVSAMSGETNKLVALANEICEFPDTREYDVLVASGEQVSIALLAMCLKSMGYKAKSYHGWQIPIITDSAFSKARIESIDDTKVRADLKDGSIVIVAGFQGVDKDGNITTLGRGGSDTSAVAVAAAFKADVCEIFTDVDGVYTTDPNICQDARKIEKVSYDEMLELASLGAKVLQIRSVEFAKKYNVDVHVRSSFNENPGTMVTKEDKDMEAVLVSGIAYDKNEAKIAVMGVPDKPGIAAKILSPLSDANISVDMIVQNVSGGDLTDFTFTVTKADFKKALAITKEVAKEISAKEVAEDENISKISIVGVGMRSHAGVATKMFQTLAKEGINIQMISTSEIKVSVIVDAKYTELAVRVLHEAFGLSGK

SEQ ID NO: 26348 - protein, 614 aa, Geobacter sulfurreducens PCA
MGVPLNQFYKNLALWLVISLMMILLFNLFNKPRTTQERLGYSDFIAAVDAGKVSTVTVQGNEIIGKYSDGKEFRSYKPTDAMLSEKLLEKKINVSAKPEEEKVSWFSIFISWFPLLFLVGVWIFFMRQMQGGGGKAMAFGKSRAKLLTEAQGRVTFEDVAGVDEAKEELEEIIQFLKDPKKFTKLGGRIPKGVLLVGPPGTGKTLLARAVAGEAGVPFFSISGSDFVEMFVGVGASRVRDLFVQGKKNAPCIIFIDEIDAVGRHRGAGLGGGHDEREQTLNQLLVEMDGFESNEGVILIAATNRPDVLDPALLRPGRFDRQVVVPQPDVKGREMILKVHTKKTPLASDVDLGVIARGTPGFSGADLSNVVNEAALLAARKDKSFVEMKDFDDAKDKVLMGVERRSMVISEEEKKNTAYHEAGHTLVAKLIPGTDPVHKVSIIPRGRALGVTMQLPIEDKHSYNKESLLNRIAVLMGGRAAEEIIFNELTTGAGNDIERATEIARKMVCEWGMSEKMGPVTFGKKEESIFLGRDMSMHKNYSEATAVEIDEEIRKIIDGSYSRVKQLLNENLSVLHCLATQLIEKENLTGDEVDRIIKDDCAASRAAVEEAPVAP

SEQ ID NO: 26349 - protein, 321 aa, Geobacter sulfurreducens PCA
MILEEARKVIRIEAEALTRLADTIDGEFEKAVRLILGTRGRVVVTGMGKSGLIGQKIASTMASTGTPALFLHPAEGVHGDLGMIMKGDVVIAISNSGETEEVVRILPIIKRLGATLVSMSGNPSSTLAKAGDVFLDISVTEEACPLGLAPTASTTATLAMGDALAVALLIERGFRPEDFALFHPGGSLGKKLLLTVGDLMHSGDAVPLVGSATPIRDALFVITAKGLGITGVCAEDGALVGVVTDGDLRRSLGKGVDILNQPAGEIMTRNPKRINRSELAAKALQVMESHSITSLFVFDDTADNRPVGVIHLHDLLRAGLA

SEQ ID NO: 26350 - protein, 66 aa, Geobacter sulfurreducens PCA
MAIGRVKWFNDAKGFGFIEQDNGEDVFVHFSAIQQDGFKSLAEGEQVSFDVVNGPKGLQAANVKKA

SEQ ID NO: 26351 - protein, 566 aa, Geobacter sulfurreducens PCA
MKMTGARILLECLKLEGVDTVFGYPGGTVINIYDELFSFKEIRHILPRHEQAGVHAADGFARATGRVGVAIATSGPGATNTVTGIATAYMDSIPVVVITGQVPTALIGNDAFQEVDIVGITRPCTKHNFLVKDVKDIPSIIKKAFYIARTGRPGPVLVDLPKDVQIATAEFHYPDSIELRSYKPTVEGHPKQIEKAVSLMLEAKKPVIYVGGGVISGDAAGELYDFAKKLNMPVTTTLMGLGSFPEDDHQALRLLGMHGTYYANMAVTNCDMLFAVGARFDDRVTGKVATFAPHAKIIHVDVDPTSIRKNVRVDLPIVGEVKKVLSQMLKVLEEQGDKVERFRTGIEPWMAEIEGWKQKHPMTYKQTTSVIKPQYVIQKLRELSEPDAIIATDVGQHQMWTAQFFTFTKARTLLSSGGLGTMGYGLPAAMGAQAAYPDRQVIAICGDGGFQMNMQELATLVQNRLPVKICILNNNFLGMVRQWQELFFDRRYSQTCMELPIDFIKLAEAFGATGLQASKVDEVEGTIKKAFETPGPVIMEFKIAREEKVLPMVPAGASLNEMVLNA

SEQ ID NO: 26352 - protein, 611 aa, Geobacter sulfurreducens PCA
MCGIVGKYYFNKNAGDSSDIDAMMQAIYHRGPDSSGKYINGRAALGFQRLSIIDTVSGHQPLYNETKTIVLLANGEIYNYKEFVPFLESKGHVFSTRSDCEVIIHLYEEYGIEFISKLNGMFAFCLYDTRNDVMFIARDRVGIKPLYYHLNKEAIIFGSEIKGILASGEVVTEEANDCLAEYLCFRYVANFRTFFSSVNALEPGTYIKISPNGCTFEKFWDLSKYVLNYAQDGDLVETVDAALTASVQRQMMTDVPLGTQLSGGVDSSLVSKLAAGYSPGLKTFTVSFFESAYDESAYARLLADSAGLEYHQIRVDGKTFADTLPKVIWYHDEPLCHANSVHMYLLCTYARQFVTVLLTGEGADELFAGYPRYQICRFGDAYNKLNPSVASLVKSVLKGVPARKIVKIVDNLGLGARELALWNSSFTTKEKVSWLLDSGDVTLDARSALVDSVWNDELSLFDNLLLYEQKSYLQPILMRQDKMSMAASVESRVPVLDNEMLDVANTIPYQYKVRHFTPKHVFKKVAERHISRKIVYKKKVGFGVPVDEWLRDHSGLGRYLDLLLDTARGINGVSRPRIEQLIAEHASRRYNHGDVLWPLVNYAIWREQFFK

SEQ ID NO: 26353 - protein, 226 aa, Geobacter sulfurreducens PCA
MERILGRLPFFSSLSGDELLSLKAALRKKSFPRNAMILCEEDSNRYMYIVISGKVKVVRTGSDGRERIYAIHKRGDFFGEMAMLDGKTSPAAVVALEDTTVGLIAKDDFDRYLMSNSKVVERIIEMLCGRLRESWLMLKVLSSSDAEQRVRTVLGHLADTHGVSDARGTIIAMKLTHKEIAGYANLARETVSRLLTSLRKGEEIEILDSHQIVLKPDFRRDDPAAV

SEQ ID NO: 26354 - protein, 391 aa, Geobacter sulfurreducens PCA
MKEIYLDNNATTKVDEAVFEEMRPYFCDLYGNPSSMHYFGGQVQRKVDEARNRVAALLGALPEEIIFTACGTESDNAAIRSALEVFPERRHIITTRVEHPAVLTLCRNLSKRGYRVTELGVDGEGRLDLNELRSAIDEDTVVVSVMWANNETGVIFPVEEISRIVKEKGKGALFHTDAVQAVGKIPINMATSSIDMLSISGHKLHAPKGTGVLYLRKGVPFRPFMVGGHQEHSRRAGTENTAGIIALGKACELAGHWMEDENTRVKALRDRLEAALLELIPRARINGGEAERLPNTLSIAFEFVEGEAILMLMSEKGICASSGSACTSGSLEPSHVLRAMGVPFTCAHGSIRFSLSRYTTDEEIDTIIRELPPIIRRLREMSPFGREFLNA

SEQ ID NO: 26355 - protein, 191 aa, Geobacter sulfurreducens PCA
MTGGRRAVFLDRDGTINVEKGYVHQAHEFEFVPGAPEAIRLLNGAGFLVVVVTNQSGVARGYYDEEAVHRLHRFMDAELAKDGAFVDAYYLCPHHPHHGVGPYRIECSCRKPLPGMLTGAARDMDIDLARSYLIGDKMSDVEAGLAAGCTSLLVLTGYGDDECPRVPAGVLVCADILAATRRVIELEGDSV

SEQ ID NO: 26356 - protein, 299 aa, Geobacter sulfurreducens PCA
MLSKTPFRSGFVSIIGRPNVGKSTLLNRILGEKIVITSDKPQTTRNRIQGIHNLPGAQIVFIDTPGIHHARSRLNKFMVEEALSSIREVDLVMLLVEANRAPGDQEREIAGLLPSVNVPVFLVVNKIDLIDPDILAERLTAYAELFPFREVVPVSAETGENVERLVEVVRDTLPEGPVYFPDDILTDLPERFIVAEIVREKVFRLTRDEIPYSTAVEVDSFREREDGGLVSISATITVERDSQKGIIIGRKGAMLKQIGSEARLEIERLLDTKVFLELFVRVRRDWSENPNILKELGYR

SEQ ID NO: 26357 - protein, 571 aa, Geobacter sulfurreducens PCA
MDTFKRILHYSKPYWWRIVISMAASLCVGGTDAAIAWMVEPLLKKIFSERDMTIFILVPVALIIVFLFRGVARFLQGYYVQTAGQLAIQDIRNEVYRKQIGLPLRYFTDNPTGTLMSRIMSDVGQMQQGVANIVTSLLRDGVTAIGLLGVIFYRNWQLALITFIVLPLTAVPAQKIGKRIKNLAKQSLGQMGEITSILQETFSGIKVVKAFRQEKSVVDRFSRTNLGLYRYLRKSIKYESLHTPIMEIITSFGVAGVIWFGGSQVMDGKMTAPEFFSFLTAMVMLYGPIKKVLSAYNTVQQAMGAAERVFEVIDHPADIQDPPDPVEPGMVRGSVELRNVSFRYDDEEVLRDVSFTAGRGEVVALVGPSGAGKTTVMSLIPRFYDVTGGAVLIDGIDVRRLRLDDLLCQIALVDQETILFNETIANNIRLGNPDATLEEVERAARSAFAHDFIMEMPEGYDTNIGDRGVRLSGGQRQRLCIARAILKNAPILLLDEATSALDTESEHMVQQALTNLMKNRTTLVIAHRLSTVLHADRIVVIDKGEVVEVGTNDELLARDGLYRKLYDMQFK

SEQ ID NO: 26358 - protein, 403 aa, Geobacter sulfurreducens PCA
MKNIINFRMAAVLASCTLLSACADGDLPYSDSTSISSPAYSHSAVFQNMTTLAVWGNNESGQLGDGTTTSAATPKRLRLGFATYSSGFATGASHTLAIARFDNVSGVRAWGSNSAGQIGRDPATVPTSSTPVKIGGFGGAVQQVAAGGLHSMALAGGTVWAWGSNSAGQLALNPISSATRFAPRQVETAKLPIAPTAIVAGGSHSIAYTSTEAYAWGNNASGQLGNGTTLSNHMPQKVQLPSSITIRKISAGGSHNLALDSTGAIWAWGSNAYGQLGNGTTTNQSTPVQLTLPAGVTGFIDVFAGPSHSVAVASNFTVYTWGFNTLGLLSVGTTGDQLSPAQVRDASNVPFTDVERVVLLGSFFTIVKKNGSGGMWAWGYNGYGQLGDGTTSNRTAPVQVALP

SEQ ID NO: 26359 - protein, 365 aa, Geobacter sulfurreducens PCA
MIIGVPREIKVHEYRVGMTPAGAAELTREGHRVLVEAGAGEGSGFADDDFLRSGARVVGRDNLFGQAELIVKVKEPLPDEYALLQPGQALFTYLHLAPNEALARALLKRSVTAIGYETLEKGGALPLLAPMSEIAGRMAPLVGAFYLQRIHGGTGTLPPGVPGVAAGRALILGAGVVGSAAARVCLGLGMETTVMNRGIERLQSLDDIFNGRLRTLVLTADALADHLRDADLVVGALLVPGGRTPVLITRPMLATMRKGAVIVDVAVDQGGCVATSRPTTHDKPVYEVDGIIHYTVANMPGAYPRTSTLALTNATLPYVRLLANVGIEEALRRDPALGGALNTWRGGIAHHALAEALELPRVTFA

SEQ ID NO: 26360 - protein, 590 aa, Geobacter sulfurreducens PCA
MRLTPSSLLPEWLRSYRPADLLPDLAAGAVVAVILAPQGMAYALLAGLPPIMGLYAATVPLLAYALAGSSRHLSVGPVAIVSLLVHVACSKVAHAGSASYVSAALQLALLTGVLQLLLGTVRAGFMVNFLSRAAIGGFTSAAALLISLSQFKNLLGISGDGGESALELAAGVVRNIGTLHLLTSVMGLAAICMLLLLQRFAPRFPAPLAAIVLGIPLTALLHLDQAGVRTVGDLPHGLPPLSLPPFAADQILTLLPAAVTIALIGYLESFAVAGLIADREKYPIYPNRELVGLGIANVAAAFFSGYPVTGGFSRTAVNHRAGARTGLAGMITATLIGIILLHFTHLFHYLPKTILAAIVIVAVAGLVEAAEARYLFRVKPSDGYTFVLTFLVTLGFGVEAGIVAGVIFSLLVFIWRSAHPHIAELGWLEEEGVFRNIRRYPHAVVPRGMLLVRVDASLYFANMAFVGDWLRATLAERADVRQIIFDLSGVNDMDAVALAALEVIIEGHGERGIVVAFAGMKGPVRDLAQRAGWQERYGNLISFLSLNQAVRQMSTEDMILAGLHSKERESETCSVPATRPTGSTNHGDPA

SEQ ID NO: 26361 - protein, 486 aa, Geobacter sulfurreducens PCA
MGERILVVSNREPYIHIRTGDTVEVHRPASGLVTAVEPVMRACSGTWIAHGSGSADRETVDSHDRVRVPPHKPEYNLRRIWLTKEEEEGYYYGFANEGLWPLCHIAHVRPVFRTSDWQQYVRINQRFADAVVKEADSDDPVVLVQDYHFALLPAMIRKALPKATIITFWHIPWPNPESFGICPWREELLKGMLGSTILGFHTPYHCKNFLETVDRYLETRIEHESSTISRRGQLTMVESYPISIQWPPAWQGTLPPVDVTRSEILGELGLPLDHLIGVGVDRMDYTKGIPERFMAVERLFELHPELVGRFTFVQIAAPSRSALEEYQAFEARVHSHAERINGRFSRDGRPAIILKAEHHEPEQVNRYYRAADVCMVTSLHDGMNLVAKEYVAARDDERGALVLSQFTGAAHELHEALIVNPYHVEQTAEALHRALTMPDYEQRERMRSMRMLVRDFNVYRWAGRMLLDAARVRQREKLAARIGGES

SEQ ID NO: 26362 - protein, 433 aa, Geobacter sulfurreducens PCA
MRFDPQQLRIDGVYAQRQPGTFMLRIKVPAGILSAEQAEAVADIADRFAGGLLHLTTRGSIELHGLTEDHLSSVWRGLAAVGLTSRGACGGAVRGVVCGSVTAAAWPLVQSLAHKLHLHFTRNPHFEALPKKFKIGVFTGDNEGRHLIQDLSLVHRENEADAPRYDVWAAGGLGREPSPAFLVEEAVAEDRIIPLVEAIVRVYKERAPKGKRLKHLVRDLGREDFLALVAERRGDQPLPLADSFSGELFPSVAAGGVCVEAPVFAGELTTGGLRSLAAVARDVAGGFMVLTGDQNVRFLLPESVRRQDALDAVAAAGFAADRPEQRVAFRICPGSHECAMGLAPTRDVARAVIGAMGDDAAALRWSISGCPNSCSQPQLARVGIVTAKSVKGEDGQRRPLFDLYRREDDGSLGVVVGSGLELEELVAAVRLER

SEQ ID NO: 26363 - protein, 452 aa, Geobacter sulfurreducens PCA
MAESRPIRILYMEDNPALARLLQKSLLRKGYQVDVVADGAAGLTVLEGTSYDLILADYDMPVCGGIEVIATLAARGVDIPVIMVTGNGSEKVAVEALKQGAADYVVKDLEMGYIELLPIVIEQVLTRQELLREKELMAEMIRDREERYRRLVELSPDGIAIHVGDRIAFINAAGARLLGASDPTGVIGRRVADLVSPDYLCLVRDQLASESTGSDAVPWFEERLTLPGGRAVDVELAAVPFSHEGEEALQVIIRDITEKKLAKRRLEFLAHHDPLTGLANRVLFFDRLDVSLRQAERDRQCAALLFIDLDHFKGVNDVFGHDAGDVLLMEAARRIESCLRKADSVARMGGDEFTVILTRVSGEADAAMVAGKIIEALAVPVALAGGECTVGASIGISMYPLDAADAESLLRKADAAMYRAKRLGKNRFAFAMHDPCAGAVDAAPQACAGSPC

SEQ ID NO: 26364 - protein, 394 aa, Geobacter sulfurreducens PCA
MSEAPAGTVPLIYLDHNATTPTHPLVVEALLPFLGERFGNPSSIHWAGRAVKGAVEEAREAVAELAGCEPGEVVFTGSGSEADNMAVKGVASSLRKRGNHIIATRVEHPAVANSCRYLEHGGYEVTWLDVDRDGILDPTRVEEAITERTILVTAMYANNETGVLLPVAEIGEIARRHRVPFHCDAVQALGKVPLEFRATGASLMALSAHKVYGPKGVGALVIRRGTTCHPLVHGGSQERNRRAGTENVAGIVGFGQACRLARESLADETARVCRLRDRLEEGILGRVPGARVNGHRQFRLPNTSNISFEGVTADTLLMALDLAGIAVSSGSACSSGTLRHSPVLAAMGLSPQEAGGAVRFSLGLGNTDQEIDRVLTVLPEIVERVKRGGDGREA

SEQ ID NO: 26365 - protein, 456 aa, Geobacter sulfurreducens PCA
MTAPKILAVDDDELSLLMLENLLADAGFAPLTAVSGAQALALLEREHVDLLISDLIMEGMNGLELLDRVRERYPNVPVIVVTARGSVESAVEAMRRGAYDYLAKPFNPEVLRITLQRALDYHHVVRENEQITGLLRERFTFQSIVTVNPAMKKLLELAARVAAARQTTVAIYGESGSGKEVLARAIHFAGKGLPAGFVAVNCAAVPEHLLESELFGHVRGAFTGADRDREGKFSLARGGTLLLDEIGDMPLPLQAKLLRVLQERVFEKIGSNTPISTDCRVIVATNRNLADMVAAGRFREDLYHRINVFPLVIPPLRERTDDIPLLCEHVLDQLRQHLGKPLPGISQKAMDAMLAHGWPGNVRELRNCLERAAILTDGELIRPEHLGFGAAGAPARETSAGPAPDTVQYALALPVDQLSLHALTERIMAITLERCGGNKSRAAQLLRIDRKAFYRG

SEQ ID NO: 26366 - protein, 128 aa, Geobacter sulfurreducens PCA
MGRINVLIVDDDVNFLYVLGLLLESKDLEVTSASRGAEAVDIVRKTTFDMVITDFSMPGMNGLELAAAVKELHPDLPVMMVTCEVTSDLIEMATDVGICRVLDKPVNVGRLLADIRHFSRRKGRHTPA

SEQ ID NO: 26367 - protein, 333 aa, Geobacter sulfurreducens PCA
MGLMDQIRAKARNNLQTIVLPESYDDRMYAAAQQIVEQGLAKVVMLGNADTIARKAADLGATISGVELIDPATSPKLNEYADAFVELRKSKGLSKDDALKLLTAADNLYYAGMMVRQGDAGGEVAGATGTTGDVLRAAFQTVGPAKGIKTVSSFFFMVTKTPSFGENGIIFFADCAVNPNPDAQALADIAVATARNCKAFLDVDARVAMLSFSTKGSASHADVDKVLKAMELAKAIDPALQIDGELQADAALLPKVGERKAPGSTVAGKANVLIFPDLDAGNIAYKLVERVAGAEAIGPIIQGLAKPVNDLSRGCSVEDIVNVAAITAVQAQG

SEQ ID NO: 26368 - protein, 421 aa, Geobacter sulfurreducens PCA
MIILALNCGSSSVKYQLFDWERKEVVAKGMVERVIIGDSFIMHEVPGRETYRKEYECPDHQVAIDLIIRTVVDADHGVLKDINEISAVGHRVVHGGEMFTRSVLIDEKVLDAVKEVQHLAPLHNPPNIAGIEAAQAVLPHVPHVAIFDTAFHQTMPEHAYLYPLPYEWYEKYGVRRYGFHGTSHLYVSKRAAVLLGKTPSECNIITMHIGNGVSHCAIKGGVSVDTSMGLTPLEGAVMGTRCGDIDPAIPAFMMQKENLSAKEIDSILNKKSGVLGVTGRFTDRRDVIEHASNGDHRCKVALDIEAYRLKKYIGTYMAVLGRLDAVVFTAGVGEMGWPIREKTIEGLEGIGIKLDRERNKGAMTRKRESLITTDDSPIKVFVIPTDEELVFTEDVVAILNGTYTDHMNFDYSFARTDFVRK

SEQ ID NO: 26369 - protein, 378 aa, Geobacter sulfurreducens PCA
MTVYLDCNATTPLEPAVMAVVTRFMERDYGNAASPIHDFGVFARLAVEHARGQVAEVAAARRDEVIFTSGATEADNLALLGLADHGLACGRRHVISTAVEHKAVLEPLEELARRGFQVELLPVGASGRLDPDRLRAALRPDTLLVSTMHVNNETGVVQPLAELAEILAGHGAYWHVDAAQGFGKEIDGLRNPRIDLIAVSGHKIYAPKGVGALIARKRDRAFPPLRPLMLGGGQEQGLRPGTLPVPLIAGFGEAAKLAVRTHEARSAANRAFREKLLAALAPLEPTLNGDQEHVLPHAVNLSLAGIEADRAITALKGVIAVSSTSACTSHTRAPSHVLTAMGLSPERVETSLRLSWCHLTPAVDWDEVVSILRGLRAS

SEQ ID NO: 26370 - protein, 457 aa, Geobacter sulfurreducens PCA
MRKTKILVVDDEHLIRWSLEQNLKKQGYDVVSAGNGEDALRIVREEQPDLVLLDIQLPGISGLEALEKIKEYDEEILVIMVTAHGALETAVHAMRLGAYDYINKPFNLDEMSIVIRKALETSDLRREVQRLRSEQSRKFGPPDIIGASRHMKNVLEMMEKVAKSDASTVLIQGESGTGKELVAKWIHYQSARAEKPFVAINCAAVPATLLESELFGHEKGAFTDAKVMKKGLFELADGGTVFLDEIGDMEMGMQAKLLRFLEERTFRRIGGTKAFAVDVRIISATNRDLLKAIEEKNFRNDLYYRLQVIPIYLPPLRERKEDILQLVNHFIEVFNREFNKHVTGISKMAEKLLLEYHWPGNIRELKNVIERAIILGNEDTLLLEHLPLEIVAKASNQTTGLATFKLPPDGVDIEEVEKELIRQSLEMSEWNQSKAAKKLNLGIDAFRYRMKKFGFLK

SEQ ID NO: 26371 - protein, 214 aa, Geobacter sulfurreducens PCA
MKFFIDTADVKEIRQAHDLGLVDGVTTNPSLIAKSGRKFEDVIKEITEIVDGPISAEVVSLEAAGMIREAGELAKIHKNIVIKLPMTPEGLKACAALTREGIKTNVTLIFTPMQALLAAKAGATYVSPFVGRLDDISQDGMGIIDDIKTIFDNYGYQSEIIVASVRNPVHVLNAALIGADIATIPYSVMLQLAKHPLTDSGIERFLKDWESVPK

SEQ ID NO: 26372 - protein, 338 aa, Geobacter sulfurreducens PCA
MQFIDEVKIHVQSGHGGAGCVSFRREKFIPFGGPNGGDGGRGGDVIFRVDSNLSTLLDLRYRPHLKAGSGKNGMGKDRHGAGGEDLVIPVPPGTIIKDAETGEILADLVTAGEEIVLLKGGRGGQGNARFATSTNRAPKFAQPGEPEEQRWLRLELKLLADVGLLGFPNVGKSSFITRVSAARPKIADYPFTTLKPNLGVVPYKNYRSFVIADIPGIIEGASEGAGLGHRFLKHVERTTVLLHVLDLSWMPDRDPIREYEALNRELALFSPELADKRQIVVVNKMDLPAVRENLPAVLPWFRERGLAVFPLSAATGEGISPLLDEIARSLWGKDEEEW

SEQ ID NO: 26373 - protein, 102 aa, Geobacter sulfurreducens PCA
MYAVIRTGGKQYKVSEGDFLKVEKLEGAVGDTVELKDVLMVGGETVAIGTPLVPSASVVGRIVDQGKDKKILVFKSKRRKNFRKMYGHRQPRTVLKIEKINA

SEQ ID NO: 26374 - protein, 225 aa, Geobacter sulfurreducens PCA
MKKDILEKGAILQRDRETYAIAPHIPGGITDTATLRKLCDVADKYGVKELKLTSAQRIALFGVKEEDLDAIWSDLDQQPGAAIGLCVRSVKICPGTTWCKRGVQDSVSLGLKIDAIYHAMELPNKMKMGISGCMLNCAETMLKDVGVVGTPKGWRIYVGGNAGARPRIGDLLVELGPDEDKVLAVIADLVEWYRSSGSEQRLGRVVEQMGFDAFKTAVLGAKATP

SEQ ID NO: 26375 - protein, 554 aa, Geobacter sulfurreducens PCA
MSTTEPAHVTNFLRTIVEDDLKSGKHRTIVTRFPPEPNGYLHIGHAKSICLNFGLARDFGGRCHLRFDDTNPVKEETEYIESIKESVRWLGFEWGEHCYYASDYFEQLYQWAESLIIQGKAYVDDLTADEIRSYRGTLTEPGKESPSRSRTAEENLDLFRRMRAGEFPDGAKVLRARIDMASPNINLRDPVMYRILHAPHPHAGDKWCIYPMYDYAHGQSDAIEGITHSICTLEFEDHKPLYEWFLDNLPVPNRPRQYEFARLNLTYAVMSKRKLLQLVKDGDVTGWDDPRMPTIMGIRRRGFTPEAIRNFCDTIGVGRSDSWIDMSILEESVRQDLNERAPRVMAVLRPLRLVIENYPEGATEDLTIAYHPQRPDLGSRSVPFGRELFIERDDFMEVPPKGFKRLSPGEEIRLRGAYIVKCTGVERDGEGNVTTVRCTYDPETRSGLPGSERKVKGVIHWVSATHAVTAEVRLYDRLFTVPNPSGDDWKELLNPLSVEIVRDCRLEPSLALARPEDRFQFERQGYFCADRVDSQPGAPVFNRTVTLRDSWAKK

SEQ ID NO: 26376 - protein, 171 aa, Geobacter sulfurreducens PCA
MPMAPGPIPAAVLLPLFERDGEVHVLFTKRTEHLNHHRGEISFPGGVSHPDDASPCETALRETWEEIGIPPGEVDILGELDDFYSVHDYLVTPCVGVIRGDRPLVVNPGEIERIIVVPLKHLLRPEAFRTEDWTWRGRTHPVHFYRYMDDEIWGLTAAILSQFLNTIFPRP

SEQ ID NO: 26377 - protein, 307 aa, Geobacter sulfurreducens PCA
MGESLQSIVNLVDPYTLQILVNIGIAIVLALGLNVITGITGQLSLGHAAFMSIGAFTSAVITLRTGLPFSANLLLSGLITAFVGAAIGYPILRLTGDYLAICTLGFAEIVKVVFLNLDITNKALGLSVPPARSPIPMPIIVWVVAILSIIFVCFMKESRFGRALKAIRDDEIAAEAMGINIARYKVQSFAVGSFLAGVGGCLYAHFLSYINPSDFGFLKSVDILSMVVLGGLGSIAGTVFGASILAAAPEFLRFMSQYRMLVYGGLLVFLMVFRPNGLLGGINFTDLVLRAIGRKPATAEVNERHRK

SEQ ID NO: 26378 - protein, 241 aa, Geobacter sulfurreducens PCA
MRGRPGLKGLFMDIRDILRKSLLFSGLDENHLAEVAAIAARRPFARGETVFAEGEPANGFYLLAQGSMKLCKVSPDGKEKVLHFVHPGETFAEAAFFGDGKYPAEARAVEKGEAIFFPREGFMGLLERNPRFSLNLIVSLSLMLRRFARQIEELTFAEVPARLAAHLVELAERKSTSFQGTTYLDLDMKKGELASRLGTVSETLSRSFRKLKEEGLIEVDGSRVVIFDMEKLKAAAGRRPA

SEQ ID NO: 26379 - protein, 403 aa, Geobacter sulfurreducens PCA
MIILILNCRGFSIHFQLFDWSTRTVLARGDVDRIELGDSFISMEVPGRDPYHLESDCSSFGAAVALILATLTHPLEGPLSRVEQITAVGHRVVHGGERFTSSVPIDGKVIEAVRSVEELAPLHIPPNLAGIEGAMATLPGIPHVAVFDTAFHQAMPLHAYLYPLPWEWYEQHGVRRYGFHGASHCHAARRGAALLGREPALCNLVTIHIGNGISLCAVEGGCSIDTSMGLTPLEGTMMGTRCGSIDPGIPPFMMQEEQLSPRDLDRILNQRSGAAGITGLKLDRSAFLARAIAGDERCLLALEMEAYRLRKHIGGYAAALGRLDAVVFSAASGEGEWLVREKALADMACFGIRLDRERNRTARSVDREERVSADDSPVAVYVIPTDEEMVYAEEVAALLNGQG

SEQ ID NO: 26380 - protein, 1510 aa, Geobacter sulfurreducens PCA
MADKTIDPSGLVPPERDACAIICHINKEARPTHGNVQRTIEALVKMGHRAGEINGEGDGCGVLTDIPRTIWREVLAGAGADPDLAEAPGFAVGHLLLPKEAIVADPQLQAAILGRFSAAGVQLLVERPGIVRSEVLSSRAREGEPLFWQVALLCPEKVAAPKLLFELQTSIERDFTVHVASLSTDVTAWKVHGAPELLPRYYPELRRRDFLSSVTIGHSRYSTNTLPTVLRAQPFSLLGHNGEINTIARLREEARMMGIPLFADGSDSQDLNRTLEGLMFRYGLTLFEAMEVVFPPIFSAMDGMGPELKAMYTWFRRFLKASAQGPAAIIARHRNLCIFSVDAMGLRPLWVGETDREIFASSELGVVPHEEILSDPKPLAPGEKVGVRIVAGQQVEIIGHPALRGEVYQSFRKRTNLASQEKWVTQGAALGDGLPSLAVRFGRSAKLHQDNLMSAFAWKSSDLSILREMAGSGSDPIASLGYDGPLASLSSRRQNLSDYFKEQVAVVTNPAIDREREAEHFSTRVYLGPRPLFRGPARLAVTLEVPLLTGGRRTGIEAADAAVAREFGTASLEALVAAFGEGKGRCRVIPCHMAKEECLGAALARLTREAVEAVSRGAAVLLLDDSDCFAPGKSFIDPFLVTAVLHKGLKEATDASGESLRRRTALVVRSGALRSLHDLIFALGMGADALCPYLMWEGAGDGPGMKNLFSVVAKGLEKVISTMGTHEIGGYGKYFASIGLCRHLAEIFETPNFCGSGQGGLTLERLEEENRSRSSVARSREKQPVPVQFRLYPKIWKMVGAVAKMEETYADLSRLIQQYEAENPLAIRHLLDLRYTQELTVDPDEVDTTVGDHNLPILISAMSFGSQGETPFRIYAEAAKRLNIICMNGEGGEIADMLGQYRKNRGQQIASGRFGVNMAFLNSADFLEIKVGQGAKPGEGGHLPGFKVTAKIAAARHATPGVSLISPSNNHDIYSIEDLAQIVEELRTANPWARMSVKVPAVAGIGTIALGVAKAGADIITISGYDGGTGAARKHAIKFVGLPAEIGVSEAHKALVAAGMRQKVEIWADGGARTGRDVVKLMLLGANRVGFGTMAMVVIGCTACRGCHLGTCHVGIATQIETAEEAEARGLKRFVPRVLENGVIYMSTFFRGMSREIRILTAKLGFRRTQDLVGRSDLLAQARGLDRLDLTELLRPARPEEHQPFEPEVRIIRKPLNYLTSLISGLVTDSFAKGEERVRYDDDSATSSDRAIGTHLAGALERGVAEGRVRTGQRALLQFRRDSIPGNGLAAFSIDRLTIRVEGGAQDGVGKSTSGGRIVILKGENREGRRVGGTVGKGLAYGAQGGTFLVQGDADSRACIRLSGADVVFGSRIREPVDDFRGDIASRANLKGFAFEYMTAGRVVVLGDPGPWICSGMTGGVVYCHLDGAMGFTREALRRRLAKGAGVEIRDVEEEDVASIGELLLKYHRELLHSHQEEEADAVEGIIADTRSCFVKIVPEKNIVTPRSTE

SEQ ID NO: 26381 - protein, 531 aa, Geobacter sulfurreducens PCA
MEKRALIAVVLSILFFYGYTALFSPPPKETPKPVATATQSQPAQQVTAAPVPVAVPAQPQPAVAARDVSVDTPAYSVTFSTQGGSIKRLDLKRYHETAGPGGKNVTLVSEDNPSNYTIGLRAPGFGLDQNAVFVPSADALTVGPGEKKQLSFTWVSPAGVTVTKTYNFSGDGYGLEIQYQVTNSGSARVSSPVQTVQTYPLVPKVKESRFETFGPATFAQDKLFEDKVKDLESGAKTHAAPLWSGFADKYFLSAVLAHEGSMAAATIRKTASGYLENTISSPELSLNPGEGRALTYRLFFGPKDIDVLKAQGNSLERAINLGWFAMLAKPLLHSLKFFHNYTGNYGIAIIIITVIIKVIFYPLTHSSYKSMKEMQKLQPKMQQLREKYKNDREAMNRAMMELYQTHKVNPVGGCLPMLVQIPVFFALYKALMFSIELRHAPFMLWITDLAAKDPYYVTPIIMGVTMVIQQKMTPSQMDPVQQKMMMALPVVFTFMFLNFPSGLVLYWLVNNVLTIIQQYYINRSISTAEAK

SEQ ID NO: 26382 - protein, 794 aa, Psilotum nudum
GSIGSLVMAVIVNDNDAEPSGRGNQPKNRRLWGMVVCHHTTPRAVPFSLRSACEFLMQVFGLQLNMEIELAAQMREKHILRTQTLLCDMLLRDAPIGIVTQSPNIMDLVKCDGAALYYGKKFWLLGTTPTEAQIKDLADWLLDVHRDSTGLSTESLADAGFPGAAALGDAVCGMAAVKITPRDYLFWFRSHTAKEIKWGGAKHNPDDKDDGKKMHPRSSFKAFLEVVKWRSSPWEDVEMDAVHSLQLILRGSFQDIDDSESKTMIHHRLNDLNLHGMDELSTVANEMVRLMETATAPILAVDSSGFINGWNGKAAELTGLPLEDAMNKSLVRDLVVDESVSTVERLLYLALQGEEERNVEIKLKTFGTQADKGPVILVVNACASRNITANVVGVCFVGQDVTGEKVVMDKFTRIQGDYRTIVQSPNPLIPPIFGSDEFGYCSEWNPAMVKLSGWKMEEVLGKMNVGEIFGSEMACCRLRGQDAMTKFMIVLNSAMGGQDSDRFPLGFFDRQGKYVEALLIANKRTDGAGAITGVFCFLHIASAEVQQALQVQKRSARTALDKLKEVAYMRQEIRNPLYGIMFTRRLLEGTNLSEEQKQIIDTSAVCEKQLHQILDEDNFENLDHGNIDLDTIEFTMGTVMDAVISQGMIRSREKGLQLIRETPVDIKNMRLYGDQLRLQQVLADFLTTAVRFTSSSDGWVGIKVVPTMKGLGGGLHVMRFDYRISHPGKGIPEDLVQQMFDCSREITQEGMGLSVSRKLVRLMNGDVSYIREAGVCYFLVNVEFPLADRDDSQN

SEQ ID NO: 26383 - protein, 692 aa, Vicia sativa
MTSSNSDLVRTIESALGISLGDSVSDSVVIIATTSAAVIIGLLVFLWRKSPDRSRELRPVIVPKFTVKHEDDEVEVDRGKTKVTVFYGTQTGTAEGFAKALAEEIKARYEKAVVKVVDMDDYAIDDDQYEEKLKKETLVFFMLATYGDGEPTDNAARFYKWFTEGKEERGTWLQQLTYGVFALGNRQYEHFNKIGKIVDEDLTEQGAKRLVPVGLGDDDQSIEDDFNAWKETLWPELDQLLRDEDDVNTASTPYTAAISEYRVVIHDPTVSPSYENHFNVANGGAVFDIHHPCRVNVAVRRELHKPQSDRSCIHLEFDLSGTGVTYETGDHVGVYAENCDETVEEAGKLLGQSLDLLFSLHTDKEDGTSLGGSLLPPFPGPCTVRTALACYADLLNPPRKAAIVALAAHASEPSEAERLKFLSSPQGKDEYSKWVVGSQRSLLEVMADFPSAKPPLGVFFAAIAPRLQPRYYSISSSPRPAPQRVHVTCALVEGPTPTGRIHKGVCSTWMKSATPLEKSHDCSRAPIFIRPSNFKLPADHSIPIIMVGPGTGLAPFRGFLQERLALKEDGVQLGPALLFFGCRNRQMDFIYEDELNNFVQQGAISELIVAFSREGPEKEYVQHKMMDKAEYLWSLISQGGYLYVCGDAKGMARDVHRSLHTIVQQQENADSSKAEATVKKLQMDGRYLRDVW

SEQ ID NO: 26384 - protein, 912 aa, Zea mays
MNPDNFTHKTNEAIVGAHEIAVEAGHAQLTPLHLAAVLAADKGGILRQAITGASGGDGAAGDSFERVLNNSLKKLPSQSPPPDSVPASTALIKVIRRAQSAQKKRGDSHLAVDQLLLGLLEDSQISDCLKEAGVSAARVRAELEKLRGGEGRRVESASGDTNFQALKTYGRDLVEQAGKLDPVIGRDEEIRRVVRILSRRTKNNPVLIGGPGVGKTAVVEGLAQRIVRGDVPSNLLDVRLIALDMGALVAGAKYRGEFEERLKAVLKEVEEAEGKVILFIDEIHLVLGAGRTEGSMDAANLFKPMLARGQLRCIGATTLEEYRKYVEKDAAFERRFQQVFVAEPSVPDTVSILRGLKEKYEGHHGVRIQDRALVVAAQLSARYIMGRHLPDKAIDLVDEACANVRVQLDSQPEEIDNLERKRIQLEVELHALEKEKDKASKARLIEVRKELDDLRVKLQPLTMKYRKEKERIDEIRKLKQRREELQFTLQEAERRMDLARVADLKYGALQEIDAAISKLESETGENLMLTETVGPEQIAEVVSRWTGIPVTRLGQNDKERLVGLADRLHQRVVGQTEAVSAVAEAVLRSRAGLGRPQQPTGSFLFLGPTGVGKTELAKALAEQLFDDENLLVRIDMSEYMEQHSVARLIGAPPGYVGHEEGGQLTEQVRRRPYSVILFDEVEKAHVAVFNTLLQVLDDGRLTDGQGRTVNFRNTVIIMTSNPGAEHLLAGMVGKNSMKVARDLVMQEVRRHFRPELLNRLDEIVIFDPLSHEQLRKVARLQMKDVAVRLAERGIALAVTDAALDIILSLSYDPVYGARPIRRWIEKRVVTQLSKMLIQEEIDENCTVYIDAAPGKDELVYRVDRSGGLVNAETGMKSDILIQAPNSSTRSDAAQAVKKMRIMEEDEDGMDEE

SEQ ID NO: 26385 - protein, 311 aa, Vitis aestivalis
MAMDSSNWMAASLDLNANPLRLFDDTPKKEVQDDFTGLGLKVVSLKEEETGVLVEKLNQVNAENRKLTEMLTVMCENYNALRSHVMEYISKNPERESPSSRKRKAESSNNNSNNNGVVGNSESSSSDEDSFKKPREETIKAKISRVYTRTDASDTSLVVKDGYQWRKYGQKVTRDNPSPRAYFKCSFAPSCPVKKKVQRSVEDQSILVATYEGEHNHPHHGRIEPTSGANRSVNLGSVPCASSLSSSGPAITLDLTKPKSNSDAKASKSPELHHFLVEQMASSLTKDPSFKAALAAAISGRILHHNQTEKW

SEQ ID NO: 26386 - protein, 278 aa, Vitis aestivalis
MGEEASSLQLIHHLLLSDFDSMETFVSHVSHSLRSSASDSSVSTDDIIQVSEYPKLHEDESNAFLFDYSTSSPSAVFQFQTESPKPSRLSHRRPPVSISLPPPPISHTSSSLDSGERRHYRGVRRRPWGKFAAEIRDPNRRGSRVWLGTFETAIEAARAYDRAAFKMRGSKAVLNFPLEAGNWSDSDPPATSIRKRERESESEEREQPEIKVLKQEEASPDSDSPVVAEAANVLEASPLTPSSWRTVWEERDMDGAFHMPPLTPLSPHPWIGYSRLIS

SEQ ID NO: 26387 - protein, 341 aa, Vitis aestivalis
MATAVEVSALQLIRQHLLGELSPKNIVVTDLTVGEEWSNGLNSEVSTSQSDSSFCFQAASCDSPVTISELFGSTDLSADFFGFVPSSTSEQSQSNFFEFETKPQIIDLTSPKGLNSSHFFEFETKPQIKDTTKTKSLDSSSQSTGKDRKPSLKISVPRPTKEIEWLEFAEPKQAATVEPAQNISHPEEKKHYRGVRQRPWGKFAAEIRDPKRRGSRVWLGTYETAIEAAKAYDRAAFQMRGSKAILNFPLEAGKSAETSTDYGRKRCREAEPEVTEMEANPPAKKEKLPEANTITRVQNDTPLTPSFWDFDLDSVGCLINVPPISPLSPHPKFGFPQLMVI

SEQ ID NO: 26388 - protein, 483 aa, uncultured marine bacterium 159
MNPDPLLNTGGLIFMSVYLFSLIGIGLAGRLARKENTLADFYLAGRGMGVFVLFLTLYATQYSGNTMIGFAGKAYRGGYQSLVMVIFMSSVIGGYLIYAPKLFRLAQKHGFITTGDFIQHRFKNNALTIIIVILSIIALGNYILTNLKAIGYIVVAATGGVVGFAQGIIILSLIMVIYETLGGMRSVAWTDVIQGVLLLIGVVLIFIVIQVEYGGLAASAEIIKNEKSDLLKFPNWFERRLWISTIGLAFFGISVYPHAIQRIYAAKDENTLKRSMQIMVFMPLVTTMFMMTVGWVGLAQFPDLDSRGSEQITILMLQDIGLRVPAMGIMIILFLSAAVAAIMSTVDSALLAISSMVTKDLYGHFKPNKKQSDLIKFGKIFSWIIMALAVLLAIELPQTIWRLMEIKLELLCQISPSIFLGIHYKNLQSKSVLAGVIVGTFIALLIIFTPGLPAKPWGIHAGIWGLIANVSVLGMHQFRFQKN

SEQ ID NO: 26389 - protein, 403 aa, uncultured marine bacterium 313
MKRLVVKFGGSSVGTIEKIKKVANIIKILSESNEIIVVVSAMSGVTDELKVKSDLISKNFDDKEQDVLLSSGEQISCSLLSGALIDLGVKARSWLGWQIPIITNDNHTSSQIIKIKTDEILNFISEKGVAVIAGFQGISKEIRITTLGRGGSDLSAVAFAKFFKADSCEIYTDVEGVLTTDPTIHEKAKKIDKISYEEILEMSSLGSKVLQSSAVQTAMIDNIPVHVRSTFSEKSGTKIIADSEIDYKKVVTGIAYSRGNAKVSIVGVEDKPGIAADIFEPIGKNNINIDMVIQNTSLDGKKANITFTIKREDLQKTLNLIEKNKQKLNYEKITHDDKLGKVSIIGAGMQAAPAVTYKMFRSLANEKINILAISTSEIKISVLIREDLTQKAVKALHKSFGLD

SEQ ID NO: 26390 - protein, 560 aa, uncultured marine bacterium 313
MDFKNVLIAIVLSTLVLVFWATFFEPPPVERQIVEDQITKSEEPSSPSIEKVELSKKIERNDAIDSVARVKIENNNIKGSISLQGAIIDDIIFKNYKESLESDQKVIFLNPKSSDEGYYIETGWASNSNEKLKLPLDNTIWKVKGNKVLTPNNPIVLEWDNNEGLIFTKKIELDDKYLFKISQGIKNTSNKSYEFFPYAQITRNYKPDVIPIYILHEGFIGMFDDELKEEDYKDVEDEKFIINSSKGWLGITDKYWLTAIVPEKGKKFKSEFLSIDGKYKANFIIKEPTVLSSNASITNEINAFVMAKEVAVIDGYAERLSIEKFDLTIDWGWFYFITKPLFFVIEYFFKLTGNFGVAIIILTALVRIVFFPLSNYSFRSMAKMKILQPEMIRLKELHKDDKTKLQQEMMALYKREKVNPISGCLPVLIQIPFFFAVYKMLYVTIEMRQQPFFGWIQDLSARDPTSIFNLFGLIPWDPPTFLMIGVWPILMGLTMFLQQKLNPTPPDPMQAKIFMFLPIFLTIILAPFPSGLVVYWTISNVLTMAQQWVIIRGTKVKTVR

SEQ ID NO: 26391 - protein, 1498 aa, uncultured marine bacterium 314
MNLYKKNLKKLTEAGAYYPSLEHDACGVGLVASTEGKKSRKIVEFGIQALKAVWHRGAVDADGKTGDGAGIQIEIPADFYKERIAFAGRKHHEGTICVGMIFLPRNDYSSQENCKTLIETELLSKNYYVYRWRQVPINTSVLGVKAENNRPEITQIIFKSNNKNFTGEELEKDLFVVRKKIEKQSNILQLKNFYICSFSSRSIIYKGMFLAEALSEFYPDLMDKRFISRFAIFHQRYSTNTFPSWDLAQPFRTLAHNGEINTLKGNINWMKIHEQDMSSKLFDDIESLKPVITPGNSDSAALDNVFELLVRSGKSVPLVKLMLIPDAWSKRRKTVSKAHQHLFNFLNSTIEPWDGPAAIAATDGKWIIAATDRNGLRPLRYTLSKDKLLFAGSETGMIPIPNDKVIFKGRLGPGQIIAVNLDQGKVYDSKSIKNHISKDYKKYNKQIIDLDKKISISNEKFIYSGDELRRRQYLAGMNIEDLELILHPMVEEAKEAVGSMGDDTPTAVLSDRYRPLSHFFRQNFSQVTNPPIDSLRENEVMSLKTRFGNLRNILDFENVPIDNIYVLNSPILSNSQFKKFTVFFKNNLKVLDCTFNVQNNLKERLDQLSFEAEIAVREGCKHLILSDKQLSEKKVAVPMILAFGAINSKLVNLGIRGFVSINVQTGEVLDTHSFAVLLGIGATTINPYLAFDSIYQRYEKKLFGKFSYEECIQRYIKSVNNGLLKIMSKMGISVLSAYRGGCNFETVGLSRAVVAEYFPGMISRISGIGIFGIETKIKELHKKAFQKNVSILPIGGIYKYRKNGENHQYQGQLIHMLQHAVAINSYETYKKYAQGIYNLPLINLRDLLIFKSPRKSININEVELETSLRKRFGSGSMSHGALSAEAHETLAIAMNRIGAASCSGEGGEDPKRFVKMKNGDSANSSVKQIASARFGVTIEYLNNCNEIEIKIAQGAKPGEGGQLPGFKVSKEIAKLRLSTPGVTLISPPPHHDIYSIEDLAQLIYDLKQTNPKARVGVKLVASTGVGTIAAGVAKAKADVILISGHSGGTGASPQTSIKHVGIPWEMGLTEANQILTLNGLRHQITLRTDGGIKTGRDIVMAAMMGAEEFGIGTTSLVAMGCIMVRQCHSNTCPVGVCTQDENLRKKFTGTPEKVVNLFTFIAQEVREILAELGFKNLNEIIGRTDLLRQVSRGTSNLDDLDLSPLLVQADPGNNDRYCTTNLINEVPPTLDEKIYKDIKNSIGKNKVESNYEIKNVHRSVGTRLSHYIFKKFGNKGIEENIVEINLSGSAGQSLGAFGIKGLKLNVTGDANDYVGKGLSGATIVIKPPADSNLVSNDNTIIGNTVLYGATSGKLFAAGQSGERFAVRNSGAEAVVEGCDSNGCEYMTGGTVVILGKTGDNFAAGMTGGMAFVYDPKHEFENYVNPGSVIWQVPETDYWKSCLNNLVNQHFEETQSHIAKTILENFNNEVQNFKQVCPKEMLDKLTNPLLLKTKVSKAV

SEQ ID NO: 26392 - protein, 396 aa, uncultured marine bacterium 314
MKSNEKNVVITSAVRTPVGTFGGSLKNIQGHMLGSVVIKKVLKKSKIKSNDVDEVIMGQVLTGSAGQNPARQAAIQAGLPIDKTAYVINQVCGSGLRSVAAGYQAIMSNDANIIIAGGQESMSNAPHAINIRKGQKLKESKLVDTMIKDGLWDAFNGYHMGITAENVASKWQITRKDQDDFALLSQTKTEKAQKDGKFKNEIVPVVLKSKKGDSIFKVDEHPRAGMTIEILTRLNPAFKKDGTVTAGNASGINDGAAAVVLMSQSEANKRNLNPLARIASWATCGVDPSLMGSGPIPASKKALEKAGWKISDLDLIEANEAFAAQSLAVIKDLRIPKEKVNVNGGAIALGHPIGASGARILVTLLHEMTKRDAKKALATLCIGGGMGIAMCIESNS

SEQ ID NO: 26393 - protein, 68 aa, uncultured marine bacterium 314
MSLKGKVKWFNGKKGYGFIEREDKEKDVFVHHTAVRDAGLKYLNEGDELTFEVENGEKGPSAVNLQKA

SEQ ID NO: 26394 - protein, 67 aa, uncultured marine bacterium 314
MSIKGKVKWFNGAKGYGFIEREDKEKDVFVHASAAEAASLQLNEGDALTFEVESGDKGPSAVNLQKA

SEQ ID NO: 26395 - protein, 404 aa, uncultured marine bacterium 440
MKRLILKFGGTSVGTIEKIKKVANVIKNRFSEDNEIIVVVSAMSGVTDELKAKSGLISKNFDSKELDVLLSSGEQVSCSLLSGALIDLGVKARSWLGWQIPIVTNDNYTSSQIMKIKTDEILNFISKKGVAVIAGFQGISKEIRITTLGRGGSDLSAVAVAKFFQTDSCEIYTDVDGVLTTDPSINKKAKKIDKISYEEMLEMSSLGAKVMQPNAVQASMIDNIPIHVRSTFSEKTGTKIIPESEIDYKKVVTGIAYSKGNAKVSVVGVVDKPGVAADVFEPIGKNNINIDMVIQNTSLDGKKANITFTIKREDLKKTLSLIEKNKKKLNYNKITHDDKLAKVSIIGAGMQANPGVTHKMFRSLADEKINILAISTSEIKISVLIREDLTKKAVKTLHKIFGLN

SEQ ID NO: 26396 - protein, 371 aa, uncultured marine bacterium 443
MRIGVPREIKNHEYRVGLPPAGVIELVRHGHEVMVETKAGEGAGFLDADYAAAGGSLVDGPSTIFRECDLIVKVKEPQPDECRQLRPGQILFTYLHLAADRLQTDLLLESGATCIAYETVEGTSGGLPLLAPMSEIAGRLAAQAGGDFLKKSSGGRGVLLGGVPGVAPAKVVVIGGGVVGTNAARVAQGMGARVVVLDRSLDRLRYLDDIFMGRVETVWSSAAALEEQVLDADLIIGAVLIPGAAAPKLVGLDLVRKLQKGSVMVDVAIDQGGCFETSRATSYEDPTYEIEGVVHYCVANMPGGVARTATLALTNATLPYVMRLADRGLDALRSDPCFALGLNVHEGLLTHQGVGEAFNFDTVSPEDALKV

SEQ ID NO: 26397 - protein, 635 aa, uncultured marine bacterium 560
MSKIIGIDLGTTNSCVAVMDGGTVKIIENSEGNRTTPSIIAYPKDSEEILVGQPAKRQAVTNPENTLYAIKRLIGRRFEEDEVQKDIDLVPYKIIKAKNGDAWVEVKGKKMAAPEISARVIQKMKQTAEDYLGTEVKEAVITVPAYFNDSQRQATKDAGKIAGLDVKRIINEPTAAALAYGVDKAIGDKKVAIYDLGGGTFDVSIIEMEDIDGEKHFEVLSTNGDTFLGGEDFDQRIINYLVEEFKKEQGFDLTKDAMALQRLKEAAEKAKIELSSSEQTEVSLPYITADASGPKHLNIKITRAKLESLVADLLKRSIEPCKIALKDAGLSSGDVDEVLLVGGQTRMPKVQKMVQDFFGKEPKRDLNPDEAVAMGAAIQAGVLGGDVKDVLLLDVTPLSLGIETLGGVMTKLIEKNTTIPTHQSQVFSTAADNQSAVTVHVLQGEREVASANKSLGQFNLEGIAPAPKGQPQIEVTLDLDSDGILHVSAKDKNTGKEQSITIKSSSGLSDEEVEKMVKDAETHAEEDKKFQELITARNMADSLVHSTKQTLEELKDEISDEEKSTIESAVNELEESIKGDDKDDIDAKVQNLSEKAQVLAQKAQEKASSEGSETGDGKADEDVVDADFEEVKEEK

SEQ ID NO: 26398 - protein, 300 aa, uncultured marine bacterium 561
MTDGEQRCGYAAIIGRPNVGKSTLLNYALGQKISITSRKPQTTRHQVMGIYTDSGDQVVFVDTPGMHLEQGKAINRYMNRAASSALADVDLVLFVVDRNRWTSEDDLVLEALQHTETPVALVINKIDRLEDQAVLLPWTESIRAKYGFDAIFPISALRQANLPALMTYIRNKMPSGVHFFPEDQVTDRSERFLAAELIREKIVRQLGDEMPYTTAVEIESFKLDGKLLRIDALIYVERQGQKKIVIGEGGSRLRSIGTEARKDMEMAFSGKVMLKLWVKVKSGWSDDERALRSLGFEDGI

SEQ ID NO: 26399 - protein, 340 aa, uncultured marine bacterium 562
MNFIDEAFLEVRAGNGGAGASSFRREKYIPFGGPDGGDGGKGADVVFRVNLNKNTLIDFQNKRVFIAKNGRPGSGKNKTGSAAEDLVIDIPKGTVIYDDISGDELLDCCDDDIEYVLAKGGDGGQGNARFKSSTNQAPRKFTLGFEGEVRFIRLELKSLADVGLVGFPNAGKSTFLNKVSSAKPKIGSYPFTTLRPHLGTIEGSDSSFVIADIPGLIEGASEGAGLGIKFLQHISRTGLLLIFVDLYSTDNLDPIEQIKLLKNELSAYKDDLTQKVSWIVCNKIDLINKDDLEIHSSHIQEELDIAEEDIFFISAATGEGTQKLLQSLEEVISQSKLDLT

SEQ ID NO: 26400 - protein, 371 aa, uncultured marine bacterium 578
MAPIVMKFGGTSLRDEDSRAHALKHIKNYSDAGERIVVVVSAMGRKGEPYATDTLVALLKDVGHNINPRELDLVMSVGETLSSAFFSHLLSHNGMPAASFNGRQSGILTDDNAGNAEILEINPSRIVEALDEGKIAVVAGFQGVNDRGDIRTLGRGGSDTSAVSLASALGAEKVEIFSDVDGIANCDPRQVEASSYLELISVNQMLDMADEGSRVIHPRAIKASLKTKTPIVAKNNFTDSAGTLIHHNKSSEEEVVAIAHRESMVLLEFALEHKAASHVDGIVNIDSKRLLLNDDVYLSDKLAQLEETLGFYKLSRHWTTISVVFNNKVSKKPAGLDYAELLESPNNIIRYLLKESKSRETLKFLHGRYTQ

SEQ ID NO: 26401 - protein, 618 aa, uncultured marine bacterium 578
MSWITKLFPFLLWIKDLSKPKTIKADIIAGVTVGFVIVPQSMAYAQLAGLGPQYGLYASFLPVLIGAIMGSSRQLSTGPVAVVSLLTAAALGEIVTDPSSYAVYAALLALIVGLFQFSLGVLRLGFVINFLSHPVVTGFTNAAAIIIGASQLPKVFGIRVINSNDTEWVSWCQPLSFIERMENVDSNGLHTICNADQSYETIARLLEAALFYTHLPTLAMALMGVLGIIVLQRFFPRMPAILTVAVISIAASFLIDYEAMGGAIVNSIDIDGLFSFKIPSFDFNAMGTLFIYAITISLIGFMEAISVAKSMAATTKQRLDVNQELIGQGLSNIASSFFQGYAVSGSFSRSAVNLTAGAVTGFSSVVTAIIVGLTILWLTPLLYHLPQATLAAIILMSVVNLVHFSPLRHAWKVEKHDGWVGLLTFIMTLIFAPHLENGIAFGIIMSLGLFLYRTMEPNFTELSVQKGSIIASRFIDDTTEVSNAVKIAKWSGSLYFANAAYFETKLLELISKNEELKYIIVDVASIVQVDASGEQVLRNLVESCSDSGVEIIFARTDRLEAELYRSGFKKRFGENRFFDLRADALKHVWQELEANEQEQELDEEQDHILDIDDGLNTA

SEQ ID NO: 26402 - protein, 586 aa, uncultured marine bacterium 580
MATNSQNKIASSSNFIRAKIEKDISNNLYKNKLWNKSPGNSNHQSKGELDKAKIRTRFPPEPNGYLHIGHAKSIFLNFGLAQDFSGACHLRFDDTNPEKEDQEYVDSIIENVKWLGFDWNFNNDTNLYYASNYFDFMYEAATLLIKSGFAYVDQQNADEIRENRGTLTSPGTDSPWRNHPIEEHLKLFEEMRNGKHTDGSMVLRAKINMASPNINLRDPAIYRIKNVSHHKTGNKWSIYPMYTFAHPIEDALEGITHSICTLEFEDQRPFYDWLLKRLKENNFFSDPLPKQYEFARLNLTYVVLSKRRLIELVENEHVSGWDDPRMPTLVGSKRRGYTPSGFKLFADRIGVSKADSWIDYTILEDCMREVLNESAHRRVAVLDPVKLIINNFSDNQEEDCFAPNHPKNKDLGKRTIKLTKELWIDREDFMEVPVAKYFRLSPGAQVRLRYGFVIECTGFEKDVNSNITKIFCDYLPDTKSGTPGADAIKVKGNIHWLSCKYAVNAKVNLYDRLFKEAHPGENNNYLDDLNPNSLTTKEIKIEENLKTIIPGDQYQFERHGYFIADDLSKPDDIILNRTTTLRDNWQ

SEQ ID NO: 26403 - protein, 297 aa, uncultured marine bacterium 580
MASSKIKTRCGTIAIVGQPNVGKSTLLNYFVGSKLSITSRKAQTTRYQLVGIFTDKDTQYIFVDTPGYQLKHLNQMNKSLNKSVNQALKDVDLILFLSEPNELDATDKKILQMIPNSTPILLIINKIDLIKDKSKILALMSEADHLDKFEEIVPTSVKKKNNLLELLESVKKYLPQQPFIYDQDELTDKGERFLAGEIVREKLFRLTGQEVPYSVAVEIEKFEQEGNLRRIFAVIIVDHESLKPMIIGNKGERLKEISKSARLDMEKLFGGKVWLETWVKVKTGWADDVRALKSLGL

SEQ ID NO: 26404 - protein, 379 aa, uncultured marine bacterium 580
MIYLDNNATTALHPEVLKAMLPFLSTQQGNPASNHTFGRSAHTAIEEAREKVAASVNAHPSQVIFTSSGTESNNTIINGIAKAYPESHFGFSSIEHPCISEPIKSLAHQGFKVSEIPVDSNGIFNVSDVSDEMKQSLTFLSVMMANNETGVIQNIAEIADWARDNKIQFHTDAVQALGKIKVDFEALDIDAMTISSHKIYGPQGIAALIINKKIDLFPYMQGGGQEKGLRSGTENIAAIIGFGKACERSSQNRVIFDEKIDLLKSTLEKNLVDLGAIIFCEKSHRLSNTTFFSFKNIDGSTLLTALDRKGFAIASGSACSSKSDEPSHVLLSMGVDLDLAQGALRVSLGVESNENEINDFIDTLKDEVSRLKQLTAVAA

SEQ ID NO: 26405 - protein, 407 aa, uncultured marine bacterium 580
MKNKLYDMPIYMDYSSTTPVDPRVAEKMIPYITEDFGNPASRSHPYGWTAEKAVEDARKEIALLVNADPREIVWTSGATESNNLAIKGASNFYSKKGKHIITLATEHKAVIDAVRECERTGYEATYMEPEPNGLLDIEKFKSTIRPDTVLVSVMFVNNEIGVIQDITTIGNICRENNIIFHVDAAQATGKVKIDLETLPVDLMSFSAHKTYGPKGVGALYVRRKPRIRIEPQMHGGGHERGMRSGTLATHQIVGMGEAFKIAREEMDEENNRIKNLQAKLLKGLTEIEETYVNGDLEKRVPHNLNISFNYVEGESLIMAIKGIAVSSGSACTSASLEPSYVLRALGRSDELAHSSIRFSIGRFTTESDVEFTIALLKEKIGKLRELSPLWEMFKDGVDLEKVEWAEH

SEQ ID NO: 26406 - protein, 446 aa, uncultured marine bacterium 581
MSFSTLGLSESLLKAVADEGYTTPSPIQAQAIPAVLEGRDVMAAAQTGTGKTAGFTLPLLHGLSKGQSAKANQVRALVLTPTRELAAQVAESVDIYGKYLNLRSAVVFGGVKINPQMMRLRKGVDILIATPGRLLDLYQQNAMSFQKLEVLILDEADRMLDMGFIHDIRRIMKALPNKRQNLMFSATFSEDIRDLAKTIVNNPVEISVTPRNSTAVSVTQWIHPVDKNQKRHLLVELINQHNWEQVLVFSRTKRGANRLAEFLEKKDIQAAAIHGNKSQGARTRALSEFKSGKLRVLVATDIAARGLDIEQLPQVVNLDLPEVAQDYVHRIGRTGRAGATGQAISLVSADEAQLLQDIERLIQTLLPRKLVAGYEPESPLPELALRPPAKPKKPKKPKESTPPRTASEKSPTATDKKRHPNDAHSPKRRRSNHRSSPKSARPTGNQ

SEQ ID NO: 26407 - protein, 400 aa, uncultured marine bacterium 582
MALLSDTLARVKPSPTVAMSSKAIEMRAAGRDIISLSAGEPDFDTPENIKSAAIAAILAGKTKYTAPDGIIELKQAICDKFLRDNALRYRPEQVSVGTGGKQVLYNALMATLNPGDEVIIPAPYWVSYPDMVYLAGGEPVILETSVERGFKLSAEALEAAITPRTKWFIFNSPSNPTGAGYHWDELRALTEVLQRHPHVWILSDDIYEHLVYDNFKFCTPAEVAPDLMDRTLTVNGVSKGFAMTGWRIGYAAGPRALIAAMRTIQGQSTSNPCTVSQWAALEALNGPQDYIASNNILFRTRRDLVVAQLNAIDGITCPTPEGAFYVYASIDGLIGKTTAAGVLLANDEAFAMQLLEEANVAIVFGAAFGLSPCFRVSYAASEDTLKAACTRIAEFCAALT

SEQ ID NO: 26408 - protein, 599 aa, uncultured marine bacterium 582
MARASTGSRANEERETSKRIGALAALWPFVRPYRVMMGFAIVALVATATVSLVLPLAVRKVVDNFNADESNLLDQYFAMAIVVVALLAFGTGMRYALVTRLGERVVTDIRKAVFGRVINMSPAFYDNILTGEVLSRITTDTTLILSVIGASVSIALRNMLIFAGGLTMLLLTSVKLTGLLLLIVPIVALPVLTLGRRLRVLSRENQDFIAASSGNASEVLSALQTVQAFTHETASRQTFDRVTEKSFEVAAQRINTRVLMTMIVIYMIFSGVVGVLWIGVHDIRSNAISAGELAQFVIYAILVAGSASALSEIWGELQRAAGATERLVELLQAQDTVTEPKNPLDLSQPLRGEIIFDDVHFRYPARPDRLSLSQINLTINPGETVALVGPSGAGKTTIIQLILRFYDPTSGQVRLDGVNLCDLRRDVFRNVVALVPQDPVVFAASALENIRFGNPEASDEQVYAAARAAVAHEFITQLPDGYDSYLGERGVMLSGGQKQRIAIARAILRDAPVLLLDEATSALDAESEQAVKLAVETLSSDRTTIIIAHRLATVKKADRIVVMDKGQIVDTGTHDELVAKGGLYAHLARLQFTDGAAEV

SEQ ID NO: 26409 - protein, 635 aa, uncultured marine bacterium 583
MAKIIGIDLGTTNSCVAVMDGGTVKIIENSEGNRTTPSIIAYPKDSDEILVGQPAKRQAVTNPENTLYAIKRLIGRRFEEDAVQKDIDLVPYKIIKAKNGDAWVEVKGKKMAAPEISARVIQKMKQTAEDYLGTEVKEAVITVPAYFNDSQRQATKDAGKIAGLDVKRIINEPTAAALAYGVDKVTGDKKVAVYDLGGGTFDVSIIEMEDIDGEKHFEVLSTNGDTFLGGEDFDQRIINHLVEEFKKEQGFDLTKDAMALQRLKEAAEKAKIELSSSEQTEVSLPYITADASGPKHLNIKITRAKLESLVADLLKRSIEPCKIALKDAGLSSGDVDEVLLVGGQTRMPKVQKMVQDFFGKEPKKDLNPDEAVAMGAAIQAGVLGGDVKDVLLLDVTPLSLGIETLGGVMTKLIEKNTTIPTHQSQVFSTAADNQSAVTVHVLQGEREVASANKSLGQFNLEGIAPAPKGQPQIEVTLDLDSDGILHVSAKDKNTGKEQSITIKASSGLSDEEVEKMIKDAETHAEEDKKFQELITTRNMADSLVHSTKQTLEELKDEISDEEKSTIESAVNELEESIKGDDKDDIDAKVQNLSEKAQVLAQKAQEKASAENPEAGNGKADEDVVDADFEEVKEEK

SEQ ID NO: 26410 - protein, 283 aa, Pasteurella multocida
MKPMLKYRGGKSRELSEIKKYIPFFEGRYIEPFFGGGALFFDLEPQNAIINDINISLMDFYRGIRNDFLNVKSELKKIQVEYEKNREEFDFLKKTTLKKHVDDKNEAIYYKMRDIFNGNTKSDLQVATVYYYINKTAYSGMIRYNKDGKFNVPYGRYKNFNTEIITKEHSELLKKSEIYSVNYKDIFAMANEGDFLFLDPPYDCVFSDYGNIETKDGFTEDMHRQLAQDFRRLNAKALMVISKTPLIEELYGDMIVHEYDKAYSVNIRNRFKSEAKHVLITNF

SEQ ID NO: 26411 - protein, 322 aa, Nicotiana sylvestris
MNTPTQSFRAKAAIFSLLLLSCMQCHAQLSATFYDNTCPNALNTIRTSVRQAISSERRMAASLIRLHFHDCFVQGCDASILLDETPSIESEKTALPNLGSARGFGIIEDAKREVEKICPGVVSCADILTVAARDASAAVGGPSWTVKLGRRDSTTASKTLAETDLPGPFDPLNRLISSFASKGLSTRDMVALSGAHTIGQAQCFLFRDRIYSNGTDIDAGFASTRRRQCPQEGENGNLAPLDLVTPNQFDNNYFKNLIQKKGLLQSDQVLFNGGSTDNIVSEYSNSARAFSSDFAAAMIKMGDISPLSGQNGIIRKVCGSVN

SEQ ID NO: 26412 - protein, 1134 aa, Selaginella martensii
MSTTKLTYSSGSSAKSKHSVRVAQTTADAKLHAVYEESGESGDSFDYSKSINATKSTGETIPAQAVTAYLQRMQRGGLVQPFGCMLAVEEGSFRVIAFSDNAGEMLDLMPQSVPSLGSGQQDVLTIGTDARTLFTAAASALEKAAGAVDLSMLNPIWVQSKTSAKPFYAIVHRIDVGLVMDLEPVKASDTRVGSAAGALQSHKLAAKAISRLQSLPGGDIGLLCDTVVEEVRDVTGYDLVMAYKFHEDEHGEVVAEIRRSDLEPYLGLHYPATDIPQASRFLFMKNRVRMICDCSAPPVKITQDKELRQPISLAGSTLRAPHGCHAQYMGNMGSVASLVMAMIINDNDEPSGGGGGGGQHKGRRLWGLVVCHHTSPRSVPFLRSACEFLMQVFGLQLNMEAAVAAHVREKHILRTQTLLCDMLLRDAPIGIVSQSPNIMDLVKCDGAALYYGKRFWLLGITPSEAQIKDIAEWLLEHHKDSTGLSTDSLADAGYPGAASLGDEVCGMAAAKITAKDFLFWFRSHTAKEVKWGGAKHDPDDKDDGRKMHPRSSFKAFLEVVKRRSLPWEDVEMDAIHSLQLILRGSFQDIDDSDTKTMIHARLNDLKLQGMDELSTVANEMVRLIETATAPILAVDSSGFINGWNAKVADVTGLPVTEAMGRSLAKELVLHESADMVERLLYLALQGDEEQNVELKLKTFGGQKDKEAVILVVNACASRDVSDNVVGVCFVGQDVTGQKVVMDKFTRIQGDYKAIVQNPNPLIPPIFGADEFGYCSEWNPAMEKLSGWRREEVLGKMLVGEIFGIQMMYCRLKGQDAVTKFMIVLNSAADGQDTEKFPFAFFDRQGKYVEALLTATKRADAEGSITGVFCFLHIASAELQQALTVQRATEKVALSKLKELAYIRQEIKNPLYGIMFTRTLMETTDLSEDQKQYVETGAVCEKQIRKILDDMDLESIEDGYLELDTTEFMMGTVMDAVISQGMITSKEKNLQLIRETPKEIKAMFLYGDQVRLQQVLADFLLNAIRFTPSSENWVGIKVATSRKRLGGVVHVMHLEFRITHPGVGLPEELVQEMFDRGRGMTQEGLGLSMCRKLVKLMNGEVEYIREAGKNYFLVSLELPLAQRDDAGSVKFQASS

SEQ ID NO: 26413 - protein, 502 aa, Secale cereale
MDGGGEHSEALKNYYLGKILGVGTFAKVIIAEHKHTRHKVAIKVLNRRQMRAPEMEEKAKREIKILRLFIDLIHPHIIRVYEVIVTPKDIFVVMEYCQNGDLLDYILEKRRLQEDEARRTFQQIISAVEYCHRNKVVHRDLKPENLLLDSKYNVKLADFGLSNVMHDGHFLKTSCGSLNYAAPEVISGKLYAGPEIDVWSCGVILYALLCGAVPFDDDNIPNLFKKIKGGTYILPIYLSDLVRDLISRMLIVDPMKRITIGEIRKHSWFQNRLPRYLAVPPPDMMQQAKMIDEDTLRDVVKLGYDKDHVCESLCNRLQNEETVAYYLLLDNRFRATSGYLGAHYQQPMESASPSTRSYLPGSNDSQGSGLRPYYRVERKWALGLQQSRAPPRAIMIEVLKALKELNVCWKKNGDCYNMKCRWCPGFPRVSDMLLDANHSFVDDCAIKDNGDANSRLPAVIKFEIQLYKTKDDKYLLDMQRVTGPQLLFLEFCAAFLTNLRVL

SEQ ID NO: 26414 - protein, 65 aa, Bacillus subtilis
MFVDQVKVYVKGGDGGNGMVAFRREKYVPKGGPAGGDGGKGGDVVFEVDEGLRTLMDFRYKKHFK

SEQ ID NO: 26415 - protein, 231 aa, Photobacterium damselae subsp. piscicida
SLHACRSTLEDLNENAPRAMAVLDPVKIVIENFDGEAETLNIANHPNKPEMGSREVPFTREVYIEREDFREEANKKYKRLVLGKEVRLRGAYVIKAERVEKDEAGNITTIYCTYDNETLGKNPADGRKVKGVIHWVSADQSVPAEIRLYDRLFTVPNPSAAEDFVSVINPESLTVMNGFVEPALVNAQAEQAYQFERLGYFCADSKDSSADKLVFNRTVGLRDTWAKIADE

SEQ ID NO: 26416 - protein, 186 aa, Campylobacter jejuni
MFIFFLKKLYYNVFMKTKALFLDRDGVINIDKKYVYKIEDFEFCDGIFELCRYFLARNYLLFIATNQSGIARGYYKESDFFKLCDYMLKEFAKQDIKIDKIYHCPHLEGCECRKPKAGMLLKAKDEFDLDMKNSIFIGDNLSDMQAGLNADIGTLILVNEEKKEGDFFRQFKNLKEILSFFKEKDI

SEQ ID NO: 26417 - protein, 541 aa, Pichia angusta
MKLSMSVLALVATCIGSAQAAAIKKDTAGQHPLGMNSKFGDVFVEKGKSLLDRVSEVVSESSKNISPELRDIWNEMEAKFPDTLKNMKLKSEPVVKITKKPADFWDFNVFNEKFSNYKLRVKKTDPGALGLDHTRQYSGYLDVEDEDKHFFYWMFESRNDPANDPVILWLNGGPGCSSLTGMLFELGSASIGPDLKPINNPYSWNSNATVIFLDQPVNVGFSYSSKSVSNTVAAGKDVYAFLELFYQQFPHLLKNDFHIAGESYGGHYIPVFASEILTHADRSFNLTSVLIGNGLTDPLNQYPFYERMACSTDGGYEPTLDESECEGMLETLPRCLSLIESCYSSQSVFSCVPASIYCNNAQLGPFQKTGRNVYDVRKMCEGTLCYKDMEYIDQYLNQDFVKEKIGAEVETYESCNFDVNRNFLFAGDWMKPYHKNVINLLEQGLPVLIYAGDKDFICNWLGNQAWSNELPWSGHEEFESAELYNLTLKDGTKVGEVKNAGKFTFARMFDGGHMVPYDQPESSLAMVNRWIAGDYSLGTKK

SEQ ID NO: 26418 - protein, 391 aa, Pseudomonas abietaniphila
MKDIVIVDAVRTPVGRFRGSLAGVRADHLGALVLNALVERNDLSPTVIDDVVFGCVTQIGEQSANIARTALLGAGWPVSIPGLTLDRKCGSGEAAVHVAAGAIASGMAEAVVAGGAENMSRVPMGSNRDLHGEAFGWMASERYELTSQGEAAERIVDKWKLSRDALDDYAFASHERAAKASDAGYFDSQLIPVPVESLREKTLTEPAVTLVADETIRRDTSREKLSTLKTSFRPENGRITAGNSSQISDGAAALLIMDAEAARRHGLRTRARIVAFATVGTDPTLMLTGPIEATAKVLRKAGLQLKDIDLFEVNEAFASVPLAWMHETGVSHERLNVNGGAIALGHPLGASGARLITTLLNELERRGARYGLQAICCAGGLGTATIIERLE

SEQ ID NO: 26419 - protein, 157 aa, Capsicum annuum
MGFLSFLGRVFFASVFILSAWQMFNEFGDDGGPAAKELAPKVAGLQDLLESKLGAGVPKIDVRHVVAAFMALKGMGGLLFVFGSFTGAVLLMFYLTMATPLLHDFYHYKFGEPQYFIVLQEFLQGLALFGALLYFVGMKNSINRRLPKKKTLKSKTA

SEQ ID NO: 26420 - protein, 159 aa, Capsicum annuum
MSDEEHHFESKADAGASKTYPQQAGTIRKNGYIVIKGRPCKVVEVSTSKTGKHGHAKCHFVAIDIFNGKKLEDIVPSSHNCDVPHVNRTDYQLIDISEDGFVSLLTENGNTKDDLRLPTDDTLLSQVKGGFEEGKDLVLSVMSAMGEEQICAVKDIGKN

SEQ ID NO: 26421 - protein, 239 aa, Capsicum annuum
HEPKWNYDGSSTGQAPGEDSEVILYPQAIFRDPFRRGNNILVMCDAYTPAGEPIPTNKRHAAAKIFSHPDVVAEETWYGIEQEYTLLQREVNWPLGWPIGGFPGPQGPYYCGTGADKAFGRDIVDAHYKACLYAGINISGINGEVMPGQWEFQVGPAVGISSGDEVWVARYILERIAEIAGVVVSFDPKPIPGDWNGAGAHTNYSTKSMREDGGYEVIKKAIEKLSLKHKEHIAAYGEG

SEQ ID NO: 26422 - protein, 354 aa, Triticum aestivum
MASLADLVNLDLSDCTDKIIVEYLWVGGSGIDIRSKARTVNGPITDASQLPKWNYDGSSTGQAPGEDSEVILYPQAIFKDPFRRGDNLLVMCDCYTPQGVPIPTNKRHNAAKIFNTPKVAAEETWYGIEQEYTLLQKDVNWPLGWPIGGYPGPQGPYYCAAGADKAFGRDIVDAHYKACLYAGINISGINGEVMPGQWEFQVGPSVGIAASDQLWVARYILERITEVAGVVLSLDPKPIPGDWNGAGAHTNYSTKSMREAGGYEVIKTAIEKLGKRHAQHIAAYGEGNERRLTGHHETADINTFKWGVADRGASVRVGRDTEKDGKGYFEDRRPASNMDPYVVTSMIAETTLLL

SEQ ID NO: 26423 - protein, 354 aa, Triticum aestivum
MASLADLVNLDLSDCTDKIIVEYLWVGGSGIDIRSKARTVNGPITDASQLPKWNYDGSSTGQAPGEDSEVILYPQAIFKDPFRRGDNLLVMCDCYTPQGVPIPTNKRHNAAKIFNTPNVAAEETWYGIEQEYTLLQKDVNWPLGWPIGGYPGPQGPYYCAAGADKAFGRDIVDAHYKACLYAGINISGINGEVMPGQWEFQVGPSVGIAASDQLWVARYILERITEVAGVVLSLDPKPIPGDWNGAGAHTNYSTKSMREAGGYGVIKTAIEKLGKRHAQHIAAYGEGNERRLTGHHETADINTFKWGVADRGASIRVGRDTEKDGKGYFEDRRPASNMDPYVVTSMIAETTLLL

SEQ ID NO: 26424 - protein, 362 aa, Triticum aestivum
MSPLADLLSLDLSGCTGKIIAEYIWVGGTGMDVRSKARTLPGPVEDPSKLPKWNFDGSSTGQATGDDSEVILCPQAIFKDPFRRGNNILVICDCYAPNGEPIPSNKRYNAARIFGHPDVKAEEPWYGIEQEYTLLQKDTNWPIGWPLGGYPGPQGPYYCAAGAEKSYGRDIVDAHYKACLYAGINIGGINAEVMPGQWEFQVGPSVGISAGDELWAARYILERITEIAGVVVSFDPKPIPGEWNGAGAHTNYSTKSMRSEGGYEVIKKAIQKLEARHMEHIAAYGEGNERRLTGRHETADINTFVWGVANRGASVRVGRDTEKEGKGYFEDRRPASNMDPYVVTSMIAETTILSKAGLSNGK

SEQ ID NO: 26425 - protein, 362 aa, Triticum aestivum
MSPLADLLSLDLSGCTGKIIAEYIWVGGTGMDVRSKARTLPGPVDDPSKLPKWNFDGSSTGQATGDDSEVILCPQAIFRDPFRKGNNILVICDCYAPNGEPIPSNKRYNAARIFGHPEVKAEEPWYGIEQEYTLLQKDTNWPIGWPLGGYPGPQGPYYCAAGAEKSYGRDIVDAHYKACLYAGINIGGINAEVMPGQWEFQVGPSVGISAGDELWAARYILERITEIAGVVVSFDPKPIPGEWNGAGAHTNYSTKSMRSEGGYEVIKKAIKKLEARHMEHIAAYGEGNERRLTGRHETADINTFVWGVANRGASVRVGRDTEKEGKGYFEDRRPGSNMDPYVVTSLIAETTILCKAGLSNGK

SEQ ID NO: 26426 - protein, 385 aa, Brassica juncea
NKKLFWIPAMAPLISVILATLIVYLTNSETRGVKIVKHIKPGFNRPSVNQLQFNGQHLGQVAKIGIICAIIALTEAIAVGRSFATIKGYRLDGNKEMMAMGFSNIAGSLTSCYVATGSFSRTAVNFSAGCETVVSNIVMAITVMVSLEVLTRFLYFTPTAILASIILSALPGLIDISGALHIWKLDKLDFLVLLAAFLGVLFASVEIGLLLAVGISFTRIILSSIRPTVEALGRLSKTDIFGDVNQYPMANKTEGLLTLRISSPLLCFANANFIRDRILNSVQNVEEEEDVGQEVKKEKVLQVVILDMSCVISVDTSGVVALEELYQELASNDTRLVIASPRWRVLHKLKRAKLDDNMKKEKIFMTVGEAVDFYVRARTTLHDMC

SEQ ID NO: 26427 - protein, 222 aa, Picea mariana
MGRGKIEIKRIENTTNRQVTFCKRRNGLLKKAYELSVLCDAEVALIVFSSRGRLYEFANHSVKRTIERYKKTCVDNNHGGAISESNSQYWQQEAGKLRQQIEILQNANRHLMGDGLTALNIKELKQLEVRLEKGIGRVRSKKNEMLLEEIDIMQRREHILIQENEILRSKIAECQNSHNTSMLSAPEYDALPAFDSRNFLHANLIDAAHHYAHQEQTTLQLG

SEQ ID NO: 26428 - protein, 222 aa, Picea mariana
MGRGKIEIKRIENTTNRQVTFCKRRNGLLKKAYELSVLCDAEVALIVFSSRGRLYEFANHSVKRTIERYKKTCVDNNHGGAISESNSQYWQQEAGKLRQQIEILQNANRHLMGDGLTALNIKELKQLEVRLEKGIGRVRSKKNEMLLEEIDIMQRREHILIQENEILRSKIAECQNSHNTNMLSAPEYDALPAFDSRNFLHANLIDAAHHYAHQEQTTLQLG

SEQ ID NO: 26429 - protein, 218 aa, Picea mariana
KIEIKRIENTTNRQVTFCKRRNGLLKKAYELSVLCDAEVALIVFSSRGRLYEFANHSVKRTIERYKKTCVDNNHGGAISESNSQYWQQEAGKLRQQIEILQNANRHLMGDGLTALNIKELKQLEVRLEKGIGRVRSKKNEMLLEEIDIMQRREHILIQENEILRSKIAECQNSHNTNMLSAPEYDALPAFDSRNFLHANLIDAAHHYAHQEQTTLQLG

SEQ ID NO: 26430 - protein, 204 aa, Capsicum annuum
MKVGNSKCNGVNNNKDVHYRGVRKRPWGRYAAEIRDPGKKSRVWLGTFDTAEEAAKAYDAAAREFRGCKAKTNFPLPSENQNGSDSGSPDESFSGENRAHAPSEFELTRCLGAGGEGVGNGGRLAEVGLVRNGDTIVHAPTELDLTRLLGAGGEGGDNSGYSAEVGLVRNGFPIFHHQPPIEAPMMSNRSSPAESYSGETIINT

SEQ ID NO: 26431 - protein, 99 aa, Saccharomyces cerevisiae
MAATKEAKQPKEPKKRTTRRKKDPNAPKRGLSAYMFFANENRDIVRSENPDVTFGQVGRILGERWKALTAEEKQPYESKAQADKKRYESEKELYNATRA

SEQ ID NO: 26432 - protein, 634 aa, Agrobacterium tumefaciens
MAKVIGIDLGTTNSCVAVMDGKDTKVIENAEGARTTPSMVAFSDDGERLVGQPAKRQAVTNPTNTLFAVKRLIGRRYEDPTVEKDKALVPFEIVKGDNGDAWVKAQDKNYSPSQISAMILQKMKETAESYLGEKVEKAVITVPAYFNDAQRQATKDAGRIAGLDVLRIINEPTAAALAYGLDKKDGKTIAVYDLGGGTFDISVLEIGDGVFEVKSTNGDTFLGGEDFDMRLVEYLAGEFKKDQGIDLKNDKLALQRLKEAAEKAKIELSSSQQTEINLPFITADASGPKHLTLKLTRAKFESLVDDLVQRTVAPCKAALKDAGVTAAEIDEVVLVGGMSRMPKVQEVVKQLFGKEPHKGVNPDEVVAMGAAIQAGVLQGDVKDVLLLDVTPLSLGIETLGGVFTRLIDRNTTIPTKKSQTFSTAEDNQSAVTIRVSQGEREMAQDNKLLGQFDLVGLPPSPRGVPQIEVTFDIDANGIVQVSAKDKGTGKEQQIRIQASGGLSDADIEKMVKDAEANAEADKKRRAGVEAKNQAESLIHSTEKSVKEYGDKVSETDRKAIEDAIASLKTAVEASEPDADDIQAKTQTLMEVSMKLGQAIYEAQQAEAGDASAEGGKDDVVDADYEEIKDDKKSA

SEQ ID NO: 26433 - protein, 356 aa, Nicotiana attenuata
MAHLSDLVNLNLSDSTQKIIAEYIWIGGSGMDVRSKARTISGPVDDPSKLPKWNYDGSSTGQAPGEDSEVILYPQAIFKDPFRRGNNILVICDCYTPAGEPIPTNKRHNAAKIFSHPDVVVEEPWYGLEQEYTLLQKDINWPLGWPLGGFPGPQGPYYCGIGAGKAFGRDIVDSHYKACLYAGINISGINGEVMPGQWEFQVGPSVGISAADELWAARYILERITEIAGVVVSFDPKPIPGDWNGAGAHTNYSTKSMRNEGGYEVIKKAIDKLGLRHKEHIAAYGEGNERRLTGRHETADINTFKWGVANRGASIRVGRDTEKEGKGYFEDRRPASNMDPYVVTSMIAETTILFKP

SEQ ID NO: 26434 - protein, 432 aa, Nicotiana attenuata
MAQILAPSAQWQMRMTKSSTDANPLTSKMWSSVVLKQNKRLAVKSSAKFRVFALQSDSGTVNRVEQLLNLDVTPYTDKIIAEYIWIGGSGIDMRSKSRTISKPVKHASELPKWNYDGSSTGQAPGEDSEVILYPQAIFKDPFRGGNNILVICDAYTPAGEPIPTNKRHKAAQIFSDSKVVSEVPWFGIEQEYTLLQQNVKWPLGWPVGGYPGPQGPYYCGAGADKSFGRDISDAHYKACLYAGINISGTNGEVMPGQWEFQVGPSVGIEAGDHIWCARYILERITEQAGVVLSLDPKPIEGDWNGAGCHTNYSTLSMREEGGFEVIKKAILNLSLRHKEHISAYGEGNERRLTGKHETASIDKFSWGVANRGASIRVGRDTEKQGKGYLEDRRPASNMDPYVVTGLLAETTILWEPTLEAEALAAQKLALNV

SEQ ID NO: 26435 - protein, 482 aa, Solanum chacoense
MEVEVEAAAAAAEREATNSVICQLADPEGNPLGAALYLPENASPKELNQVVNKLLSNEEKLPYAFYISDEELVVQLGSYLEKNKVSVEKVLTIVYQPQAVFRIRPVTRCSATIAGHTEAVLSVAFSPDGRQLASGSGDTTVRLWDLNTQTPLFTCQGHRNWVLSVAWSPDGKHLVSGSKAGELICWDLQTGKPLGNPLTGHKKWITGISWEPVHLSAPCRRFVSASKDGDARIWDVTTRKCLICLTGHTLAITCVKWGGDGVIYTGSQDCTIKVWETTQGKLIRELKGHGHWVNSLALSTEYVLRSGAFDHTNKHFASPEEMKKVALERYNKMRGNAPERLVSGSDDFTMFLWEPAVSKHPKTRMTGHQQLVNHVYFSPDGQWIASASFDKSVKLWNGTTGKFVAAFRGHVGPVYQISWSADSRLLLSGSKDSTLKVWDIRTKKLKQDLPGHADEVFAVDWSPDGEKVASGGKDRVLKLWMG

SEQ ID NO: 26436 - protein, 618 aa, Clostridium perfringens
MSKIIGIDLGTTNSCVAVMEGGEPVVITNSEGARTTPSVVSFQANGERLVGQVAKRQAITNPDKTIMSIKRHMGTDYKVNIDGKDLSPQEISAMILQKLKADAEAYLGEKVTEAVITVPAYFNDAERQATKDAGRIAGLDVKTIINEPTAASLAYGLDKMDSAHKILVYDLGGGTFDVSILDLGDGVFEVVSTNGDARLGGDDFDQRIIDYIAEDFKGENGIDLRQDKMALQRLKEGRQKAKIELSSSTQTLINLPFITADATGPKHIDMTLTRAKFNELTHDLVERTINIMKEALKSGNVSLNDIDKVILVGGSTRIPAVQEAVKNFTGKEPSKGVNPDECVAMGAAIQAGVLTGDVKDVLLLDVTPLTLGIETLGGVATPLIERNTTIPARKSQILSTAADNQTSVEIHVVQGERQMAADNKTLGRFTLSGIAPAPRGIPQIEVAFDIDANGIVKVSATDKATGKEANITITASTNLSDAEIDKAVKEAEQFAEEDKKRKEAIEVKNNAEQTVYQTEKTLNELGDKVSAEEKSEIEAKIEVKKVKDGDDIQAIKKAMEDLTQAFYKVSEKLYQQNGGAQGQGFDPIIMGGANAGAGATNNNDDNVVDADFEVQDDK

SEQ ID NO: 26437 - protein, 568 aa, Escherichia coli
MTTTDNKAFLNELARLVGSSHLLTDPAKTARYRKGFRSGQGDALAVVFPGSLLELWRVLKACVTADKIILMQAANTGLTEGSTPNGNDYDRDVVIISTLRLDKLHVLGKGEQVLAYPGTTLYSLEKALKPLGREPHSVIGSSCIGASVIGGICNNSGGSLVQRGPAYTEMSLFARINEDGKLTLVNHLGIDLGETPEQILSKLDDDRIKDDDVRHDGRHAHDYDYVHRVRDIEADTPARYNADPDRLFESSGCAGKLAVFAVRLDTFEAEKNQQVFYIGTNQPEVLTEIRRHILANFENLPVAGEYMHRDIYDIAEKYGKDTFLMIDKLGTDKMPFFFNLKGRTDAMLEKVKFFRPHFTDRAMQKFGHLFPSHLPPRMKNWRDKYEHHLLLKMAGDGVGEAKSWLVDYFKQAEGDFFVCTPEEGSKAFLHRFAAAGAAIRYQAVHSDEVEDILALDIALRRNDTEWYEHLPPEIDSQLVHKLYYGHFMCYVFHQDYIVKKGVDVHALKEQMLELLQQRGAQYPAEHNVGHLYKAPETLQKFYRENDPTNSMNPGIGKTSKRKNWQEVE

SEQ ID NO: 26438 - protein, 669 aa, Schizosaccharomyces pombe
MTVLVPLRRLDTRAAFSSYGREIALQKRFLNLNSCSAVRRYGTGFSNNLRIKKLKNAFGVVRANSTKSTSTVTTASPIKYDSSFVGKTGGEIFHDMMLKHNVKHVFGYPGGAILPVFDAIYRSPHFEFILPRHEQAAGHAAQAYSRVTKKPGVVLVTSGPGATNVITPIADALADGTPLVVFSGQVATSAIGSDAFQEADMVGISRSCTKWNVMVKDVADLPRRIDEAFEIATSGRPGPVLVDLPKDVTASVLKEPIPILSSVPSMNRRMKEVLEEGSKNVTAKIDRVGNLLKLAKKPVIFCGHGVLANPECPTLLRKFSERLQIPVTTSLLGLGAVDERSDLSLHMLGMHGSGYANMAMQEADLILALGVRFDDRVTGNVSLFAPQARLAAAEERGGIIHFDISPKNIGKVVQPTEAIEGDVYESLKLLDSATKNIKIPSRFDWLSQIQTWKERFPFTFTRSAPGELVKPQEVIQELDKQTSDIKDKVTITTGVGAHQMWAATFYRWTKPSSLVTSGGLGTMGFGLPAAIGASVAAPKDIVIDIDGDASFSMTGMELATVRQFDIPVKILILNNEEQGMVTQWQNLFYEKRYSHTHQKNPNFVKLADAMGIKALRVEKREDLAKKMKEFLSTKGPVLMEVLVAQKEHVYPFVPGGKALHQFILHESLS

SEQ ID NO: 26439 - protein, 392 aa, Pseudomonas sp. 61-3
MNEVVIVAATRTAIGSFQGALSAIPATELGAAVIRRLLEQTGIDAAQIDEVILGQVLTAGAGQNPARQTAIKAGLPHTTPALTLNKVCGSGLKAVHLAVQAIRCGDAELVIAGGQENMSLAPYVLPKARTGLRMGHAQLQDSMIQDGLWDAFNDYHMGITAENLAQKYEISREAQDAFSAASQQKAAAAIEGGRFQSEITPILIPQRKGEPLVFDTDEQPRIDSTAQALAKLKPAFQKDGSVTAGNSSTLNDGAAVLLLASAAKAQELGLPVLARIKAYASAGVDPSIMGIGPVPATRLTLQKAGWSIEDLDLIEANEAFAAQSLAVGKELGWDTSKVNVNGGAIALGHPIGASGARILVSLVHELIRRDGKKGLATLCIGGGQGVGLAIER

SEQ ID NO: 26440 - protein, 218 aa, Antirrhinum majus
MVRGKTQMRRIENATSRQVTFSKRRNGLLKKAFELSVLCDAEVSLIIFAPRGKLYEFASSSMQDTIERYQCHTKELQANNPPAEHNIQHVRHEAASLMKKIEQLETSKRKLLGEGLGTCTFEELQQLEQQLERSVATIRARKTQMFKQQIEQLKEKGKSLAAENAMLHQKIGVEQQQVPALNLQKAVMGSSEISEVSDVETELFIGLRETRAKRPLQQ

SEQ ID NO: 26441 - protein, 453 aa, Kluyveromyces lactis
MKWIYTFIAAVSATVTFHPENVEYSLSAKELDPASLGIDTVNQWSGYLDYQDKKHSFYWFFESRNDPANDPVILYLNGGPGCSSMDNLFFETGPASIGPDLKPIHNPYSWNNNASIIFLDQPVNVGFSYSEERVKTTNDAARDVYNFLDLFFTKFPNLTANAFHIAGESYAGHYIPRIAHEIVSVHKDDTKFNLSSIVIGNGLTDPLVQNQYFKPMACGEGGYPAILNPSKCRTMSVSNLACKGLTSLCSKTKLTPGRAYLLLHFCWKSLIQPAFDSAVNPCDIRGPCEDPESGLCWKTLGYIRSYLNQEFVQDALGTKVSSYNGCNTSVGSDFFLTGDNSRPFQQYVTELLDLNIPVLIYAGDTDYICNWLGNMAWTDALTWKDHISYETLPLNPWYSLNGSVQFGEVKNHGPFTFLRVFEAGHTVPYYQPLATMEMINRWISGDLSLGYSN

SEQ ID NO: 26442 - protein, 190 aa, Gerbera hybrid cultivar
MEKRPNNSSQDVEVRKGPWTMEEDLILINYIANHGEGVWNSLARSAGLKRTGKSCRLRWLNYLRPDVRRGNITPEEQLLIMELHAKWGNRWSKIAKHLPGRTDNEIKNYWRTRIQKHIKQVENFSGQTSSGQNDQATMSSTQTCNVVNPMETYSPPYDNFQNFSGPFPTETNENMWSMEDLWSMQLLNSE

SEQ ID NO: 26443 - protein, 250 aa, Gerbera hybrid cultivar
MGAEARSGLRKGAWTAEEDMLLKNCIERYGEGKWHLVPLKAGLNRCRKSCRLRWLNYLRPNIKRGDFGEDEIDLIIRLHKLLGNRWSLIAGRIPGRTANDVKNWWNTHLRSRHQQQQKVHQEDELSQDTTVAIIKPQPRTFSKTLNWFGNRQSVKDHVDINIIKSSSASDTNNISAPPELIASPKILDDAINECRQKLFDGDEKEVDIDGHVRWSFTPADEEPLNIVDQENGHDSLLDFPIDEVVWDLLN

SEQ ID NO: 26444 - protein, 227 aa, Listeria ivanovii
MLISMVGYPKDVETLYLGEAGFLNHLKPGSIAIDMTTSSPALAKKMAQVGSEKGIGVLDAPVSGGDIGAKNGTLAIMVGGDEAIFLKAEPIFAILGSSAILQGEAGSGQHTKMVNQIAIASNMIGVTEAIIYAEKAGLNPSRVLESIPGGAAGSWSLTNLIPRVLKDDFSPGFFIKHFIKDMGIAISEAQQMGLELPGLMLAEKMYETLAERGLSEEGTQALIKYYR

SEQ ID NO: 26445 - protein, 380 aa, Listeria ivanovii
QNRWRPELHDIQVSGIRAFNTRVTGIPDMIRLTLGEPDFPTPEHVKQAAIQAIQDNFTNYTPNAGMPELLEAASTYFQEKYNLEYNTNEIIVTVGATEAISVALQTILEPGDEVILPDPIYPGYEPLITLNKAHPIRIDTTETNFKLTPTQLRKHITPKTKALIIPYPSNPTGVSLTKEELVDLANVLREAGIFVIADEIYSELIYHEEHASIAPMLREQTIVINGLSKSHAMIGWRIGFLLAPEIITKQMLKIHQYSVTCASSISQKAALEAITNGKDDAFQMRTEYKTRANFTQDRLEKMGFTVVPPDGAFYFFVKLPDEITENSFDWAVKLAEEAKVAVVPGNAFSEKGDRFFRLSYATSFNKLAEALDRMAAFLSK

SEQ ID NO: 26446 - protein, 151 aa, Triticum aestivum
MAGRDRDPLVVGRVVGDVLDPFIRTTNLRVTFGNRTVSNGCELKPSMVAQQPRVEVGGNEMRTFYTLVMVDPDAPSPSDPNLREYLHWLVTDIPGTTGASFGQEVMCYESPRPTMGIHRFVLVLFLQLGRQTVYAPGWRQNFNTRDFAELY

SEQ ID NO: 26447 - protein, 159 aa, Capsicum frutescens
MSMIPSFFGGRRSNIFDPVSLDLWDPFEGFPISSTIANTPSSARETSAFPNARIDWKETPQAHIFKVDVPGIKREEVKVQVEEGRILQITGERSREQEEKNDQWHRMERSSGKFLRRFRLPENTKMGEIKAAMENGVLTVTVPKEEEKRSEVKAIDISG

SEQ ID NO: 26448 - protein, 392 aa, Acridocarpus adenophorus
DLEPVNPADVPVTAAGALKSYKLAAKAISRLQSLPSGDISLLCDVLVKEVRDLTGYDRVMAYKFHEDEHGEVVSECRRSDLEAYLGLHYPATDIPQASRFLFMKNKVRMICDCLAPPVKVIQDERLPQPLSLCGSTLRSPHGCHAQYMENMGTIASLVMSVSINEDDDMMDGDQQQMPRKLWGLVVCHHTSPRFVPFPLRYACEFLIQVFGVQINKEVELAAQVREKHILRIQTLLCDMLFRDAPVAIITQSPNVMDLVKCDGAALYYKNKFWLLGITPTEAQIRHIVEWLLECHSGNTGLSTDSLMEAGYPGASVLGDAVCGMAAVGITSRDFLFWFRSHTAKEIKWGGAKHDPDDKDDGTKMHPRSSFKAFLEVVKWRSLPWEDVEMDAI

SEQ ID NO: 26449 - protein, 392 aa, Acridocarpus chevalieri
DLEPVNPADVPVTAAGALKSYKLAAKAISRLQSLPSGNIFLLCDVLVKEVRDLTGYDRVMVYKFHEDEHGEVVSECRRSDLEAYLGLHYPATDIPQASRFLFMKNKVRMICDCLAPPIKVIQDERLPQPLSLGASTLRSPHGCHAQYMANMGTIASLVMSVTINEDDDMMDGEQQQMARKLWGLVVCHHTSPRFVPFPLRYACEFLIQVFGVQINKEVELAAQVREKHILQIQTLLCDMLLRDAPVAIITQSPNVMDLVKCDGAALYYKKKFWLLGITPTEAQIRDIVEWLLEFHSGNTGLSTDSLMEAGYPGASVLGDAVCGMAAVSITSKDFLFWFRSHTAKEIKWGGAKHDPDDKDDGRKMHPRSSFNAFLEVVKWRSLPWEDIEMDAI

SEQ ID NO: 26450 - protein, 392 aa, Acridocarpus excelsus
DLEPVNPADVPVMATGALKSYKLAAKAISRLQSLPSGDISLLCDVLVKEVRDLIGYDRVIVYKFHEDEHGEVVSECCRSDLEAYLGLHYPTMDIPQASRFLFMKNKVRMICDCLAPLVKVIQDERLHQPLSLYGSTLRSPHGCHAQYMANMGTIASLVMSVTINEDDDMMDGDQQQMPRKLWGLVVCHHTSPRFVSFPLRYACEFLIQVFGVQINKEVELAAQVREKHILRIQTLLCDMLLRDAPVAIITQSSNVMDLVKCDGVALYYKNKFWLLGITPTEAQISDKVEWLLECHSGNTGLSTDSLMEAGYPGASVLGDAVCGMAVVGITSRDFFFWFRSHTTKEIKWGDAKHDPDDKDDGTKIHHRSSFKAFLKVVKWRSLPWEDVEMDAI

SEQ ID NO: 26451 - protein, 392 aa, Acridocarpus orientalis
DLEPVNPADVPVTAAGALKSYKLAAKAISRLQSLPSGNISLLCDVLVKEVRDLTGYDRVMVYKFHEDEHGEVVSECRRSDLEAYLGLHYPATDIPQASRFLFMKNKVRMICDCLAPPIKVIQDERLPQPLSLGGSTLRSPHGCHAQYMANMGTIASLVMSVTINEDDDMMDGDQQQMARKLWGLVVCHHTSPRFVPFPLRYACEFLIQVFGVQINKEVELAAQVREKHILQIQTLLCDMLLRDAPVAIITQSPNVMDLVKCDGAALYYKKKFWLLGITPTEAQIRDIVEWLLEFHSGNTGLSTDSLMEAGYAGASVLGDAVCGMAAVSITSKDFLFWFRSHTAKEIKWGGAKHDPDDKDDGRKMHPRSSFKAFLEVVKWRSLPWEDVEMDAI

SEQ ID NO: 26452 - protein, 392 aa, Acridocarpus smeathmannii
DLEPVNPADVPVTAAGALKSYKLAAKAISRLQSLPSGNISLLCDVLVKEVRDLTGYDRVMVYKFHEDEHGEVVSECRRSDLEAYLGLHYPATDIPQASRFLFMKNKVRMICDCLAPPIKVIQDKRLPQPLSLCGSTLRSPHGCHAQYMANMGTIASLVMSVTINEDDVMMDGDQQQMARKLWGLVVCHHTSPRFVPFPLRYACEFLIQVFGVQINKEVELAAQVREKHILQIQTLLCDMLLRDAPVAIITQSPNVMDLVKCDGAALYYKKKFWLLGITPTEAQIRDIVEWLLEYHSGNTGLSTDSLMGAGYPGASVLGDAVCGMAAVSITSKDFLFWFRSHTAKEIKWGGAKHNPDDKDDGRKMHPRSSFNAFLEVVKWRSLPWEDVEMDAI

SEQ ID NO: 26453 - protein, 392 aa, Acridocarpus zanzibaricus
DLEPVNPADVPVTAAGALKSYKFAAKAISRLQSLPSGNISLLCDVLVKEVRDLTGYDRVMVYKFHEDEHGEVVSECRRSDLEAYLGLHYPATDIPQASRFLFMKNKVRMICDCLAPPIKVIQDERLPQPLSLGGSTLRSPHGCHAQYMANMGTIASLVMSVTINEDDDMMDGDQQQMARKLWGLVVCHHTSPRFVPFPLRYACEFLIQVFGVQINKEVELAAQVREKHILQIQTLLCDMLLRDAPVAIITQSPNVMDLVKCDGAALYYKKKFWLLGRTPTEAQIRDIVEWLLEFHSGNTGLSTDSLMEAGYPRASVLGDAVCGMAAVSITSKDFLFWFRSHTAKEIKWGGAKHDPDDKDDGRKMHPRSSFKAFLEVVKWRSLPWEDMEMDAI

SEQ ID NO: 26454 - protein, 392 aa, Camarea axillaris
DLEPVNPADVPVTAAGALKSYKLVAKAISRLQSLPSGNISLLCDVLVKEVRDLTGYDRVMVYKFHEDEHGEVVSECRRSDLESYLGLHYPATDIPQASRFLFMKNKVRMICDCLAPPVKVIQDERLPQPLSLCGSTLRSPHGCHAQYMTNMGTIASLVMSVTVNEDDDTMDGDQQHMTKKLWGLVVCHHASPRFVPFPLRYACEFLIQVFGVQINKEVELAAQVREKHILQIQTMLCDMLLRDAPVAIITQSPNVMDLVKCDGAALYFKNKTWLLGVTPTEEQIRGIAEWLLEYHSGNTGLSTDSLMEAGYPGASGFGDAVCGMAAVSITSRDFLFWFRSHTAEEIKWGGAKHDPDDKDDLRKMHPRSSFKAFLEVVKWRSMPWEDVEMDAI

SEQ ID NO: 26455 - protein, 392 aa, Heteropterys aureosericea
DLEPVNPADVPVTAAGALKSYKLASKAISRLQSLPSGNISLLCDVLVKEVMDLTGYDRVMVYKFHEDDHGEVVSERRRSDLESYLGLHYPATDIPQASRFLFMKNKVRMICDCLAPPVKVIQDERLPQPLSLCGSTLRSPHGCHAQYMTNMGTIASLVMSVTINEDDDMMDGDQQQMTRKLWGLVVCHHTSPRFVPFPLRYACEFLIQVFGVQINKEVELAAQVREKHILQIQTMLCDMLLRDAPVAIITQSPNVMDLVKCDGASLYFKNKTWLLGVTPTEEQIRDIAEWLLEYHSGNTGLSTDSLMEAGYPGASVLGDAVCGMAAVSITSRDFLFWFRSHTAKEIKWGGAKHDPDDKDDLRKMHPRSSFKAFLEVVQWRSMPWEDIEMDAI

SEQ ID NO: 26456 - protein, 392 aa, Heteropterys bahiensis
DLEPVNPADVPVTAAGALKSYKLASKAISRLQSLLSGNISLLCDVLVKEVRDLTGYDRVMVYKFHEDEHGEVVSECRRSDLESYLGLHYPATDIPQASRFLFMKNKVRMICDCLAPPVKVIQDERLPQPLSLCGSTLRSPHGCHAQYMTNMGTIASLVMSVTINEDDDMMDGDQQQMTRKLWGLVVCHHTNPRFVPFPLRYACEFLIQVFGVQINKEVELAAQVREKHILQIQTMLCDMLLRDAPVAIITQSPNVMDLVKCDGAALYFKNKTWFLGVTPTEEQIRDIAGWLLEYHSGNTGLSTDSLMEAGYPGASVLGDAVCGMAAVSITSRDFLFWFRSHTAKEIKWGGAKHDPDDKDDLRKMHPRSSFKAFLEVVKWRSMPWEDIEMDAI

SEQ ID NO: 26457 - protein, 392 aa, Heteropterys bicolor
DLEPVNPADVPVTAAGALKSYKLASKAISRLQSLPSGNISLLCDVLVKEVRDLTGYDRVMVYKFHEDEHGEVVSECRRSDLESYLGLHYPATDIPQASRFLFMKNKVRMICDCLAPPVKVIQDERLPQPLSLCGSTLRSPHGCHAQYMTNMGTIASLVMSATINEDDDMMDGDQQQMTRKLWGLVVCHHTSPRFVPFPLRYACEFLIQVFGVQINKEVELAAQVREKHILQIQTMLCDMLLRDAPVAIITQSPNVMDLVKCDGAALYFKNKTWLLGVTPTEEQIRDIAEWLLEYHSGNTGLSTDSLMEAGYPGASVLGDAVCGIAAVSITSRDFLFWFRSHTAKEIKWGGAKHDPDDKDDLRKMHPRSSFKAFLEVVKWRSMPWEDMEMDAI

SEQ ID NO: 26458 - protein, 392 aa, Heteropterys byrsonimifolia
DLEPVNPADVPVTAAGALKSYKLASKAISRLQSLPSGNISLLCDVLVKEVRDLTGYDRVMVYKFHEDEHGEVVSECRRSELESYLGLHYPATDIPQASRFLFMKNKVRMICDCLAPPVKVIQDERLPQPLSLCGSSLRSPHGCHAQYMTNMGTIASLVMSATINEDDDMMDGDQQQMTRKLWGLVVCHHTSPRFVPFPLRYACEFLIQVFGVQINKEVELAAQVREKHILQIQTMLCDMLLRDAPVAIITQSPNVMDLVKCDGAALYFKNKTWLLGVTPTEEQIRDIAEWLLEYHGGNTGLSTDSLMEAGYPGASVLGDAVCGMAAVSITSRDFLFWFRSHTAKEIKWGGAKHDPDDKDDLRKMHPRSSFKAFLEVVKWRSMPWEDIEMDAI

SEQ ID NO: 26459 - protein, 392 aa, Heteropterys capixaba
DLEPVNPADVPVTAAGALKSYKLASKAISRLQSLPSGNIFLLCDVLVKEVRDLTGYDRVMVYKFYEDEHGEVVSECRRSDLESYLGLHYPATDIPQASRFLFMKNKVRMICDCLAPPVQVIQDERLPQPLSLCGSTLRSPHGCHAQYMTNMGTIASLVMSVTINEDDDMMDGDQQQMTRKLWGLVVCHHTSPRFVPFPLRYACEFLIQVFGVQINKEVELAAQVREKHILQIQTMLCDMLLRDAPVAIITQSPNVMDLVKCDGAALFFKNKTWLLGVTPTEEQIRDIAEWLLEYHSGNTGLSTDSLMEAGYPGASVLGDAVCGMAAVSITSRDFLFWFRSHTAKEIKWGGAKHDPDDRDDLRKMHPRSSFKAFLEVVKWGSMPWEDVEMDAI

SEQ ID NO: 26460 - protein, 392 aa, Heteropterys catingarum
DLEPVNPADVPVTAAGALKSYKLASKAISRLQSLPSGNISLLCDVLVEEVRDLTGYDRVMVYKFHEDDHGEVVSECRRSDLESYLGLHYPATDIPQASRFLFMKNKVRMICDCLAPPVKVIQDERLPQPLSLCGSTLRSPHGWHAQYMTNMGTIASLVMSVTINEDDDMMDGDQQQMTGKLWGLVVCHHTSPRFVPFPLRYACEFLIQVFGVQINKEVELAAQVREKHILQIQTMLCDMLLRDAPVAIITQSPNVMDLVKCDGASLYFKNKTWLLGVTPTEEQIRDIAEWLLEYHSGNTGLSTDSLMEAGYPGASVLGDAVCGMAAVSITSRDFLFWFRSHTAKEIKWGGAKHDPDDKDDLRKMHPRSSFKAFLEVVKWRSMPWEDVEMDAI

SEQ ID NO: 26461 - protein, 392 aa, Heteropterys chrysophylla
DLEPVNPADVPVTAAGALKSYKLASKAISRLQSLLSGNISLLCDVLVKEVRDLTGYDRVMVYKFHEDEHGEVVSGRRRSDLESYLGLHYPATDIPQASRFLFMKNKVRMICDCLAPPVKVIQDERLPQPLSLCGSTLRSPHGCHAQYMTNMGTIASLVMSVTINEDDDMMDGDQQQMTRKLWGLVVCHHTSPRFVPFPLRYACEFLIQVFGVQINKEVELAAQVREKHILQIQTMLCDMLLRDAPVAIITQSPNVMDLVKCDGAALYFKNKTWFLGVTPTEEQIRDIAEWLLEYHSGNTGLSTDSLMEAGYPGASVLGDAVCGMAAVSITSGDFLFWFRSHTAKEIKWGGAKHDPDDKDDLRKMHPRSSFKAFLEVVKWRSMPWEDIEMDAI

SEQ ID NO: 26462 - protein, 392 aa, Heteropterys lindleyana
DLEPVNPADVPVTAAGALKSYKLASKAISRLQSLPSGNISLLCDVLVKEVRDLTGYDRVMVYKFHEDDHGEVVSECRRSDLESYLGLHYPATDIPQASRFLFMKNKVRMICDCLAPPVKVIQDEGLPQPLSLCGSTLRSPHGCHAQYMTNMGTIASLVMSVTINEDDDMMDGDQQQMTRKLWGLVVCHHTSPRFVPFPLRYACEFLIQVFGVQINKEVELAAQVREKHILQIQTMLCDMLLRDAPVAIITQSPNVMDLVKCDGASLYFKNKTWLLGVTPTEEQIRDIAEWLLEYHSGNTGLSTDSLMEAGYPGASVLGDAVCGMAAVSITSRDFLFWFRSHTAKEIKWGGAKHDPDDKDDLRKMHPRSSFKAFLEVVKWRSMPWEDVEMDAI

SEQ ID NO: 26463 - protein, 392 aa, Heteropterys megaptera
DLEPVIPADVPVTAAGALKSYKLASKAISRLQSLPSGNISLLCDVLVKEVRDLTGYDRVMVYKFHEDEHGEVVSECRRSDLESYLGLHYPATDIPQASRFLFMKNKVRMICDCLAPPVKVIQDERLPQPLSLCGSTLRSPHGCHAQYMTNMGTIASLVMSVTINEDDDMMDGDQQQMTRKLWGLVVCHHTSPRFVPFPLRYACEFLIQVFGVQINKEVELVAQVREKHILQIQTMLCDMLLRDAPVAIITQSPNVMDLVKCDGAALYFKNKTWLLGVTPTEEQIRDIAEWLLEYHSGNTGLSTDSLMEAGYPGASVLGDAVCGMAAVSITSRDFLFWFRSHTAKEIKWGGAKHDPDDKDDLRKMHPRSSFKAFLEVVKWRSMPWEDMEMDAI

SEQ ID NO: 26464 - protein, 392 aa, Heteropterys nitida
DLEPVNPADVPVTAAGALKSYKLASKAISRLQSLLSGNISLLCDVLVKEVRDLTGYDRVMVYKFHEDEHGEVVSECRRSDLESYLGLHYPATDIPQASRFLFMKNKVRMICDCLAPPVKVIQDERLPQPLSLCGSTLRSPHGCHAQYMTNMGTIASLVMSVTINEDDDMMDGDQQQMTRKLWGLVVCHHTSPRFVPFPLRYACEFLIQVFGVQINKEVELAAQVREKHILQIQTMLCDMLLRDAPVAIITQSPNVMDLVRCDGAALYFKNKTWFLGMTPTEEQIRDIAEWLLEYHSGNTGLSTDSLMEAGYPGASVLGDAVCGMAAVSITSRDFLFWFRSHTAKEIKWGGAKHDPDDKDDLRKMHPRSSFKAFLEVVKWRSMPWEDVEMDAI

SEQ ID NO: 26465 - protein, 392 aa, Heteropterys pauciflora
DLEPVNPADVPVTAAGALKSYKLASKAISRLQSLPSGNISLLCDVLVKEVRDLTGYDRVMVYKFHEDEHGEVVSECRRSDLESYLGLHYPATDIPQASRFLFMKNKVRMICDCLAPPVKVIQDERLPQPLSLCGSTLRSPHGCHAQYMTNMGTIASLVMSVTINEDDDMMDGDQQQMTRKLWGLVVCHHTSPRFVPFPLRYACEFLIQVFGVQINKEVELAAQVREKHILQIQTVLCDMLLRDAPVTIITQSPNVMDLVKCDGAALYFKNKTWLLGVTPTEGQIRDIAEWLLEYHSGNTGLSTDSLMEAGYPGATVLGDAVCGMAAVSITSRDFLFWFRSHTAKEIKWGGAKHDPDDKDDLRKMHPRSSFKAFLEVVKWRSMPWEDVEMDAI

SEQ ID NO: 26466 - protein, 392 aa, Heteropterys rhopalifolia
DLEPVNPADVPVTAAGALKSYKLASKAIARLQSLPSGNISLLCDVLVKEVRDLTGYDRVMVYKFHEDEHGEVVSECRRSDLESYLGLHYPATDIPQASRFLFMKNKVRMICDCLAPPVKVIQDERLPQPLSLCGSTLRSPHGCHAQYMTNMGTIASLDMSVTINEDDDMMDGDQQQMTRKLWGLVVCHHTSPRFVPFPLRYACEFLIQVFGVQINKEVELAAQVREKHILQIQTMLCDMLLRDAPVAIISQSPNVMDLVKCDGAALYFKNKTWLLGVTPTEEQIRDIAEWLLEYHSGNTGLSTDSLMEAGYPGASVLGDAVCGMAAVSITSRDFLFWFRSHTAKEIKWGGAKHHPDDKDDLRKMHPRSSFKAFLEVVKWRSMPWEDVEMDAI

SEQ ID NO: 26467 - protein, 392 aa, Heteropterys sanctorum
DLEPVNPADVPVTAAGALKSYKLASKAISRLQSLPSGNISLLCDVLVKEVRDLTGYDRVMVYKFHEDDHGEVVSECRRSDLESYLGLHYPATDIPQASRFLFMKNKVRMICDCLAPPVKVIQDERLPQPLSLCGSTLRSPHGCHAQYMTNMGTIASLVMSVTINDDDDMMDGDQQQMTRKLWGLVVCHHTSPRFVPFPLRYACEFLIQVFGAQINKEVELATQVREKHILQIQTMLCDMLLRDAPAAIITQSPNVMDLVKCDGASLYFKNKTWLLGVTPTEEQIRDIAEWLLEYHSGNTGLSTDSLMEAGYPGASVLGDAVCGMAAVSITSRDFLFWFRSHTAKEIKWGGAKHDPDDKDDLRKMHPRSSFKAFLEVVKWRSMPWEDVEMDAI

SEQ ID NO: 26468 - protein, 392 aa, Heteropterys sericea
DLEPVNPADVPVTAAGALKSYKLASKAISRLQSLLSGNISLLCDVLVKEVRDLAGYDRVMVYKFHEDEHGEVVSECRRSDLESYLGLHYPATDIPQASRFLFMKDKVRMICDCLAPPVKVIQDERLPQPLSLCGSTLRSPHGCHAQYMTNMGTIASLVMSVTINEDDDMMDGDQQQMTRKLWGLVVCHHTSPRFVPFPLRYACEFLIQVFGVQINKEVELAAQVREKHILQIQTMLCDMLLRDAPVAIITQSPNVMDLVKCDGAALYFKNKTWFLGMTPTEEQIRDIAEWLLEYHSGNTGLSTDSLMEAGYPGASVLGDAVCGMAAVSITSRDFLFWFRSHTAKEIKWGGAKHDPDDKDDIRKMHPRSSFKAFLEVVKWRSMPWEDVEMDAI

SEQ ID NO: 26469 - protein, 392 aa, Heteropterys sincorensis
DLEPVNPADVPVTAAGALKSYKLASKAISRLQSLPSGNISLLCDVLVKEVRDLTGYDRVMVYKFHEDEHGEVVSECRRSDLESYLGLHYPATDIPQASRFLFMKNKVRMICDCLAPPVKVIQDERLPQPLSLCGSTLRSPHGCHAQYMTNMGTIASLVMSVTINEDDDMMDGDQQQMTRKLWGLVVCHHTSPRFVPFPLRYACEFLIQVFGVQINKEVELAAQVREKHILQIQTMLCDMLLRDAPVAIISQSPNVMDLVKCDGAALYFKNKAWFLGVTPTQEQIRDIAEWLLEYHSGNTGLSTDSLMEAGYPGASVLGDAVCGMAAVSITSRDFLFWFRSHTAKEIKWGGAKHDPDDKDDLRKMHPRSSFKAFLEVVKWRSMPWEDVEMDAI

SEQ ID NO: 26470 - protein, 392 aa, Heteropterys steyermarkii
DLEPVNPANVPVTAAGALKSYKLASKAISRLQSLPSGNISLLCDVLVKEVRDLTGYDRVMVYKFHEDEHGEAVSECRRSDLESYLGLHYPATDIPQASRFLFMKNKVRMICDCLAPPVKVIQDEKLPQPLSLCGSTLRSPHGCHAQYMTNMGTIASLVVSVTINEDDDMMDGDQQQLTRKLWGLVVCHHTSPRFVPFPLRYACEFLIQVFGVQINKEVELAAQVREKHILQIQTMLCDMLLRDAPVAIITQSPNVMDLVKCDGAALYFKNKTWLLGVTPTEEQIRDIAEWLLEYHSGNTGLSTDSLMEAGYPGASVLGDAVCGMAAVSITSRDFLFWFRSHTAKEIKWGGAKHDPDDKDDLRKMHPRSSFKVFLEVVKWRSMPWEDVEMDAI

SEQ ID NO: 26471 - protein, 392 aa, Heteropterys ternstroemiifolia
DLEPVNPADVPVTAAGALKSYKLASKAISRLQSLPSGNISLLCDVLVKEVRDLTGYDRVMVYKFHEDDHGEVVSECRRSDLESYLGLHYPATDIPQASRFLFMKNKVRMICDCLAPPVKVIQDERLPQPLSLCGSTLRSPHGCHAQYMTNMGTIASLVMSVTINEDDDMMDGDQQQMTRKLWGLVVCHHTSPRFVPFPLRYACEFLIQVFGVQINKEVELAAQVREKHILQIQTMLCDMLLRDAPVAIITQSPNVMDLVKCDGASLNFKNKTWLLGVTPTEEQIRDIAEWLLEYHSGNTGLSTDSLMEAGYPGASVLGDAVCGMAAVSITSRDSLFWFRSHTAKEIKWGGAKHNPDDKDDLRKMHPRSSFKAFLEVVKWRSMPWEDVEMDAI

SEQ ID NO: 26472 - protein, 392 aa, Heteropterys trichanthera
DLEPVNPADVPVTAAGALKSYKLASKAIARLQSLPSGNISLLCDVLVKEVRDLTGYDRVMVYKFHEDEHGEVVSECRRSDLESYLGLHYPATDIPQASRFLFMKNKVRMICDCLAPPVKVIQDERLPQPLSLCGSTLRSPHGCHAQYMTNMGTIASLVMSVTINEDDDMMDGDQQQMTRKLWGLVVCHHTSPRFVPFPLRYACEFLIQVFGVQINKEVELAAQVREKHILQIQTMLCDMLLRDAPVAIITQSPNVMDLVKCDGAALYFKNKTWLLGVTPTEEQIRDIAEWLLEYHSGNTGLSTDSLMEAGYPGASVLGDAVCGMAAVSITSRDFLFWFRSHTAKEIKWGGAKHHPDDKDDLRKMHPRSSFKAFLEVVKWRSMPWEDVEMDAI

SEQ ID NO: 26473 - protein, 392 aa, Jubelina wilburii
DLEPVNPADVPVTAAGALKSYKLAAKAISRLQSLPSGNISLLCDVLVKEVRDLTGYDRVMVYKFHEDEHGEVVSECRRSDLEPYLGLHYPATDIPQASRFLFMKNKVRMICDCLAPPVKVIQDERLPQPLSLCGSTLRSPHGCHAQYMTNMGTIASLVMSVTINEDDDTMDGDQQQMTRKLWGLVVCHHTSPRFVPFPLRYACEFLIQVFGVQINKEVELAAQVREKHILQIQTMLCDMLLRDAPVAIITQSPNVMDLVKCDGAALYFKNKTWLLGVTPTVEQIRDIAEWLLEYHSGNTGLSTDSLMEAGYPGASVLGDAVCGVAAVSITSRDFLFWFRSHTAKEIKWGGAKHDPDDKDDGRKMHPRSSFKAFLEVVKWRSMPWEDIEMDAI

SEQ ID NO: 26474 - protein, 392 aa, Mascagnia rigida
DLEPVNPADVPVTAAGALKSYKLAAKAISRLQSLPSGNISLLCDVLVREVRDLTGYDRVMVYKFHEDEHGEVVSECRRSDLESYLGLHYPATDIPQASRFLFMKNKVRMICDCLAPPVKVIQDERLPQPLSLCGSTLRSPHGCHAQYMTNMGTIASLVMSVTINEDDDMMDGDQPQMARKLWGLVVCHHTSPRFVPFPLRYACEFLIQVFGVQINKEVELAAQVREKHILQIQTMLCDMLLRDAPVAIITQSPNVMDLVKCDGAALYFKNRTWLLGVTPTEEQIRDIAEWLLEYHSGNTGLSTDSLMEAGYPGASALGDAVCGMASVSITSRDFLLWFRSHTAKEIKWGGAKHDPEDKDDGRKMHPRSSFKAFLEVVKWRSKPWEDIEMDAI

SEQ ID NO: 26475 - protein, 392 aa, Philgamia glabrifolia
DLEPVNPADVPVTAAGALKSYKLAAKAISRLQSLPSGNISVLCDVLVKEVRDLTGYDRVMVYKFHEDEHGEVVSECRRSDLESYLGLHYPATDIPQASRFLFMKNKVRMICDCLAPPVKVIQDERLPQPLSLCGSTLRSPHGCHSQYMTNMGTIASLVMSVTINEDDDTMDGDQQQMTRKLWGLVVCHHTSPRFVPFPLRYACEFLIQVFGVQINKEVELAAQVREKHILQIQTMLCDMLLRDAPVAIITQSPNVMDLVESDGTALYFKNKTWLLGVTPTEEQIRDIAEWLLQYHSGNTGLSTDSLMEAGYPGASALGDSVCGMAAVSITSRDFLFWFRSHTAKEIKWGGAKHDPDDKDDLRKMHPRSSFKAFLEVVKWRSMPWEDIEMDAI

SEQ ID NO: 26476 - protein, 392 aa, Sphedamnocarpus sp. Davis 39-01
DLEPVNPADVPVTAAGALKSYKLAAKAISRLQSLPSGNISVLCDVLVKEVRDLTGYDRVMVYKFHEDEHGEVVSECRRSDLESYLGLHYPATDIPQASRFLFMKNKVRMICDCLAPPVKVIQDERLPQPLSLCGSTLRSPHGCHSQYMTNMGTIASLVMSVTINEDDDTMDGDQQQMARKLWGLVVCHHTSPRFVPFPLRYACEFLIQVFGVQINKEVELAAQVREKHILQIQTMLCDMLLRDAPVAIITQSPNVMDLVKSDGTALYFKNKTWLLGVTPTEEQIRDIAEWLLQYHSGNTGLSTDSLMEAGYPGASALGDSVCGMAAVSITSRDFLFWFRSHTAKEIKWGGAKHDPDDKDDLRKMHPRSSFKAFLEVVKWRSMPWEDIEMDAI

SEQ ID NO: 26477 - protein, 392 aa, Tristellateia sp. Davis 19-01
DLEPVNPADVPVTAAGALKSYKLAAKAISRLQSLPSGNISLLCDVLVKEVRDLTGYDRVMVYKFHEDEHGEVVSECRRSDLESYLGLHYPATDIPQASRFLFMKNKVRMICDCLAPPVKVIQDGRLPQPLSLCGSTLRSPHGCHAQYMANMGTIASLVMSVTINEDDDTMDGDQQQMARKLWGLVVCHHTSPRFVPFPLRYACEFLIQVFGVQINKEIELAAQVREKHILRIQTMLCDMLLRDAPVGIITQSPNVMDLVKCDGAALFYKNKFWLLGITPTEAQIRDIAEWLLEYHSGNTGLSTDSLMEAGYPGASVLGDAVCGMASVSITSRDFLFWFRSHTAKEIKWGGAKHDPDDKDDGRKMHPRSSFKAFLEVVKWRSLPWEDMEMDAI

SEQ ID NO: 26478 - protein, 392 aa, Tristellateia sp. Davis 29-01
DLEPVNPADVPVTAAGALKSYKLAAKAISRLQSLPSGNISLLCDVLVKEVRDLTGYDRVMVYKFHEDEHGEVVSECRRSDLESYLGLHYPATDIPQASRFLFMKNKVRMICDCLSPPVKVIQDERLPQPLSLCGSTLRSPHGCHAQYMANMGTIASLVMSVTINEDDDTMDGDQQQMARKLWGLVVCHHTSPRFIPFPLRYACEFLLQVFGVQINKEIELAAQVREKHILRIQTMLCDMLLRDAPVGIITQSPNVMDLVKCDGAALFYKNKFWLLGITPTEAQIRDIAEWLLEYHSGNTGLSTDSLMEAGYPGASVLGDAVCGMASVSITSRDFLFWFRSHTAKEIKWGGAKHDPDDKDDGRKMHPRSSFKAFLEVVKWRSLPWEDVEMDAQ

SEQ ID NO: 26479 - protein, 392 aa, Verrucularia glaucophylla
DLEPVNPADVPVTAAGALKSYKLAARAISRLQSLPSGNISLLCDVLVKEVRDLTGYDRVMVYKFHEDEHGEVVSECCRPDLDAYLGLHYPATDIPQASRFLFMKNKVRMICDCLAPPVKVIQDQRLPQPLSLCGSTLRSPHGCHAQYMANMGTIASLVMSVTINEDDNIVDDNQLRMERKLWGLVVCHHTGPRFVPFPLRYACEFLIQVFGVQINKEVELAAQVTEKHILRTQTLLCDMLLRDAPVAIITQSPNVMDLVKCDGAALYYRKKFWLLGVTPTEAQIRDIAEWLLEYHSGNTGLSTDSLMEAGYPGASVLGDAVCGMASVKISSRDFLFWFRSHTAKEIKWSGAKHDPGDKDDIRKMHPRSSFKAFLEVVKWRSLPWEDMEMDAI

SEQ ID NO: 26480 - protein, 896 aa, Saccharomyces cerevisiae
MTTTAQDNSPKKRQRIINCVTQLPYKIQLGESNDDWKISATTGNSALYSSLEYLQFDSTEYEQHVVGWTGEITRTERNLFTREAKEKPQDLDDDPLYLTKEQINGLTTTLQDHMKSDKEAKTDTTQTAPVTNNVHPVWLLRKNQSRWRNYAEKVIWPTFHYILNPSNEGEQEKNWWYDYVKFNEAYAQKIGEVYRKGDIIWIHDYYLLLLPQLLRMKFNDESIIIGYFHHAPWPSNEYFRCLPRRKQILDGLVGANRICFQNESFSRHFVSSCKRLLDATAKKSKNSSDSDQYQVSVYGGDVLVDSLPIGVNTTQILKDAFTKDIDSKVLSIKQAYQNKKIIIGRDRLDSVRGVVQKLRAFETFLAMYPEWRDQVVLIQVSSPTANRNSPQTIRLEQQVNELVNSINSEYGNLNFSPVQHYYMRIPKDVYLSLLRVADLCLITSVRDGMNTTALEYVTVKSHMSNFLCYGNPLILSEFSGSSNVLKDAIVVNPWDSVAVAKSINMALKLDKEEKSNLESKLWKEVPTIQDWTNKFLSSLKEKASSDDDVERKMTPALNRPVLLENYKQAKRRLFLFDYDGTLTPIVKDPAAAIPSARLYTILQKLCADPHNQIWIISGRDQKFLNKWLGGKLPQLGLSAEHGCFMKDVSCQDWVNLTEKVDMSWQVRVNEVMEEFTTRTPGSFIERKKVALTWHYRRTVPELGEFHAKELKEKLLSFTDDFDLEVMDGKANIEVRPRFVNKGEIVKRLVWHQHGKPQDMLKGISEKLPKDEMPDFVLCLGDDFTDEDMFRQLNTIETCWKEKYPDQKNQWGNYGFYPVTVGSASKKTVAKAHLTDPQQVLETLGLLVGDVSLFQSAGTVDLDSRGHVKNSESSLKSKLASKAYVMKRSASYTGAKV

SEQ ID NO: 26481 - protein, 342 aa, Mesembryanthemum crystallinum
MELYEIVKDIGSGNFGQAKLVRDKWTNEFVAVKFIERGSKDDEHVQRKLMNHSSLKHPNIIRFKEVLLTPTHLAIVMEYAAGGELFERICNAGRFREDEARFFFQQLISGVSYCHSMQICHRDLKLENTLLDGSPAPRVKICDFGYSKSSVLHSQPKSAVGTPAYIAPEVLSKREYDGKIADVWSCGVTLYVMLFGAYPFEDPDDPKNFRKSLVRILSVQYCIPDNIPISMECRHLLSRIFVANPEKRITIPEIKNHPWFQKNLPMELMEGGSWQSHDINHPSQNIGEILSIIQEARQPAELPSTGGLQIGGTLDFDDLDVDLDVDVDLDDIESSGEFVCPM

SEQ ID NO: 26482 - protein, 376 aa, Actinoplanes teichomyceticus
MSTGIAVAAVAATAGSASASPALAAAPPATVAAGYAHTCAIRTGGTLWCWGSNANGQLGDGTKTSRTTAVRVGDATTWAGVDAGTSHNCAVRTDGTLWCWGSNSRGQLGDGSTTDRTAPVRVGTATNWTTVSAGDRHTCAVRTDGTLWCWGFNRLGQLGDGAQVYVATTPLQVGTASTWASVTTGFAHTCGTRTDGTLWCWGDSSAGQLGLGILSYRTTPGQVGTATNWATVTAGYTFTCATRTDGTLWCFGENGYGQLGVTGTYQASPVQVGSVATWTGVAAGFDTACASRADGSLWCWGNNAAGQIGDGTTTHRYAPTRVGTATTWTAALAAGYHNCGFRTDDSLWCWGSNANGELGDGTTTARPAPQQVSLPA

SEQ ID NO: 26483 - protein, 636 aa, Vibrio vulnificus
MGKIIGIDLGTTNSCVAVLDGDKPRVIENAEGERTTPSVIAYTDGETLVGQPAKRQAVTNPENTLFAIKRLIGRRFEDEEVQRDIEIMPYKIVKADNGDAWVEAKGQKMAAPQVSAEVLKKMKKTAEDFLGEEVTGAVITVPAYFNDAQRQATKDAGRIAGLEVKRIINEPTAAALAYGLDKQGGDRTIAVYDLGGGTFDISIIEIDEVEGEKTFEVLATNGDTHLGGEDFDNRLINYLVAEFKKDQGIDLKNDPLAMQRVKEAAEKAKIELSSTNQTDVNLPYITADATGPKHMNIKVTRAKLESLVEDLVQRSLEPLKVALADADLSVGDITDVILVGGQTRMPMVQAKVTEFFGKEPRRDVNPDEAVAVGAAVQGGVLAGDVKDVLLLDVTPLSLGIETMGGVMTKLVEKNTTIPTKANQVFSTAEDNQSAVTIHVLQGERKQAMYNKSLGQFNLEGINPAPRGMPQIEVIFDLDADGILHVSAKDKQTGKEQKITIQASGGLSDAEIEKMVQEAEANKEADKKFEELATARNQADQIIHGTRKQVEEAGEALPADEKAKIETAISELEEARKGEDKEAIEAKIQALMAAAQKLMEIAQQQAQAQQGSAEAGAQSQEDDVVDAEFEEVKDDKK

SEQ ID NO: 26484 - protein, 636 aa, Vibrio fluvialis
MGKIIGIDLGTTNSCVAVLDGDKPRVIENAEGERTTPSVIAYTDGETLVGQPAKRQAVTNPENTLFAIKRLIGRRYEDEEVQRDISIMPYKIVRADNGDAWVEAKGQKMAAPQVSAEVLKKMKKTAEDYLGEKVTGAVITVPAYFNDAQRQATKDAGRIAGLEVKRIINEPTAAALAYGLDKQGGDRVIAVYDLGGGAFDISIIEIDEVEGEKTFEVLATNGDTHLGGEDFDNRMINYLVDEFNKEQGINLKNDPLAMQRLKEAAEKAKIELSSAQQTDVNLPYITADATGPKHMNIKVTRAKLESLVEDLVQRSLDPLKVALADADLSVSDITDVILVGGQTRMPMVQKKVAEFFGKEARRDVNPDEAVAVGAAVQGGVLAGEVKDVLLLDVTPLSLGIETMGGVMTKLIEKNTTIPTKANQVFSTAEDNQNAVTIHVLQGERKQANFNKSLGQFNLEGIQAAPRGMPQIEVTFDLDADGILHVSAKDKQTGEEQNITIQASGGLSDEEIEKMVQEAEANKEADKKFEELATARNQADQMIHATRKQVEEAGDALPADEKEKIEAAISELETAKRGEDKAEIDAKVQALMTASQKLMEIAQQKAQAQGADAGQQSTSPEDDVVDAEFEEVKDDKK

SEQ ID NO: 26485 - protein, 159 aa, Brassica napus
MSDEEHHFESSDAGASKTYPQQAGNIRKGGHIVIKGRPCKVVEVSTSKTGKHGHAKCHFVAIDIFTAKKLEDIVPSSHNCDVPHVNRIDYQLIDISENGFVSLLTDSGGTKDDLKLPTDDNLSALMKSGFEEGKDVVVSVMSSMGEEQICAVKEVGGGK

SEQ ID NO: 26486 - protein, 566 aa, Escherichia coli
MEMLSGAEMVVRSLIDQGVKQVFGYPGGAVLDIYDALHTVGGIDHVLVRHEQAAVHMADGLARATGEVGVVLVTSGPGATNAITGIATAYMDSIPLVVLSGQVATSLIGYDAFQECDMVGISRPVVKHSFLVKQTEDIPQVLKKAFWLAASGRPGPVVVDLPKDILNPANKLPYVWPESVSMRSYNPTTTGHKGQIKRALQSVVAVKKPVVYVGGGAITAGCHQQLKETVEALNLPVVCSLMGLGAFPATHRQVLGMLGMHGTYEANMTMHNADVIFAVGVRFDDRTTNNLAKYCPNATVLHIDIDPTSISKTVTADIPIVGDARQVLEQMLELLSQESAHQPLDEIRDWWQQIEQWRARQCLKYDTHSEKIKPQAVIETLWRLTKGDAYVTSDVGQHQMFAALYYPFDKPRRWINSGGLGSMGFGLPAALGVKMAFAEETVVCVTGDGSIQMNIQELSTALQYELPVLVVNLNNRYLGMVKQWQDMIYSGRHSQSYMQSLPDFVRRGAYGHVGIQISHPHGWKANLARRWNRCAIIAWCLLMLPSMAASTSTRCRFAGAEWMKCG

SEQ ID NO: 26487 - protein, 77 aa, Brassica juncea
LKHEAANMMKKIEQLEASKRKLLGEGIGSCSIEELQQIEQQLEKSVKCIRARKTQVFKEQIEQLKQKEKALAAENEK

SEQ ID NO: 26488 - protein, 1382 aa, Musa acuminata
MDVPESDCGFVNESELLFHCNQCDRELVRKIAQLLLPGLATACVDNTTGLFKSAASVAVVTRKEMVDYLKQRSQMYVTEAVGQGDDIVNMVEEFSDEPTEIISGFVDDFASSKRNLFSRVSGWLSSESREDKIDDFVQEMETNVFWSIDRREAIAEILIRNVDLKRAFHCSKKFDSAQQLAEHETQCSFRILGCTNEGCKAKFSAIHAEKHDSECPFKVIPCEQKCSERIVRHDMDRHCITICPMKLVNCPFYQVGCHSAFPLCNLEKHCSECLRSHLLYVLQVLHKQEASVEELRRRVQLLEKSHTLSELSEALDVRSLTLVIKEQEAKMKKLERDLKLFVSVAPSFAAAFPVDYDKSSERKVPDGIRSKDLLFSWRNGLRAELGFWRRFGSVALREMRLQRFGTSMDMGPGTDGFATADCGWSGSPIPCDPFALSELVNFDDYIESCSPATIVDQIFTMSFSIVQQTPGVWASPAQDIIAGDTSVAAGTYYSCGEKMASQKANLLLELPSHRPGMDIASRKIGCFDFDDISNEGNSTVPRPFGGVSLPDRMLRALSLLKESSCGGAILAQVWMPIRQGNHYVLSTSEQPFLCDQNLAGYREVSRHFTFSTKDAPGLFLELPGRVFISGRPEWTSNVIYYNRFEYLRVDYAVIHDVRGSLAVPIFDPDGCSCHAVLELVTTIEKPNFDTEMESVSKALQAVNLRSIKAQAHQQSFTKSQISIFSEIHDVSRVICHAHMLPLAITWIPIWCDDGAIYEAKFEKDDIGVMKPTSRRTILCIQKLACYVNDRQMKDFLHACAEHHLEKGQGVAGKALRSNYPFFSPDVRVYDIREYPLAHHARRFDLRAAVAFRLKSTYTGNDDYIVEFFLPINCRGSEEQQLLLSYLSSTMRRIHGSLRTVVDAEIGGSEIMRVGNHNEASLGSSSTAFSMKSSQLMDGNSETTAEMHFGVQNMESNEQSAGAHHEQLKSISMKHTEKKRSTAEKNISFSVLQHYFSGSLKDAANSIGDHFFEHVITVAVCPTTLKRACRQYGILRWPSRKIKKVNRSLQKIQKVIRSVQGVDGALKYDPSTRCLVASVSPPENPPLISSEPKGQDLMPASSSHHSETNHSIGKVEQDYFFHGRNLRGTMLKCETNKLGIPSNDCHRDFTSDGALLPYANMQGALSWPSYSKDASDSSYNSKEAVCQGSKDGLSFMTNECQIMSRNFSFVALHQMAMEVECNDGIIEHSHPSSGMTDSSNGRALNHPSFEKSKALISQIGPLITVKATYNGDTIRFKFLLSMGSHHLFEEIERRFKLLAGTFQLEHMDNDEEWVLLVNDSDLQECINVPNNIGSKTVKLQVRDVPCYIILVVGNQHRNLILRDAAVNPSDCGQVFVGCYVIVV

SEQ ID NO: 26489 - protein, 677 aa, Solanum lycopersicum
MVESSVGGVVPAVKGEVMRRMGDKEEGGSVTLRDEEVGTVTEWELDRELLCPICMQIIKDAFLTACGHSFCYMCIVTHLHNKSDCPCCSHYLTTSQLYPNFLLDKLLKKTSARQISKTASPVEQFRHSLEQGSEVSIKELDALLLMLSEKKRKLEQEEAERNMQILLDFLQMLRKQKVDELNEVQHDLQYIKEDLNSVERHRIDLYRARDRYSMKLRMLADDPIGKKPWSSSTDRNFGGLFSTSQNAPGGLPTGNLTFKKVDSKAQISSPGPQRKDTSISELNSQHMSQSGLAVVRKKRVNAQFNDLQECYLQKRRQLANKSRVKEEKDADVVQREGYSEGLADFQSVLSTFTRYSRLRVIAELRHGDLFHSANIVSSIEFDRDDELFATAGVSRRIKVFDFSSVVNEPADAHCPVVEMSTRSKLSCLSWNKYTKNHIASSDYDGIVTVWDVTTRQSVMEYEEHEKRAWSVDFSRTEPSMLVSGSDDCKVKVWCTKQEASVLNIDMKANICCVKYNPGSSVHIAVGSADHHIHYYDLRNTSQPVHIFSGHRKAVSYVKFLSNNELASASTDSTLRLWDVKDNLPVRTLRGHTNEKNFVGLSVNNEFLSCGSETNEVFVYHKAISKPVTWHRFGSPDIDEADEDAGSYFISAVCWKSDSPTMLAANSQGTIKVLVLAA

SEQ ID NO: 26490 - protein, 163 aa, Neurospora crassa
MSAAHDDAQHEHTFDSVDAGRSATYPMQCSALRKGGHVVIKNRPCKIVDMSTSKTGKHGHAKVHLVAIDIFTGKKLEDLCPSTHNMDVPNVKRTDYQFSYIDEDFLVLIDSNGEEKRELKMPEGELAKRIEKLEEEGKDFFVGVQTAMGEEAAIDVKEASNKD

SEQ ID NO: 26491 - protein, 248 aa, Rosa hybrid cultivar
MAYENKPNTVLDADAQRRLGRGKIEIKRIENTTNRQVTFCKRRNGLLKKAYELSVLCDAEVALIVFSNRGRLYEYSNNSVRETIERYKKACADSSNNGSVSEATTQYYQQEAAKLRAQITTLQNSNRGYMAEGLSNMSIKELKGVETKLEKAISRIRSKKNELLFAEIEYMQKRELDLHNNNQLLRAKIADNERHQQSINAIAGGHGSYEIMQPTQPFHEARNYFQVNALEPNIHQYSRHDQISLQLV

SEQ ID NO: 26492 - protein, 392 aa, Azohydromonas lata
MTDIVIVAAARTAVGKFGGSLAKIPAPELGAAVIKALLEKTGVGADQIGEVIMGQVLAAGAGQNPARQAMMKAGIAKETPALTINAVCGSGLKAVMLAAQAIAWGDSEIVIAGGQENMSASPHVLQGSRDGQRMGDWKMVDTMINDGLWDVYNKYHMGITAENVAKAHDITREQQDALALASQQKATAAQEAGKFKDEIVPVAIPQRKGDPVMFDTDEFINKKTNAEALAGLRPAFDKAGSVTAGNASGINDGAAAVMVMSAAKAEQLGLKPLARIASFGTSGLDPATMGMGPVPATRKALERAGWQVGDVDLFELNEAFAAQACAVNKELGVDPAKVNVNGGAIAIGHPIGASGCRVLVTLLHEMQRRDAKKGVAALCIGGGMGVSLAVER

SEQ ID NO: 26493 - protein, 877 aa, Mycobacterium bovis
MGKIERNRLNIDGVEQPDKHFERTPNGGVVDSFNPTTKTQAALTAALQAASTAGNPEIRPAHLLMALLTQNDGIAAPLLEAVGVEPATVRAETQRLLDRLPQATGASTQPQLSRESLAAITTAQQLATELDDEYVSTEHVMVGLATGDSDVAKLLTGHGASPQALREAFVKVRGSARVTSPEPEATYQALQKYSTDLTARAREGKLDPVIGRDNEIRRVVQVLSRRTKNNPVLIGEPGVGKTAIVEGLAQRIVAGDVPESLRDKTIVALDLGSMVAGSKYRGEFEERLKAVLDDIKNSAGQIITFIDELHTIVGAGATGEGAMDAGNMIKPMLARGELRLVGATTLDEYRKHIEKDAALERRFQQVYVGEPSVEDTIGILRGLKDRYEVHHGVRITDSALVAAATLSDRYITARFLPDKAIDLVDEAASRLRMEIDSRPVEIDEVERLVRRLEIEEMALSKEEDEASAERLAKLRSELADQKEKLAELTTRWQNEKNAIEIVRDLKEQLEALRGESERAERDGDLAKAAELRYGRIPEVEKKLDAALPQAQAREQVMLKEEVGPDDIADVVSAWTGIPAGRLLEGETAKLLRMEDELGKRVIGQKAAVTAVSDAVRRSRAGVSDPNRPTGAFMFLGPTGVGKTELAKALADFLFDDERAMVRIDMSEYGEKHTVARLIGAPPGYVGYEAGGQLTEAVRRRPYTVVLFDEIEKAHPDVFDVLLQVLDEGRLTDGHGRTVDFRNTILILTSNLGSGGSAEQVLAAVRATFKPEFINRLDDVLIFEGLNPEELVRIVDIQLAQLGKRLAQRRLQLQVSLPAKRWLAQRGFDPVYGARPLRRLVQQAIGDQLAKMLLAGQVHDGDTVPVNVSPDADSLILG

SEQ ID NO: 26494 - protein, 456 aa, Escherichia coli
MMEGQQHGEQLKRGLKNRHIQLIALGGSIGTGLFLGSASVIQSAGPGIILGYAIAGFIAFLIMRQLGEMVVEEPVAGSFSHFAYKYWGSFAGFASGWNYWVLYVLVAMAELTAVGKYIQFWYPEIPTWVSAAVFFVVINAINLTNVKVFGEMEFWFAIIKVIAVVAMIIFGGWLLFSGNGGPQATVSNLWDQGGFLPHAFTGLVMMMAIIMFSFGGLELVGITAAEADNPEQSIPKATNQVIYRILIFYIGSLAVLLSLMPWTRVTADTSPFVLIFHELGDTFVANALNIVVLTAALSVYNSCVYCNSRMLFGLAQQGNAPKALASVDKRGVPVNTILVSALVTALCVLINYLAPESAFGLLMALVVSALVINWAMISLAHMKFRRAKQEQGVVTRFLLLYPLGNWICLLFMAAVLVIMLMTRGMGIWVYLIPVWLIVLGIGYLFKEKTAKAVKAH

SEQ ID NO: 26495 - protein, 238 aa, Stylosanthes hamata
MAPREKTPAVKVNGKSNAGVKEVHFRGVRKRPWGRYAAEIRDPGKKSRVWLGTFDTAEDAARAYDAAAREFRGPKAKTNFPFPDSDDINNNNIVVVKNNNRSPSQSSTVESSSRDRDSYSAAAATAVADSSPLDLNLAPQELDSPDPFGSHSTQPFAVFPGGMPAAKQALYLDAVLRASMASHGQFGFGYNRPAAAGAQSDSDSSSVIDLNQNEGDVAKNNGRGLVLDLNEPPPQEMA

SEQ ID NO: 26496 - protein, 239 aa, Stylosanthes hamata
MAPREKTPAVKVNAGVKEVHFRGVRKRPWGRYAAEIRDPGKKSRVWLGTFDTAEDAARAYDAAAREFRGPKAKTNFPFPDSDDINSNNNNIVVVKNNNRSPSQSSTVESSSRDRDSYSAAAAATAVADSSPLDLNLAPAGAGFAGSIRFPFQQPFAVFPGGMPAAKQALYLDAVLRASMASHGQFGFGYNRPAAAAAGAQSDSDSSSVIDLNQNEGDVAKNNGRGLVLDLNEPPPQEMA

SEQ ID NO: 26497 - protein, 454 aa, Pirellula sp.
MPVPQVAIVGRPNVGKSSLFNWLARRRLAIVDNFEGVTRDRMTTLIESDDQFFELIDTGGMGVEDADDLTSDVRRQIDMAIASADVILLVVDVQTGLMPLDEEVVERLRGVERPVILVANKADQEHQDIHADEFRRLGRGHLITVSTTQNRHRDDLIQVIVDRLPEKDEDLVAPESSMKIAIVGRRNVGKSTFVNTLAESDRMIVSEVAGTTRDSVDVRFEIDGQTFLAIDTPGLRKRKSIRTDLDFYGTHRAQRSVRRADVVLMFFDALEKTSKVDKQLVGYIMEHHKPVIFVVNKWDKVDKEVPTERWVKYLRHQFTTLSYAPIAFITGQTGRNVKAVMNHAAMLYKQAQSRVSTGELNRILRAAIEQHPPAMYQGRRPKIFYATQVSTEPPTVVVMCSDPKALTHDYQRYLIGWMRDHLPFGEVPIKLYMQQRSRSEAKAERSGQGRSLES

SEQ ID NO: 26498 - protein, 464 aa, Solanum berthaultii
MVRVTLFLLLLLVSDVVSDHFIVETLPGFHGKLPFTLETGYIGVGEEEKVQLFYFFVPSERDPLNDPLMIWLTGGPGCSGLSSFVYEIGPLTFDYANSNGNFPKLELNSNSWTKVANIIFIDQPAGTGYSYANTSEAYNCNDTLSVTLTYDFLRKWLMDHPEYLNNPLYVGGDSYSGIFVALLTRKIYDGIEVGDKPRLNIKGYIQGNALTDRYIDSNGRIKYANRMGLISDKIYQSAKTNCNGSYFDVDPHNILCLNDLQKVTKCLKNIRRAQILEPYCDLPYLMDILQETPTNGQSVFPIAGPWCREKNYIYSYVWANDKVVQKALNVREGTTLEWVRCNESMHYRGKERTESYVYDVPSAVGDHRHLTSKSCRALIYSGDHDMVVPHLSTEEWIDTLKLPIADDWEPWFVDAQVAGYKVKYLQNDYELTYATVKGAGHTAPEYKPEQCLPMVDRWFSGDPL

SEQ ID NO: 26499 - protein, 456 aa, Solanum berthaultii
  misc_feature (449)..(449): Xaa can be any naturally occurring amino acid
  unsure (1)..(456): unsure at all Xaa locations
MVLAFIVFVLMLLLTDVVSSHFIVETLPGFDGQLPFKLETGYIGVGEEEKLQLFYFFVESERDPQNDPLMIWLTGGPGCSGLSTFLYEFGPLTFDYANSSGNFPKLELNLHSWTKVANIIFIDQPVGTGYSYAKTSEAYNSNDTLSATLTYDFLRKWLMDHPEYLKNPLYVGSESYAGIYSALVTRKIYDGVEVGDEPQMNIKGYIQGNALTDAYITVNSRVKYVYHMGLISDKIYQSAKANCNGNYVDIDPNNILCLNDLQKVKKCLNNIQSHHILENWCDLSLLRSNVHSGPWCRENNYIYSKIWANDKAVQKALNVREGTILEWVRCNNSMKYSARESMKRSGSYVYEIQSSIDDHRHLTSKSCRALIYSGDHDMIISHVSTEEWIDTLKLPIVDDWEPWFVEDQVAGYKVKYLQNDYELTYATVKGAGHTAPEYKPRQCMSMVDXWFSGDPL

SEQ ID NO: 26500 - protein, 461 aa, Solanum berthaultii
MVRVTLFLLLLLVSDVVSDHFIVETLPGFHGKLPFTLETGYIGVGEEEKVQLFYFFVPSERDPLNDPLMIWLTGGPGCSGLSSFVYEIGPLTFDYANSNGNFPKLELNSNSWTKVANIIFIDQPAGTGYSYANTSEAYNCNDTLSVTLTYDFLRKWLMDHPEYLNNPLYVGGDSYSGIFVAPLTRKIYDGIEVGDKPRLNIKGYIQGNALTDRYIDSNGRIKYANRMGLISDKIYQSAKTNCNGSYFDVDPHNILCLNDLQKVTKNIRRAQILEPYCDLPYLMDILQETPTNGQSVFPIAGPWCREKNYIYSYVWANDKVVQKALNVREGTTLEWVRCNESMHYRGKERTESYVYDVPSAVGDHRHLTSKSCRALIYSGDHDMVVPHLSTEEWIDTLKLPIADDWEPWFVDAQVAGYKVKYLQNDYELTYATVKGAGHTAPQYKPEQCLPMVDRWFSGDPL

SEQ ID NO: 26501 - protein, 311 aa, Micromonospora echinospora
MESAAVPPTRPSLVLTGHQEGVIGAVFHPDDHLVATSGEDGTVRLWDATTGEQVGRTLTGHTDTVWLVVFDPEGRLLASASEDRTARIWDVSTGEQVGEPLTGHTAGVYGVAFHPDGGLLATGSADHTVRLWKVPGGEPVGEPLTESTDEIDGVAFHPDGHLVASTGDAVRLYDTATGRPVGTPLVGHTKGAVSVAFSPDGRLLASGSDDLTVRIWDHAAGGAAVEPLVGHTDAVDGVVFHPNGRLLVSAAEDCTVRVWDVATGRQVGEVETGHTAPVWNIAFDRSGERIVTASQDGTARILPFPAYPAAG

SEQ ID NO: 26502 - protein, 373 aa, Thermoproteus tenax
MDTCKTEEWRKLRNAGKACPHRGQSVEENLELWDKMLRGDFREGESVLRVKTDLTHPDPSVRDWVAFRIIDVERNPHPLVGAKYHVWPTYNFAVSIDDHLMGVTHVLRAQEHSVNTVKQSFVFKHFGWTQPVTIHFGRLKVEGGSLSKSKLKALKLRYDDITMPTLAGLRSRGIQPEAIWELILSVGIKPSDATVSLANLFSINRKILDPKADRYMFVPEPVKLVINLPKRIVAKIPVHPSFPERGHREYELGPGEVSLYISRKDAELGSFRLMELANVVVRRKEGDVYYGEVVGYTIDEAREAKMPIIQWTPDNSREAVVIRPVAAGKKAVERGLIEPGAETLREGDIVQFLRYGFVKLASRDTMEFIYIHE

SEQ ID NO: 26503 - protein, 735 aa, Thermoproteus tenax
MGGQVRLIVVSNRLPVTISPSGEIRESVGGLATAMKSFLGAVNGGRELGLEEVVWVGWSGVPSERESNDLRERLRGMGLEPVPLSSEEVEGFYEGFSNSTLWPLFHGFSEYATYEEKHWRAYRGVNEKYAKAVVALARPGDLVWIHDYHLMLAPAIVREAAEVGVGFFLHIPFPPAELLQLLPSEWRREILEGLLGSDLVGFHTYEYSANFSRSVVRFLGYKVEMGAIAVGHRRVRVGVFPIGIDFDRFYNSSQDPSVVEEMAKLREMLGRAKVVFSIDRLDYTKGVLRRVAAWERFLREHPEWRGRAVFVLVVVPSRTGVPMYEEMKRQIDREVGRINGELGELNWVPIVYLYRFIPSPTLMALYNIADVALITPLRDGMNLVAKEFVASKRDCRGVLILSELAGASKELAEALVINPNDVGGTAEAIAEALSMSEDEQCRRIRAMQERLRMRDVVRWGTDFIYSLISAKSAREEVEKALRYMEELSVDKLKSDFAKAKRRLLLLDYDGTLVPHYPYPHMAVPDGDLLELLSRLAALPETAVYVVSGRGRDFLDGWLGRLPVGLVAEHGFFLKHPGGEWKSLGKVDPSWRQYAKGIMEDFASNVPGSFVEVKEAGIAWHYRNADETIAEKAVVELIDALSNALAGSGLSILRGKKVVEVRPAGYTKGTAAKMLLDELSPDFVFVAGDDETDEGMFEVAPQSAYTVKVGPGPTLAKFRVGDYRGLRSLLEQLRPP

SEQ ID NO: 26504 - protein, 242 aa, Corylus avellana
MEFQNQSMSVSPQRKLGRGKIEIKRIENTTNRQVTFCKRRNGLLKKAYELSVLCDAEIALIVFSSRGRLYEYANNSSVKTTIERYKKACADSSNSGSVSEANTQFYQQEAAKLRGQIRSVQDSNRHMLGEALSELNFKELKNLEKNLEKGINRIRSKKNELLLAEIEYMHKREVDLHNNNQFLRAKIAENERNQQNLNVMPGGGNYELMQSQSFDSRNYFQVDALQPNHHYPRQDQMALQLV

SEQ ID NO: 26505 - protein, 561 aa, Leuconostoc lactis
MSDQKYGADIVADSLTNHGIDLVFGIPGAKIDRLFTTLEHPAPGQKVPKLIVTRHEQNAVFMAQAFARITGKPGVTIVTSGPGVGNLVSGLMTASAESDPVVAIGGQVPRKDLYRLTHQSTKSVALFAPITNYSSEIQDPNNISEIIANAFAAANGAKKGAAFVSLPQDVDDAPVSVEALPPMPYAKQGAAALADLDWLAEQIKQAKLPVLLVGARGSDDDTVAALHKLLKQTTLPVVETFQGSGVISRELEPETFFGRIGFFRNQTGDKLLKQSDLVITVGYDAIEYEPRNWNKENDLNIVALDTTPVQIDNNFVPKRQLVGDLGQSLDLLTERVAGYELPVDSQAVLKTLKADLRASDEPTYTPAQGHLNHPLNIIKAIQAHVTDDMTVATDIGSHYIWMARHFKSYVARHFLISNGMQTLGVGLPWAMTAAMLRPNAKAVSVSGDGGFFFSSMELETAVRLKLNTVHIVWNDNAHYDMVKFQEEMKYDGRSAGVDFGNIDLVKYAESFGAKGLRVNTPDELNAVLDEAFASEGPVVVDIPVDYSHNFELGSQMIDAQG

SEQ ID NO: 26506 - protein, 328 aa, Pseudomonas stutzeri
MELLVLPNNRRLPFDSGANLLEVLREHRVGISYSCMSGRCGTCRCRVIDGSVISSAAKSGDSNRIEEHYVLACQSVLTSNCAIEIIDSDDIVTHPARIIKGMVVAVESPTHDIRRIRIRLAKPFEFSPGQYATLQFSPEHVRPYSMAGLPDDQEMEFHIRKVPGGRVTEYIFEHVREGTSIKLSGPLGTAYLRQAHTGPMLCVGGGTGLAPVLSIVRGALKSGMTNPIHLYFGVRSQQDLYDADRLNQLAAIHPQLTVHTVIATGPINEGQRAGLITDLIEKDIPSLAGWRAYLCGAPAMVDALCTVAKVLGISPEHIYADAFYPSGV

SEQ ID NO: 26507 - protein, 389 aa, Pseudomonas stutzeri
MRHHGIDVDIYEQAEELREVGAAVALSANATRFYYNHWGLGEEFDEAAFEISALIYRDGKTGREIGRHAGGLAYRDLFGGPYLGIHRAELQRILSTKVGMERIHLNKRLVNIDDTGEQVVLHFKDGSKAEADIVIGADGMRSTVRNLMLGYEDYIYAGYTAFRGIVPIDKIPSMPDPTAIQFWMGESGHCLHYPIGGDRKGDINFFLVERTPTTWPLKQSTAPTDDGEQLRLFKDWHPALVEMIASNTLKTVNQRWGMVYRMTLGRWSKGRVTLLGDAAHSLVPHHGQGANQSIEDAVVLADCIAAAGSASIAETFERYERLRRGRARKVVYASVTTGDMLHLPPGEERDRRDARLASHDAMVHHLDWIHGFDASDLNEPDERQGGTWL

SEQ ID NO: 26508 - protein, 891 aa, Spinacia oleracea
MAGALIQSTNIPSLAYKVNGQFQRSDKGNKAVKMMASLQDPGYRMRTFSGVRGGNALDTLGTTSECFYSKMRAVLSVRKGTASRGVVRAMFERFTEKAIKVIMLAQEEARRLGHNFVGTEQILLGLIGEGTGIAAKVLKSMGINLKDARVEVEKIIGRGSGFVAVEIPFTPRAKRVLELSLEEARQLGHNYIGSEHLLLGLLREGEGVAARVLENLGADPSNIRTQVIRMVGENTEAVGAGVGGGTTGNKMPTLEEYGTNLTKLAEEGKLDPVVGRQAQIERVTQILGRRTKNNPCLIGEPGVGKTAIAEGLAQRIATGDVPETIEGKKVITLHMGLLVAGTKYRGEFEERLKKLMEEIKQSDEIILFIDEVHTLIGAGAAEGAIDRANILKPRFRRGELQCIGATTLDEYRKHIEKDPALERRFQPVKVPEPTVDETIQILKGLRERYEIHHKLRYTDEALVAAAQLSYQYISDRFLPDKAIDLIDEAGSRVLPSSLKKLESWLQHEKELRQLTKEKNEAVRGQDFEKAGELRDREMDLKAQISALVEKKKEMSKAETEAGDVGPMVTESDIQHIVSSWTGIPVEKVSTDESDRLLKMEDTLHTRVIGQDEAVKAISRAIRRARVGLKNPNRPIASFIFSGPTGVGKSELAKALAAYYFGSEEAMIRLDMSEFMERHTVSKLIGSPPGYVGYTEGGQLTEAVRRRPYTVVLFDEIEKAHPDVFNMMLQILEDGRLTDSKGRTADFKNTLLIMTSNVGSSVIEKGGRRIGFDLDYDEKDSSYNRIKSLVTEELKQYFRPEFLNRLDEMIVFRQLTKLEVKEIADIMLKEVFGRLKNKEIELQVTERFRDRVVDEGYNPSYGARPLRRAIMRLLEDSMAEKMLARKSKRVIQ

SEQ ID NO: 26509 - protein, 366 aa, Oryza sativa Japonica Group
MAAVNTVSSLPCSKAGAAVAGGAPRPSTCSVFYPPRCWSKRSSGNGVRAQASTTETTAAPAAEVTTKVEKVSKKQVDGVVTNKYRPKEPYTGRCLLNTRITGDDAPGETWHMVFSTDGEIPYREGQSIGVIPDGIDKNGKPHKLRLYSIASSAIGDFADSKTVSLCVKRLVYTNDQGEIVKGVCSNFLCDLKPGSDVKITGPVGKEMLMPKDPNATIIMLGTGTGIAPFRSFLWKMFFEEHDDYKFNGLAWLFLGVPTSSTLLYREEFERMKEIAPERFRLDFAVSREQTNAAGEKMYIQTRMAEYKDELWELLKKDNTYVYMCGLKGMEKGIDDIMIDLAAKDGIDWLDYKKQLKKSEQWNVEVY

SEQ ID NO: 26510 - protein, 365 aa, Oryza sativa Japonica Group
MPLSYSAAAAAAPSPLAARSRGLLRRPPRSSPVVVRCKKIDQLRAVNGIPPYAPVSNRSLLSPVTLPIIRDANIKNDTRLRIFSGTANPSLSQEIASYLGLELGKINIKRFADGEIYVQLQESVRGCDVFLVQPTCPPANENLMELLIMIDACRRASAKNITAVIPYFGYARADRKSQGRESIAAKLVANMITPVILDYLASKTICSDDLVVVSPDVGGVARARAFAKKLSDAPLAIVDKRRHGHNVAEVMNLIGDVRGKVAVMMDDMIDTAGTIAKGAELLHQEGAREVYACCTHAVFSPPAIERLSSGLFQEVIITNTIPLKEDKSFPQLTILSVANLLGETIWRVHDDCSVGHEPYSSLDID

SEQ ID NO: 26511 - protein, 313 aa, Gossypium arboreum
MEPAWVDTTLDLNINPCFRTNKAMKREFEGDVAESAPVKYESGVLVEELNRVSAENKKLTEMLTVLCEQYYSLQHQFMELVNKNPEIETTAAATTSSSKKRKAEWEDYGANMIGFSGNTETSSSDDGSPKTPKDCIKPKVSRVQVRTNPSDNSLIVRDGYQWRKYGQKVTRDNPCPRAYFKCSFAPSCPVKKKVQRSAEDPSILVATYEGEHNHHEHHRSPPAEISLNSNNNTPSSNTGSGPVSSAPTKALASTVTLELLQPAGLGGDETERAALQIDAPAIQQILVHQMAASLSRDPNFTAALAAAISGRAV

SEQ ID NO: 26512 - protein, 195 aa, Petunia x hybrida
MTFAGTTQKCSACDKTVYLVDRLAADNRVYHKACFRCYHCKSTLKLSNFNSFEGVIYCRHHFDQLFKRTGSLDKSFEGTPKFTKPEKPVDNENGSGNKVSSLFGGTRDKCVGCSKTVYPIEKVSVNGAAYHKACFKCTHGGCTISPSNYIAHEGRLYCKHHHIQLFKEKGNYSQLESENEPESALPTPLQIAAES

SEQ ID NO: 26513 - protein, 145 aa, Petunia x hybrida
MSDRPQVPWSSGICDCFQDVKGCCLTCWCPCITFGRIAEVADQGSTSCVVSGTVYLLVYLVTSGFGCCWYSCFYRSKLRNQYYLDEKPCSDLCTHCCCEYCALCQEYRELQNQGFDMSTGWNENMEKWKGSGGALPPTVQAAMNR

SEQ ID NO: 26514 - protein, 186 aa, Campylobacter jejuni
MFIFFLKKLYYNVFMKTKALFLDRDGVINIDKKYVYKIEDFEFCDGIFELCRYFLARNYLLFIATNQSGIARGYYKESDFFKLCDYMLKEFAKQDIKIDKIYHCPHLEGCECRKPKAGMLLKAKDEFDLDMKNSIFIGDNLSDMQAGLNANIGTLILVNEEKKEGDFFRQFKNLKEILSFFKEKDI

SEQ ID NO: 26515 - protein, 154 aa, Prunus persica
MALSLFGGRRSNVFDPFSLDIWDPLEGLGTLANIPPSARETTAIANTRIDWKETPEAHIFIADLPGLKKEEVKVEVDDGKVLHISGERSREQEEKNDKWHRIERSTGKFSRRFRLPDNAKIDQVKASMENGVLTVTVPKEEEKRPQVKAIDISG

SEQ ID NO: 26516 - protein, 507 aa, Yersinia pestis
SGKHSAETHHAAKKRWLDSHDTGYHKSMGLRHIQMIAIGGSIGTGLFLGTGARLQMAGPALALVYLVCGIFSFFILRALGELVLHRPTSGSFVSYAREFLGEKASYVAGWMYFLNWAMTGIVDITAVALYMHYWGTFSDVPQWLFALGALSIVATMNMIGVRWFAEMEFWFALIKVAAIALFLIVGVIFLGTGQSVAGHTTGIHLITDNGGFFPHGLLPALIMVQGVIFAFAGIELIGTAAGECKDPEKMLPKAINSVIWRIGLFYVGSVVLLVCLLPWHAYQAGQSPFVTFFSNLGVPYIGTIMNIVVLSAALSSLNSGLYSTGRILRSLSMGGSAPKFMSKMSPQSVPYAGILVTVGIYVLGVLLNYLVPSQVFEIVLNIASLGIISSWAFIIICQMKLRQAIKRGMAKPVSFKMPGAPVTSWLTLIFLAGVLVMMAFDYPNGTWTIASIPVLTLLLIAGWFSLRKRANEVAAAPIDVWSQEILFEEPDAQNVSPKELYEQKSVG

SEQ ID NO: 26517 - protein, 549 aa, Saccharomyces cerevisiae
MSEITLGKYLFERLKQVNVNTVFGLPGDFNLSLLDKIYEVEGMRWAGNANELNAAYAADGYARIKGMSCIITTFGVGELSALNGIAGSYAEHVGVLHVVGVPSISSQAKQLLLHTLGNGDFTVFHRMSANISETTAMITDICTPQAEIDRCIRTTYVTQRPVYLGLPANLVDLNVPAKLLQTPIDMSLKPNDAESEKEVIDTILVLVKDAKNPVILADACCSRHDVKAETKKLIDLTQFPAFVTPMGKGSISEQHPRYGGVYVGTLSKPEVKEAVESADLILSVGALLSDFNTGSFSYSYKTKNIVEFHSDHMKIRNATFPGVQMKFVLQKLLTNIADAAKGYKPVAVPARTPANAAVPASTPLKQEWMWNQLGNFLQEGDVVIAETGTSAFGINQTTFPNNTYGISQVLWGSIGFTTGATLGAAFAAEEIDPKKRVILFIGDGSLQLTVQEISTMIRWGLKPYLFVLNNDGYTIEKLIHGPKAQYNEIQGWDHLSLLPTFGAKDYETHRVATTGEWDKLTQDKSFNDNSKIRMIEVMLPVFDCSTKLG

SEQ ID NO: 26518 - protein, 563 aa, Saccharomyces cerevisiae
MSEITLGKYLFERLSQVNCNTVFGLPGDFNLSLLNKLYEVKGMRWAGNANELNAAYAADGYARIKGMSCIITTFGVGELSALNGIAGSYAEHVGVLHVVGVPSISSQAKQLLLHHTLGNGDFTVFHRMSANISETTAMITDIRNAPAEIDRCIRTTYTTQRPVYLGLPANLVDLNVPAKLLETPIDLSLKPNDAEAEAEVVRTVVEFIKDAKNPVILADACCSRHDVKAETKKLMDLTQFPVYVTPMGKGAIDEQHPRYGGVYVGTLSRPEVKKAVESADLILSIGALLSDFNTGSFSYSYKTKNIVEFHSDHIKIRNATFPGVQMKFALQKLLDAIPEVAKDYKPVAVPARVPITKSTPANTPMKQEWMWNQLGNFLREGDIVIAETGTSAFGINQTTFPTDVYAIVQVLWGSIGFTVGALLGATMAAEELDPKKRVILFIGDGSLQLTVQEISTMIRWGLKPYIFVLNNNGYTIEKLIHGPHAEYNEIQGWDHLALLPTFGARNYETHRVATTGEWEKLTQDKDFQDNSKIRMIEVMLPVFDAPQNLVKQAQLTAATNAKQ

SEQ ID NO: 26519 - protein, 80 aa, Wolbachia sp. wTai
MKIIIGSASKRLGDSIISGLHAQLFPTQVSRFADGEVNVEVANDLRDQEVYVVQSLSSPVNDNLMELLLTIDAAKRSGAK

SEQ ID NO: 26520 - protein, 324 aa, Emiliania huxleyi
MISNKRYRVTKQFYKFLNDYTKTVVDIGGTLRKKQCNKINEIITTPLTWVGNKSKVCNSIFATLPNSIVNYYEPFLGSGSVLLHVLQQQSEGKITIKSNIFASDFNKDLINFFIVLQQTPIELCSIFTNSFVSLYNNLENDEAKKKFYYDVRSDFNLNLGVFNLEQSARFLFLNKTSFGGLFRVNSKGFFNVPFGHRKKPKFPKESLLLEVHKLIKNVHFSHQRFNHQIALQKGDFFYLDPPYAKVTKTSFVNYLPDGFSNNDCLLLLEFCKRLEKEACFFTLSNSVELFNFGENYKMLQYTSNSLKGQLDQLLITNTNEQLNW

SEQ ID NO: 26521 - protein, 586 aa, Haloferax mediterranei
MASKKEQWKSDLYGDAVRDELEAFAEEGFESIPEDERDKWFTRFKFWGVFQQRTGQESYFMMRLTNANGVLEPGQLRTIAEVARDYATGPVDNPEFGNGWVDLTTRQSIQLHWLELEDIPEIWEQLESVGVTSRSAGGDTMRNITGCPVAGKDTHELVESKPLLDRFQSELREDNALSNMPRKFNISVTGCREGCAQDSINDIGWNPPGKRSTERLFTGFNVRVGGGLGSRKPRVARSLDVFVADEERAYEVVRGFVELYHDHGNRDVRARARSRFFVDDWGTEKIRDRLESEYLDFELQSAGEDIRDEYTYNAGRPQSAGKSDHVGVHEQSDGRYYVGLSVAVGRLTAADALELADLADKYGSGQIRLTRRQNPIVMDVPAGALDDLLAEPLLSKHTPEPNPFQRGTVACTGTEFCSLALTETKARTARMLRWLRDNVEVPDDVHQLKIHYSGCTADCGQANTADIGLFGMRAQKDGEMVEAMDIGVGGGIGDEPSFVEWIHQRVPADEVPGAIASLVEAFAAHRTAGQTFRQWVEAEGPDAVAEYCEPIETDFEAPYMHDAKQSWYPFADEDEPPKTEQPMTSD

SEQ ID NO: 26522 - protein, 409 aa, Bacillus anthracis
GVGKTAIVEGLAQRIVKKDVPEGLKDRTIFALDMSALVAGAKFRGEFEERLQAVLNEIKKSEGRILLFIDELHTIVGAGKTEGAMDAGNMLKPMLARGELHCIGATTLDEYRKYIEKDPALERRFQQVLAEEPTVEDTISILRGLKERFEIYHGVNIHDRAIVAASVLSDRYISDRFLPDKAIDLVDEACATIRTEIDSMPTELDEVTRRIMQLEIEEAALGKEKDFGSQERLKTLQRELSDLKEVASSMRAKWEKEKEDIHKVRDLREHLERLRRELEEAEGNYDLNRAAELRHGKIPAIEKELKEAEEMGANNKQENRLLREEVSEEEIADIVSRWTGIPVAKLVEGEREKLLRLEQILSERVIGQEEAVSLVSDAVLRARAGIKDPNRPIGSFIFLGPTGVGKTEL

SEQ ID NO: 26523 - protein, 478 aa, Vitis riparia
MRPIFCGNFDYDARQSDLERLFRRYGKVDRVDMKTGFAFIYMEDERDAEDAIRGLDRTGFGRKGRRLRVEWTKQERGIRRPSGSRRSSTNLRPAKTLFVINFDPYNTRTRDLERHFDPYGKILNIRIRRNFAFIQYESQEDATRALEATNMSKLMDRVISVEYAVRDDDERRNGYSPDGRRRDKSSERSYDKGRSLSPYRRERGSPDYGRGSSPSAYRRERASPDYGRDPSPSPRRRDRAMPDHGRSRSPSHHRRERTSHDSARGPSRSPYRSERSDRAIPDYGRGRSPSPGRREKIMPDYPDRPSLSPERKEKTGRSEKAIPDYGRGASPSSPRRERTNSDYVRANSRSRSRSQSQSPRQRERTKPDYGHERSVSPEQREKANPDHGRGPSRSSPRREYDRGPSQSPQQGERALPDYARGPSDSPYQRESISPDYDRGPSPNSKREERDSPNYGGSASPMNGRYRSRSPPARERSRS

SEQ ID NO: 26524 - protein, 685 aa, Hypericum androsaemum
MSSSGSEWVEWALGVGTDSVLVVITTSLVAVIGVVALFLWKRSSDRGKDPKTLVVPPKPLSLKEEEEEDEAEGKTKVCIFYGTQTGTAEGFAKALAEEIKVRYEKAVVKVVDLDDYALDDDQYEEKLKKETLAFFMVATYGDGEPTDNAARFYKWFTEEHERGVWLQQLKFGVFGLGNRQYEHFNKIAKVLDEQFCEQGAKRLIPVGLGDDDQCIEDDFTAWRELLWPELDPLLRDEDNANAASTPYTAAILEYRVVIHDPTTLSVEDKFANLANGNATFDAQHPCRVNVAVQRELHKPESDRSCIHLELDISGTGIRYEAGDHVGVYTENCAENVEEAGRLLGQPLDLVFSVYTEKEDGTPLGGSLPPPFPGPCTLQTSLARYADLLNPPRKAALLALAAHASEPSEAERLKFLASPQGKDEYAQWVVTSQRSLLEVMAEFPSAIPPLGIFFAAVAPRLQPRYYSISSSPRYAPHRVHVTCALVYGPTPTGRIHKGVCSNWMKNAVSLERSSDCSWAPIYIRPSNFKLPANPSTSITMVGPGTGFAPFRGFLQERMALKEDGVQLGPALLFFGCRNRQMDYIYEEELNNFVEQGALSELIVAFSREGPQKDYVQHKMMDKAAYIWEVLSQGAHIYVCGDAKGMARDVHRTLHTIVQEQGNLDSSKTELFVKKLQMDGRYLRNVW

SEQ ID NO: 26525 - protein, 174 aa, Malus x domestica
MPRDRDPLVVGRVVGDVLDPFTRSVSLRVTYGTKEVNNGCELKPSEVVQQPRADIGGDDLRTFYTLVMVDPDAPSPSDPNLKEYLHWLVTDIPATTAASFGQEIVCYESPRPTVGIHRFVLVVFRQLGRQTVYAPGWRQNFNTRDFAELYNLGLPVSVVYFNCQREGGSGGRRR

SEQ ID NO: 26526 - protein, 355 aa, Pinus sylvestris
MSLLTDLINLDLSDITEKIIAEYIWIGGSGMDIRSKARTLSHPVTDPKDLPKLNYDGSSTGQAPGKDSEVILYPQAIFRDPFRRGNNILVICDTYTPAGEPIPTNKRANAQKYLAIQMLFAEEPWYGIEQEYTLLQKDVNWPLGWPVGGYPGPQGPYYCGTGADKAYGRDIVDAHYKACLYAGINISGINGEVMPGQWEFQVGPTVGISSGDQVWAARYLLERITEVAGVVLSFDPKPIQGDWNGAGAHTNYSTKSMREEGGIKVIKKAIEKLGLRHKEHIAAYGEGNERRLTGRHETADINTFSWGVANRGASIRVGRDTEREGKGYFEDRRPASNMDPYIVTSMIAETNHPLK

SEQ ID NO: 26527 - protein, 200 aa, Pinus sylvestris
MSSVLTDLLNLDLSDLTEKVIAEYIWIGGSGMDMRSKARSLSGPVSSVKELPKWNYDGSSTGQAQGHDSEVILYPQAIFRDPFRRGKHILVICDAYSPNGTAIPSNKRAAAAKIFNEKAVSDEETWYGLEQEYTLLQKDVKWPLGWPIGGYPGPQGPYYCGVGADKAWGRDIVDAHYKACLYSGINISGINGEVMPGQWE

SEQ ID NO: 26528 - protein, 509 aa, Vicia faba
MLQRSRTLPSKIYQGVIEERKDGRHYIELEPLPKMETETKPITIQSKCLDDDGRVKRTGTFWTASAHIITAVIGSGVLSLSWAIAQLGWAVGPVVMVLFAVVNLYTSTLLTQCYRSDDSVAGPRNYTYTDAVKSILGGKKFKICGVIQYVNLFGVAIGYTIAASVSMMAIKRSNCYHESHGNDPCHMSSNVYMIAFGIAEVILSQIPDFDQVWWLSIVAAIMSFTYSAVGLGLGVAKVAENGTFHGRLMGISIGTVTPAGTVTGTQKVWRSLQALGAMAFAYSFSIILIEIQDTIKSPPAEHKTMKKATMLSIMVTTVFYILCGSMGYAAFGDHVPGNLLTGFGFYNPYWLLDIANFAIVVHLVGAYQVFSQPFFAFVEKWSAHKWPKNKFVTEEYDIPIPCIGVYKLNLFRLIWRTIFVLLTTLIAMLLPFFNDVVGLLGAFGFWPLTVYFPIDMYISQKKIGRWTNRWLGLQMLSGCCLIISTLAAVGSIAGVVLDLKTYKPFKTSY

SEQ ID NO: 26529 - protein, 218 aa, Eustoma grandiflorum
MGRGKIDIKRIENNTNRQVTFCKRRNGLLKKAYELSVLCDAEVALIIFSSRGRVYEYANNNIKSTIDRYRKATSDASTVFTTQEINAQFYQQESKKLRQQIQVLQNSNRHLMGEGLSSLNVKELKQLESRLERGISRTRSKKHEMILAEVEYLQKREIQLEQENACIRSKIAEQERLQELSMMPPGQDYNAMQAYLAQNFMQVNGLMEGPPVYSMLHK

SEQ ID NO: 26530 - protein, 232 aa, Lilium longiflorum
MGRGKIEIKRIENTTNRQVTFCKRRNGLLKKAYELSVLCDAEVALIVFSSRGRVYEYSNNSIKQTIDRYKKACDSSNSNSLIQVNSQQYFQQESAKLRHQIQILTNANRHLVGEALSSLTVKELKQLENRLERGLTRIRSKKHELLFAEIEFSQKREVELQSDNMYLRAKIAENERTQAAIVQARAEFDALPTFDSRNFYQVNNMLEAPPHYHHQDQTALHLGYEAKDDSVP

SEQ ID NO: 26531 - protein, 595 aa, Capsicum chinense
MAVDSVLSSPLGPPACEKDAKALQFIEEMTRNADAVQQRVLDEILTRNSQTEYLKRFKLDGVSDRETFKSRIPVVTYEDLQPEIQRIANGDRSPILSAHPISEFLTSSGTSAGERKLMPTIKEELDRRQLLYSLLMPVMNLYVPGLDKGKGLYFLFIKSETKTPGGLLARPVLTSYYKSEHFKSRPHDPYNVYTSPNEAILCADSFQSMYTQMLCGLYEREQVLRLGAVFASGLVRAIRFLQLHWPQLAHDIRTGNLNPQITNLSLCERMGKIMRPNPELADFVAGECCKENWEGIITRIWPKTKYLDVIVTGAMAQYIPTLDYYSGGLPKACTMYAASECYFGLNLNPMCKPSEVSYTIMPNMGYFEFLPHDSTTTNSSPTNLVDLVDVEVGKEYELVITTYAGLYRYRVGDILRVTGFHNSAPQFHFVRRKNVLLSIDADKTDEAELQKAVENASKLLREFNTSVVEYTSYADTKTIPGHYVIYWELLMKDLKNSPSDEVLNKCCLAMEESLNTVYRQGRVACNSIGPLEIRVVKNGTFEELMDYAISRGASINQYKVPRCVNFAPILELLDSRVMSSHFSPSLPQWTPERRR

SEQ ID NO: 26532 - protein, 330 aa, Escherichia coli K12
MKTAYIAKQRQISFVKSHFSRQLEERLGLIEVQAPILSRVGDGTQDNLSGAEKAVQVKVKALPDAQFEVVHSLAKWKRQTLGQHDFSAGEGLYTHMKALRPDEDRLSPLHSVYVDQWDWERVMGDGERQFSTLKSTVEAIWAGIKATEAAVSEEFGLAPFLPDQIHFVHSQELLSRYPDLDAKGRERAIAKDLGAVFLVGIGGKLSDGHRHDVRAPDYDDWSTPSELGHAGLNGDILVWNPVLEDAFELSSMGIRVDADTLKHQLALTGDEDRLELEWHQALLRGEMPQTIGGGIGQSRLTMLLLQLPHIGQVQAGVWPAAVRESVPSLL

SEQ ID NO: 26533 - protein, 504 aa, Halobacillus trueperi
MKNVTSVFWITLAIALFSVVWGSVAPKNLESITGSIQSYISVHFGWYYLLIVTGFVIFCLYMIFSPYGKMKLGKPADKPEYNYATWFAMLFSAGMGIGLVFWGAAEPIYFYANNAPTAETGTAAALNESMRFVYFHWGVHAWGIYAIVALVLAYFKFRRGSPALISPTLEPLFGDKMNGPWGKVVDVIAVFATIVGVATTLGFGAAQINGGLTFLTPLEDSFGIQLLIIAVVTVLFMISAYTGLSKGIRYLSNTNMVLALALLTITLIVGPTLFIMNMFTDTIGAYLQNLPTMSFRLAPNNEENRTWINNWTVFYWAWWIAWSPFVGIFIARVSKGRTIREFLSGVLLVPSVVGFLWFSTFGSSAIKVQQEQGGLSDLATEQVMFGTFDNYPLGLILSIIAMVLIGTFFITSADSATFVLGMQTTNGSLTPPTMVKFVWGIVQSSMAAVLLHSGGLQALQNALISAAFPFSFIMILMVVSLYKAIRADKIALDRGKDKEEKTSA

SEQ ID NO: 26534 - protein, 253 aa, Glycine falcata
MKMKVLVFFVATILAAWECHAYDMFPLRMNTGYGDRSTEMKCASWRLAVEAHNIFGFETIPKECVEPTKEYIHGGQYQSDSKTVNQQAYFYARELEVRENDVFLFSIDGTALSNVPYYSEHGYGVEKFNSTLYDEWVNKGVAPALPETLYNYNKLVSLGFKIVFLSGRLQDKEEVTKANLKAAGYNTWHRLILKDPKFIAPNALEYKSAMREKLMRQGYRIVGIIGDQWSDLLGHHTGDSRTFKLPNPMYYIE

SEQ ID NO: 26535 - protein, 253 aa, Glycine tomentella
MKMKVLVFFVATILVAWQCHAYNMFPLRMNTDYAARSTEAKCASWRLAVEAQNIFGFKTIPEECVESTKEYIHGGQYESDSKTVNQQAYFYARDLEVHDNDVFVFSIDATVLSNVPYYSEHGYGVEKYNSTLYDEWVNKGVAPALPQTLINYNKLLDLGFKIVFLSGRTEDKREVTEANLKAAGYHTWHQLILKDPKFITPNALAYKSAMREKLLRQGYSIKGIVGDQWSDHLGDHRGDSRSFKLPNPMYYIE

SEQ ID NO: 26536 - protein, 108 aa, Glycine curvata
FGFKTIPEECVEPTKEYIHGGQYQSDSKTVNQQAFFYARELEVRDNDVFLFSIDGTVLSNVPYYSEHGYGVERFNSTLYDEWVNKGVAPALPETLKNYKKLVSLGFKI

SEQ ID NO: 26537 - protein, 225 aa, Mycobacterium avium subsp. paratuberculosis K-10
MDDILAQATIFQGIDPEAVAALSRHLQHVSFPRRRTVFVEGEPGDDLYVIVSGAVKIRHQTADGRETVFAVLGPGDVFGELALFDPGPRTSTVITLTEVEALRMDRNALRTWIIERPEIAEQLLRVLARRLRHTNNTLCDLIFTDVPARVAKQILDLAMRFGTDSGGPVRVEHHLTQKELAQLVGSSRETVNKALADFAQRGWIRQQGKALIIDQPAKLARRARA

SEQ ID NO: 26538 - protein, 351 aa, Mycobacterium avium subsp. paratuberculosis K-10
MRIRGSTASRRDSFPHRRVGDDGGVAVTKLSGVFRVGELEPAFAEELAARYDVPRLPDGAARDRFLAEHAAEVRALLTWGRPGVDAALIAALPNLEVIVNNGAGVDLIDTAAADRRGIGVSNTPDVLSDTVADTALGLILMTLRRLGAADRYVRAGRWAREGPFPYGRDVSGLQVGILGLGRIGSAIATRLRGFDCAIAYHNRRRIDGSPYRYAASAVELAESVDVLVVATTGDHQAHKLVDRAVLRALGPEGYLINIARGSVVDQEALVEMLAGGELAGAGLDVFADEPHVPAELVGLDNVVLLPHVGSATARTRRAMASLALRNLDSYLATGQLVTPVLRPRRRIPDRN

SEQ ID NO: 26539 - protein, 1527 aa, Mycobacterium avium subsp. paratuberculosis K-10
MTPKRAGLYNPAFEHDACGVAMVVDMHGRRSRDIVDKAITALLNLEHRGAQGAEPRSGDGAGILIQVPDAFLREVVDFELPPEGSYATGIAFLPQSSKDAATACAAVEKIAEAEGLTVLGWRNVPTDDSSLGALSRDAMPTFRQVFMAGASGMTLERRAYLMRKRAEHELGTKGPGQDGPGRETVYFPSLSGQTFVYKGMLTTPQLKAFYLDLQDDRLTSALGIVHSRFSTNTFPSWPLAHPFRRIAHNGEINTVTGNENWMRAREALIKTDVFGTEADVEKLFPICTPGASDTARFDEVLELLHLGGRSLAHAVLMMIPEAWERHESMDPARRAFYQYHASLMEPWDGPASMTFTDGTVIGAVLDRNGLRPSRIWVTEDGLVVMASEAGVLDLDPATVVRRMRLQPGRMFLVDTAQGRIVSDEEIKAELAAEHPYQEWLDRNLVPLDDLPQGDYKRMPHDRLVKRQQTFGYTYEELNLLVAPMVRTGAEPIGSMGTDTPVAVLSQRPRMLYDYFQQLFAQVTNPPLDAIREEVVTSLQGTTGGERDLLTPTELSCHQIVLSQPILRNRELAKLVNLNPDDEVNGRPHGMRSKVIRCLYPVAEGGAGLAAALEDVRAQASAAIADGARVIILSDRESDEKMAPIPSLLAVAGVHHHLVRDRTRTHVGLVVESGDAREVHHMAALVGFGAAAINPYMVFESIEDMLDRGVIEGIDRNTALNNYVKAAGKGVLKVMSKMGISTLASYTGAQLFQAVGISEDVLDEYFTGLSCPIGGITLDDIAADVAARHALAYLDRPNERAHRELEVGGEYQWRREGEYHLFNPETVFKLQHATRTGQYKIFKDYTRLVDDQSERMASLRGLLKFRAGVRPPVPLEEVEPASEIVKRFSTGAMSYGSISAEAHETLAIAMNRLGGRSNSGEGGEDVKRFDRDPDGSWRRSAIKQVASGRFGVTSHYLTNCTDIQIKMAQGAKPGEGGQLPGHKVYPWVAEVRHSTPGVGLISPPPHHDIYSIEDLAQLIHDLKNANPAARVHVKLVSENGVGTVAAGVSKAHADVVLISGHDGGTGATPLTSMKHAGAPWELGLAETQQTLLLNGLRDRIVVQVDGQLKTGRDVMIAALLGAEEFGFATAPLVVSGCIMMRVCHLDTCPVGVATQNPVLRERFTGKPEFVENFFMFIAEEVREYMAQLGFRTLNEAVGQVKSLDTTLARAHWKAHRLDLGPVLHEPESAFMNQDLYCSSRQDHGLDKALDQQLIVMSREALDSGKPVRFSTTISNVNRTVGTMLGHEVTKAYGGQGLPDGTIDITFDGSAGNSFGAFVPRGITLRVYGDANDYVGKGLSGGRIVVRPSDNAPADYVAEDNIIGGNVILFGATSGEAYLRGVVGERFAVRNSGAHAVVEGVGDHGCEYMTGGKVVVLGRTGRNFAAGMSGGVAYIYDPPGEFPQHLNAEMVELESLDDDDIEWLHGMIQAHVDATDSAVGQRILGDWAQQQRHLVKVMPRDYKRVLQAIAEAERDGGDVDKAIMAAAHG

SEQ ID NO: 26540 - protein, 421 aa, Mycobacterium avium subsp. paratuberculosis K-10
MALVVQKYGGSSVANADRIRRVAERIVATKKQGNDVVVVVSAMGDTTDDLMDLAQQVCPAPPPRELDMLLTAGERISNALVAMAIESLGAQARSFTGSQAGVITTGTHGNAKIIDVTPGRLQAALDEGRIVLVAGFQGVSQDTRDVTTLGRGGSDTTAVALAAALGADVCEIYTDVDGIFSADPRIVHNARKLDTVTFEEMLEMAACGAKVLMLRCVEYARRYNIPVHVRSSYSDKEGTVVVGSIKDKPMEDPILTGVAHDRSEAKVTVVGIPDIPGYAARVFRAVADADVNIDMVLQNVSKVEDGKTDITFTCSREAGPTAVAKLDALKDEIGFTQLLYDDHIGKVSLIGAGMRSHPGVTATFCEALAQVGVNIELISTSEIRISVLCRDTELDKAVVALHEAFGLGGAETATVYAGTGR

SEQ ID NO: 26541 - protein, 224 aa, Mycobacterium avium subsp. paratuberculosis K-10
MDEILARAGIFQGVEPSAVTALTKQLQPVDFPRGHTVFAEGEPGDRLYIIVSGKVKIGRRSPDGRENLLTIMGPSDMFGELSIFDPGPRTSSATTITEVRAVSMDRDALRAWIADRPEIAEQLLRVLARRLRRTNNNLADLIFTDVPGRVAKQLLQLAQRFGTQEGGAMRVTHDLTQEEIAQLVGASRETVNKALADFAHRGWIRLEGKSVLISDSERLARRAR

SEQ ID NO: 26542 - protein, 272 aa, Mycobacterium avium subsp. paratuberculosis K-10
MSAGGSPLRNGDPAPARGTVPLTPDACPSWLRPLVDNVDHVPDAARRRLPADVLAMITTKAASALTSVRGAAREAAVLVLFSGPESGPPGGGPPTDADLLVTVRASTLRHHAGQAAFPGGAADPTDDGPVATALREAREETGIDVSRLHPLATMEKMFIAPSQFHVVPVLAYSPDPGPVAVVNEAETALVARVPLRAFINPANRLMVYRGDLGRRWAGPAFLLNEMLVWGFTGQVISALLDVAGWAQPWDTSDQRELDAAMALVGERGDALE

SEQ ID NO: 26543 - protein, 143 aa, Mycobacterium avium subsp. paratuberculosis K-10
MLRTMLKSKIHRATVTQADLHYVGSVTIDADLMDAADLLEGEQVTIVDIDNGARLVTYAITGERGSGVIGINGAAAHLVHPGDLVILIAYGTMEEAEARAYQPRIVFVDADNKPVDLGHDPAFVPDFEIAGAAELLDPRIVAR

SEQ ID NO: 26544 - protein, 364 aa, Mycobacterium avium subsp. paratuberculosis K-10
MTEADSAQALDEPLGDHVLELQIAEVIAETDDARSLVFAVPDDDGDPDIPPERLRYAPGQFLTLRVPSERTGSVARCYSLCSSPFTDDALTVTVKRTADGYASNWLCDNARPGMRIHVLAPSGNFVPKTLGDDFLLMAAGSGITPIMSIAKSALSEGSGQVTLLYANRDERSVIFADALRELSAKYPDRLTVLHWLESLQGLPSVTALAQLAAPYTDRPVYICGPGAFMDSAREALETLKVPAAQIHIEVFKSLDSDPFAAVKIEDTAEGDEPPATAVVELDGETHTVSWPRNAKLLDVLLAKGLDAPFSCREGHCGACACTLRKGQVSMEVNDVLEQQDLDEGLILACQSHPESDSVEVTYDE

SEQ ID NO: 26545 - protein, 386 aa, Mycobacterium avium subsp. paratuberculosis K-10
MPEAYVIDAVRTAVGKRGGSLAGIHPVDLGALGWRGLLDRVDVDPAAVDDVIAGCVDAIGAQAGNIARLSWLAAGYPEEVPGVTVDRQCGSSQQAISFGAQAIMSGTADLIVAGGVQNMSQIPISSAMTVGEQFGFTSPTNESKQWLHRYGDQEISQFRGSELIAEKWNLSREEMERYALTSHERAFAAIRGGHFDNEIITVETESGPFRVDEGPRESSLEKMAGLKPLVEGGRLTAAMASQISDGASAVLLASERAVNDHGLQPRARIHHISARAADPVFMLTGPIPATRYALDKTGLSIDDIDTVEINEAFAPVVLAWLKEIKADPEKVNPNGGAIALGHPLGATGAKLFATMLNELERIGGRYGLQTMCEGGGTANVTIIERL

SEQ ID NO: 26546 - protein, 492 aa, Mycobacterium avium subsp. paratuberculosis K-10
MAPGGGRGSKTAGYGNSDFVVVANRLPVDQERLPDGSTAWKRSPGGLVTALEPLLRRQRGAWVGWPGIVDEDVDHEDDPIVQDDLELRPVKLSADDVAEYYEGFSNATLWPLYHDVIVKPIYHREWWDRYVAVNRRFAEATSRAAARGATVWVQDYQLQLVPAMLRELRPDLTIGFFLHIPFPPVELFMQLPWRTEIVKGLLGADLVGFHLTGGAQNFLFLSRRLIGANTSRGAVGMRSRYGEVELESRVVRVGAFPISIDSTALDQTARHRDIRRRAREIRAELGNPRKVLLGVDRLDYTKGIDVRLKAFSELLAEGRAKRDDTVLVQLATPSRERVDSYQQLRNDIERQVGHINGEYGEVGHPVVHYLHRPVPRNELIAFFVAADVMLVTPLRDGMNLVAKEYVACRSDLGGALVLSEFTGAAAELRQAYLVNPHDLEGVKDTVEAALNQSVEEGRRRMRSLRRQVLAHDVDRWARSFLDALAESGPRDG

SEQ ID NO: 26547 - protein, 67 aa, Mycobacterium avium subsp. paratuberculosis K-10
MAQGTVKWFNGEKGFGFITPDDGTKDLFVHYSEIQGSGYRSLDENQRVQFDVEQGAKGPQAVGVSTV

SEQ ID NO: 26548 - protein, 389 aa, Mycobacterium avium subsp. paratuberculosis K-10
MHLLVELEKTVAEAVIVSALRTPIGTARKGTLRDTSAFDLAHHVVSEAVKDIDPTQVDDVILGEGLYGGGVLARHAAITAGLTQVPGLANNRHCAAGQAAVQSAAASVRAGMDQLVIAGGVNSASTSPRSRMQVDGEWVDWFPPTHPDRPDAPNMDMSITVGWNAAVKAGVSREEMDAWALRSHRNAIAAIDEGRFKEEIVPIDTPHGLFSVDEHPRRDTSMEKLAALKPLHPEIEGFSITAGNACGANDGAAVLTIASDRLGLRPLATIRSWASVGVDPAITGLAPVEAIPKALGRAGLSISDVDLFEINEAFAAMCVATVKLLELDPDKVNVSGSGCSLGHPVAATGARMLVTLVHELRRRGGGIGVAAMCAGGGMGSATVIEVAGE

SEQ ID NO: 26549 - protein, 384 aa, Mycobacterium avium subsp. paratuberculosis K-10
MRETVIVEAVRTPVGKRNGALSGMHAADLSAIVLNELVERTGIGPELIDDVVWGCVSQVGDQSSNIGRYAVLAAGWPESIPGTTVNRACGSSQQALDFAVQAVMSGQQDVVVAGGVEVMSRVPLGAARATGMPYGPKVLARYDDFSFNQGLSAEMIAKKWGFTRTQLDEYSVRSHERAAAAQDAGAFTDQIVPVFVEDAENKVVAADEGVRRGSSVEKLAALKPAFAEDGVIHAGNSSQISDGAAALLVTTAEMAVELGLTPIVRYVAGAVTGADPVLMLTGPIPATEKVLKKAGVALSDVGVFEVNEAFAPVPLAWLAETGADAARTNPLGGAIALGHPLGASGAVLMTRMAHHMRDNGIRYGLQTMCEGGGTANATLVELVS

SEQ ID NO: 26550 - protein, 297 aa, Mycobacterium avium subsp. paratuberculosis K-10
MTIGFIGLGNMGFPMASRLIREQHDVVAFDSRREALERLVAAGARPASSPKEVADGAETVLASLPTPGASLEVATGTAGVIEGARVKRYVDLSTVGSRTAMRIHDLLARRNIVAIDSPVSGGVGGAEQGTLALMVSGPRGEFDVIRTTLEALGRPFYVGDKPGAAQTMKLANNILAANVLAATAEVVVMGVKAGLDPAVMIEVLNAGSGATSASRDKFPRAILPRSFDYGFATGLMVKDVRLYLDEASALGVPAEVAETIARLWETTAREEGPEADFTTVIKPLERAAGVTVGRSAR

SEQ ID NO: 26551 - protein, 563 aa, Mycobacterium avium subsp. paratuberculosis K-10
MPVTDAATEPAYTVGDYLLDRLAELGVSEIFGVPGDYNLEFLDHIVAHPRLRWVGNANELNAGYAADGYGRLRGMSALVTTFGVGELSAANAVAGSYAEQVPVVHIVGGPSKDAQGTRRALHHSLGDGDFEHFFRVSREITCAQANLMPATARREIDRVLSEVREQKRPGYILLSTDVARFPTEPPEAALPRYTGGTSPRALAMFTEAAAALIGEHRITVLADLLVHRLQAIKELEALLAADVVPHATLMWGKSLLDESSPNFLGIYAGSASAPAVRTAIEEAPVLVTAGVVFTDMVSGFFSQRIDPARTIDVGQYQSSVAGEVFAPLEMGEALQALTAILTRRGVSSPPVASPPAEPLPPPPPREQPLTQKMVWDRVCTALTPGNVVLADQGTSFYGMADHRLPQGVTFIGQPLWGSIGYTLPAALGAAVAHPDRRTVLLIGDGAAQLTVQELGTFAREGLSPVIVVVNNDGYTVERAIHGETAPYNDIVGWKWTEVPNALGVTEHLAFRVQTYGELDDALTAAARHQDRMVLVEVVLPRLEIPRLLVELVRPTSPDGSPRR

SEQ ID NO: 26552 - protein, 393 aa, Mycobacterium avium subsp. paratuberculosis K-10
MTVSRLRPYATTVFAEMSALAARAGAVNLGQGFPDEDGPAEMLKAAQEAIADGVNQYPPGIGIAPLRHAIAAQRHRRYGIEYDPDTEVLVTVGATEAIASAVIGLVEPGSEVLLIEPFYDSYSPVIAMASAQRVAVPLVPHGRGFALDADALRRAVTPRTRALIVNSPHNPTGTVLGATELAAIAEVAVESDLLVITDEVYEHLVFDDHRHLPLAGFDGMAERTITISSAAKMFNCTGWKIGWACGPAHLIAGVRAAKQYLSYVGGAPFQPAVALALETQDAWVADLRDRLRARRDRLAAGLIDIGFEVHDSAGTYFLCADPRPLGYDDSVAFCAALPEKVGVAAIPLSPFCDPAGAHGPADVWNHLVRFTFCKRDDTLDEAIRRLAALRGAG

SEQ ID NO: 26553 - protein, 188 aa, Mycobacterium avium subsp. paratuberculosis K-10
MPAPELRDVRTVFLDRDGTVNVKAAEGEYIKSPAELVLLPGAARALAALNAAGLRTVLVTNQRWLSEPTAAPADFAAVHDRLVRLLADRGARIDAAYHCPHPANSCDCRKPGPGMLLRAAAEHDVDLAASVMIGDSDVDMVAGRAAGTKTILIRPGARQAVAEADFVVDDLAAAVELILNAGKTPPAG

SEQ ID NO: 26554 - protein, 326 aa, Mycobacterium avium subsp. paratuberculosis K-10
MSHDWTDNRKNLMLFSGRAHPELAEQVAKELDVHVTAQTAREFANGEIFVRFHESVRGCDAFVLQSAPAPVNSWLMEQLIMIDALKRGSAKRITAVMPFYPYARQDKKHRGREPISARLVADLLKTAGADRIVTVDLHTDQIQGFFDGPVDHMRGQNLLTGYIRDNYPDGNMVVVSPDSGRVRIAEKWADALGGVPLAFIHKTRDPRVPNQVVSNRVVGEVAGRTCVLIDDMIDTGGTIAGAVKLLRDEGAGDVIIAATHGVLSDPAAERLASCGAREVIVTNTLPIGEEKRFPQLTVLSIAPLLASTIRAVFENGSVTGLFDGDA

SEQ ID NO: 26555 - protein, 260 aa, Mycobacterium avium subsp. paratuberculosis K-10
MTTLEIKDLHVSVVNPNAAESEREIPILNGVDLTVKSGETHALMGPNGSGKSTLSYAIAGHPKYTVTSGSITLDGQDVLAMSIDERARAGIFLAMQYPVEVPGVSVSNFLRSAATAVRGEAPKLRHWVKEVKAAMGALEIDPAFAERNVNEGFSGGEKKRHEILQLELLKPKIAILDETDSGLDVDALRVVSEGVNRYAQAEHGGILLITHYTRILRYIHPEYVHVFVGGRIAESGGSELADELEQNGYVRFTQAAAAGA

SEQ ID NO: 26556 - protein, 398 aa, Mycobacterium avium subsp. paratuberculosis K-10
MSERVILAYSGGLDTSVAISWIGKETGREVVAVAIDLGQGGEDMEVIRQRALDCGAVEAVVVDARDEFAEGYCLPTIRNNALYMDRYPLVSAISRPLIVKHLVAAAREHGGSTVAHGCTGKGNDQVRFEVGFASLAPDLEVLAPVRDYAWTREKAIAFAEENAIPINVTKRSPFSIDQNVWGRAVETGFLEHLWNAPTKDVYAYTEDPTLNWSTPDEVIVGFERGVPVSIDGKPVSVLGAIEELNARAGAKGVGRLDVVEDRLVGIKSREIYEAPGAMVLITAHTELEHVTLERELGRFKRHTDQRWAELVYDGLWYSPLKAALESFVDKTQEHVTGEIRMVLHGGHIAVNGRRSAESLYDFNLATYDEGDSFDQSAAKGFVYVHGLSSKIASRRDQR

SEQ ID NO: 26557 - protein, 601 aa, Mycobacterium avium subsp. paratuberculosis K-10
MCGVTGEVRLDGRAPDVAAVSAMAAVLTPRGPDAGGAWSQGRVALGHRRLKIIDLTEAGAQPMVDSELGLSIAWNGCIYNYKELRSELSGYGYRFFSHSDTEVLIKAYHRWGDDFVSHLFGMFAFAIVERDSGRVLLGRDRLGIKPLYLTEDSHRVRFASTLPALLAGGGVDTRIDPVALHHYMSFHSVVPAPATILRGVRKVPPASLVAIEPDGKRTVTTYWAPDFTRHADRADWSERDWEDAVLSTLRLAVKRRLVADVPVGCLLSGGVDSSLIVGLLAEAGQHGLSTFSIGFESAGGVKGDEFQYSDIVAQRFETNHHQIRIDSDRMLPALDGAIGAMSEPMVSHDCVAFYLLSQEVARHVKVVQSGQGADEVFAGYHWYPPMGEPAAATLDGAVAQYRRAFFDRDTAGVAQLVGPGILAPGDPSLRFVTEHFAQAGAETGIDRALRLDTTVMLIDDPVKRVDNMTMAWGLEGRVPFLDHELVELAATCPPEYKIAHEGKGVLKQAARRVIPSEVIDRPKGYFPVPALTHLEGPYLDMDRDALYAPTAKERGLFNTDAVDALLANPNGKLTPLRGNELWQIALLELWLQRHGVTGPVA

SEQ ID NO: 26558 - protein, 314 aa, Mycobacterium avium subsp. paratuberculosis K-10
MTINASAPQRQGAVAVVDTVTALPAAVAGDGHTADPFEPLTVGAMVDRVSAIAVEKAAHPWAFLMRSLVGGAMVAFGVLLALVVSTGVKTPGVASLLMGLAFGMSFVLILVSGMSLITADMAAGFLAVLQRALSIRSYVVLVAVGLVGNIVGALVFVTVCAAAGGPYLGAFADRAATVGTQKAGQPFWTALLLAVLCTWFLQTSMCMFFKARSDVARMALAFYGPFAFVIGGTQHVIANVGFVGLPLLLNLFHPIAARGDIGWGIGDHGLLTNIGVTTVGNLIGGTVFVALPFWIIAHLQRRRILSTGALRPDG

SEQ ID NO: 26559 - protein, 643 aa, Mycobacterium avium subsp. paratuberculosis K-10
MCGLLAFVAARAGAVGADDAIARASHLMRHRGPDEPGTWAGADGSVVFGFNRLSIIDIAHSHQPLRWGPPETPDRYELVFNGEIYNYLELRDELAARHGAVFATDGDGEAIVAGFHHWGTDVLTRLRGMFAFALWDTVTRELFCARDPFGIKPLFVATGTGGTAVASEKKCLLELAELIGFDTAIDERAVQHYTVLQYVPEPETLHRGVRRLESGCYARIRPGAAPDVTRYFVPRFAAVPITRDTEQARYDEITAVLEDSVAKHMRADVTVGAFLSGGIDSTAIAALAIRHNPRLITFTTGFEREGFSEIDVAVASAEAIGARHIAKVVHPDEFVAALPEIVWYLDEPVADPALVPLFFVAREARKHVKVVLSGEGADELFGGYTIYREPLSLRPFDYLPRPVRRSMGKVSRPLPDGMRGKSLLHRGSLTLEERYYGNARSFSDTQLRDVLPGFRAEWTHTDVTAALYAQSIGWDPVARMQHIDLFTWLRGDILVKADKMTMANSLELRVPFLDPEVFAVASRLPVEAKITRTTTKYALRRALEPIVPAHVLHRPKLGFPVPIRHWLRAGELQDWAYSMVASSQAGHLVDLGAVRRMLDEHRNGVSDHSRRLWTVLIFMLWHAIFVEHSVVPQISEPVYPVQL

SEQ ID NO: 26560 - protein, 555 aa, Mycobacterium avium subsp. paratuberculosis K-10
MTTARPVKTRNEGQWALGDREPLNDTEKIKLADGPLNVRERIINVYAKQGFDSIDKSDLRGRFRWMGLYTQREQGYDGSWTGDDNTDKIEAKYFMMRVRSDGKAMSAHTMRTLGQISTEFARDTADISDRENLQLHWIRIEDVPEIWRRLESVGLQTTEACGDCPRGIHGSPLAGDSLDEVLDPSPAIEEIVRRSLNNPEYANLPRKYKTAVSGLQDVSHETHDVAFVGVEHPEHGPGLDLWVGGGLSTNPMLAQRLSVWVPLDEVPDVWEAVTQLFRDYGYRRLRAKARLKFLVKDWGIEKFREILEQEYLNRRLIDGPAPAPVKHTIDHVGVQKIKNGLNAVGVAPIAGRVSGTTLSAVADLMEQVGSDRARWTPFQKLVILDVPDDKVDELVTGLDALGLPSRPSSWRKNTMACTGIEFCKLSFAETRVRTQTLVPELERRLADVDAQLDAPISVHLNGCPNSCARIQVADIGFKGQWIDNGDGTSVEGFQVHLGGGLGEQSGFGRKLRQHKVTSEELGDYIDRVTRKYLEGRNDGETFASWALRADEEELR

SEQ ID NO: 26561 - protein, 483 aa, Mycobacterium avium subsp. paratuberculosis K-10
MPATPIGLRAQLLRRRPVVGAHVAPGTADHLRRGIGTFQLTMFGVGSTIGTGIFFVMSQAVPEAGPAVIVSFLLAGVAAGLAAVCYAELASAVPVSGSSYSYAYTTLGEVVAMGVAACLLLEYGVATAAVSVNWSGYLNKLLSNVVGFQLPHALSAAPWDAQPGYVNLPAVMLIGMCALLLIRGASESAKVNAIMVMIKLGVLVVFGILAFTAFDVHHLDDFAPFGVAGVGTAAGTIFFSYIGLDAVSTAGDEVTNPQKTMPRALIAALSTVTGVYVFVALAALGTQPWQDFGGQQEAGLATILDHVTHGSWASTILAAGAVISIFSVTLVTMYGITRILFAMGRDGLLPPRFARVNPRTMTPVNNTVIVAVAASTLAAFIPLQNLADMVSIGTLTAFVVVSVGVIVLRVREPDLPRGFRVPGYPVTPVLSIMACGYILASLHWYTWIAFSGWVLLALIFYFVWGRHHSALNDAAVDPSGQER

SEQ ID NO: 26562 - protein, 485 aa, Mycobacterium avium subsp. paratuberculosis K-10
MDQSDAPLLNALADYRDKNRYGFAPPGHRQGRGTDDRVLAVLGREPFLDDVLASGGLDDRRASNGYLQRAEDLMAEAVGAEIAWFSTCGSSLSVRAAMMAVAGGQGSLLVGRDSHKSIVAGLIFSGVQPRWITPRWDAERHFSHPPSPQQVEEAWDKHPDAAGALVVSPSPYGTCADIAGIAEVCHRRGKPLILDEAWGAHLPFHEDLPTWAMDAGADVCVVSVHKMGAGFEQGSVFHVQGDLIDRDRLSACADLLMTTSPNVLIYAAMDGWRRQMVQHGHQLLGAALDLARQVRDEIELIPDVEVLDDELLGVQASHDLDRMQVLIDVCGTGTSGYQAADWLREHARIDVGMSDHRRILATLSMADDKETLGRLTDALRAWRTAAQDFDPAPRIALPSPSEMQLETVELPRDAFFGRVQEVPTKTAAGRIAAEQITPYPPGIPAVVPGERLNDAVLDYLCSGVAAGMNLPDAADPSLQTIRVLA

SEQ ID NO: 26563 - protein, 299 aa, Mycobacterium avium subsp. paratuberculosis K-10
MTEFRSGFVCLVGRPNTGKSTLTNALVGTKVAITSMRPQTTRHTIRGIVHREDFQIILVDTPGLHRPRTLLGKRLNDLVRDTYAEVDVIGLCIPADEAIGPGDRWIVEQIRATAPKTTLVAIVTKIDKVPKDRVAAQLVAVSELVGDSAEIVPVSAVTGAQVDIVIDVLAAALPPGPAYYPDGELTDEPEEVLMAELIREAALEGVRDELPHSLAVVIDEVNPREDRDDLIDVHALLYVERDSQKGIIIGKGGARLREVGTAARAQIEKLLGTKVYLDLRVKVAKNWQSDPKQLGRLGF

SEQ ID NO: 26564 - protein, 555 aa, Mycobacterium avium subsp. paratuberculosis K-10
MTTARPAKARNEGQWALGNREPLNPNEEMKQAGAPLAVRERIETIYAKNGFDSIDKSDLRGRFRWWGLYTQREQGYDGSWTGDENIEKLEARYFMMRVRCDGGAISAAALRTLGQISVDFARDTADITDRENIQYHWIEVENVPEIWRRLDAVGLRTTEACGDCPRVILGSPLAGESLEEVIDPSWAIAEIARRYIGQPDFADLPRKYKTAISGLQDVAHEVNDVAFIGVNHPEHGPGLDLWVGGGLSTNPMLAQRVGAWVPLHEVPEVWAAVTSVFRDYGYRRLRSKARLKFLVKDWGIEKFREVLETEYLKRPLIDGPAPEPVAHPIDHVGVQRLKNGLNAVGVAPIAGRVSGTILLAVADLAQQAGCDRIRFTPYQKLVLLDIPDDKLDEVVAGLEALGLQSQPSHWRRNLMACSGIEFCKLSFAETRVRAQGLVPELERRLADVNRQLDVPITINLNGCPNSCARIQVADIGLKGQMVDDGEGGSVEGFQVHLGGSLGQDSGFGRKLRQHKVTSDELGDYIERVARNFVKYRGEGERFAQWAMRADEDDLR

SEQ ID NO: 26565 - protein, 492 aa, Mycobacterium avium subsp. paratuberculosis K-10
MPRFVDRVVIHARAGSGGNGCASVHREKFKPLGGPDGGNGGRGGSIVFVVDPQVHTLLDFHFHPHISAPSGKQGMGNNRDGAAGADLEVKVPDGTVVLDENGRLLADLVGAGTRFEAAAGGRGGLGNAALASRARKAPGFALLGEPGETRELTLELKTVADVGLIGFPSAGKSSLVSAISAAKPKIADYPFTTLVPNLGVVSAGEHTFTVADVPGLIPGASAGRGLGLDFLRHIERCAVLVHVIDCATADPGRDPISDIDALEAELAAYTPTLQGDVTLGDLTERPRAVVLNKIDVPEARELAEFVRDEIAERGWPVFLVSTVAREGLQPLIFGLWQMISEYQSAQPEIVPRRPVIRPVPVDDSGFRVEPDPRQPGAFVVSGARPERWVRQTNFDNDEAVGYLADRLARLGVEEELLRLGARPGCAVTIGDMTFDWEPQTPAGQQVVLSGRGTDARLERTERVGAAERKAARRQRRTGDDAERGTTERGENT

SEQ ID NO: 26566 - protein, 406 aa, Mycobacterium avium subsp. paratuberculosis K-10
MSAVREAVICEPVRTPIGRYGGMFKALTAVDLGVAALGGLLQRTGLPPEAVQDVILGHCYPSSEAPAIGRVVALDSGLPVTVPGMQVDRRCGSGLQAVIQACLQVRNGDHDLVIAGGCESMSNVAFYSTDMRWGGARSGVRVHDGLARGRTTAGGRRYPVPGGMLETAENLRRQYGISRQEQDELAVRSHQRAVAAQKDGILAQEIIAVAVPTRHGDELIDTDEHPRADTSVESLSKLKPVLLDQDPEATVTAGNASGQNDVASMCVVTTPEKADEHGLRPLVRLVSWAVAGVAPHIMGIGPVPATEVALAKAGLSLSDIDLIELNEAFAAQALAVMREWKFGAADHDRTNVHGSGISLGHPVGATGGRMLATLARELTRRQARYGLETMCIGGGQGLAAAFERVA

SEQ ID NO: 26567 - protein, 389 aa, Mycobacterium avium subsp. paratuberculosis K-10
MIVAGARTPIGKLMGSLKDFSASDLGAIAIAGALEKADVPADLVEYVIMGQVLTAGAGQMPARQAAVAAGIGWDVPALSINKMCLSGIDAIALADQLIRAGEFDVVVAGGQESMTKAPHLLMDSRAGYKYGDVTVLDHMAYDGLHDVFTDQPMGALTEQRNDVDKFTREEQDQYAARSHQRAAAAWKDGVFTDEVVPVNIPQRKGDPLQFTEDEGIRANTTAESLAGLKPAFRKDGTITAGSASQISDGAAAVVVMSKAKAQQLGLSWLAEIGAHGVVAGPDSTLQSQPANAIKKALGREGISVDQLDVVEINEAFAAVALASTRELGVNPDIVNVNGGAIAVGHPIGMSGARITLHAALELSRRGSGYAVAALCGAGGQGDALILRAG

SEQ ID NO: 26568 - protein, 419 aa, Mycobacterium avium subsp. paratuberculosis K-10
MNYTGHNGKPLVERVSTENAAARIEGLPRVPISKATAHEVISLSYGFFTPLTGFMGRREVDATLDEFALPDSTLWSIPIVFDMSADDIAERDVKEGASVVLDYLGVPMAILDVTEIYEYDLERMAEKTYGTTDPRHPGVKKTLGYHNRFIGGDITLINEPVFNEPFKSFWLTPRQHQDALAAKHWHRVVAHQTRNVPHTGHEALMKQAWLAANEDQPVDSLNTGVLVNAIIGQKRVGDYIDEAILLAQNALRTSGYFRENVHMVSFTLWDMRYAGPREAIFHAILRTNLGCTHHMFGRDHAGVGDFYHPYDSQNILKQYRNQLGIKPVFLRENWYCPVCLEVTNSALCGHEAQAQSFSGSLIRSILTDEVKPTQKVMRHDVFEVVMECAAKHGQGSPFVTEEYLANRLPVFTLNQLEGS

SEQ ID NO: 26569 - protein, 382 aa, Mycobacterium avium subsp. paratuberculosis K-10
MAEAVIVEAVRSPIGKRNGGLSGVHPAELSAQVLNGLVDKAGVDPGIVDDVIWGCVMQAGEQALDIGRTALLTAGWPETVPGVTVDRQCGSSQQSIHFAAAGVIAGHYDVVVAGGVESMSRTPMGASLANGGRPYPQAFLDRYQGQIPNQGIGAEMIAEKWGFDRTALDEFSLASHEKAAAAQDSGAFDDQIVGIKDQDGNVVLKDEGIRRGTPMEKMASLKPAFKEDGVIHAGNSSQISDGSAAILFMSAEKAKELGLKPIAKVHTATLAGADPVIMLTAPIPATQKVLKKSGLSIDDIGVYEVNEAFAPVPMAWLKDIGADEKKLNPNGGAIALGHPLGGSGARIMTTLLYHMRDKGIRYGLQTMCEGGGQANATIVELL

SEQ ID NO: 26570 - protein, 366 aa, Mycobacterium avium subsp. paratuberculosis K-10
MSIRWAASRPPSIWASRPADLYGRRDHDRFTAVLWGVRAVFEGFASVSRWHPARVKPVQRKLTAVVTKREFAAPDVVALTLADPDGGLLPSWTPGAHIDVLLPSGRRRQYSLCGPPGHRGEYRIAVRRIADGGGGSIEMHEAFGVGDTVEFEGPRNAFYLGTAEHDVLFVIGGIGVTPILPMIRVAAQRGIDWRAIYTGRSREYMPLLDEVVSVDPQRVTVWADDEHGRFPTAAELLAAAGPATAVYVCGPSAMLEAVRIARNEHAGAPLHYERFSPAPVVDGVPFELELARSRQVLAVPANRTALDVMLDRDPTTPYSCRQGFCGTCRVKVLAGQVDHRGRTDPGQDGMLVCVSRADGGRLVIDA

SEQ ID NO: 26571 - protein, 373 aa, Mycobacterium avium subsp. paratuberculosis K-10
MRVGVPTETKTNEFRVALTPAGVAELTRRGHEVLVQSGAGEGSSIPDSEFKAAGAQLADTAEQVWADAELLLKVKEPVPAEYDLLRRNQILFTFLHLAASRACTEALLTSGTTSIAYETVQTADGTLPLLAPMSEVAGRLSAQVGAYHLMRTHGGRGVLMGGVPGVKPADVVVVGAGTAGYNAARVAGGMGAMVTVLDVNINKLRLLDAEFGGQVRTRYSSAYDLEGTVKRADLVIGAVLLPGAKAPNLISNSLVAQMKSGAVLVDISIDQGGCFEDSRPTTHDDPTFAVHDTVFYCVANMPSAVPKTSTVALTNATMPYVLALADRGWRAACRSNHALAKGLSTHDGALLSQQVAADLGLPCTDPAGVLQQD

SEQ ID NO: 26572 - protein, 528 aa, Mycobacterium avium subsp. paratuberculosis K-10
MNLPVVLIADKLAESTVAALGDQVEVRWVDGPDREKLLAAVPEADALLVRSATTVDAEVLAAAPKLKIVARAGVGLDNVDVDAATERGVLVVNAPTSNIHSAAEHALALLLAAAREIPAADASLREHTWKRSSFSGTEIFGKTVGVVGLGRIGQLVAQRLSAFGTHLIAYDPYVSPARAAQLGIELLSLDELLARADFISVHLPKTPETAGLIDKDALAKTKPGVIIVNAARGGLVDEAALADAVRSGHVRAAGLDVFSKEPCTDSPLFELPQVVVTPHLGASTTEAQDRAGTDVAASVKLALAGEFVPDAVNVAGGTVNEEVAPWLDLVRKLGLLAATLSDGPPVSLSVQVRGELASEDVEVLKLSALRVLFSAVVEGPVTFVNAPALAEERGVTAEISTASESPNHRSVVDVRAVSHDGTAVNVAGTLSGPQLVEKIVQINGRNFDLRARGINLVINYVDQPGALGKIGTLLGSAGVNIQAAQLSEDAEGPGATILLRLDQDVPADVRSAIGAAVGANKLEVVDLS

SEQ ID NO: 26573 - protein, 622 aa, Mycobacterium avium subsp. paratuberculosis K-10
MSAPTRRPAPDAPGAAGIAPAPPAPAAKPAAGKPKRIGPEQVTGAQSVIRSLEELGVEVIFGIPGGAVLPVYDPLFDSKKLRHVLVRHEQGAGHAASGYAHATGKVGVCMATSGPGATNLVTALADAQMDSIPVVAVTGQVGRTLIGTDAFQEADISGITMPITKHNFLVRSGNEIPQVLAEAFHIAASGRPGAVLVDIPKDVLQGQCTFSWPPRIHLPGYKPTTKPHSRQIREAAKLIAAARKPVLYVGGGVIRGEASEQLRELAELTGIPVVTTLMARGAFPDSHRQHLGMPGMHGTVAAVAALQRSDLLIALGTRFDDRVTGKLDTFAPEAKVIHADIDPAEIGKNRHADVPIVGDVKAVIAELVEMLRHDGAPGNLDIADWWAYLDDVQSTYPLSYGPQSDGSLGPEYVIEKLGQIAGPDAVYVAGVGQHQMWAAQFISYEKPRTWLNSGGLGTMGFAIPAAMGAKMARPEAEVWAIDGDGCFQMTNQELATCAVEGIPIKVALINNGNLGMVRQWQTLFYEERYSQTDLATHSHRIPDFVKLAEALGCVGLRCEREEDVVDVINAARAINDRPVVIDFIVGADAQVWPMVAAGTSNDEIQAARGIRPLFDDETEGHA

SEQ ID NO: 26574 - protein, 392 aa, Mycobacterium avium subsp. paratuberculosis K-10
MVYLDHAATTPMHPAAVEAMTAVLGTVGNASSLHTSGRAARRRIEESRELIADKLGARPSEVIFTAGGTESDNLAVKGIYWARRDAEPRHRRIVTSEVEHHAVLDSVNWLVEHEGAEVTWLPTAADGSVSPAALREVLTRHDDVALVSVMWANNEVGTVQPVAELAAVAAEFGVPMHSDAVQAVGQLPVDFTASGLSAMSVTAHKFGGPPAVGALLLRRDVACVPLAHGGGQERDIRSGTADVAGAVGMAAAARISVDGLETNSARLRALRDRLVDGVLGGIEDVTLNGARDPLRLPGNAHFTFRGCEGDALLMLLDANGIECSTGSACTAGVAQPSHVLVAMGVDPASARGSLRLSLGHTSIDADVDAVLRVLPGAVERARRAALAAAGAS

SEQ ID NO: 26575 - protein, 184 aa, Mycobacterium avium subsp. paratuberculosis K-10
MDLRRARPEPPLAVLLDRDDTLIVDRPYLNDPAGVRPTHDAAKALTRLRRRGLLLAVVTNQSGVARGLISAGQLAAVNDRVDEVLGPFDSWQVCVHGASDGCGCRKPRPGLILAAAEALGVPARRCVMIGDTGADVRAALAAGAAAVLVPTDRTLPAEVEHARTHARVAATLNDAVSLVLSECR

SEQ ID NO: 26576 - protein, 362 aa, Mycobacterium avium subsp. paratuberculosis K-10
MRMTMAQAIWENIPADLYGRRKRDRMYTALYGVGALFGGLASASRWTPARVVPVRRTTTAVVTQREELAPDVVAFTLADPHGGLLPSWTPGAHIDVRLPSGRRRQYSLCGPPGRRTDYRIAVRRIEDGGGGSIEMHDTFRVGDALEFEGPRNAFYLVTDERDVLFVIGGIGVTPILPMIQTAQQHGINWRAVYAGRSRDDMPLLDEVVAVAPERVSVWADDERGRIPTAADLLAEAGPATAVYVCGPTAMLEAVRTARDEHADAPLHYERFGPPPVVDGVPFELELARSRRVLTVPGNRSALEVMLDRDPATPYSCQQGFCGTCKVKVLAGQVDRRGRTVEGDDEMLVCVSRAKNDRLVIDA

SEQ ID NO: 26577 - protein, 505 aa, Mycobacterium avium subsp. paratuberculosis K-10
MTTPTSTTELTFAQLGVRDEIVRALDEKGIQHPFAIQELTLPLALAGDDLIGQARTGMGKTFAFGVPLLQRITAGTAPRALNGTPRALVVVPTRELCLQVTDDLTLAAKHLTADGGRPLSVVPIYGGRPYEPQIDALRAGADVVVGTPGRLLDLAQQGHLQLGGLSVLVLDEADEMLDLGFLPDIERILRQIPDDRQSMLFSATMPDPIITLARTFMNQPTHIRAEAPHSAATHDTTVQYVYRAHALDKVELVSRVLQAESRGATMIFTRTKRTAQKVADELAERGFKVGAVHGDLGQVAREKALKAFRTGDIDVLVATDVAARGIDIDDVTHVINYQIPEDEQAYVHRIGRTGRAGKAGVAVTLVDWDELARWALIDKALGLDVPEPAETYSNSPHLYEELGIPAGAGGRVGAARKPQGPRRSAERATGKPDQKSETATRRSGTRRRRTRGGQPVSGHPSGNGAASSNGEAAADAPAGSPPGNPGSSRRRRRRRKPADATAQSN

SEQ ID NO: 26578 - protein, 391 aa, Mycobacterium avium subsp. paratuberculosis K-10
MNRDAVIVGAVRTPIGKGKASGALHDVLPADLLAHSLRELVARTGVDPAQIDDVIAGAVTQVGDQAVNIARNALLGAGFPESVPGVTIDRQCGSSQQAINFAAQGVIAGAYDVVIAAGVESMGRVPMGSQVLPGSNPFGEAMNARYPEGLVPQGISAELIAAKWGFSRTQLDEFSAASHEKAARATKDGLFDNELIPIAGLATDEFIRPGTTVQTLAGLQPAFYSEATEARFPQINWEITAGNSSPLSDGSAAVLITSSETAARLGLRPLARIHTTAVVGSEPLYMLTGVIPATEKVLSKAGLTLADIDLFEVNEAFAPVVLAWAQDTGADLDKTNVNGGAIAIGHPLGASGARIITTLVNALEQRGGRYGLQTMCEGGGMANATIIERLS

SEQ ID NO: 26579 - protein, 384 aa, Mycobacterium avium subsp. paratuberculosis K-10
MSNTMSKTTSPITANLGDTKRPVVAGAERHPGWHALRKLAARITTPLLPDDYLHLANPLWSARELRGRVVDVRRETEDSATLVIKPGWGFNFDYQPGQYIGIGLLIDGRWRWRSYSLTSSPATSASARTVTITVKAMPEGFLSSHLVAGVEPGTVVRLAAPQGNFVLPDPAPASILFLTAGSGITPVMSMLRTLVRRNQIGDIVHLHSAPTEADVMFRGELAALANEHPGYRLQLRETRTRGRLDLSLLDREVPDWRERQTWACGPEGMLNAAERVWSAAGIGEQLHLERFAVSKAAPAGAGGMVTFARSGRSVDADAATSLMDAGEAAGVQMPFGCRMGICQSCVVGLVEGHVRDLRTGAEHEPGTRVQTCVSAASGDCVLDI

SEQ ID NO: 26580 - protein, 505 aa, Mycobacterium avium subsp. paratuberculosis K-10
MASRWRTKSVEQSIADTDEPDTRLRKDLTWWDLVVFGVAVVIGAGIFTVTASTTGDITGPAIWVSFVIAAGTCALAALCYAEFASTLPVAGSAYTFSYATFGEFLAWIIGWNLLLELAIGAAVVAKGWSSYLGTVFGFSGGTVKFGAAQLDWGALVIVGGVATLIALGTKLSSRFSAVITGIKVSVVVFVVVVGVFYIKRANYSPFIPKPEAGGQAKGIDQSVLSLLTGAHTSHYGWYGVLAGASIVFFAFIGFDIVATMAEETKHPQRDVPRGILASLGIVTLLYVAVAVVLSGMVSYTQLKTMPGRGQANLATAFTANGIHWASKIISIGALAGLTTVVMVLMLGQCRVLFAMARDGLLPRALAKTGSRGTPVRITVLVALVVAVTASVFPITKLEEMVNVGTLFAFVLVSAGVMVLRRTRPDLERGFKAPWVPVLPIASIGACVWLMLNLTALTWVRFGIWLVVGTAIYAGYGYWHSVQGRRDAGEPDRSDALAADPNSPVP

SEQ ID NO: 26581 - protein, 364 aa, Mycobacterium avium subsp. paratuberculosis K-10
MFTQTVQASGRVLARTVRQRVLGSELLDLLTGPHGVDRYTELVAPTWTLGEARAKVTDVRRTTPRSVTLTLEPNDTFLSSHTVTAGQYVNLTVEIDGRRHTRCYSPANREGTATLELTIGRHDGGLVSNHLYDHARRGMVVGLAGVGGDFVLPTPRPRRVLFVSGGSGITPVMAMVRTLVSQRHRGEIAFIHYAPTPAEACYREELAALPSVRVLHGYTRSAGGDLSGRFGPDHLAAAMPAPDAVFVCGPTSLVDAVREHCDNVYTESFTPPVLEAPADPSGGRVTFSDSGVDVVDDGRSLLEQAEAAGLSPQNGCRMGICHTCTRRKTAGTVRNLVTGAVSTAPDEDVQICVSVPVGDVDLSL

SEQ ID NO: 26582 - protein, 365 aa, Mycobacterium avium subsp. paratuberculosis K-10
MTNAQANAVKVGVVAESGADERRVALVPKAVASLVGSGLAVVVESGAGERALLPDALYTEAGADIGDAWAADIVVKVAPPTADEVAKLHSGQTLIGFLAPRNADNSIGALKQAGVQAFALEAIPRISRAQAMDALSSQGNVAGYKAVLLAASESTRFFPMLTTAAGTVKPASVLVLGVGVAGLQALATAKRLGARTSGYDVRPEVADQVRSVGAQWLDLGIDAAGEGGYARELTEEERAQQQKALEEAIAGFDVVITTALVPGRPAPRLVTAAAVESMKPGSVVVDLAGETGGNCELTEPGKTVVKHDVTIAAPLNLPATMPEHASELYSKNITALLDLLIKDGKLAPDFDDEVVAAACVTRESA

SEQ ID NO: 26583 - protein, 430 aa, Mycobacterium avium subsp. paratuberculosis K-10
MDSDGTIGGVTTHQLPVHSSAHHRQQRTFAQSSKLQDVLYEIRGPVHQHAARLEAEGHRILKLNIGNPAPFGFEAPDVIMRDMIQALPYAQGYSDSQGILPARRAVVTRYELVDGFPRFDVDDVYLGNGVSELITMTLQALLDNGDEVLIPSPDYPLWTASTSLAGGTPVHYLCDETQGWQPDIADLESKITERTKALVVINPNNPTGAVYSGEILSQMVDLARKHELLLLADEIYDKILYDDAKHINVASLAPDMLCLTFNGLSKAYRVAGYRAGWLAITGPKDHAGSFIEGINLLANMRLCPNVPAQHAIQVALGGHQSIEDLVLPGGRLLEQRDVAWSKLNEIPGVSCVKPAGALYAFPRLDPEVYDITDDEQLVLDLLLQEKILVTHGTGFNWPAPDHLRIVTLPWARDLAAAIERLGNFLVGYRQ

SEQ ID NO: 26584 - protein, 623 aa, Mycobacterium avium subsp. paratuberculosis K-10
MARAVGIDLGTTNSVVAVLEGGDPVVVANSEGSRTTPSIVAFARNGEVLVGQPAKNQAVTNVDRTIRSVKRHMGTDWSIEIDGKKYTAQEISARVLMKLKRDAEAYLGEDITDAVITVPAYFNDAQRQATKEAGQIAGLNVLRIVNEPTAAALAYGLDKGEKEQTILVFDLGGGTFDVSLLEIGEGVVEVRATSGDNQLGGDDWDDRIVNWLVDKFKGTSGIDLTKDKMAMQRLREAAEKAKIELSSSQSTSINLPYITVDADKNPLFLDEQLTRAEFQRITQDLLDRTRQPFKSVIADAGISVSDIDHVVLVGGSTRMPAVTDLVKELTGGKEPNKGVNPDEVVAVGAALQAGVLKGEVKDVLLLDVTPLSLGIETKGGVMTKLIERNTTIPTKRSETFTTADDNQPSVQIQVYQGEREIAAHNKLLGSFELTGIPPAPRGVPQIEVTFDIDANGIVHVTAKDKGTGKENTIKIQEGSGLSKEEIDRMIKDAEAHAEEDRKRREEADVRNQAESLVYQTEKFVKDQREAEGGSKVPEETLSKVDAAIADAKTALGGTDITAIKSAMEKLGQESQALGQAIYEATQAESAQAGGPDGAAAGGGSGSADDVVDAEVVDDDRESK

SEQ ID NO: 26585 - protein, 695 aa, Mycobacterium avium subsp. paratuberculosis K-10
MADISAIYVAAPEPETGKSTVALGLLHRLTATVAKVGVFRPITRDGQDRDYILELLLSRTTAGLSYQQCVGVTYQQLHADGDAAIATIVDAYHAMAELCDVVVIVGSDYSELGQAIRPAELSTNARIAVNLGAPILLTVSGKGRTAAEVATVVQVCLAELDAQHAHTAAVVVNRCEPAELDAVAEALRGFPQRCYVLPDEPLLSAPTVAELEKAVAGSPVSGEESLREREVTGILVAGMTADHVLERLADGMAVITPGDRSDVVLAVASAHAAEGFPSLSCIVLNGGFALHPSIAALVAGLRLRLPIVATALGTYDTASAAAAARGRVTATSQRKIDTALELMDRHVDIADLLEQLAIPIPTVTTPQMFIHQLTLQARADRKHIVLPEGDDDRILRAAGRVLQRRVADLTILGDEARIRQRSGELGVDLSDVKVIDPRTSALRPEFAQQYAQLRKAKGVTVEQAREIMRDATYFGTMLVYTSQVDGMVSGAAHTTAHTVRPAFEIIKTVPDVSTVSSIFLMCLPDRVLAYGDCAIIPNPTPEQLADIAISSARTAAQFGIEPRVAMLSYSTGDSGTGADVEKVRTATQLVRQRNPDLPVEGPIQYDAAIEPSVAATKLRDSPVAGRATVLIFPDLNTGNNTYKAVQRSAGALAIGPVLQGLRKPVNDLSRGALVEDIVNTIAITAIQAQGLPGGR

SEQ ID NO: 26586 - protein, 387 aa, Mycobacterium avium subsp. paratuberculosis K-10
MDGSDGARRVLVINSGSSSLKFQLVDPEFGVAASTGIVERIGEESSPVPDHDAALRRAFDMLAGDGVDLNTAGLVAVGHRVVHGGNTFYRPTVLDDAVIARLHELSELAPLHNPPALQGIEVARRLLPDIAHVAVFDTGFFHDLPPAAATYAIDRELADRWQIRRYGFHGTSHRYVSEQAAAFLDRPLRGLKQIVLHLGNGCSASAIAGTRPLDTSMGLTPLEGLVMGTRSGDIDPSIVSYLCHTAGMGVDDVESMLNHRSGVVGLSGVRDFRRLRELIESGDGAAQLAYSVFTHRLRKYIGAYLAVLGHTDVISFTAGIGENDAAVRRDAVSGMEELGIVLDERRNLAGGKGARQISADDSPITVLVVPTNEELAIARDCVRVLGG

SEQ ID NO: 26587 - protein, 309 aa, Mycobacterium avium subsp. paratuberculosis K-10
MLVAAGCGHTESLRVASVPTLPPPTPVGMEQLPPQPPLPPDGPDQNCDLTASLRPFPTKAEADAAVADIRARGRLIVGLDIGSNLFSFRDPITGEITGFDVDIAGEIARDIFGAPSHVEYRILSSDERVTALQRGEVDVVVKTMTITCDRRKQVNFSTVYLDANQRILAPRDSPITKVSDLSGKRVCVAKGTTSLHRIRQIDPPPIVVSVVNWADCLVAMQQREIDAVSTDDSILAGLVEEDPYLHIVGPNMATQPYGIGINLNNTGLVRFVNGTLERIRRDGTWNTLYRKWLTVLGPAPAPPTPRYLD

SEQ ID NO: 26588 - protein, 413 aa, Mycobacterium avium subsp. paratuberculosis K-10
MVGDARPLRVLVVGAGVAGISVARGLLRDGHDVTVFESRPRLAAAGGAVTVWSNGETVLRQLGVEMDGAGRQLSSVRAVTSTGRPLATLDVTAMARRLGAPVRMVPRRVLLERLLDGFPPGRIHCDRRAVALATSRDGVSVEFTDGTVAEGDVLIGADGLHSMVREWVGARHAKATGWCSWQGLVSLPEIAESDAALMMIGGGGNLGLWPAGGAEVQWWFDLPWSAGFVRPQHPIETIRSHFAGWSEPVDRVLAILTDEDLAASPFPHFRHPIPRPGQGRVTLLGDAAHTMPPTLAQGTNQALLDTMVLCQALADFGRGTPGGQADVANALRWYEKTRRRRVRAVSWVASLPVSHGEAVLRPAALVSDRLQAAALTMFLRWTSHRRMSDHINRSLGEAINRSLGEAPKIPSRR

SEQ ID NO: 26589 - protein, 295 aa, Mycobacterium avium subsp. paratuberculosis K-10
MTERVVVAFLGLGNMGAPMAANLVAAQHAVRGFDPVPAALSAATASGVTGFDTATDAVTGADVVITMLPNGEVVKRCYAEILPAARPGALFIDSSTISVADAREVHAQAQSHGVAQLDAPVSGGVKGAVAGTLAFMVGGEPEALERARPVLEPMAGKIIHCGAAGAGQAAKVCNNMVLAVQQIAIGEAFILAEKLGLSAQSLFDVITGATGNCWAVHTNCPVPGPVPTSPANNDFKPGFAASLMNKDLGLAMDAVTSTGAAAPLGRHAAEIYAKFAASHGDKDFSAVIEMLRGAC

SEQ ID NO: 26590 - protein, 353 aa, Mycobacterium avium subsp. paratuberculosis K-10
MDLLFDFFSLDFVYYPVSWIMWVWYKLFAAMLGPSNFFAWALSVMFLVFTLRALLYKPFVRQIRTTRQMQELQPQIKALQKKYGKDRQRMALEMQKLQREHGFNPILGCLPMLAQIPVFLGLYHVLRSFNRTTGGFGQPHLSVVQNRLTGNYVFTPTDVGHFLDANLFGAPIGAFMTQRTGLDAFTYFSRPAVIAVGLPVMILAGVATYFNSRASVARQSPEAAANPQTAMMNKLALYVFPLGVVVGGPFLPLAIILYWFANNIWTFGQQHYVFGMIEKEDEAKKQEAIQRRAANAPAPGAKPKRNLKAGAGNGVDADAAQPDAGATEGQAGGGSDAPSRTPRPGARPKKRKR

SEQ ID NO: 26591 - protein, 303 aa, Oryza sativa Japonica Group
MLKSKVICCKLYISESQNAKVVDAITRIGQKDPEVVLLSKFEDDHYNRVRYTLASYIINENSTGEVKFSPMRRVLLEMIEKAFSTINLETHTGTHPRIGVIDDMSFHPLNQATMEDAAQLAKTVASDIGNFLQVPVFLYGAAHPTGKPVTAVRRELGYFQPNYMGIQWMGQVLPDILPVKPDEGPDHVSRERGAIMIGAAPLPLNYNVPVLSKDIPTIRRITRRVTGRGGGLPTVQALALSHGDDCTEIACFLDPDHVSADQVQQQVEQIAAEQGLEVEKGYFTDFSKDAMLEKYFKIVLSVD

SEQ ID NO: 26592 - protein, 1482 aa, Spinacia oleracea
SDNDSGDGSGVMTAIPWDLFNDWGKDQGIGPFDRSHTGVGMVFLPKDDLLAEEAKKVVLDTFAQEGIEVIGWRSVPTNVSVVGRNAKETMPNIQQVFVRIIKEDSTDDIERELYICRKLIERAASSHTWASELYFCSLSNQTIIYKGMLRSEVLGMFYYDLQNERYTSPFAIYHRRYSTNTSPRWPLAQPMRFLGHNGEINTIQGNLNWMRSREPSIQSPVWRGRENEIRPYGNPKASDSANLDSAAELLIRSGRTPEEALMILVPEAYKNHPTLMIKYPEAVDFYDYYKGQMETWDGPALLLFSDGKTVGACLDRNGLAPARYWRTVDNVVYVASEVGVLPMDESKVTMKGRLGPGMMISVDLSSGQVYENTEVKKRVASSNPYGKWVKENLRSLKAVNFLSRALLENDTILRNQQAFGYSSEDVQMVIESMASQGKEPTFCMGDDIPLAVMSQKPHMLYDYFKQRFAQVTNPAIDPLREGLVMSLEVNIGKRGNILEVGPENASQVILPSPVLNEGELEALVNDPLLKAQMLPIFFDIRKGVEGTLEKRLNRLCEAADEAVRNGSQMLVLSDRSEELEPTRPAIPILLAVGAVHQHLIQNGLRMYTSIVVDTAQCFSTHQFACLIGYGASAICPYLALETCRQWRLSNKTVNLMRTGKIPTVTIEQAQNNFCKAVKSGLLKILSKMGISLLSSYCGAQIFEIYGLGKDVVDIAFQGSVSKMGGLTLDELARETLSFWVKAFSEDTAKRLENFGFIQFRPGGEYHVNNPEMSKLLHKAVRNKSESAYAVYQQHLANRPVSVLRDLLEFKSDRAPISVGKVEPATSIVERFCTGGMSLGAISRETHEAIAIAMNRLGGKSNSGEGGEDPIRWRPLTDVVDGYSSTLPHLKGLQNGDTATSAIKQVASGRFGVTPTFLVNADQIEIKIAQGAKPGEGGQLPGKKVSAYIARLRNSKPGVPLISPPPHHDIYSIEDLAQLIYDLHQINPKAKVSVKLVAEAGIGTVASGVAKGNADIIQVSGHDGGTGASPISSIKHAGGPWELGLSETHQTLISNGLRERVILRVDGGLKCGVDVMMAAAMGADEYGFGSLAMIATGCVMARICHTNNCPVGVASQREELRARFPGVPGDLVNFFLYVAEEVRGILAQLGFEKLDDIIGRTDILKPRDISLMKTQHLDLSYILASAGLPTMSSTAIRKQEVHTNGPVLDDQILSDPEIIDAIENEKIVNKTVKIFNVDRAVCGRIAGVIAKKYGDTGFAGQLNLTFEGSAGQSFAVFLTPGMNIRLVGESNDYVGKGMAGGELIVTPAENPGFRPEDATIVGNTCLYGATGGQIFVRGKAGERFAVRNSLAEAVVEGTGDHCCEYMTGGCVVILGKVGRNVAAGMTGGLAYILDEDDTLIPKVNKEIVKIQRVTAPVGQMQLKNLIEAHVEKTGSSKGASILKDWDKYLPLFWQLVPPSEEDTPEASAMFEQMTSEGASLQSA

SEQ ID NO: 26593 - protein, 272 aa, Hordeum vulgare subsp. vulgare
MAMARTTALLLVAAALLAASSSAWEVNIQMPASAAVDDAVAPLIHALRPLLGSGKQAGVACDSWRLGVEAYNVRDWKTVPANCEGYVGHYMLGNHFRRDCKVVIDQAIAYVDGLKLAGNGKDVWVFDIDETTLSNLPYYATHGFGARPYNATSFDAYVMEGSAPVLPETKRLYYKLLKVGIKPVFITGRTEDKRAVTVGNLRSQGFSGWMSLTLKQHGFKGSAISYKSAERKKLEDAGYVIVGNIGDQWSDILGAPEGARTFSRPDPMYYIA

SEQ ID NO: 26594 - protein, 325 aa, Mycobacterium leprae
MTRQFKIQRACSVLATAMMLAACGHAELLTVASMPTLPPPTPVGMEQVPPELLLPQDNTEEDCDPTASLRPFPTKAEADAAVAEIRARGRLIVGLEIGSNLFSFRDPITGEITGFDIDIAGEVARDIFGTPSHMEYRILSTAARITALQKSEVDIIVKTMTITCKRRKLVNFSTVYLDAKQRILAPRDSPITKPSDLSNKRVCMTRGTTSLHQVSEVVPPPIIVSAENWADCLVAMQQREIDAISTDDAILAGLVEEDPYLHIVGPNMATQPYGIGINLNNTTLVRFVNGTLERIRRDGTWITLYRKWLTVLGPAPAPPTPRYVD

SEQ ID NO: 26595 - protein, 1049 aa, Streptomyces coelicolor A3(2)
MFIQLLQAACLPGAHGDPPPVLVTLGVRADFYDRCLRYPELADALQHRHMVLGPLTTAELREAVTAPARAVGMELEPGLAELIIREVSTDGPRGGCDSHAFRAVGEHDAGVLPLLSHALLATWQRRKAGRLTLAGYRAAGGIQGAVAATAERAWSGLDPAARTAARLLLLRLIRLSEDTQATRRRSTRRRLAEEARDPDKTEESLEALVRARLVTLDADTVEITHEALLHAWPRLRDWIDEDRAGNLLRQRLEEDGLAWEESDRDSALLYRGSRLAQADGWAKSADDTFLTRSAVEFLAAAVRLRRRTVMISRAAVSALVVLALLAVGSAVLAWQQRNDAVFEQVVAEADRVQDTDPSLSAQLDLAAHRLRPDDEDVRNRLISIVNAPLATPLLGHTGAVYLTSFSPDGRILATASYDRTVRLWDVSDPGRPQQLGKPLTGHTSWVSTAVFSPDGRTLASASDDGTIRLWDVTDPGRPRPLGAPLDGHGGTVYLLAFSPDGRTLASAHDDHAVRLWNVADRRAPEALDTLTGSTGAVRSVAFSPDGDTLASGGDDDKVRLWDVSDPRRPEPAGAPLAGHSGLVHSVAFSPDGHTLASGSADDTVQLWDVTDPAGAKPVGAPLTGHSGPVWAVAFSPDGAMLAVSSADSTASLWNVSDPAYPSQVGVPLAGGSGEMYALGFSPDGHTLATGSGDSKVRLWSLPTSDMIGRIGAFRPDGHVLATAARDGRVRLWDVTDPGRPVSLSAPFEPGDGDIRSLVFSPDGGTLAVLVGGRALQLWDVTDPAGPTAHGPPVALSTRYAGPDTLAFSPDGRTLATAHDDRTIQLWNADDPSRPRRLGKPLAGHSGYVNTLAFSPDGRTLASGGADDAVRLWDVTDPAHATRLGAARTGHLGPVNVLAYSPDGHTLASGSDDGTVRLWDVTEPGEGSGGGTTLAGHTDSVVSLTFSQDGDTLASGANDNTVRLWSVTDPAEAAPIGRAMSPNAKTGNFLSFSPVSHMLGVSSGTDTVRLWSLGVDDAIDRICSATRGVLTEEKWHEYLPRLDYEPPCHQ

SEQ ID NO: 26596 - protein, 651 aa, Thellungiella halophila
MSGKGEGPAIGIDLGTTYSCVGVWQHDRVEIIANDQGNRTTPSYVAFTDSERLIGDAAKNQVAMNPINTVFDAKRLIGRRFSDSSVQSDMKLWPFKIIPGPADKPMIIVNYKGEEKQFAAEEISSMVLIKMREIAEAYLGVSIKNAVVTVPAYFNDSQRQATKDAGVIAGLNVMRIINEPTAAAIAYGLDKKATSVGEKNVLIFDLGGGTFDVSLLTIEEGIFEVKATAGDTHLGGEDFDNRMVNHFVQEFKRKSKKDITGNPRALRRLRTACERAKRTLSSTAQTTIEIDSLYEGIDFYSTITRARFEELNMDLFRKCMEPVEKCLRDAKMDKSTVHDVVLVGGSTRIPKVQQLLQDFFNGKELCKSINPDEAVAYGAAVQGAILSGEGNEKVQDLLLLDVTPLSLGLETAGGVMTTLIPRNTTIPSQKEQVFLTYSDDQPGVLIQVYEERGQEPRTTTLLGKFELSGIPPAPRGVPQITVCFDIDANGILNVSAEDKTTGQKNKITITNDKGRLSKDEIEKMVQEAEKYKSEDEEHKKKVEAKNALENYAYNMRNTIQDEKIGEKLPAANKKKIEDSIEQAIQWLEGNQLAEADEFEAKMKELESICNPIIAKIVQGAGGEAGGPGAAGMDDDAPPFSGGAGPKIEEVD

SEQ ID NO: 26597 - protein, 315 aa, Nanoarchaeum equitans Kin4-M
MTCRIRYFQPGFFAIPVGIGGLSIAYLRLAELFPYLKSIGLGLAWLSFISLIVIAILYLAKIVFFKQEFLKDINNPIKLSMLPLFSIALLIDSISFGILKCNFALPLAIAGTMIHLLFTYFNLRTWITKDLHLSTITPTWYIPIVGNILVPITPINQILGIFNWFFFSIGIIFWIILTTILFYRKFFHEPLPEALLPSLFILLAPPSVGFISYIKITHSLDSIANILYFTALAFLLLLVTLIDRFVKIRFKLTWWAYIFPIDALTIATILYYHLTKMPLFIDLAIAIESLATILLTIVGIKTLIAIKKGEICKEE

SEQ ID NO: 26598 - protein, 369 aa, Nanoarchaeum equitans Kin4-M
MDEKEIEEILEENKRLKSMVNYLQKELEKFRSPPLVVAEVIKPYGERAIVRLPTGMELLVEKLSKIEIEPGDTVFLNQSNMVIVGKAEKRKKFNIDAFVITEKPNVDWSQIGGLKEQIEEIREAIELPLTKPEIFEKIGIEPPKGVLLYGPPGTGKTLIGKALAKSANATFIYIVGSELVQKYIGEGAKLVKELFDYAREHAPAIVFIDEIDAIAARRIETGTSGEREVQRTFMQLLAEIDGFKPLDKVKVIGATNRLDILDPAILRPGRFDRIIHIPLPDKQGRIEIFKIHTRKMRTKDIDYSLLAELTEGFSGAEIKQVCIEAGYLAIRNKRDYVILEDFIKAIDKVKKMRKKEEYQRFLKGLSYFG

SEQ ID NO: 26599 - protein, 562 aa, Nanoarchaeum equitans Kin4-M
MYKEIIAYLKLKYGKVKPQSVIGKIIAKNPELKAKIKELIPIIEQEIKEVEQMDIEQIKELAKAYEQTIEKKEKDIEIPVKDKVITRFAPNPSGLLHIGHARAIVLNHYIAKKYNGQFILRIEDTDPDVKKPMIEAYELIPKDVEWLIQEKPDKIVVQSDRLDIYYKYIEELIKQGKAYVCLCKAEEFREYRNKGLPCPHRNQSIEENLELWSKMLKGEFKKGEAVVRLKTDLTHKDPGVRDFPIARIVENPHPRIGYKPVFPLYNFAVVIDDHLLGITHVIRMKEHTNNAIKQSFIYKAFGWEEPIYLEYGALLTDMPTHKSEIRKLIEQKQIEGWDDIRLPTLIALRRRGILPEAIYEYIVKDVGLNKADIKVDWNKIYYYHKIRIDKQTPRYFMIRDPIAIVIENYDDIIDKFEIKNGIPYKKISKHPDVDLGYRELPIKEVLYIDKRDAERLKQKPLRLFELFNIKFVGEIEIEYGDEYSKTKEKAYAVRVISFDVQEAIKNKYPIVQWLPEYEETTLFELDGYKKAYVEPNIKENYVHFIREGYYKRENDKWIFSVK

SEQ ID NO: 26600 - protein, 826 aa, Nanoarchaeum equitans Kin4-M
MLCMSEEGIKLKVAEAYQEDVYLGKVRVDYDVLDRLGLSPGDIIEIEGTRKTYAIADVLYPEDQGLGIIRMDGVIRKNAGVGVGEYVIVRKPPKPQIAKKVVLAPVKKEEQIIIDEYYLRNLLNGFVVTKGDYVVVRFDNLGFFIDFLPLKEMWFKVVSTNPPKGPVIIGRDTIIEIKPGGVQEIPEVTYEDIGGMKDVIQKVRELVELPLRHPEIFERLGIEPPKGVLLYGPPGTGKTLLAKAVANESGAYFISINGPEIVSKYVGESEAKLREIFEEAQKNAPAIIFIDEIDAIAPKRDEAVGEVERRLVAQLLTLMDGLKSRGKVIVIAATNRPNALDPALRRPGRFDREIEVPVPNEEARYEILKVHTRRVPLGKRVVEKVDGKTVEKYVPLTKEEKEQLLRKLAAMTHGFVGADLAALVKEAAMNAIRRVIPDILALKEEKLPKELLEKLMVTEEDFKEALKMVTPSAMREFYIEIPKVKWEDIGGLEEVKQELRETVEWPLKYRIEELGIKPPKGVLLYGPPGTGKTLLAKAAASESGANFIAVKGPEILNKWVGESERAIREIFRKAKQAAPAIIFIDEIDAIAPARGSDVNRVTDRIVNQLLTEMDGITDRGDVIVIGATNRPDILDPALLRPGRFDRVIYVPPPDKKARVEIFKIHARKIPKDPELKERFEEFKKNLEKLKEIKPDIDIEKYKNLSLEEALELYKKSKEFRDIVDTVLFYIPLAEKTEGYTGADIEAVVREAVMLALRELFEQAKKEKWDDKKINEMIGKLKVKMKHFEKALEKVGPSVDKETIRAYEEFAKNFRKRINKKNNPYLG

SEQ ID NO: 26601 - protein, 630 aa, Arabidopsis thaliana
MVLQKRPDYGFNGYEVPHTPRAARSPRKSAFKKKSENHQISSFDLLAAVAGKLLLEGGNSSSSSNNTSGNNEDQCAVKKEPLNGGDIMVEEETTNSDHDNNNAERSFFVSEILQKSHEMQSFNRSPSPLKEFHFGSSSGITSDSSEKFETQELAYDESKINNGDCYRSESNDKKSMLGGLNFEAKLSRNVVGKDEKHIGSGFRKPIPQNPSTCSDDVDLHGKENDDGENFSACYRTKSFRSTLRIGDRRIRKVWASKYCKVPPKLKDTTVTNSDLDLKSDYYSKKHCLKSLRSERNYPIKKRRYFDGYTASQSEETNKNEGQSGSPRKASAFLSSIACQKQPAAFQSPRDSNNVKLGIKSFRVPELFIEIPETATVGSLKRTVLEAVTSILGGGLRIGVLVHGKKVRDDSKMLLQTGLSLDTLSDTLGFCLEPNPPQSTKPLSPEDSDFARPCNVPHTLTRCLPSPGKHAKPSNSVESDLDSKPSAPNRGKTIYSRALIPVSPLHAQALTVVPPRKTKRSEVAQRRIRRPFSVAEVEALVQAVERLGTGRWRDVKLRAFDNAKHRTYVDLKDKWKTLVHTARISPQQRRGEPVPQELLDRVLTAHAYWSQQQGKHQLLEGPQQLETSLGQ

SEQ ID NO: 26602 - protein, 248 aa, Arabidopsis thaliana
MEGSSKGLRKGAWTTEEDSLLRQCINKYGEGKWHQVPVRAGLNRCRKSCRLRWLNYLKPSIKRGKLSSDEVDLLLRLHRLLGNRWSLIAGRLPGRTANDVKNYWNTHLSKKHEPCCKIKMKKRDITPIPTTPALKNNVYKPRPRSFTVNNDCNHLNAPPKVDVNPPCLGLNINNVCDNSIIYNKDKKKDQLVNNLIDGDNMWLEKFLEESQEVDILVPEATTTEKGDTLAFDVDQLWSLFDGETVELD

SEQ ID NO: 26603 - protein, 323 aa, Arabidopsis thaliana
MDEKGRSLKNNNMEDEMDLKRGPWTAEEDFKLMNYIATNGEGRWNSLSRCAGLQRTGKSCRLRWLNYLRPDVRRGNITLEEQLLILELHSRWGNRWSKIAQYLPGRTDNEIKNYWRTRVQKHAKQLKCDVNSQQFKDTMKYLWMPRLVERIQSASASSAAAATTTTTTTTGSAGTSSCITTSNNQFMNYDYNNNNMGQQFGVMSNNDYITPENFSVAVSPASDLTEYYSAPNPNPEYYSGQMGNSYYPDQNLVSSQLLPDNYFDYSGLLDEDLTAMQEQSNLSWFENINGAVSSSDSLWNIGETDEEFWFLQQQQQFNNNGSF

SEQ ID NO: 26604 - protein, 324 aa, Arabidopsis thaliana
MGRSPCCEKKNGLKKGPWTPEEDQKLIDYINIHGYGNWRTLPKNAGLQRCGKSCRLRWTNYLRPDIKRGRFSFEEEETIIQLHSIMGNKWSAIAARLPGRTDNEIKNYWNTHIRKRLLKMGIDPVTHTPRLDLLDISSILSSSIYNSSHHHHHHHQQHMNMSRLMMSDGNHQPLVNPEILKLATSLFSNQNHPNNTHENNTVNQTEVNQYQTGYNMPGNEELQSWFPIMDQFTNFQDLMPMKTTVQNSLSYDDDCSKSNFVLEPYYSDFASVFTTPSSSPTPLNSSSSTYINSSTCSTEDEKESYYSDNITNYSFDVNGFLQFQ

SEQ ID NO: 26605 - protein, 261 aa, Arabidopsis thaliana
MVEEVWRKGPWTAEEDRLLIEYVRVHGEGRWNSVSKLAGLKRNGKSCRLRWVNYLRPDLKRGQITPHEESIILELHAKWGNRWSTIARSLPGRTDNEIKNYWRTHFKKKAKPTTNNAEKIKSRLLKRQHFKEQREIELQQEQQLFQFDQLGMKKIISLLEENHSSSSSDGGGDVFYYPDQITHSSKPFGYNSNSLEEQLQGRFSPVNIPDANTMNEDNAIWDGFWNMDVVNGHGGNLGVVAATAACGPRKPYFHNLVIPFC

SEQ ID NO: 26606 - protein, 223 aa, Escherichia coli
MLELQEASRLPERLGDDFVRAANIILHCEGKVVVSGIGKSGHIGKKIAATLASTGTPAFFVHPAEALHGDLGMIESRDVMLFISYSGGAKELDLIIPRLEDKSIALLAMTGKPTSPLGLAAKAVLDISVEREACPMHLAPTSSTVNTLMMGDALAMAVMQARGFNEEDFARSHPAGALGARLLNKVHHLMRRDDAIPQVAVNRQRDGCDAGTQPHRSGAGGGM

SEQ ID NO: 26607 - protein, 600 aa, Paracoccidioides brasiliensis
SARASMVLTEVRETAESYLGGTVNNAVVTVPAYFNGSQRQATKDAGLIAGLNVLRIINEPTAAAIAYGLDKKAEGERNVLIFDLGGGTFDVSLLTIEEGIFEVKSTAGDTHLGGEDFDNRLVNHFVNEFKRKHKKDLSSNARALRRLRTACERAKRTLSSAAQTSIEIDSLYEGIDFYTSITRARFEELCQDLFRSTMDPVERVLRDAKIDKSSVHEIVLVGGSTRIPRIQKLVSDFFNGKEPNKSINPDEAVAYGAAVQAAILSGDSTSKSTNEILLLDVAPLSVGIETAGGVMTPLIKRNTTIPTKKSETFSTFADNQPGVLIQVFEGERARTKENNLLLGKFELTGIPPAPGVPQIEVTFDVDANGIMNVSALEKGIGKTNKIVITNDKGRLSKEEIERMLAEAEKYKAEDEAEASRISAKNGLESYAYSLRNTISDSKVDEKLDASDKEKLKTEIDKTVSWLDENQTATKEEFEAQQKELESVANPIMMKFYGAGGEGGAPGAGFPGAGGPGGFPGAGAKRCSTSGGDDGPYRRGGRLNGFFLDSLGFFPFSPMAFKNGLKRGFFLSFLFFSFFFLLLPTISFCCDCGGLSMGSFL

SEQ ID NO: 26608 - protein, 314 aa, Dunaliella tertiolecta
MDAYEKLEKIGEGTYGKVYKARDINTGKLVALKKTRLEMEEEGVPSTTLREVSLLLMLSESNHVVKLIAVEHVEENGKPCLYLVFEYLSTDMKKWMDRNGRGPAHPLPKPAIKSLTYQLIKGLAHCHKHGVMHRDLKPQNLLVDDSIMCCKIADLGLGRAFSIPIKSYTHEIVTLWYRAPEVLLGSTHYSTPVDMWSVGCIFAELVRKTPLFPGDCELQQLLHIFKLLGTPNEEVWPGVSKLRDWHEFPQWHPQDLSRIFPTLEPEGVDLLKRMIEYDPAKRISAKEALKHPYFDDPMIREVDQQENPEVRARD

SEQ ID NO: 26609 - protein, 564 aa, Kluyveromyces marxianus
MSEITLGRYLFERLKQVEVQTIFGLPGDFNLSLLDKIYEVPGMRWAGNANELNAAYAADGYARLKGMACVITTFGVGELSALNGIAGSYAEHVGVLHVVGVPSISSQAKQLLLHHTLGNGDFTVFHRMSSNISETTAMITDINSAPSEIDRCIRTTYISQRPVYLGLPANLVDLKVPASLLETPIDLSLKPNDPEAENEVLETVLELIKDAKNPVILADACCSRHNVKAETKKLIDITQFPAFVTPMGKGSIDEQHPRFGGVYVGTLSSPEVKEAVESADLVLSVGALLSDFNTGSFSYSYKTKNIVEFHSDYIKVRNATFPGVQMKFVLQKLLTKVKDAAKGYKPVPVPHAPRDNKPVADSTPLKQEWVWTQVGKFLQEGDVVLTETGTSAFGINQTHFPNDTYGISQVLWGSIGFTGGATLGAAFAAEEIDPKKRVILFIGDGSLQLTVQEISTMIRWGLKPYLFVLNNDGYTIERLIHGETAQYNCIQSWKHLDLLPTFGAKDYEAVRVATTGEWNKLTTDKKFQENSKIRLIEVMLPVMDAPSNLVKQAQLTASINAKQE

SEQ ID NO: 26610 - protein, 370 aa, Geobacillus stearothermophilus
MAAERVFISPAKYVQGKNVITKIANYLEGIGNKTVVIADEIVWKIAGHTIVNELKKGNIAAEEVVFSGEASRNEVERIANIARKAEAAIVIGVGGGKTLDTAKAVADELDAYIVIVPTAASTDAPTSALSVIYSDDGVFESYRFYKKNPDLVLVDTKIIANAPPRLLASGIADALATWVEARSVIKSGGKTMAGGIPTIAAEAIAEKCEQTLFKYGKLAYESVKAKVVTPALEAVVEANTLLSGLGFESGGLAAAHAIHNGFTALEGEIHHLTHGEKVAFGTLVQLALEEHSQQEIERYIELYLSLDLPVTLEDIKLKDASREDILKVAKAATAEGETIHNAFNVTADDVADAIFAADQYAKAYKEKHRK

SEQ ID NO: 26611 - protein, 356 aa, Vigna aconitifolia
MSLLSDLINLNLSDTTEKIIAEYIWIGGSGLDLRSKARTLPGPVSDPSKLPKWNYDGSSTGQAPGEDSEVIIYPQAIFKDPFRRGNNILVMCDAYTPAGEPIPTNKRHNAAKIFSHPDVVAEEPWYGIEQEYTLLQKDVNWPLGWPVGGFPGPQGPYYCGAGADKAFGRDIVDAHYKACLYAGINISGINGEVMPGQWEFQVGPAVGISAGDELWVARYILERITEIAGVVLSFDPKPIKGDWNGAGAHTNYSTKTMRNDGGYEVIKSAIEKLGKRHKEHIAAYGEGNERRLTGRHETADINTFLWGVANRGASIRVGRDTEKAGKGYFEDRRPASNMDPYVVTSMIADTTILWKP

SEQ ID NO: 26612 - protein, 370 aa, Saccharomyces cerevisiae
MAEASIEKTQILQKYLELDQRGRIIAEYVWIDGTGNLRSKGRTLKKRITSIDQLPEWNFDGSSTNQAPGHDSDIYLKPVAYYPDPFRRGDNIVVLAACYNNDGTPNKFNHRHEAAKLFAAHKDEEIWFGLEQEYTLFDMYDDVYGWPKGGYPAPQGPYYCGVGAGKVYARDMIEAHYRACLYAGLEISGINAEVMPSQWEFQVGPCTGIDMGDQLWMARYFLHRVAEEFGIKISFHPKPLKGDWNGAGCHTNVSTKEMRQPGGMKYIEQAIEKLSKRHAEHIKLYGSDNDMRLTGRHETASMTAFSSGVANRGSSIRIPRSVAKEGYGYFEDRRPASNIDPYLVTGIMCETVCGAIDNADMTKEFERESS

SEQ ID NO: 26613 - protein, 2194 aa, Medicago sativa
MSNSLSLTFTALNNPQINAISNPNARLRPLARVTRCSATCVERKRWLGTKLRSGGGLERIQLWESGGLGRLPKLRVAVKSSFSAVPDKPMGLYDPAFDKDSCGVGFVAELNGQSSRKTVTDALEMLVRMTHRGACGCEANTGDGAGILVALPHGFYQEVVDFQLPPQGNYAVGMFFLPKSDSRRKESKNIFTKVAESLGHKVLGWRSVPTDNTGLGKSAQLTEPVIEQVFLTPSSDSKVDLEKQMYILRKLSMVSITSALNLQSDGITDFYICSLSSRTVIYKGQLTPAQLGEYYYADLGNERFTSYMALIHSRFSTNTFPSWDRAQPFRVLGHNGEINTLRGNVNWIKAREGLLKCKELGLSENDLKKFLPIVDANSSDSGCFDGVLEFLLHSGKSLPEAVMMMIPEAWQNDKNMDPQRKAFYEYYSALMEPWDGPALISFTDGHYLGATLDRNGLRPGRFYVTHSGRVIMASEVGVVDIPPEDVCRKGRLNPGMMLLVDFEKQIVVNDDALKEQYSLARPYGDWLEKQKIELKDIIDSVHESDIVPPTISGVPPLSNDDVDMENMGIQGLLAPLKAFGYSVESLEILLLPMAKDGVEALGSMGNDTPLAVMSNREKLTFEYFKQMFAQVTNPPIDPIREKIVTSMRCMVGPEGDLTETTEEQCHRLSLKGPLLSTKEMEAIKKMNYRGWRSKVIDITYSKERGTKGLEEALDRICTEAHNAISEGYTTLVLSDRAFSKKHVAVSSLLAVGAVHQHLVKTLERTRVALMVESAEPREVHHFCTLVGFGADAICPYLAIEAIWRLQVDGKIPPKASGDFNSKDELVKKYFKASTYGMMKVLAKMGISTLASYKGAQIFEALGLSSEVIEKCFAGTPSRVEGATFEMLAQDALHLHELAFPSRIFSPGSAEAVALPNPGDYHWRKGGEVHLNDPLAIAKLQEAARTNSVDAYKQYSKTIHELNKACNLRGLLKFKDAASKVPISEVEPASEIVKRFCTGAMSYGSISLEAHTALATAMNTIGGKSNTGEGGEQPSRMEPLADGSRNPKRSAIKQVASGRFGVSSYYLTNADELQIKMAQGAKPGEGGELPGHKVIGDIAITRNSTAGVGLISPPPHHDIYSIEDLAQLIHDLKNANPAARISVKLVSEAGVGVIASGVVKGHAEHVLISGHDGGTGASRWTGIKSAGLPWELGLAETHQTLVANDLRGRTTLQTDGQLKTGRDVAIAALLGAEEYGFSTAPLITLGCIMMRKCHKNTCPVGIATQDPVLREKFAGEPEHVINFFFMVAEEMREIMSQLGFRTVNEMVGRSDMLEVDKEVVKGNAKLENIDLSLLLRPAAELRPEAAQYCVQKQDHGLDMALDNKLISLSNAALEKGLPVYIETPICNTNRAVGTMLSHEVTKRYNLAGLPADTIHIQFTGSAGQSFGAFLCPGITLELEGDSNDYIGKGLSGGKVVVYPPKGSNFDPKDNILIGNVALYGATRGEAYFNGMAAERFCVRNSGALAVVEGVGDHGCEYMTGGTVVVLGKTGRNFAAGMSGGIAYVLDVDGTFQSRCNLELVDLDKVEEEEDIITLRMLIQQHQRHTNSLLAKEVLVDFENLLPKFVKVFPREYKRVLASMKSDAASKDAVERAAEDVDEQDDEAQAVEKDAFEELKKLATASLNEKPSEAPKRPSQVTDAVKHRGFVAYEREGVQYRDPNVRLNDWNEVMMETKPGPLLKTQSARCMDCGTPFCHQENSGCPLGNKIPEFNELVYQNRWQEALERLLETNNFPEFTGRVCPAPCEGSCVLGIIENPVSIKNIECAIIDKAFEEGWMIPRPPVKRTGKRVAIVGSGPSGLAAADQLNKMGHIVTVFERADRIGGLMMYGVPNMKTDKVDIVQRRVNLMAEEGINFVVNANIGLDPLYSLERLREENDAIVLAVGATKPRDLPVPGRELSGVHFAMEFLHANTKSLLDSNLQDGNYISAKGKKVVVIGGGDTGTDCIGTSIRHGCTAVVNLELLPQPPPTRAPGNPWPQWPRIFRVDYGHQEAETKFGKDPRTYEVLTKRFVGDENGVVKGLEVVRVCWEKDETGKFQFKEIEGSEEIIEADLVLLAMGFLGPEATIAEKLGVERDNRSNFKADYGRFSTSVDGVFAAGDCRRGQSLVVWAISEGRQAAAQVDSYLTNEDHGIDGNQDEFVKRQQDLNKKHSKHTVMT

SEQ ID NO: 26614 - protein, 566 aa, Escherichia coli
MEMLSGAEMVVRSLIDQGVKQVFGYPGGAVLDIYDALHTVGGIDHVLVRHEQAAVHMADGLARATGEVGVVLVTSGPGATNAITGIATAYMDSIPLVVLSGQVATSLIGYDAFQECDMVGISRPVVKHSFLVKQTEDIPQVLKKAFWLAASGRPGPVVVDLPKDILNPANKLPYVWPESVSMRSYNPTTTGHKGQIKRALQSVVAVKKPVVYVGGGAITAGCHQQLKETVEALNLPVVCSLMGLGAFPATHRQVLGMLGMHGTYEANMTMHNADVIFAVGVRFDDRTTNNLAKYCPNATVLHIDIDPTSISKTVTADIPIVGDARQVLEQMLELLSQESAHQPLDEIRDWWQQIEQWRARQCLKYDTHSEKIKPQAVIETLWRLTKGDAYVTSDVGQHQMFAALYYPFDKPRRWINSGGLGSMGFGLPAALGVKMALPEETVVCVTGDGSIQMNIQELSTALQYELPVLVVNLNNRYLGMVKQWQDMIYSGRHSQSYMQSLPDFVRRGAYGHVGIQISHPHGWKANLARRWNRCAIIAWCLLMLPSMAASTSTRCRFAGAEWMKCG

SEQ ID NO: 26615 - protein, 403 aa, Candida tropicalis
MTLPPVYIVSTARTPIGSFQGSLSSLTYSDLGAHAVKAALAKVPQIKPQDVDEIVFGGVLQANVGQAPARQVALKAGLPDSIIASTINKVCASGMKAVIIGAQNIICGTSDIVVVGGAESMSNTPYYLPSARSGARYGDAVMVDGVQKDGLLDVYEEKLMGVAAEKCAKDHGFSREDQDNFAINSYKKAGKALSEGKFKSEIAPVTIKGFRGKPDTVIENDEEIGKFNEDRLKSARTVFQKENGTVTAPNASKLNDGGAALVLVSEAKLKQLGLKPLAKISGWGEAARTPFDFTIAPALAVPKAVKHAGLTVDRVDFFELNEAFSVVGLANAELVKIPLEKLNVYGGAVAMGHPLGCSGARIIVTLLSVLTQEGGRFGAAGVCNGGGGASAIVIEKIDSDAKL

SEQ ID NO: 26616 - protein, 161 aa, Funaria hygrometrica
MDFVVFDTDPFLTTLHQLVHEPGSDLERKIKRQRRNHHDEPRHVTIATPVDVKEIKDAYLFVADVPGLQKTDIEVQVENENVLTMRGKRKLDEKVNEKEEDTKFIRMERSPVKLLRKFTLPSDANADAITANCVDGVLTVTVPKIPPPEPAKSKTVQIAVD

SEQ ID NO: 26617 - protein, 366 aa, Mycobacterium leprae
MATLAESPEPKSGASRAGVLGEEAGYHKGLKPRQLQMIGIGGAIGTGLFLGAGGRLAKAGPGLFLVYAVCGVFVFLILRALGELVLHRPSSGSFVSYAREFFGEKAAYVVGWLYFLDWAMTAIVDTTAIATYLHRWTIFTALPQWTLALLALAVVLVMNLISVEWFGELEFWAALIKVCALMAFLVVGTIFLGGRYPVDGHNTGLSLWTSHGGLFPTGVAQLIVVSSGVMFAYAAVELVGTAAGETVEPKKIMPRAINSVIARIAIFYVGSVILLALLLPYSAFKASESPFVTFFSKVGFYGAGDLMNIVVLTAALSSLNAGLYATGRVMHSIAINGSGPKFTARMSKNGVPYGGILLAAVICLCG

SEQ ID NO: 26618 - protein, 279 aa, Leuconostoc lactis
MNKKIKKFAIVITLVVGIIGFSFEHKVADAATNQGRTIKQIKKSGKIKIAVFGDLKPYGWVDKNGKRQGYDIELAKKIAKDLGVKVKYVQVNANARVDALNSGKVDLALANFTVTPERKEVISFAKPYMKVSIGVASKKTNLITKVNQLKGKNLIVNKGTTAETYFTKEYTSAKLLKFDSKTQQFAALKDGRADAITDDNSYLFAWVKDHPDYKVGIKQLGEQSYISPGVQKGNKSVLKWTNKEIKKLNKSNFFKKDYKKTLAPYFGDDVKSTDITIGK

SEQ ID NO: 26619 - protein, 296 aa, Rhizobium sp. USDA 1953
  misc_feature (16)..(16): Xaa can be any naturally occurring amino acid
  misc_feature (169)..(169): Xaa can be any naturally occurring amino acid
  unsure (1)..(296): unsure at all Xaa locations
RGKTQIKEFDAFPTLXQLPLWGFDGSSTQQAEGRSSDCVLKPVAVYPDPVRTNGALVMCEVMMPDGKTPHPSNTRATVLDDESAWFGFEQEYFFYKNGRPLGFPEQGYPAPQGPYYTGVGYKNVGDIARQIVEEHLDICLAAGINHEGINAEVAKGQWEFQVFGKGSKXAADEVWLARYLLLRLTEKYGIDVEFHCKPLGDTDWNGSGMHANFSTAYLREVGGKDYFEALMAAFEKNLHDHINVYGPDNHLRLTGKHETAPWDKFRYGVADRGASIRVPHSFVNNGYRGYLEDRRP
